United States Patent Application Publication US 2005/0228172 A9 - sequence listing, part 69

SEQ ID NO: 299999 - DNA, 578 bp, Homo sapiens
aatttccacttctggggaattacagccaagtaaatattacccaggggtggcttatgcaatttttgtgtgtgtgatgcaacagtaaaaatgccaaaacaaaacaacaatggttccagtccttcgactggacaaaaaaatgtttgagatatctgatcacattaatcatccaaaggaatgaaatatggaaatatggtagttatttgaytgaacaaacatttaaaataaaatttaagtcatatttagcaaaatgggccattgaatattggaatgtatgatcaagatttgaagtagagatttatatggtaaattctgccaattcgtcctaaagctttccctttatacccaacctgattggttcattcatcactaagtatagtttccaggattatggttacattagttctataaaaatgcatttgaaaagcaacagagaataattttagatgaaaaaaacaaacataatgcccataaactccaaccacttcctgcctcaaaaatgaaaaagacacaatagcaaatttatacaaaaaccagggctagcactttaagatgtctacattgctgttcttgtttgttat

SEQ ID NO: 300000 - DNA, 578 bp, Homo sapiens
aatttccacttctggggaattacagccaagtaaatattacccaggggtggcttatgcaatttttgtgtgtgtgatgcaacagtaaaaatgccaaaacaaaacaacaatggttccagtccttcgactggacaaaaaaatgtttgagatatctgatcacattaatcatccaaaggaatgaaatatggaaatatggtagttatttgactgaacaaacatttaaaataaaatttaagtcatatttagcaaaatgggccattgaatattggaatgtatgatcaagatttgaagtagagatttatatggtaaattctgccaattygtcctaaagctttccctttatacccaacctgattggttcattcatcactaagtatagtttccaggattatggttacattagttctataaaaatgcatttgaaaagcaacagagaataattttagatgaaaaaaacaaacataatgcccataaactccaaccacttcctgcctcaaaaatgaaaaagacacaatagcaaatttatacaaaaaccagggctagcactttaagatgtctacattgctgttcttgtttgttat

SEQ ID NO: 300001 - DNA, 588 bp, Homo sapiens
tcctctattgttttcttagctatcctcttgtgttktacttttagtgtttgctctagggattataatatgcactcccaacttatcacagtttatcatatattaatattataccacttcatgtatgattaagaacgttataattgtataattccactgataccctcccatcttttaaatattgtattacatttaatatgtacatatatcttaaaccacaaaatacattgctattatttttgctctaaaaacaatgttatcttttagatacatttaaaaatgagaaataaaaatcttatatttacccacatatttactattatttcagctctttattctcaattctcagatgtaaatcctttccatgaacctaaatgacatttttcaaaaatgtttattatagaataaatccagtggtaataaataatcttagtttttatttatttgaaagtttattttgcctccatttttgaaagatatttttattagacacaaaaatcatggttaacagcacttttaaaatgtcatttattgtcttctggctagtacttcttcctgtgcttatttcccccatctggataaacttttaat

SEQ ID NO: 300002 - DNA, 588 bp, Homo sapiens
tcctctattgttttcttagctatcctcttgtgttttacttttagtgtttgctctagggattataatatgcactcccaacttatcacagtttatcatatattaatattataccacttcatgtatgattaagaacgttataattgtataattccactgataccctcccatcttttaaatattgtattacatttaatatgtacatatatcttaaaccacaaaatacattgctattatttttgctctaaaaacaatgttatcttttagatacatttaaaaatgagaaataaaaatcttatatttacccacatatttactattatttcagctctttattctcaattctcagatgtaaatcctttccatgaacctaaatgacatttttcaaaaatgtttattatagaataaatccagtggtaataaataatcttagtttttatttatttgaaagtttattttgcctccatttttgaaagatatttttattagacayaaaaatcatggttaacagcacttttaaaatgtcatttattgtcttctggctagtacttcttcctgtgcttatttcccccatctggataaacttttaat

SEQ ID NO: 300003 - DNA, 579 bp, Homo sapiens
ctcacttttcgggtgtctgcatgcctacttcttcctggttgtgagacaagaacacagacctggatgagataaggagcaaaaaatcttgcatcaagtccacgattctcagctgtcttccctgctccccctacttttctcttttgtgggtcatattgtcctgcctatttgcatatctagtatttttttttaattaaatgctagacagttgaaggcaatattgttgagagtctgacttgtgtgctatttctttaaatagttttgagttttattcagttagttaatttattgatgattctgcttgattctgttgaggcttgtatataaaccaggactagcattcttagatgtaaatcctttctttcaacctaaatgacttttttcaaacatgtttcattcaaaacataatattcaaaaatgttatgttttgttagggagcttttaaaataatctttattctagatataragttgcactacaactaagacaggtccattagagcacatcaaccgaatgatcacagtggtcagcaaaatctctccattctggtggtcagaactccaaggtctcaaactctacata

SEQ ID NO: 300004 - DNA, 542 bp, Homo sapiens
agttttttcttaataaattttaatttagaagawctcacatttttcctaacttctttacacaactggagtggggagatttgttcgtagcttatatagctaccatctttaggattaggcccctttgggaacttctcaggtaccccaaaatcattctgtaagccttgttgtgacatgaaaaattaacatatgcattgtttttgtctgtgcctttcaaaaagctcaattactctaaggtgttcaaatattttgggaaaggactggatttttaaaattattttacaatcaaaagtccaatgtgttctatttaagggaataactgagaagctgtaatttaactcagatttgtgagtgctccaatacaaagcgtcattggattttcaattataatgaacagaataataactaaagatgtaaacagaaacagaaatgactgtactatcaaacacctgcttcataattatttgaacaacaaaatgtttttgagcctaccacttatttataatcctggcatttttttaaacaaattccatctatgtatcaat

SEQ ID NO: 300005 - DNA, 542 bp, Homo sapiens
agttttttcttaataaattttaatttagaagatctcacatttttcctaacttctttacacaactggagtggggagatttgttcgtagcttatatagctaccatctttaggattaggcccctttgggaacttctcaggtaccccaaaatcattctgtaagccttgttgtgacatgaaaaattaacatatgcattgtttttgtctgtgcctttcaaaaagctcaattactctaaggtgttcaaatattttgggaaaggactggatttttaaaattattttacaatcaaaagtccaatgtgttctatttaagggaataactgagaagctgtaatttaactcagatttgtgagtgctccaatacaaagcgtcattggattttcaattataatgaamagaataataactaaagatgtaaacagaaacagaaatgactgtactatcaaacacctgcttcataattatttgaacaacaaaatgtttttgagcctaccacttatttataatcctggcatttttttaaacaaattccatctatgtatcaat

SEQ ID NO: 300006 - DNA, 573 bp, Homo sapiens
aacaaaatgttttaaatcttccctttacaagggcaaatagtatgtggaacctgtgttgaactaatcctttcctcctttttccatttcctaaacagctttacccctggtagccaagctgactatatattatgtacaaatgtgtgatagaggtgatttttaatgggattttcactgctaaggaagcagtgataccccagtttcatagcaccaagtattattctcataatgaactgtcatttcattcatgtcagtcaaagaattactttcttctccctgtacracaaaactctatgttctcataatttaaaaactaaaacattgccaccaacaaaaggtctttgacaactttattgtctgtcataaatcaacctggcaagatcaagtgacaaaatatgaaatctcaaacctatatttctgttaaaatgatagtattcactacacatttaatgcacatatttattttttctaccctgacaacaagcaacacggcctgatgcttgatgggaaaaaagtcacattgcataaataaagcagaaaacaaatttaaacatatgatatttcactttgtgtaaa

SEQ ID NO: 300007 - DNA, 573 bp, Homo sapiens
aacaaaatgttttaaatcttccctttacaagggcaaatagtatgtggaacctgtgttgaactaatcctttcctcctttttccatttcctaaacagctttacccctggtagccaagctgactatatattatgtacaaatgtgtgatagaggtgatttttaatgggattttcactgctaaggaagcagtgataccccagtttcatagcaccaagtattattctcataatgaactgtcatttcattcatgtcagtcaaagaattactttcttctccctgtacaacaaaactctatgttctcataatttaaaaactaaaacattgccaccaacaaaaggtctttgacaactttattgtctgtcataaatcaacctggcaagatcaagtgacaaaatatgaaatctcaaacctatatttctgttaaaatgatagtattcactayacatttaatgcacatatttattttttctaccctgacaacaagcaacacggcctgatgcttgatgggaaaaaagtcacattgcataaataaagcagaaaacaaatttaaacatatgatatttcactttgtgtaaa

SEQ ID NO: 300008 - DNA, 573 bp, Homo sapiens
aacaaaatgttttaaatcttccctttacaagggcaaatagtatgtggaacctgtgttgaactaatcctttcctcctttttccatttcctaaacagctttacccctggtagccaagctgactatatattatgtacaaatgtgtgatagaggtgatttttaatgggattttcactgctaaggaagcagtgataccccagtttcatagcaccaagtattattctcataatgaactgtcatttcattcatgtcagtcaaagaattactttcttctccctgtacaacaaaactctatgttctcataatttaaaaactaaaacattgccaccaacaaaaggtctttgacaactttattgtctgtcataaatcaacctggcaagatcaagtgacaaaatatgaaatctcaaacctatatttctgttaaaatgatagtattcactacacatttaatgcacatatttattttttctaccctgacaacaagcaacacggcctgatgcttgatgggraaaaagtcacattgcataaataaagcagaaaacaaatttaaacatatgatatttcactttgtgtaaa

SEQ ID NO: 300009 - DNA, 644 bp, Homo sapiens
taaggttgagccatatgaaatgtttatgttttaaagtcataatgactgaataccaacatttcaaagaatttatcacaattatcagtataatctcattaacactcatagtattcttattctatagattgaggrcatattttatgaaatagaatttgtaatttctgaggttataaaggatgcataaaggatggataatgatatccaggctgcattcagggtaattcttaaagaagacagacagaggttgcagccatcatcaccccataggaaatgctcaaaacaatagaaggattgaatggatggacttcatgttgctatttatatgaagaagattagggaaaatgtggataagaacaaaaggtctttttatcatactagagcaaattgtcaagtctatatctgtactagcctaaaactttgccattcaccgaaatgaaccgttgcctttttgctcttaagtcttgaattaggtgatcaacaatcgttttatttatttttctcctttaggcttgtaacctttgacaaacaaaatcttgtaattattgtctctcatcaccactaccctgtaagacctctgaagcaggagcctttttgtttgtttgctgttattttcccaacaactaaaatagtgtttaccatgcacc

SEQ ID NO: 300010 - DNA, 644 bp, Homo sapiens
taaggttgagccatatgaaatgtttatgttttaaagtcataatgactgaataccaacatttcaaagaatttatcacaattatcagtataatctcattaacactcatagtattcttattctatagattgaggacatattttatgaaatagaatttgtaatttctgaggttataaaggatgcataaaggatggataatgatatccaggctgcattcagggtaattcttaaagaagacagacagaggttgcagccatcatcaccccataggaaatgctcaaaacaatagaaggattgaatggatggacttcatgttgytatttatatgaagaagattagggaaaatgtggataagaacaaaaggtctttttatcatactagagcaaattgtcaagtctatatctgtactagcctaaaactttgccattcaccgaaatgaaccgttgcctttttgctcttaagtcttgaattaggtgatcaacaatcgttttatttatttttctcctttaggcttgtaacctttgacaaacaaaatcttgtaattattgtctctcatcaccactaccctgtaagacctctgaagcaggagcctttttgtttgtttgctgttattttcccaacaactaaaatagtgtttaccatgcacc

SEQ ID NO: 300011 - DNA, 558 bp, Homo sapiens
ggatatagatcaatagaaattcttaagcactactggtagcaacaaaagttgatataaccactttggagaagaatacagcaaaatctagtcaaggtgaaagtccatataatttgtcacctaacaattccattcctaagtagttttaagatacatgtctgcagttacagatgaataagcattgcttctaatagygaaaaaagtgaaaacagcctgaaagtctacaacagaagaataaagtgggactcttctttcagtggcacattataaagccataaaaagaaattaattatagattcatatattattagtcagtagtctatgctaagaaaaaaagagccctggcaaagaaatatcctgtactacttcattttagaacatttaattttgttgaggaatgtgtgtatatgtatatgtaatattatatattgtatgtactaaaatataaagaaattttttggaatgatgaacatgcatttcaagggtagttgctaattcacaggagaagagagaggaatgaacttggataatggtaaacacacaaatatacatacaaaataa

SEQ ID NO: 300012 - DNA, 558 bp, Homo sapiens
ggatatagatcaatagaaattcttaagcactactggtagcaacaaaagttgatataaccactttggagaagaatacagcaaaatctagtcaaggtgaaagtccatataatttgtcacctaacaattccattcctaagtagttttaagatacatgtctgcagttacagatgaataagcattgcttctaatagtgaaaaaagtgaaaacagcctgaaagtctacaacagaagaataaagtgggactcttctttcagtggcacattataaagccataaaaagaaattaattatagattcatatattattagtcagtagtctatgctaagaaaaaaagagccctggmaaagaaatatcctgtactacttcattttagaacatttaattttgttgaggaatgtgtgtatatgtatatgtaatattatatattgtatgtactaaaatataaagaaattttttggaatgatgaacatgcatttcaagggtagttgctaattcacaggagaagagagaggaatgaacttggataatggtaaacacacaaatatacatacaaaataa

SEQ ID NO: 300013 - DNA, 662 bp, Homo sapiens
aattttcttacaatttgaaacagttcattcttcaaaacaccaaaaggcatcagcatctactttagactacagagcattttttcattgtgatatgctggatttaaccacggtattccctctagaggcaaaatttacccgtctgtaaaaaattgatagattttttttcttcttgtatttgagattgctataaacatctgaagcgactaattaaaaaaaaaactgcgtcagtgcaatgaagtgatacagctatgtcagtttgcttcttattgtcataaaaaawttttttgcaagccctgggaaaaaaaaatatatctcaagtggaaaagagaagtaatgttaccatcaataacacaagaaaatctcagattgtttattagttctgacctccttcattgatggctgtataaactcatatttctgtcattgattctgtgcttctattcagcactaacattttaataagaaaaaatgttaaatatcaaagtaatagatgagcattcctctaaaagccaatttcattaaataccatcggtattaatctttctaaatcttaattacagccttttgacatattaccccctatttgaccttttctgctcaattccagtaaagatctgtaggacagacagggataccagcccgtgtaaacctacagaaatgca

SEQ ID NO: 300014 - DNA, 662 bp, Homo sapiens
aattttcttacaatttgaaacagttcattcttcaaaacaccaaaaggcatcagcatctactttagactacagagcattttttcattgtgatatgctggatttaaccacggtattccctctagaggcaaaatttacccgtctgtaaaaaattgatagattttttttcttcttgtatttgagattgctataaacatctgaagcgactaattaaaaaaaaaactgcgtcagtgcaatgaagtgatacagctatgtcagtttgcttcttattgtcataaaaaaattttttgcaagccctgggaaaaaaaaatatatctcaagtggaaaagagargtaatgttaccatcaataacacaagaaaatctcagattgtttattagttctgacctccttcattgatggctgtataaactcatatttctgtcattgattctgtgcttctattcagcactaacattttaataagaaaaaatgttaaatatcaaagtaatagatgagcattcctctaaaagccaatttcattaaataccatcggtattaatctttctaaatcttaattacagccttttgacatattaccccctatttgaccttttctgctcaattccagtaaagatctgtaggacagacagggataccagcccgtgtaaacctacagaaatgca

SEQ ID NO: 300015 - DNA, 538 bp, Homo sapiens
tttttgcaagccctgggaaaaaaaaatatatctcaagtggaaaagagaagtaatgttaccatcaataacacaagaaaatctcagattgtttattagttctgacctccttcattgatggctgtataaactcatatttctgycattgattctgtgcttctattcagcactaacattttaataagaaaaaatgttaaatatcaaagtaatagatgagcattcctctaaaagccaatttcattaaataccatcggtattaatctttctaaatcttaattacagccttttgacatattaccccctatttgaccttttctgctcaattccagtaaagatctgtaggacagacagggataccagcccgtgtaaacctacagaaatgcatcactttaatgctactgagcaaatggggatggtgacccaaaattatattttattcaggagtcaacgaggccacatttttctaagtgagcaaacaagttctgacttttcctgcttcaagattaagacatctaaaaagagaggcccataagtctgagca

SEQ ID NO: 300016 - DNA, 538 bp, Homo sapiens
tttttgcaagccctgggaaaaaaaaatatatctcaagtggaaaagagaagtaatgttaccatcaataacacaagaaaatctcagattgtttattagttctgacctccttcattgatggctgtataaactcatatttctgtcattgattctgtgcttctattcagcactaacattttaataagaaaaaatgttaaatatcaaagtaatagatgagcattcctctaaaagccaatttcattaaataccatcggtattaatctttctaaatcttaattacagccttttgacatattaccccctatttgaccttttctgctcaattccagtaaagatctgtaggacagacagggataccagccygtgtaaacctacagaaatgcatcactttaatgctactgagcaaatggggatggtgacccaaaattatattttattcaggagtcaacgaggccacatttttctaagtgagcaaacaagttctgacttttcctgcttcaagattaagacatctaaaaagagaggcccataagtctgagca

SEQ ID NO: 300017 - DNA, 538 bp, Homo sapiens
tttttgcaagccctgggaaaaaaaaatatatctcaagtggaaaagagaagtaatgttaccatcaataacacaagaaaatctcagattgtttattagttctgacctccttcattgatggctgtataaactcatatttctgtcattgattctgtgcttctattcagcactaacattttaataagaaaaaatgttaaatatcaaagtaatagatgagcattcctctaaaagccaatttcattaaataccatcggtattaatctttctaaatcttaattacagccttttgacatattaccccctatttgaccttttctgctcaattccagtaaagatctgtaggacagacagggataccagcccgtgtaaacctacagaaatgcatcactttaatgctactgagcaaatggggatggtgacccaaaattatattttattcaggagtcaacgaggccacatttttctragtgagcaaacaagttctgacttttcctgcttcaagattaagacatctaaaaagagaggcccataagtctgagca

SEQ ID NO: 300018 - DNA, 600 bp, Homo sapiens
gctaacttcctccattgtcttttcaaaagaagatattctgcagattacacgttaagtatcataaacttgaatataaaattttattatcacaatctattagctattgtttattgaggctaattttgtgctagacatatattttgctaaacattttacaaatattatctcatttaatttcataatacttctaagaagggaaaggaacattttactattaacttttatactgtttacatggtgaggcttagagrgcatgtattaattccctcatctaacacagcttcttagggacagagcaagaatctaagcccaggtctgcaagtccccacaatccatgtggtaaagcttcctgttattttaggttgatttcttctcagcctggagacccagtccccataaaacatttatttggggtcactgaattgctgatctggttgccatgtctggctggcatctggggtgttttggagggaggtcatttcagaggggattgtttatagagggagggattgttgaagaagcaagcagagctggaaaatgagtttcagaaaattccccaggatccactgggatgaaaagcacaggaggcaattttccatg

SEQ ID NO: 300019 - DNA, 403 bp, Homo sapiens
attctaattcagtaactgagttcataaaaccttaaaaagtattcctttctagtagaatatattcacgagttggaaaagatcattcatttaaaaccattgtcaatacaatacaatattttctgacatggttaatagctattaccatagctatctagaaaggggtgaggggcctgaggaggccaggcggggtggcttatgcctgtaatcctagcaatttgggaggcccaggcgggtggattgcctgagctcaggagttcaagaccagcttgggcaacatggtgaaaccctgtctctactaaaacacaacaaattagccaggcatggcrgtgtctgcctgtaatcctagctactcaggtggctgaggtgtgagaattgctggaacctgggaggcggaggttgcagt

SEQ ID NO: 300020 - DNA, 533 bp, Homo sapiens
ctggctaacatggtgaaaccccgtctctactaaaaatatgaataattagccaggcgtggtggcaggtgcctgtaatcccagctactcgggaggctgaggcaggagaatggcatgagcccaggaggcggagcttgcagtgagccgagatcacacctctgcactctggcctgggttacagagcaagactccatcgcaaaaaaaaaaaaaaaaggtgatttatgagacaggtcatcaaagtccaaagaatgagccaagtctgtagatcaccaaaatgaagtaccttgggcatataggaaatgccttgtggacmatatgttacaagagaaagaagtgagagaaaggcttggaagggagagagaataaataataataagacaaataatttataatcttatcaaaaattatgtaaggtaggaattattatctttgtttcacaccagagaaaactaaggtgcaaatggtgaagtggcttgtccaagtagaacatattatttagtaggagaattggaaatcataattgtaattctttttct

SEQ ID NO: 300021 - DNA, 635 bp, Homo sapiens
atgtatgtgaaatagaaataacacttacaagtataaagtgcagcaccaaacccagaaatattactagagctgtctttcaacatacaaaggtaaaaatatttcagaaacagctgcttcaaacaatgaggtacttctattttttcccgaactctaaatcatacaacatgctccacacaggcctgaagagactagatttaaagagaaaagggatgaattgactcactttacaaataggaaactcttgtcaaacaatcctctagttattcaaactgtatcacaaatcatttcaaatatccagaaatcaataaccgtaaacattttattctgatttctttacattgttcttttgcaaagtaaaagttatagagcccaaaggaataattttacccaatctctccttgagttttaatgataattctgaatattagtcaggcttatatgctccagaaacataagcaaattgttaatagagaygagtttgttaattaaaattaccagaggcagaagaatacctgtaacaatgagaaatatgatgaaactataaaaggcacatgaaattaaatactgtgcctattttggaatatatataatatgtatatactatatattatatattttataataatatatatttt

SEQ ID NO: 300022 - DNA, 446 bp, Homo sapiens
acaaacaggatgccaacatttttaaccaagggttcaatgaacagttaccatactgtatggaagatttgaagggcaagaatatctaaaagagagttgtcacattccatctgagagcaggtagcaagaattgattgataccttcacctgtaaatgggggataataacgaccatatcataatatttcattagtagaaaaattgtatgactgcataataatatccctccataatgctataatatcttgatatgtatacacatatagagacrtacaactacatatgcaattgatgcatgtgtgtgtttgtatgtttcctatctccaagtaaattgagatgggaaggtaatatgcatactttgctcttatccttaaggacagaggtccttgtatatgaatacattttgttctctaaatctagatccttgtctcttctatgcctcatgttgaa

SEQ ID NO: 300023 - DNA, 538 bp, Homo sapiens
taagaaaactcctattgggaggccgaggcaggcggatcacaaggtcaggagatcgagaccatcctggctaacacagtgaaaccccatgtctagtaaaaatacaaaaaaaaaaaaaattagccgggcgtggtggtgagtgcctgtagtcccagctactcaggaggctgaggcaggagaatggtgtgaacccrggaggcagagcttgcagtgagctgagattgtgccactgcactccagcctgggcaacagagtgagactccatctcaaaaaaaaaaaaaaaaatttcctagctgatcttttcaaaggagttgattgttcccaactaataaataattttattctttttgtttgtttagctctttctgtatgcagatgtgtattttttttttattttccataagttattggggaacaggtggtggttggttacaagagtaagttctttaatgctgatttgtgagactgtggtggcacctgtcacctgagcagtatacactgtacttaatttgtagtcttttatccctcatccccttcccac

SEQ ID NO: 300024 - DNA, 538 bp, Homo sapiens
taagaaaactcctattgggaggccgaggcaggcggatcacaaggtcaggagatcgagaccatcctggctaacacagtgaaaccccatgtctagtaaaaatacaaaaaaaaaaaaaattagccgggcgtggtggtgagtgcctgtagtcccagctactcaggaggctgaggcaggagaatggtgtgaacccaggaggcagagcttgcagtgagctgagattgtgccactgcactccagcctgggcaacagagtgagactccatctcaaaaaaaaaaaaaaaaatttcctagctgatcttttcaaaggagttgattgttcccaactaataaataattttattctttttgtttgtttagctctttctgtatgcagatgtgtattttttttttattttccataagttattggggaacaggtggtggttggttacaagagtaagttctttaatgctgatttgtgagactgtggtggcacctrtcacctgagcagtatacactgtacttaatttgtagtcttttatccctcatccccttcccac

SEQ ID NO: 300025 - DNA, 579 bp, Homo sapiens
tgcaattgcaaattgtgctgccataaacacgtgtgcaagtatttttttcatataatggcttcttttcctctgggtagatacccagtagtgggattgctggatcaaatggtagttctacttgtaattctttaaggaatctccaccctgcttttcgcagtggctgcactagttacattccctccagcactgtagaagtgttcccttttcaccacatccacaccaacatctattattttttgattttttgattatggccattcttgagtgtaagtaaggtggcatcgcatcatggtttttatttgcattttcctaatgattagtgatgttgagcattttttcatatgtttgttagccatctstatatcttttttttgagaattgtccctattcatgtccttagtccagtttgtcatggaattgtttctttttttcttgctaatttaatttccttgtagattctggatattagtcctttgtcagttgtatagattgtgaagattttctcccactctgtggattgtctctttactctgctgactgttccttttgctgtgcaaaagctctttagtttaattaagt

SEQ ID NO: 300026 - DNA, 348 bp, Homo sapiens
agcaactagttaactcaaaatggatcaaagatctgaatgtaagtcctaaaactctgttagaagaatatataggaataaaattgcattatcttgggctaggaaaagccttcttaaatatgacaccaaaacaaaagtaacaaaagaaaaaagagrtaaattgcatggtcttaaaattaaaatctgtgcttcaaagtgtatgattaagaaaattgaaaaccacctacagaatgggagaaaacatttttaaatcatgtctgataagagacttcattataaaatatataaagaactcttataccttaatagtacaaagacaaacaattcgatttaaaaatgtgcaaatagttt

SEQ ID NO: 300027 - DNA, 348 bp, Homo sapiens
agcaactagttaactcaaaatggatcaaagatctgaatgtaagtcctaaaactctgttagaagaatatataggaataaaattgcattatcttgggctaggaaaagccttcttaaatatgacaccaaaacaaaagtaacaaaagaaaaaagaggtaaattgcatggtcttaaaattaaaatctgtgcttcaaagkgtatgattaagaaaattgaaaaccacctacagaatgggagaaaacatttttaaatcatgtctgataagagacttcattataaaatatataaagaactcttataccttaatagtacaaagacaaacaattcgatttaaaaatgtgcaaatagttt

SEQ ID NO: 300028 - DNA, 617 bp, Homo sapiens
ggattacaggcgcacgacaccatgctcggctaattttattttttttgtatttttaatagagacagggtttcaccatgttgggcagagtggtctcgaatatgttaaattatttttaggtattctttaagattcccatgaagaaaaatccaggaaaggaagatgttacattctcatgaaactgctctaatttcccyatgtcggttactattctgtttccccattctgagaagagtaaccaaaccctgacagcaaaataatgctctcctggatttttcatttagatggcaaggaagtagcctgagggagtaggggccttaagagatacttgattcagaaactggagccaaatccaagactagtgtcctggaagagatatagcatgcttaaccggggactgagtggaatgagaacggcagagaaattccctgtgaaaggtttaagatgaggaaagtcctgaagttcctagaagctggtatgcaaatttgagatttaaacgaggatgaaatgcagtatggtacaatggtaaattgcatgggctctgattcaaaactgtttggatttttaattggaagtccttcattcactaggtttgtgaccttgaagagtttaattaatat

SEQ ID NO: 300029 - DNA, 617 bp, Homo sapiens
ggattacaggcgcacgacaccatgctcggctaattttattttttttgtatttttaatagagacagggtttcaccatgttgggcagagtggtctcgaatatgttaaattatttttaggtattctttaagattcccatgaagaaaaatccaggaaaggaagatgttacattctcatgaaactgctctaatttccctatgtcggttactattctgtttccccaktctgagaagagtaaccaaaccctgacagcaaaataatgctctcctggatttttcatttagatggcaaggaagtagcctgagggagtaggggccttaagagatacttgattcagaaactggagccaaatccaagactagtgtcctggaagagatatagcatgcttaaccggggactgagtggaatgagaacggcagagaaattccctgtgaaaggtttaagatgaggaaagtcctgaagttcctagaagctggtatgcaaatttgagatttaaacgaggatgaaatgcagtatggtacaatggtaaattgcatgggctctgattcaaaactgtttggatttttaattggaagtccttcattcactaggtttgtgaccttgaagagtttaattaatat

SEQ ID NO: 300030 - DNA, 528 bp, Homo sapiens
gctctaatttccctatgtcggttactattctgtttccccattctgagaagagtaaccaaaccctgacagcaaaataatgctctcctggatttttcatttagatggcaaggaagtagcctgagggagtaggggccttaagagatacttgattcagaaactggagccaaatccaagactagtgtcctggaagagatatagcatgcttaaccggggactgagtggaatgagaacggcagagaaattccctgtgaaaggtttaagatgaggaaagtcctgaagttcctagaagctggtrtgcaaatttgagatttaaacgaggatgaaatgcagtatggtacaatggtaaattgcatgggctctgattcaaaactgtttggatttttaattggaagtccttcattcactaggtttgtgaccttgaagagtttaattaatatccttaacctcaatattctcatcctcaaaatggagataattaaattccctaattcctagggttctctccatcaagtgcagccatccacagtg

SEQ ID NO: 300031 - DNA, 602 bp, Homo sapiens
gtcatagtggattatggcaagccctaatgactagtgtccttgtaagaagagaagaggacacacagatgcacagacactgaggaatcagagagagaagaaagtgacagagccagatgatggagcggagcatacacaaacctaggaatgccaagcattgctaggagccagcaggcactgggaagaggcaaggaaagattcttccctagagccttcagaggtagcatggatctagwaataccttggttttggacttccagcgtccaggactttgagagaattactcttgtggtaatctaccaaattcatggtaatttgttgcaacagccctagaaaactaatagagaatcattttcccttattccagcatttcgcaggtaaggaatgaaaaatacagccaagcaatgtaacttgtcaactagcagttaaaatagattcaaagcatttgttgtaatctaggtcttgtgacttccctataaaacttactggttctcaaatatctatcaaatgcatttaactcccttgagaaaaactgaagtcctgtgttttgttgtttttttcctttaacacattttgtttcattgtatcaaagtgtttcttctttc

SEQ ID NO: 300032 - DNA, 457 bp, Homo sapiens
tctaagttttgttttttattttgagacagagtcttgctctcttacccaagctggagtgcagtgacatgatcttggctgactgcaatctgtgcctcctgggctcaagcaatcttcccacctcagcctcccaagtagctgggactacaggtgtgtgccaccacacctggctaatgtttgtattttttgtagagatagggtttctccmtgttgtccaggctggtcttgaactactgagctgaagtaatccacctgctttggcctcccaaagtgctgggattacagatatgagccactgtgcctggcctgagagttcttagtttcaatcagtaagagaggtagagtatagtggattacttcatcttgatgagcataagaactcaccttcatttctggaagatgttttcactggatgtaggattctagttgacagtttttgttttaaaaaagtgtttgaaaa

SEQ ID NO: 300033 - DNA, 457 bp, Homo sapiens
tctaagttttgttttttattttgagacagagtcttgctctcttacccaagctggagtgcagtgacatgatcttggctgactgcaatctgtgcctcctgggctcaagcaatcttcccacctcagcctcccaagtagctgggactacaggtgtgtgccaccacacctggctaatgtttgtattttttgtagagatagggtttctccatgttgtccaggctggtcttgaactactgagctgragtaatccacctgctttggcctcccaaagtgctgggattacagatatgagccactgtgcctggcctgagagttcttagtttcaatcagtaagagaggtagagtatagtggattacttcatcttgatgagcataagaactcaccttcatttctggaagatgttttcactggatgtaggattctagttgacagtttttgttttaaaaaagtgtttgaaaa

SEQ ID NO: 300034 - DNA, 457 bp, Homo sapiens
tctaagttttgttttttattttgagacagagtcttgctctcttacccaagctggagtgcagtgacatgatcttggctgactgcaatctgtgcctcctgggctcaagcaatcttcccacctcagcctcccaagtagctgggactacaggtgtgtgccaccacacctggctaatgtttgtattttttgtagagatagggtttctccatgttgtccaggctggtcttgaactactgagctgaagtaatccacctgctttggcctcccaaagtgctgggattacagatatgagccactgtgcctggcckgagagttcttagtttcaatcagtaagagaggtagagtatagtggattacttcatcttgatgagcataagaactcaccttcatttctggaagatgttttcactggatgtaggattctagttgacagtttttgttttaaaaaagtgtttgaaaa

SEQ ID NO: 300035 - DNA, 550 bp, Homo sapiens
taccaaagccgtaactattttggaaaagcctccttcatattgcagccattggacatgataatacatgtgatgtgctggcatttgttgagaatcatgtgaaaattaagcttccaccccatcacactaacgttccagccctccacggttttctccctaggctaagatagagaggaagaacatgaaatgtgcagaaagcattctcttaagcaaaygtgtataacttgcataaattgtaataatttcctggaacaggatgcacctctaacctctacaggcaaatcatagattccattgtccagctgtataatgaaaacagagttctcagagaagaataccggagactcccccgacttgcctgaatcaaatttccagaggtaagtggtgaaaggccacaatatgaagtcactctcagatgggtcccttctcttgccacactccactgtagaaataaaagaggacggggaggccagagctgctcaaaaccttataacccacaattctcatagctattctcaacttagagagggctgctttctagacacaccccctc

SEQ ID NO: 300036 - DNA, 550 bp, Homo sapiens
taccaaagccgtaactattttggaaaagcctccttcatattgcagccattggacatgataatacatgtgatgtgctggcatttgttgagaatcatgtgaaaattaagcttccaccccatcacactaacgttccagccctccacggttttctccctaggctaagatagagaggaagaacatgaaatgtgcagaaagcattctcttaagcaaatgtgtataacttgcataaattgtaataatttcctggaacaggatgcacctctaacctctacaggcaaatcatagattccattgtccagctgtataatgaaaasagagttctcagagaagaataccggagactcccccgacttgcctgaatcaaatttccagaggtaagtggtgaaaggccacaatatgaagtcactctcagatgggtcccttctcttgccacactccactgtagaaataaaagaggacggggaggccagagctgctcaaaaccttataacccacaattctcatagctattctcaacttagagagggctgctttctagacacaccccctc

SEQ ID NO: 300037 - DNA, 550 bp, Homo sapiens
taccaaagccgtaactattttggaaaagcctccttcatattgcagccattggacatgataatacatgtgatgtgctggcatttgttgagaatcatgtgaaaattaagcttccaccccatcacactaacgttccagccctccacggttttctccctaggctaagatagagaggaagaacatgaaatgtgcagaaagcattctcttaagcaaatgtgtataacttgcataaattgtaataatttcctggaacaggatgcacctctaacctctacaggcaaatcatagattccattgtccagctgtataatgaaaacagagttctcagagaagaataccrgagactcccccgacttgcctgaatcaaatttccagaggtaagtggtgaaaggccacaatatgaagtcactctcagatgggtcccttctcttgccacactccactgtagaaataaaagaggacggggaggccagagctgctcaaaaccttataacccacaattctcatagctattctcaacttagagagggctgctttctagacacaccccctc

SEQ ID NO: 300038 - DNA, 550 bp, Homo sapiens
taccaaagccgtaactattttggaaaagcctccttcatattgcagccattggacatgataatacatgtgatgtgctggcatttgttgagaatcatgtgaaaattaagcttccaccccatcacactaacgttccagccctccacggttttctccctaggctaagatagagaggaagaacatgaaatgtgcagaaagcattctcttaagcaaatgtgtataacttgcataaattgtaataatttcctggaacaggatgcacctctaacctctacaggcaaatcatagattccattgtccagctgtataatgaaaacagagttctcagagaagaataccggagactcycccgacttgcctgaatcaaatttccagaggtaagtggtgaaaggccacaatatgaagtcactctcagatgggtcccttctcttgccacactccactgtagaaataaaagaggacggggaggccagagctgctcaaaaccttataacccacaattctcatagctattctcaacttagagagggctgctttctagacacaccccctc

SEQ ID NO: 300039 - DNA, 601 bp, Homo sapiens
gggaatttaggtaatgttgctgtatttactcacgtgcttccttattcccttagtcaactcagtttcataaatttcttcaggatctttttcaagaagatctttcgattttttttcagcctactctaattactccttgtctatgttactgttcctatttgtacagagctcagactaccctatcatgtgttcctgctttttcatttctttttttttttgagatggagtctcactctgycacccagactggagggcagtggtgtgatctcagttcacagcaacctccacctcccaggttcaggggatcctccacctcagcctcccaagtagctgggattacaggcctgtgccaccacgctcggctaatttttatatttttaatagagatggggtttcaccacattggccaggctagtctcaaactcctgacctcaagtgatccatctgccttggcctcccaaagttctggattgcaggtatgagccgtcgtacctgccccatgtgttcttttttatagtctattcattatatacatgatatatttacttccccaattgtggtgtaagcatttttagaggatgcttacaccacaactggggaagta

SEQ ID NO: 300040 - DNA, 446 bp, Homo sapiens
ctagacaagtcatacctttaggtaacagatactttcaaagatgtactttcctgcayccattaaagttttagtctcagctaatctgaaaacctgcggtcctcatgcactgggatagcagtgcaatatggctcaggctcaggttttgctgggcacaccagagtaggccacacactctcatgtgcagtggcttcaggtatggatcagggtctttcccactaattggcttcagttatgatgttgtaggtcatcattcttctggctttaatatgagagaagaagggatggggaagaactggtctccaagtgagagcatccagggtgaagagtgtggaaataagggtcattagcacaagagaagagccaggtgatatcaaaggcatgtagtaatggcataaaggtggaacgttgctctcattctgctgaagtgggcaccatggaaaccttgg

SEQ ID NO: 300041 - DNA, 446 bp, Homo sapiens
ctagacaagtcatacctttaggtaacagatactttcaaagatgtactttcctgcacccattaaagttttagtctcagctaatctgaaaacctgcggwcctcatgcactgggatagcagtgcaatatggctcaggctcaggttttgctgggcacaccagagtaggccacacactctcatgtgcagtggcttcaggtatggatcagggtctttcccactaattggcttcagttatgatgttgtaggtcatcattcttctggctttaatatgagagaagaagggatggggaagaactggtctccaagtgagagcatccagggtgaagagtgtggaaataagggtcattagcacaagagaagagccaggtgatatcaaaggcatgtagtaatggcataaaggtggaacgttgctctcattctgctgaagtgggcaccatggaaaccttgg

SEQ ID NO: 300042 - DNA, 446 bp, Homo sapiens
ctagacaagtcatacctttaggtaacagatactttcaaagatgtactttcctgcacccattaaagttttagtctcagctaatctgaaaacctgcggtcctcatgcactgggatagcagtgcaatatggctcaggctcaggttttgctgggcacaccagagtaggccacacactctcatgtgcagtggcttcaggtatggatcagggtctttcccactaattggcttcagttatgatgttgtaggtcatcattcttctggctttaatatgagagaagaagggatggggaagaactggtctccaagtgagagcatccagggtgaagagtgtkgaaataagggtcattagcacaagagaagagccaggtgatatcaaaggcatgtagtaatggcataaaggtggaacgttgctctcattctgctgaagtgggcaccatggaaaccttgg

SEQ ID NO: 300043 - DNA, 592 bp, Homo sapiens
taaatttcccttacagaagggtaacttctactgtgtttttagaattctcctgtgtctactgtttctcaaaataatcagctcaaaataatccttatgccaaaaagtcatattttagggtggcacatgcctgtctcctacaagttttcatcaagtttgaaaactttttggtcattctttgttcaaatattttttctatctgttaccaggaaggggtcccaatccagactccgagagagggttcttggatctcatgcaaggaagaagttggagtgagtccatagagtaaagtgaaagcaagtttatttaagaaagtaaagaaataaagaatgactactccataggcagaccagccccaagggttactggttggctatttttgtggttatttcttgattatatgctaaacaaggggtggattwttattcctttccaggaaagcgggggcaattccaggaactgacagttcctcctctttttagaccatatagtgtaatttcctgacgttgccatggcacttgtaaactgtcatggtgctggtgggagtgtcttttaacaggctaacggattataattagcatataacgagcagtga

SEQ ID NO: 300044 - DNA, 516 bp, Homo sapiens
catagaaaaacaggcatttaatattccttttagttttaggggagggggaagggagagagggagagaggacacagggaagcttacagcaaaatttttgctgtttatagctttttttgggaagaaaacacatgcacaaatcctggtgttaggaatattttaagcatatatctttaatattattcattcaggaccgaagtaagttctgatgcagaaaatgagtgagttttacagctttctgagcccctgtttgactcaggaagcccagctggccccctcctttcaaaattacacatatattaggccacttgaagttgtcccacacctcactgatkctcttttcattttttttaaccctctgtttcattttggattgtttctattgctctgtctttgcattcattaatcttgttttctgtggtctaatgtgctctcaatcccatccagcatactggttttcatctctagaagttggattttagtgtttttctattttccatgtcttaattgaggtaagac

SEQ ID NO: 300045 - DNA, 516 bp, Homo sapiens
catagaaaaacaggcatttaatattccttttagttttaggggagggggaagggagagagggagagaggacacagggaagcttacagcaaaatttttgctgtttatagctttttttgggaagaaaacacatgcacaaatcctggtgttaggaatattttaagcatatatctttaatattattcattcaggaccgaagtaagttctgatgcagaaaatgagtgagttttacagctttctgagcccctgtttgactcaggaagcccagctggccccctcctttcaaaattacacatatattaggccacttgaagttgtcccacacctcactgattctcttttcattttttttaaccctctgtttcattttggattgtttctattgctctgtctttgcattcattaatcttgttttctgtggtctaatgtgctctcaatcccatccagcatactggtwttcatctctagaagttggattttagtgtttttctattttccatgtcttaattgaggtaagac

SEQ ID NO: 300046 - DNA, 540 bp, Homo sapiens
ttaatttgggttgtgggtttataaatgttcattttcttattttgcatcattaaccatatacacatatatattacacattttttcatttgcgtaaaatattagtcaacttttttaagttctaaaagaaagtgaagagccctggggcggaacaagggcaaagaagtaggaagagtctgtggccaacctcttaactcacgtacctttctgacccctctacctcttctacctagagccctccatctcagccagctcccccgtccttgtcaccatgactctgaaggtgcctttctgacacaccaagatggtcaaggaaaaatggtgctgggttaggtgacagggaagatcatgagctttcatactttatgatctgacaagccactgtagcctctcacatttatatactaagtgagggtctttcagaatagcgcttcagtgtctgcacctgactcacactattaggcagttaaaagctggggaatgagctcatgtgaagagtttttccatttcagatsatagctatttttaggaacacaagctaca

SEQ ID NO: 300047 - DNA, 347 bp, Homo sapiens
agttgatcccttaaaagcttaggaaagaatctcaagggcacataggaaaataagcaaagggcttgatagayatattcatgacaacacaagaaggtgaagtcgggaagaggaaatggacaaggtcatcccaaattgaaataacttataaaagataaattataatatctccagaaattaactgtaaacattcctataaaatcatagatgataattttttaaaataaaagattgagtagtaagaataactaagaataaaaaattaatgagttcctagtggaaacttaaaattgaaccactgggggactttctataatgaatggcagttgaagaaaaaaattgggtaaact

SEQ ID NO: 300048 - DNA, 563 bp, Homo sapiens
gaattaccatggatcagctctcagaggcagtaggttctggactcrtgctggctttgatacgtgtgcattggaaaagctcaagtacccggcaatacttggagattaggaagaaaggatgaaaataaaccactgcactaaataacatgacaataatcacttatacaaaaattttaaagataaggaatatttaaagatttattagtttattatagctttatagttggagagtgaagaagaaaataccaaagctttttgtcttaacaaaatggtgcagacggattaacatatattgtcacctatgataaccagtcagcataaaaagtatttagaaaggaatggttatattctctaagagatatattctgatgtcatgttttttgctttagagtctattaatatagccacctttttgttaatgttttcagtcaagctccttttcttgcctttcatttccaacctttctctcactttctggtttagatacaactcctaaatatatcatatagttaatttaaaaatccagtgtagcagtatttcgggggtttgttttactggataatttg

SEQ ID NO: 300049 - DNA, 563 bp, Homo sapiens
gaattaccatggatcagctctcagaggcagtaggttctggactcgtgctggctttgatacgtgtgcattggaaaagctcaagtaccyggcaatacttggagattaggaagaaaggatgaaaataaaccactgcactaaataacatgacaataatcacttatacaaaaattttaaagataaggaatatttaaagatttattagtttattatagctttatagttggagagtgaagaagaaaataccaaagctttttgtcttaacaaaatggtgcagacggattaacatatattgtcacctatgataaccagtcagcataaaaagtatttagaaaggaatggttatattctctaagagatatattctgatgtcatgttttttgctttagagtctattaatatagccacctttttgttaatgttttcagtcaagctccttttcttgcctttcatttccaacctttctctcactttctggtttagatacaactcctaaatatatcatatagttaatttaaaaatccagtgtagcagtatttcgggggtttgttttactggataatttg

SEQ ID NO: 300050 - DNA, 563 bp, Homo sapiens
gaattaccatggatcagctctcagaggcagtaggttctggactcgtgctggctttgatacgtgtgcattggaaaagctcaagtacccggcaatacttggagattaggaagaaaggatgaaaataaaccactgcactaaataacatgacaataatcacttatacaaaaattttaaagataaggaatatttaaagatttattagtttattatagctttatagttggagagtgaagaagaaaataccaaagctttttgtcttaacaaaatggtgcagacggattaacatatattgtcacctatgataaccagtcagcataaaaagtatttagaaaggaatggttatattctctaagagatatattctgatgtcatgttttttgctttagagtctattaatatagccacctttttgttaatgttttcagtcaagctccttttctygcctttcatttccaacctttctctcactttctggtttagatacaactcctaaatatatcatatagttaatttaaaaatccagtgtagcagtatttcgggggtttgttttactggataatttg

SEQ ID NO: 300051 - DNA, 548 bp, Homo sapiens
ctactaaaaatgcaataattagctgggcatggttgtggggcctgtgatccagctgttcaggaggctgaggcaggagaatcgcttgaacccgggaggcagaggttgcagtgagctgagatcacaccactgcactccagcctggatgacagagagagactccatctcaaacaacaacaacaacaacaacaacaacaacaacaacmaccaaacaaaaaaatcaacactatcttgtagggtcgttatgtggactaaataggttactacacagtaaagcacttagaaacaatgccagtcacataataatgctcttgaaacagttattattattattactattattattgtctttgttttcatttctaactgtaccagtgagaaattttaacattccctacaataaattagaaatattcaatggtttttttgacctcttctccccatattagtggccaggtgtctgaaaaactggttacttgaagtgtctactcaaagtacagacgtagaatcctacagcaggattctatcctccaacaggatctctgttagtg

SEQ ID NO: 300052 - DNA, 608 bp, Homo sapiens
atgtgaaccacttctcaacgctgcagactcaaatactaggaaatactaagaacctcaggacaaacaaatagccagtccaaaaagactcacagactagataagctgtcatctaccacctaacagataatgtatccctgttaaccactatcyccagatgttcatttcataaaatcaaaaacagaattccatgtggatcatggaaaaaaatagttgacaatgtacaaatgagagaaaaaatacttgtccaagaattacatttagtgtctaaaagccaaatagctcaatttctgctcatgagattcaacagatgaactgagggaacatatgccgatagctctgagattacaggtccgcatgggatgcccataaggtgcaggattctattagctaagattatatgtctcaggtgggcaaatctttgtggacatagcaagaaaaaagaaaaactgtcaaggaataatatagagacagtgtgatggttaattttatgtgttaacttggctagaccacagtgcccaggtatgtggtcaaatataattctggaggtttctgagaaagggtattttggatgagagtaacatttgcattagtagactttgagtagagca

SEQ ID NO: 300053 - DNA, 608 bp, Homo sapiens
atgtgaaccacttctcaacgctgcagactcaaatactaggaaatactaagaacctcaggacaaacaaatagccagtccaaaaagactcacagactagataagctgtcatctaccacctaacagataatgtatccctgttaaccactatctccagatgttcatttcataaaatcaaaaacagaattccatgtggatcatggaaaaaaatrgttgacaatgtacaaatgagagaaaaaatacttgtccaagaattacatttagtgtctaaaagccaaatagctcaatttctgctcatgagattcaacagatgaactgagggaacatatgccgatagctctgagattacaggtccgcatgggatgcccataaggtgcaggattctattagctaagattatatgtctcaggtgggcaaatctttgtggacatagcaagaaaaaagaaaaactgtcaaggaataatatagagacagtgtgatggttaattttatgtgttaacttggctagaccacagtgcccaggtatgtggtcaaatataattctggaggtttctgagaaagggtattttggatgagagtaacatttgcattagtagactttgagtagagca

SEQ ID NO: 300054 - DNA, 581 bp, Homo sapiens
tcattggcatagtcccaagaaactttacttggcaagcaagctattgattttggcgggggtgggatggtgtttatcagtcacccctactagcagagatgtgataacactgcagtcagagtagttgagttttaaaattttgacttgccaaccaacagaacattatttatgtggtaaaacttagacatcagaggctacaggcactcaggctaaattctgacccattcattggtgacaaatgttaagggatttttgccccattagccctttttttactcatgatggtactctgaacagaagaatctcctctaacaatttaagaccattcattgtataagcatgtaaatcatcaatctcaatgacacattttcacaactatacactgaattggctcagaggcttcactcataactttaactttttttcccyctttactacaaattttacccaaactctgtcagttgaattcacactctacaggaacacatatcaagaagtttaacacatgcactttagttacagcaacacctgccaggagaatatcttacctccttgactgagagttcaaggagtgcagggagatg

SEQ ID NO: 300055 - DNA, 581 bp, Homo sapiens
tcattggcatagtcccaagaaactttacttggcaagcaagctattgattttggcgggggtgggatggtgtttatcagtcacccctactagcagagatgtgataacactgcagtcagagtagttgagttttaaaattttgacttgccaaccaacagaacattatttatgtggtaaaacttagacatcagaggctacaggcactcaggctaaattctgacccattcattggtgacaaatgttaagggatttttgccccattagccctttttttactcatgatggtactctgaacagaagaatctcctctaacaatttaagaccattcattgtataagcatgtaaatcatcaatctcaatgacacattttcacaactatacactgaattggctcagaggcttcactcataactttaactttttttccctctttactacaarttttacccaaactctgtcagttgaattcacactctacaggaacacatatcaagaagtttaacacatgcactttagttacagcaacacctgccaggagaatatcttacctccttgactgagagttcaaggagtgcagggagatg

SEQ ID NO: 300056 - DNA, 581 bp, Homo sapiens
tcattggcatagtcccaagaaactttacttggcaagcaagctattgattttggcgggggtgggatggtgtttatcagtcacccctactagcagagatgtgataacactgcagtcagagtagttgagttttaaaattttgacttgccaaccaacagaacattatttatgtggtaaaacttagacatcagaggctacaggcactcaggctaaattctgacccattcattggtgacaaatgttaagggatttttgccccattagccctttttttactcatgatggtactctgaacagaagaatctcctctaacaatttaagaccattcattgtataagcatgtaaatcatcaatctcaatgacacattttcacaactatacactgaattggctcagaggcttcactcataactttaactttttttccctctttactacaaattttacccaaactctgtcagttgaattcacactctacaggaacacatatcaagaagtttaacacatgcactttagttacagcarcacctgccaggagaatatcttacctccttgactgagagttcaaggagtgcagggagatg

SEQ ID NO: 300057 - DNA, 619 bp, Homo sapiens
atgcattagatacatacatacatacatacatacatacataaagacagagcgatagatatataaagaatttatagaaatgtgtcttttttttgtactcactttatgtataaatgccaactacttaccaggcaagtaatcctagaggttacaaaacaaaaagccttaccaagaaattaagatgctcaaatcacttggctgattgaattcatttaaagcatatggctagaagcaaggggaaagaggacggaggatctccctccctgtaacctgtgttatgcactgttcctctattctcctcttctctctcccatcttcycttcctttcccttcccttgtctccaccctctcctgctctgtctcccactgatggtgtagcgaggaggaccacacttgagggtcctcagtctggaacagggcctaagcaggcagaaggtgcctgcagccagcacacacttgccttattggagaggtgcaagggcaagtgtgtagcttgcctgtaacctcctgagcagccacacatttatctgtgtgtctcaggcagagaatggatgttgccagtgagttaatttaaggatgagccaggagagagctatcatcaacctagagacaacaaggtctg

SEQ ID NO: 300058 - DNA, 573 bp, Homo sapiens
gcatgccttcggccccacagcagaaggccaggaaacgcagatctgacccagggaataatgccagttttctgttcttatatcctttcagcacagagctcaagtcttagaaaacaaggggcaattttctgaactgacttgatgttttcttgtgtgtgacctgacaaatgtgagtgccttacttgatgatctgagggaacaggccccttatcttcacagacagagcaatcactcaattctagaaggaagccagggaaagaaggaagacaacaatccattgagccttggtttcctcatctgtaaaktagaatactactatctatactgcacaggtagatatgaagattaaataaaatactgaacatacagaatattagcaagggcagggagtggggagaggggttgatcacaaagcagcagcttgagggaagttttttgagtgatgaaactattctctattgtggtaatgggggtggttatatagctgcatgcattgtcagagatcatagatgtctacattgaaaagagtgaattttaatttatacaagtgaaaaagtaaataagatgccctaacac

SEQ ID NO: 300059 - DNA, 569 bp, Homo sapiens
tctacagcttcaagaaactaaattctctcaacaacctcaattagttagaaaacagattcttccccagtcaagactcagatgagaccgtagccccggtcaactccttgaatgcagttttatgagactctaggcagaggacccagctaagtagtttctggacttctgacttacagaaattgtgagawaataaatgtgtgctgctttgagtggctaagtttgtggtaatactgttacacagcaatagaaaactaataaaattccacaatacttttcaactaaaaatactctgagaagattcacaggttctcaataaaacctgtatggcaacttctgaatcaaggtcacactgctcttggtagtcaaaggaaagtatggtagctatacccaacagtaagttgaaggggtgtccgaagccctaggcagggagtctccacttatacagtttaggagatttagctttgatcctccagctgctgccaggatactaatatattctgtcgagaaacttgctctcaggagatctagaggtgagctcatctgggggctttagggtatcatatttaaagcgt

SEQ ID NO: 300060 - DNA, 569 bp, Homo sapiens
tctacagcttcaagaaactaaattctctcaacaacctcaattagttagaaaacagattcttccccagtcaagactcagatgagaccgtagccccggtcaactccttgaatgcagttttatgagactctaggcagaggacccagctaagtagtttctggacttctgacttacagaaattgtgagaaaataaatgtgtgctgctttgagtggctaagtttgtggtaatactgttacacagcaatagaaaactaataaaattccacaatacttttcaactaaaaatactctgagaagattcacaggttctcaataaaacctgtatggcaasttctgaatcaaggtcacactgctcttggtagtcaaaggaaagtatggtagctatacccaacagtaagttgaaggggtgtccgaagccctaggcagggagtctccacttatacagtttaggagatttagctttgatcctccagctgctgccaggatactaatatattctgtcgagaaacttgctctcaggagatctagaggtgagctcatctgggggctttagggtatcatatttaaagcgt

SEQ ID NO: 300061 - DNA, 569 bp, Homo sapiens
tctacagcttcaagaaactaaattctctcaacaacctcaattagttagaaaacagattcttccccagtcaagactcagatgagaccgtagccccggtcaactccttgaatgcagttttatgagactctaggcagaggacccagctaagtagtttctggacttctgacttacagaaattgtgagaaaataaatgtgtgctgctttgagtggctaagtttgtggtaatactgttacacagcaatagaaaactaataaaattccacaatacttttcaactaaaaatactctgagaagattcacaggttctcaataaaacctgtatggcaacttctgaatcaaggtcacactgctcttggtagtcaaaggaaagtatggtagctatacccaacagtaagttgaaggggtgtccraagccctaggcagggagtctccacttatacagtttaggagatttagctttgatcctccagctgctgccaggatactaatatattctgtcgagaaacttgctctcaggagatctagaggtgagctcatctgggggctttagggtatcatatttaaagcgt

SEQ ID NO: 300062 - DNA, 670 bp, Homo sapiens
tacaatcagtgagccaaaagtaataatagaggaatagagttcttttactcctgtattttgacaacaagaaagaaaatgtagatccttgtaatacttacttcaatcttattgtcttataccttccctaaaccctgaagttacactggaaccaccccagcccccaacacatacactcacacacacagcacgcactcgcaaaacacacacatgcatgtatacccaacatacacaccctacatgcacacatttgcatgcccttgctgtgttctgaagatggcactttgctttcccccctcctttttcacttgatgttttattgtggagattgacctagtttttcccaccctctatgtcagattcagtcatcctgctgatggtggctaagagatagaaatggaggcggtacccataggattctctctactaggctaggggaaaagatgagcctgggaatactcctcaatccatttatcctattgcatgagtatyattacaggcagatgagaaatctgcctgcttaaagacagaattttctgatcccttggagaaaagaaaattaaaactgttgttcttctttccattagactgtgagctccacagtaggtggccctgggcccagtgatctgcacctcactaggacttaaaccttgcctcatacttagcacaaaat

SEQ ID NO: 300063 - DNA, 623 bp, Homo sapiens
ttgctgtgatgactaagttaatacatctttctagaataatccctggcatgaattaaatcttcatgaatatagctattactattatcacctttttgcagatgagaaaacaggaccagagaggttagttcasttgcccaaggtcacacagctcatcagtggtagatataaagtggaaatccaggttggtctgtcttttctcctgtggacgagaggcagtctaacacaccttgtcactatatttttcttgagctccagactgtgaaagcacagtaaattttttttcatcgttcatttcttgtaagcaactaccactcctgggtagatccagctcccaaggacactggacaatgaaggaagtatatttccaaatctgcaaatcatcaacagaattaaatctaaatgtcacattacatcctgtctgatatctggtcttccctaaacagacataaaactaaaatctgtttggactgctttgccattttccaaagcatttcccagactctttcttctatcctgccttcaaagtcctgcattagcccctctccctcaagggcagcttggcatgggctatggttcaacacatgtggtcttcagtctacttttgcgagacaggtttccttagg

SEQ ID NO: 300064 - DNA, 628 bp, Homo sapiens
gtgaaagagatttagactataaaaggaaaattcgatttaagttttaaaaagtttgatgttaatggtttttgtggggatttgaaaattatctaaagattttgatgaaaatctctccacatgaatatttaacaaaacatctacaaagagaaattttatgttggttgaaaatggaatttttccacccactctatcaatatcttttttctttatgattttgtttaattagtatattattttattgtgaaacatttcatggccagtacagaaaatcagaaagtacaaaaagcaaaaaggaaaaaatgaaaatattcataatttaaccagaaatatctatcttggattatgtctttggctaaccctcttatgcatatatgtattcatattaaaaaygatatttttcaaaaacaatgttaacttaatgtattggaacatttttcatgctattgattattaaatattttaaaacttggggacaagaaggcatcttgtttatcaaagttttctagttgaaaattcactcaataaaaatcatttgtgatctcaaatcactcacttcatttgatcctcccaaaatctggtgagggaggaggtgcaggcacaattgcagggaatggagccagaactgtta

SEQ ID NO: 300065 - DNA, 628 bp, Homo sapiens
gtgaaagagatttagactataaaaggaaaattcgatttaagttttaaaaagtttgatgttaatggtttttgtggggatttgaaaattatctaaagattttgatgaaaatctctccacatgaatatttaacaaaacatctacaaagagaaattttatgttggttgaaaatggaatttttccacccactctatcaatatcttttttctttatgattttgtttaattagtatattattttattgtgaaacatttcatggccagtacagaaaatcagaaagtacaaaaagcaaaaaggaaaaaatgaaaatattcataatttaaccagaaatatctatcttggattatgtctttggctaaccctcttatgcatatatgtattcatattaaaaacgatatttttcaaaaacaatgttaacttaatgtattggaacatttttcatgctattgattattaaatattttaaaacttggggacaagaaggcatcttgtttatcaaagttttctagttgaaaatwcactcaataaaaatcatttgtgatctcaaatcactcacttcatttgatcctcccaaaatctggtgagggaggaggtgcaggcacaattgcagggaatggagccagaactgtta

SEQ ID NO: 300066 - DNA, 538 bp, Homo sapiens
tttctgtatggatgtcttatacatgatttgtttgattttttttttaccccctaggtatttgatgctttaaattctattataaatggcaaagttttaaattatgttgggtaactgtcaattgttgatagaaaagcaagaaattcctttcatattatccttgcatctagcagtcttgatwaattcattctaatagtttgtctgtagattcttttggattctatacatgtatatctattttacctgtaaataataatacttctactttttactcatttaaattgtaattatttatctttcatctttgtgctgactatgatacttaggacaatgtagaatcaagtggtactaatgggtcttcctgtctcttttcccattgcagaaggaaagcttttaccattttgccattgatgataatatatcttatatgttttatgtagatactttgatgacagtaattacattctattcctagattactaagagtttttaataatgaataggtgctgaattttattaagcactttagaaatatatattg

SEQ ID NO: 300067 - DNA, 589 bp, Homo sapiens
acaggggtgtcttgtctgagaacaaatacaattcagtcttctctttggggttttagtatgtgtcaaacataggactggaagtttgcccctgttcttttttcttttgaaagaacatcagttcatgcctgaggcatgagtgactgtgcatttgagaatagttttccctrttctgtggatacagtcccagagttttcagggagtacacaggtagattagtttgaagcattgaccttttatttattccttatttctctttcatcaaaacaaaacagcagctgtgggaggagaaatgagagggcttaaatgaaatttaaaataagctatattatacaaatactatctctgtattgttctgaccctggtaaatatatttcaaaacttcagatgacaaggattagaacactcattaaagatgctattcttcagaattgtttcatttgtatgatgtttcattttagagaagattttcatgatgaatggttaatgtgttcttgcctgaagttttatgtctgatccagatctagctttttgtatcaaagtgtgccctaagggaagatgcagatataatatgttgaagttacaaggaggc

SEQ ID NO: 300068 - DNA, 622 bp, Homo sapiens
agactgccgttgtttgaaaggggtgggctggaggtgagaaggtgggcaagagaagaaaacatgaaaatgttcttttcaattcataggctgaggacaatttcctgtgaaaagacaaacataggaactgctctgttatcactgttatttccatgcatctctatgagaggagacttgcactgaattccagggaaggggacttagttatacggcagatcaatgatgtccaagacagagaaacattgactgaaaaacgaagcacatgcgatrttggcttgagggtctattacaaaataatcagctgccctagtcaactgggaacacagagaggtcaaggaattttcagcaacagtaaaatataattttcttattaaagaaaaagttttgcctggcatccctaagagaaaatggattaacatgaaaggcttaggattggtgtatcattaggccatatacaacccacgtgtgcattatgacagtatttaataaggggccacaactgaactctaagtccagaaactcttttttgcacaggtagcaccaagagcaactcctgaagtcaggcattatataaagctgtattcaagcccactgactggacccccttgtgaccctatagaattaa

SEQ ID NO: 300069 - DNA, 622 bp, Homo sapiens
agactgccgttgtttgaaaggggtgggctggaggtgagaaggtgggcaagagaagaaaacatgaaaatgttcttttcaattcataggctgaggacaatttcctgtgaaaagacaaacataggaactgctctgttatcactgttatttccatgcatctctatgagaggagacttgcactgaattccagggaaggggacttagttatacggcagatcaatgatgtccaagacagagaaacattgactgaaaaacgaagcacatgcgatgttggcttgagggtctattacaaaataatcagctgccctagtcaactgggaacacagagaggtcaaggaattttcagcaacagtaaaatataattttcttattaaagaaaaagttttgcctggcatccctaagagaaaatggattaacatgaaaggctyaggattggtgtatcattaggccatatacaacccacgtgtgcattatgacagtatttaataaggggccacaactgaactctaagtccagaaactcttttttgcacaggtagcaccaagagcaactcctgaagtcaggcattatataaagctgtattcaagcccactgactggacccccttgtgaccctatagaattaa

SEQ ID NO: 300070 - DNA, 608 bp, Homo sapiens
aattaaaaaaaatattataattaaacaacgaaacaccaaacaacttgattttaaaaatgaggaaaggacttgagtagacatttctccaaaaaagatatacaaacagctaacaaacatatgaaatgatgtttgacatcactaatcattaggataatgcaaatcaaaaccacaagaaaataccacctcacacccattagaatgggtataaaaaacaaagttttgggtcacaaaaatcaatatatacaaatcagtagctctgctatataccaacaataatcccttttacaacagctgaaaaaaaattaaatacctagaaatatacttaaccaaggaagtgaaggatctctacaaggaaaactacaaagcactgctaaaagaaatcatagatgacacaaacaaatggaaacacatctcaaattcaaggaagggaagaatcaatgttgtgaaaatgcccatactgcccaaagcaatatacatattcaatgcaattctcattaaaataccatcatcatttttcataggatataggaaaaacaatactaaaattcatatggaataaaaaaagagcccacatagsgaaagcaatagtaagaaaaaagaacaaatct

SEQ ID NO: 300071 - DNA, 561 bp, Homo sapiens
ccgtgacagcccgctacctctggaggtatacaggcaccatgtgcccrccaaccacgttgccctgacaattccctgtttcttaactaatatttgagttacatgacaagatggtctgcatttattgtccaatttgtttcttttagttattggttacacaactcttatatgctcctgtctctttacatgcctagtaattttaaatatcaagtattatacatttaaaaaaagtagaagttccagttgatgttattacccaccagggaatttcaactcttcctttcactgggcagatagggtgtggagtctatcacctggactgtgatgggttgaggctgggttgcagtatatttctagttcgcccttgttcttagggcttggtcctccagggtttttcatcaaagagtctttgggatttcttctcagtggtgaaacatggtaagaatttccactctgattttgagacctttttttaaaagcaactttattgagaaataatttacaaacgattacattcacctattttgagtgtacaatggtttttagtgtatttacagagttgtg

SEQ ID NO: 300072 - DNA, 599 bp, Homo sapiens
cagaattggattgttacatgttggaaacctttcaattggaatcaaatcaaaaggacatctttgcttggcacacttcaggggggcattatctatctatctatctatctatctatctatctatctatctatctatctctcctaccttgttcatcacagacatgcccagaacctaaaaaaaatcaaaggcaaaattagatactcaatgagtggcattgagagatatacccaacccaacaaaaggactcacccatcaacctgaaggacaatagtaaagcaggaggtagagccttgccaaggggggtcttgccaaggggaggggggcaattcacttcttccatttttaaagtgagaccttgtacatttgcagagtctttcccccaggtragtcatgagtaagctgcagaaggcagggtagagacttcgagtcttgtgttttcagccttcacaatcattttaaagaggctcaacagactttggtaaggaaaaagggtaaaggctcttagggaaatgagaagcgaaaaactataaaatgaaaagtcaaagggcagctaactctggaactgtgagtacagtgagttctgctataacatttgtgttga

SEQ ID NO: 300073 - DNA, 468 bp, Homo sapiens
cagctccttcaatcaagaaaggagtctattttcccatttatgtgaatctgggctggctttttgacttgctttggccaatagaatgtggcaaaaatgataatgggtcagttctgagcctatacctcaagagtccttgcatgctttgttgctatcaccctgagagttagcttgggctagcttgctagagtatgagagaacaagaasaacagaaatcagctgtgctagttaagatgcatcataggcaggttgcggtggctcatgcctgtaatcctagcactttggcaggctgaggtgggtggatcatgaggtcaggagatcgagaccatcctggctaacatggtgaaaccccgtctctactaaaaatacaaaaaaaaaaaaaaaaattagccgggtgtggtggcacgtgcctgtagtcccagctactcgggaggctgaggcaggagaatcacttgaacctgggaggcagag

SEQ ID NO: 300074 - DNA, 552 bp, Homo sapiens
ttccctttttaccattgttccaattcctttgatttctgcattggataatcttttaacaaatcatcacagtctattcttatttattctagaatgaagctaatacttagatagcccttctcccatttctttttccctgaggatraaggtgaaaaaaatacatggaaagcaccaaccaaaaataagtggaaagaattaacacttagatatatcaattaattaaataaaggcatgaggaaatagtgcttgagtaaatcatccatatggggccaaagagagagatgggaaatccaaataacagatgtggaatttgtttaatggtacttatgaatgagattcaatatatgcttactttaaaattataagtaaagttcaacaagtatttcagagtgggaaggtaatcatgtcaataataaatattcatgaatgtcactagtatagcagaaaatttattatgcctttttagtgtttctttttgtttggagtatctatgtaatttatattagcacttatttggaactgaactatccttatcagcttaaatttgttctactt

SEQ ID NO: 300075 - DNA, 559 bp, Homo sapiens
cgtgaacatgagttgtggctgatctggattaagatgtaacacatgggattttgaagatttagtatgaakaataatataaattatccaattttaaaataatgaatatatgttgaaatagtatactaaatatattggattaaataaaatataatattaaaattaatttaattgtttcttttcactcttttaaaagtggttaccagacagttttaaatgacatatgtgacttgcattgtatttctacttgacaacactcttctagagactggttaattcttaattcagcttcaagattgatttatttgagctttctacaaacctccctcatttttgttaacatggcaacctgtgctttctcttatcctgcctcttaccacatttggagaaattatgtgggtgcttcttacatctgtttctcccagtaggctgaaactctgtcaggggagggtcatatcttgttcatcattgctcttttacaacctagttcactgactgatatgacatagatgccacttaataatatttattgaataaaactatcaactatcatacttaaaag

SEQ ID NO: 300076 - DNA, 624 bp, Homo sapiens
ttttaatttattcatcgctgcaatcaaaacacaactttttgctaaaatcctttcagacaaagtaaattcactcattgaaaccaatactgcagatagttttaaaatccccaaatcctcaaaatagctgatttgctgtcattttatttcatttttcagtcgcctgcttgttacatcttcccattatttcttcctcttctcattgcatgaggctaacacaatatggatttgatttctctaagactctaagaggatcctaaacacgaattctcaaagtgaataggatggcatgtgctaactaattaagtactgtttctagatatttgtgagggagcctaaatctagcctgctaaggaattagagtgtctcactggatatgtggtagccatcccctttcaatgtaacttgtcaaatgaagctacccaatcccaggcctactatgttcccacatgatgttatcagacaaaaatattaataaggcagtaaaggtaaaatataaagctamagaagaatagatacatagaaataatacagaaacgttataaaaatttaaattttatggttttaatagtttaattgtagatgattttaatgtatactacaattaatctaaactttgatatttat

SEQ ID NO: 300077 - DNA, 621 bp, Homo sapiens
tattggattaaataaaatataatattaaaattaatttaattgtttcttttcactcttttaaaagtggttaccagacagttttaaatgacatatgtgacttgcattgtatttctacttgacaacactcttctagagactggttaattcttaattcagcttcaagattgatttatttgagctttctacaaacctccctcatttttgttaacatggcaacctgtgctttctcttatcctgcctcttaccacatttggagaaattatgtgggtgcttcttacayctgtttctcccagtaggctgaaactctgtcaggggagggtcatatcttgttcatcattgctcttttacaacctagttcactgactgatatgacatagatgccacttaataatatttattgaataaaactatcaactatcatacttaaaagttcagaaatttttttttgcccaaaggtgtttatcaaagtattatttatagtttttaaaacaggcaacaattatgttatagaaataggaggttggttaagtaagatgagacatatttatataagatattaggcagccattaaagatatatttgttacctcaatataataaatgacatatgtgaaagcttata

SEQ ID NO: 300078 - DNA, 621 bp, Homo sapiens
tattggattaaataaaatataatattaaaattaatttaattgtttcttttcactcttttaaaagtggttaccagacagttttaaatgacatatgtgacttgcattgtatttctacttgacaacactcttctagagactggttaattcttaattcagcttcaagattgatttatttgagctttctacaaacctccctcatttttgttaacatggcaacctgtgctttctcttatcctgcctcttaccacatttggagaaattatgtgggtgcttcttacatctgtttctcccagtaggctgaaactctgtcaggkgagggtcatatcttgttcatcattgctcttttacaacctagttcactgactgatatgacatagatgccacttaataatatttattgaataaaactatcaactatcatacttaaaagttcagaaatttttttttgcccaaaggtgtttatcaaagtattatttatagtttttaaaacaggcaacaattatgttatagaaataggaggttggttaagtaagatgagacatatttatataagatattaggcagccattaaagatatatttgttacctcaatataataaatgacatatgtgaaagcttata

SEQ ID NO: 300079 - DNA, 535 bp, Homo sapiens
gtgaggtgatgcctcgccctgcttcggctcatgcacggtgccctgcacccactgtcctgcacccactgtccggcactccccagtgagatgaacccagtacctcagttggaaatgcagaaatcacccrtcttctgtgtcgctgtcacttggagctgtagactggagatgttccaatttggccatcttggctccacccccctgagataaccctaatctcttatactctaatatataaaagagaaagaaatattagctggcaatgtcatatagaagtaattatgcctttgatgtcagtagacccatttcctttctttcctttttccttcctcctcactttctacttccttcctctcctcctgtctctcatgtcttctcctctcctttcctattccctggtctctgttttctctcctgttattattattttttactctttttcctttgcttttctactggtagtaaatacaacaacaggataatttccagtaaaattcactccagctgaattcagcacacatttactgactacttagta

SEQ ID NO: 300080 - DNA, 603 bp, Homo sapiens
ggtttggctgtggccccactaaaatctcattttaaattgtagcttgcataatttccatgtgttgtgagaggcacccagcgagaggtaattgaatcatgggggtgggtctttcctgtgctgttcttgtgatagtgaataagtctcatgagatctgacagttttataaagggaagttcccctgcacatcctctcttgcctgccaccatgtaagatgtgactttgctcctccttctccttctgctgtgattgtcaggcctccccagccacatggaactgtgagtcaatcaaacctcttttcttcatagatkacccagtctcaggtatgtctttatttgcagtgtgagaacagacaaatacaccagtccctggactgatacctgaaaaaagaggagataaggttagttgacctaaggatcatttcctctgccaagcaactttgttttcacattctttgtaccactaaaaacatttgcaatgctctttctaattctaaagcagcaaaattataactttaaaatattggaaccttgctatgcatggtttgaatacatctctcaaagtttatgtgttggaaatttaatcccaatgcaacagtgttgtgag

SEQ ID NO: 300081 - DNA, 645 bp, Homo sapiens
ttttgtttcaatttgtgctgacttcattgttggatataactttctccactgcaggaatatcaccaggctaattactaggaaatctctctcttttttttttggtatatggagtaatatgtatggatgaaaggaccttaaaattggaggatttttcaatctaaaattagatgctcatacaagagaacctctttcctactatagactcccttctccttcccctaatccccatcctgttcttagcagatggtgactgggcttatgctaaaaacttccagggacagagactttgctacttgtacacaggaagactattccattttgacrcaactcaaattactagaaagttcaaccttatgagacaatttctttaattttgaaaatcatatctttggccatacttctgttctttgtagtaggaaaaatttatgttctctcttctgtatagtggtatttaaaatatttaaaaagattttcagaaatgctctacacctcaaagattttttattttctagggaaaaagtttctaaatgatctcttaatagttcctttaataatttgatttccaactctcttactgtctttctcactttctctgaatgattgatagtgtttagaggcccctctatgttatcaataactgatcag

SEQ ID NO: 300082 - DNA, 406 bp, Homo sapiens
ggccagatcacatgcttattcaacatacgcactgtagtacacaaaactgaaaagatcagtggttttgtaacaaacagacctcgattcacattttggctctgctatttatacgatcagttttgtcatctctaaaatgaggattgtactttttatgattgmatgaagtatttagaacctagcaggcacttaacgaatggcaggtctctccctctgcaaacattttttctttcaattgtcttttcatctttcttcatggggttgttctttatttatcagactcatttaataatctctatctttaaataaatcatcacctaacattgtttggtgacatgaatcaaatacctaggactctttaaattctaccagagaggtgcagatgaacatattctaaggctatcatgcc

SEQ ID NO: 300083 - DNA, 600 bp, Homo sapiens
tccatttacctgaagcagcttttaaagcgttttccagttccttgcatccatgacttgaaaatttaacgacaaaatgccaacctgaggatttacatttcttttcttcgactgaattaaaatctaggggaraaaatgtaaaagagacatgtttaatttctgcattccttgaagatcttcagatatgagagtagggataagaggttgtttgctgctactatggccatctaatcaagagtgacatgatatgaacattttcaagtgctctagaagagtcaaagatcagaaaaaattgacttttgttattttccttctatcagcttcagaggggaggcagaagagatttctacataaaaaggtgcagggagtagaaattgaacaccccaaagagtgatatctttcacccatttacagtcagcttcttaggcataagataaatcaataaaagtaggagcatgacagcttcttccagcaaatctacttaaggctcccaaagctggcttctgtttccacaggaattaactcctaaaattcaagttctactggttcaatctctccatctttaacatctgtgacttccaacatctccttcccatgacttat

SEQ ID NO: 300084 - DNA, 600 bp, Homo sapiens
tccatttacctgaagcagcttttaaagcgttttccagttccttgcatccatgacttgaaaatttaacgacaaaatgccaacctgaggatttacatttcttttcttcgactgaattaaaatctaggggagaaaatgtaaaagagacatgtttaatttctgcattccttgaagatcttcagatatgagagtagggataagaggttgtttgctgctactatggccatctaatcaagagtgacatgatatgaacattttcaagtgctctagaagagtcaaagatcagaaaaaattgacttttgttattttccttctatcagcttcagaggggaggcagaagagatttctacatmaaaaggtgcagggagtagaaattgaacaccccaaagagtgatatctttcacccatttacagtcagcttcttaggcataagataaatcaataaaagtaggagcatgacagcttcttccagcaaatctacttaaggctcccaaagctggcttctgtttccacaggaattaactcctaaaattcaagttctactggttcaatctctccatctttaacatctgtgacttccaacatctccttcccatgacttat

SEQ ID NO: 300085 - DNA, 474 bp, Homo sapiens
ttttggggggttgatgagaaatttgcttctaaaaatgatcagccacagacaaaagtagagccayaactataaactggagtaaagttagggtatgagagaagaaggaggtgtcattaatgtgacagcaccaagctccaggtggggatagatcataaagatggcgcagtctcaggcaagtgatgggttcaggctgtccaactcactgaaattgcctcaaccctggcgatgtcatcttctaactcagtctccagtttgtctattaaggcttgcaagagtttcccactggaggctggcttttcagccagcgccttccacaatgtctttgtgtccctagggtggcaaagcaggaaattggtagataaggcacaacccctcgggctgtaagcttttccatctgactcactctaaaatcacattatgactaatgacaatttcaagggcagatggacatgctgccatgcctggggataagaa

SEQ ID NO: 300086 - DNA, 557 bp, Homo sapiens
atttttctcagttatcattatctgatattatgcttatttttggatttcctttactaagatacaagctcagtgaaacaggaattgtattttctgctttcttagtgcctagaatagagctttacatatggtaggtgctcaggagaaggaaggtaaatgaatgcatgactgaatgagtgattgaattgattggccagtcctcacaacaaccacaaaatggtcttttgtttttgtttcttgaggatgaggagactgaacttcaatcagtgcacacagagtgcatctgattaactccaaagctcttgttccttccactccaacccacagcatcccacattttgggaaaggacacttggtctacaaagtttcccactatstgaaatgatcagtaatgagtgttgactaggcatgtgtactctaagttagaaaatgacaggaccacgggtccctcattcagcttgaatatctatcttctttgcagtggggagtatgtagcttactcatttggaaatcaatccagaatctttacatcccctggccactccatatttattacctta

SEQ ID NO: 300087 - DNA, 621 bp, Homo sapiens
tttaagtttcttgctgataacttttaggggaagcataatgttgatcttctcccatcctaccctcctactccacactatatgtatggaatgctgctggggctgggtcagattcaagaacgtttcactaacctataatggcaggaagcgagctttcatggcgaagcaaggtggaatttgaagtctgagcctggggrtggatgaagggtaatcacactcatttagggtctctctttccttacccttctcattgtcttccacccaaggggatggtgaaaaactcaagcctgggagagggcttggagctcaggccttgaccagctctgctctagggattagaacaagatttcctgatatctccttcccattgtcagtatgtgcttcctggcccactctggctctatcatggaagttagtagaaaacagaatgggccaggctgatgctgaggtttgagggaaatggggaggagcacatgttctgtttcgactcatgatcctattccttcctccaccttgcaaaaacaaaacaaaacaaaaactttcatatgaggaagtctgattcaacagtgcacaaatgcggctgtatatcataatcacttgtagaaattacaaaatagactctta

SEQ ID NO: 300088 - DNA, 578 bp, Homo sapiens
ccttccccttgctagaatttataactcctctgaattagggaccaaggaagacataatcgaacttagatcaaaagttaaaaatgcaaattttgtcattaatttatcttggaaattgcaagacatttaacatttgcaactaaaatatgagtataacacaccttctgtttcttattattatgtgtgcattcattttactctacaaaatataattgggatacggaaaatgctaattacagccatgtctgtttaaccatcttgatttaaccaccttcgttttcctcatgcaaataaacatgactgcttcctattgctttaaacaaagcctgacataccttttgttttatgacttgaggaagattagtcacagattctgcccaggcagaatatcgccttttgtttccagcaggattgtccagctctaggtaastaaggccagatatgaagcctgcacctccccctctgatgaacggttctcctcgcaatacattgttctgggttcctatacagaagaaagcaaatgaaaagtgaaaagtctatcaagtatttaaaaaaactatcaaattgtatgacatcctgga

SEQ ID NO: 300089 - DNA, 552 bp, Homo sapiens
gacttcctcggcctctagcttcagttggtttgatcagtggtgagcactgactagcaggagactcraggcaggaaggacagtgcagttgaggtgtttatgcccctggctcacgcctgtgggacctctgaagtccctaaaatgagagtgtcagctcctcctcagggccatctccacacagccctctctgtctccagtttttcctgaatgcccctctccttactccttggacctgggtatggctatacggtcaagctgttagcagtctaggaatactgccatgggacttgtagtttcctttcctctgttcacatttttgtaaatatttctgctaataaagcttttcttgtcctaatttaattgtgccatctctatcctactaggaccatgacacagacatctattaactacttcagagatatcctcctacaatggaatgatttcaagttggtggcattcttaaccatgcaaatctagagaagatgcttcaagaatcaacaaaagcagctgctgtttccctatcagtattgctttaagagtttatgtgccaaagga

SEQ ID NO: 300090 - DNA, 552 bp, Homo sapiens
gacttcctcggcctctagcttcagttggtttgatcagtggtgagcactgactagcaggagactcgaggcaggaaggacagtgcagttgaggtgtttatgcccctggctcacgcctgtgggayctctgaagtccctaaaatgagagtgtcagctcctcctcagggccatctccacacagccctctctgtctccagtttttcctgaatgcccctctccttactccttggacctgggtatggctatacggtcaagctgttagcagtctaggaatactgccatgggacttgtagtttcctttcctctgttcacatttttgtaaatatttctgctaataaagcttttcttgtcctaatttaattgtgccatctctatcctactaggaccatgacacagacatctattaactacttcagagatatcctcctacaatggaatgatttcaagttggtggcattcttaaccatgcaaatctagagaagatgcttcaagaatcaacaaaagcagctgctgtttccctatcagtattgctttaagagtttatgtgccaaagga

SEQ ID NO: 300091 - DNA, 604 bp, Homo sapiens
atcctctaaagttctaaatcctcagctgacagttttgccattttgctccattttatatataaaacaagcagtgctcgagtagtcctgcagccttctccactagccagattagaacactgcttaatgccatggctgtcagccctagtgacccagacaaataacaggcagcagatggactacatcgaaatgcaaacaaagacccttaactcttggtaagctacaccttccatccaacagacactattatctaagaaattatcccttatcattaataaaataaaacagagaaatgagcaaaggcggcacttacccacattcgtagggcattttacaaacacatcttgaattctgcagtttctcccagcgctgacatttaggcactgcctgtgttaacggattttctaaaaaaggataagggagatgtggtcgttaggagaaaagcctcttcatagtaaacaaggtattatatgaattgctggaccagggtctgtagtattctccaactgcaatgcatttgcacagtaacaatagtaataataatcaaggtgtgatacattttacaagctatagagagtttctagagycacattacaaataactgcat

SEQ ID NO: 300092 - DNA, 567 bp, Homo sapiens
atactggatttttgggtttccacattaagaacaatttcaygaatcacaacacttttccttcaataatgtctgctttaaagtgttaaatgaaaatgctttctaaattttcaatttcagaaatactgataaactctttgaaagcccaaaaatgaaacatacagaactttaaataaattatgatctcaactctgtacttatgaaaaatgcaggggaaaaaaatctagaggaaacaaacaaacaaacaaaaaacagattttaaaaatcctttattgtcttggcaccataacagatataaagctaatctttcacaaggatgatttaagttaaaagtttcagaatcaccaggctatccttgcctttccttgctttcatgagtctttctgtgccatgtgaagaaaatctgttactcagtctacaaactgaccctatcttaaggagcaagaatggagggaatgactcacagctatggtgatacagtaccatgaaggtcgccacaaggactctcacttgcctgggtacaagtgtccttggatagacatggaagccactcacctttttgtacacagc

SEQ ID NO: 300093 - DNA, 456 bp, Homo sapiens
atggaatttttttttagtttatgtaaaagcataagaaaagtcccaagaaagtgaagatctggggtgccaccgtctaagcagaggaaagaggcccagagagctaagctcttccccttaagggaaytgccaactctgaaaatggcagctgagggccgagaagctgagcggagctttacagcaattcatgaggctacaaaaatttgagttcaatgatcacacacaaagaagatccctaagaaataccacatggttttgattgaaattttatagagctacaccctaggaataatgctgaactagaattaaaccacatgtaggttcatcatggtcaagcagttaaaaaccagacagaaaaaaaacaaaataaaaaacaaaaacaaaataaaaaacaaaaacaaaaacttgaaagctgtaaagcaaaaaaaaaaaaaaaaaaaaaaaaaaaaaaaaaaaccc

SEQ ID NO: 300094 - DNA, 586 bp, Homo sapiens
ggtagaaagcccataccttcagttggaatcccttaatggccacatccttggaatagagataacccagacataagccagcctcactggttgccataaacaaaagttagtcttctctagaggaagatagcatcatccaatttttaaattttcatacgtaaagtctgacattcaattaaaactaatttaacattcaaaaagacaasaattgaccaaattccaaccaaaaaaaacaatagaaacagacttacagtaacagacttacctaaagaatgaaattaacagatacaggccctgaaacaactgaaattaatatatttttttaaatgacaagatggagaattacaacagagaattagaaaatataaaacagtaaacataaatgtttgaagtaattgatgttatttactctgatttgcttattacacactgtttacacatatcaaaacatcgcttaaaaactatattttaagtgaaaaattttaatatttttaaatataataatgtaagaatataggctcattcattataataaatataccacattaatggaagatgttaatacctaatagggaaactgggcgggaag

SEQ ID NO: 300095 - DNA, 648 bp, Homo sapiens
catcagtcaatgaatgagtggataaagaaactgtggtatatatatacgatagaatactactcagccataaaaaggaattaattaatggcattctcagcaacgtggatgagactggagactattattctaagtgaagtaactcaggaattaaaaaccaaatattgtgccaggcatggtagctcatgcctgtaatcccagcactttgggaggccgaktcaggcagatcacgaggtcaggagttcaagaccatcctggccaacagagtgaaaccccatctctactaaaaatacaaaaattagccggtcatggtggtgtgcacctgtagtcccagctactcagaaggctgaggcaggagaattgtttgaatgttgaacccaggaggcagaggttgcagtgagctgagattgtgccactgcactccagcttgggcaacagagagagactccatctcaaaaaaaaaaaaagaaagaaaaccaaacattgcatgttctcactcacaagtgggagctaagctatgaggatgcaaaggcataagactgatgcaatggactttggggattcagagagaaagggtgggaagggggtaagggataaaagactacaaactgggtgcagtgtgtactgcctgagtgacgggtgcaccaaaat

SEQ ID NO: 300096 - DNA, 567 bp, Homo sapiens
acttctttgattaaatttattccttggtattttattttatagcttttataaatggaatttatttcttgattttcttttcagaaccatctctgttagcatgtaggaatgctgctgatttttgcatgttaatttggtagcctgcaaatttactgaattaatttatcactgctaagatttatttagtgtagtctttcatttttttttttttttttggagacagagtcttgctctgtcgcccaggctgaagtgcagtggcatcattttggctaactgcaacctcagcctcccaagttcaagcaattctcctgcctcagcctcctgagtagctgagattataggcgtgcaccaccacgcccagtgaagttttgtatttttagtagagatggggtttccccatgttgggcaggctggtctcaaactcctaacctcaggtgatccaccctccttggcctcccaaagtgctgggattatgggcatgagccaccatgcccagcctacatttttttytaaatataagttcatgttgtttaaaagcaagaataacttgacctcttccctttaaatttg

SEQ ID NO: 300097 - DNA, 577 bp, Homo sapiens
tttttttttttactgtgggtgataacatctgggggcactaagctcagagcatcacttttcatttctccttctcagcttttacgaacaaaaatcttgtaaataatgtcattaaaaattcttttcagaccttccttggatgtatgtgctcaagatgagagaagcaaaaggatactgcctctgacagtttgcaagatgcatgttctccactgtcagggtagaaattacacccttactggtagggacagctgtactctgcctgcctcagctgagaaagcttgtggtgcctgcccactgtggggaaaatgtgatggtaaggggcctttcatatttgtaagtataagaatgctaaagtcacagtactgaggatttaaaaaatgtggtttcyagtttagcagtgggccgaagaagatacttgaggatgttaaagactcagactgatttgacatgcactgacctctcctatacccctcactggagaagggcacagatcacagacctcagaggataagattcccacattcctgatgtggaaatgttctcccaaacaggggtgattccatgccaccttcatgatttt

SEQ ID NO: 300098 - DNA, 633 bp, Homo sapiens
gtgtactcattttttaaaagtctgacataaaaataacttaaaaatgaaaactttatatcatgtccttaaaaggaggtatcacttgccataaatactaggtaactataaaagttatatgtaatggaactaaataaagttgtggactctagccagatactggtccaacattgactatgctgtttctctgtgagtttagcaagtgttagaggggtgttaaaaacatactagcaccaagctgacactttcttctagaagtaatcagacggatttgaagagaataraagaagaagttactttctcacgttgtgattcaatatttgctaacactatgtttaagtagtacttacagtgatcttgaactcccccaagagcacagcaaacctcccatgatttgggcagtactatgaaagtggaatggctgggtctccagagccaagtcactgtctgggcttccctatctgtaaatttaggagctggactctatgacttgtaaggtctctgtcgtctcttcactctctgccctcctggcctgtacccgctggcacctgtcccctcactccctcaaggtttgcagcacagactgatgacatacatatgtgactctagccatgtctgggtcacttttggttaggt

SEQ ID NO: 300099 - DNA, 633 bp, Homo sapiens
gtgtactcattttttaaaagtctgacataaaaataacttaaaaatgaaaactttatatcatgtccttaaaaggaggtatcacttgccataaatactaggtaactataaaagttatatgtaatggaactaaataaagttgtggactctagccagatactggtccaacattgactatgctgtttctctgtgagtttagcaagtgttagaggggtgttaaaaacatactagcaccaagctgacactttcttctagaagtaatcagacggatttgaagagaataaaagaagaagttactttctcacgttgtgattcaatatttgctaacactatgtttaagtagtacttacagtgatcttgaactcccccaagagcacrgcaaacctcccatgatttgggcagtactatgaaagtggaatggctgggtctccagagccaagtcactgtctgggcttccctatctgtaaatttaggagctggactctatgacttgtaaggtctctgtcgtctcttcactctctgccctcctggcctgtacccgctggcacctgtcccctcactccctcaaggtttgcagcacagactgatgacatacatatgtgactctagccatgtctgggtcacttttggttaggt

SEQ ID NO: 300100 - DNA, 633 bp, Homo sapiens
gtgtactcattttttaaaagtctgacataaaaataacttaaaaatgaaaactttatatcatgtccttaaaaggaggtatcacttgccataaatactaggtaactataaaagttatatgtaatggaactaaataaagttgtggactctagccagatactggtccaacattgactatgctgtttctctgtgagtttagcaagtgttagaggggtgttaaaaacatactagcaccaagctgacactttcttctagaagtaatcagacggatttgaagagaataaaagaagaagttactttctcacgttgtgattcaatatttgctaacactatgtttaagtagtacttacagtgatcttgaactcccccaagagcacagcaaacctcccatgatttgggcagtactatgaaagtggaatggctgggtctccagagccaagtcactgtctgggcttccctatctgtaaatttaggagctggactctatgacttgtaaggtctctgtygtctcttcactctctgccctcctggcctgtacccgctggcacctgtcccctcactccctcaaggtttgcagcacagactgatgacatacatatgtgactctagccatgtctgggtcacttttggttaggt

SEQ ID NO: 300101 - DNA, 593 bp, Homo sapiens
gactctatgacttgtaaggtctctgtcgtctcttcactctctgccctcctggcctgtacccgctggcacctgtcccctcactccctcaaggtttgcagcacagactgatgacatacatatgtgactctagccatgtctgggtcacttttggttaggtggtcaccattgtctgctggctgaccttgttactcatctttggaagactcctggctggtgtattccaaccatggactttccatgcacagactccttgcctccttaactcatttctggtttgttttttgggatttgtagccttttgcatgccatgctctctctcaaakcaagttaagttctctttttttctctctctctttgtttgagtcttgacttggttctttgttgagggcttctcatttgacctcagttgctggcttatatggacagcagcatgtatgtaggagatagttgaagagctcttgacttggataaaaccaccccatgtggtctaaccaatataaagcctgctaccaacctcaaaacctatttctttggagtggagcaaaatgccccaatttcctggtcctactgcttttccaggggataatttatta

SEQ ID NO: 300102 - DNA, 561 bp, Homo sapiens
tgtattttccattataagtcttgatccttactgcctttcctctttctagttcttcaacacaggctgatcatgcactgtgacccaaaaggtgaactcccactgttgcttgcagacatctctttggctggttcccttcttgctgtgtcacatcttttcttgctctgatctgatttctgtatcagtcctctccaaaatggagtgctttttactctargagttatgcagtattagaagctttgtatttatttctctttttggttaacatgtccttcttttgtgcaaattgcatgatgtgtatcatttacaaacatagttctatacatatgcaatttgcagaccatgcagttatatattgcactaaaggcattgtaatggggtgcacaatcaaataacattgggagcctgctgctcatagttttgtcttggtacaggaaccctggcttctattctgcctctgctcttctggtcttagcacttgcatttttgccttttcctaagcaatgctaactctttgccctacctgtagccctgtggactccagttctaggcaacagcctcttg

SEQ ID NO: 300103 - DNA, 637 bp, Homo sapiens
aaataccttggcatcattattgaaaataaatatgaaaaataacaatatgggttaatttttagttttgtaggtataagaaatatatttcctttttctatcattatttgatcttttctttttactaaggaagggtgctagccatccagtcttttcttcattcctgttttttagactttctatctactgaaaaacgtttggaagaaagctaatctcttttaggttagctgagatrttcatgactttcaaataccttggcatcattattgaacataaatatgaaaaataacaatataggtgaatttttagctttataggtgaaaaaaatatatttccttttttatcatttcaacattatgacaaagataaggaaaggcacctgaatcttgtccagcagccctcaggggtgatctcaggtagatttggaaggtggagacctttacataggatttgtcacattagaaaatgagtgttgagtgcaaattaaaaaaaaaattttaaattgacctcattaaaatttgttttcatcttcctttgctaactttattttgtatatgttttcaacttcattgactttgctgcctttccttctcagaggctgagctggtagtgagtactatatattctcggtgtgtcctaa

SEQ ID NO: 300104 - DNA, 467 bp, Homo sapiens
ggtctcatgaaactgcaattgagatgtyagctgggctacattctcttccagtggctgagccagagaggaatcttccaaattcactcatgttgttggcagtgctcatttctttgtggttgcaggactgggaactccagctttttgctggctgttggctggaggctgctgtcagcatctagagtctcccacagttcacagcttgggagctgtttctcccaggctggcaggagagtgaatttgtagagcaagtctgcctgcaagatggggtctcatatgatatgacaatcatattatgtttaccatattgtaccctttggaagcaagtcacaggtcccacctacctccaaggggagattacacaaggactccaccaccaggagctagggatcactggggtcacctacagtctgtttgctgcactaggttaagttcaggtggggccttaaagcggctcagtgcttcttcag

SEQ ID NO: 300105 - DNA, 542 bp, Homo sapiens
cattagaaataaggatttgtgcatttttgcagtttacctctattaattatgactattaaaatattgagagtttacacgtgtcagacattgtaagcacctcacgccacttgtctccttaaagccttacaacaaagttatacagaaggaattgttaatgttcccattttccagaggagtacactgaggcttggagaggttacataacttacctgaggtcacccagccaggaaacagtagagccggactccagacccatgccacatgaccacaacaagtgggtggaggctgcctgcagaactgaacctttgggaagcatgatgaccctttccacatctacttttgtaaaagcttcatagtctgagaaaatgcaaaggggcactgtgcttgggttctggaatcagactaccctggctgaaacccctactggaaagtttactggtggggagacctcaagcaaggcacttgcctgttctctgtgaacgtgagcgggcaccgactttggctggcrttcagtgtagcatcagagctgcccaggatgtaag

SEQ ID NO: 300106 - DNA, 504 bp, Homo sapiens
agcttaaaaaaacaacaacactgtagtgtcagaaggcagaaaaaggtgaatagcctttgaatatyttttgactaaacaattccatgtttgaatttatgctaaggaaatactggacaagagaacaaggatgtacataaaatggtatttgctgtagcactttataatatcaaaaaattagaagtaatctagacatccagaaataaggtcatacttacataaattatagtgtgtgaccttatttctataatttagtagagactgtttagtctctactaaaaatacttacataaattatagtgtgtagtgcataaaatactatgcactcatttatagtcatgctgtaagcctggcacggtggctcacgcctgtaatcccagcacttggggatgctgaggcagcaggattgcttgagctcaggagttcaagaccagcctgggcaacatagtgagacctcatctccacaaacaaacaaaccaacaaaaatcaaaaattagccaagcatgg

SEQ ID NO: 300107 - DNA, 538 bp, Homo sapiens
ctttggaaaattctggtgcaaagggacgctcaaggccctcaagatgggaaaccagagttccacgcctggctcttccactgatggccttgagcgggtcactctgaaactcctgctccctagcactctcctctgtacaggggttccatagaatttcttgttggaccgcagccctctgctgtccaccaggattacccaggacagtcggtggctgagcagagagtcagccaagggtttccattccctgggcccttaaacccattcctcttacctgagttytccagcttgaaccccccacgccaccccaccctgtacatggagtcagaaagctgaagtttagagcaatgacaacctctctccactcctctttttccctccggagcatctacgcatcaagcctggatgacatcaaagaaaaaaagctgcttcacgtctccctccaccctccgtcggtcactctgaatcacactcacatagagagaggatcagccaaccactccagtgtggtttaaaggcaggaacactacagtagaagttcaaa

SEQ ID NO: 300108 - DNA, 538 bp, Homo sapiens
ctttggaaaattctggtgcaaagggacgctcaaggccctcaagatgggaaaccagagttccacgcctggctcttccactgatggccttgagcgggtcactctgaaactcctgctccctagcactctcctctgtacaggggttccatagaatttcttgttggaccgcagccctctgctgtccaccaggattacccaggacagtcggtggctgagcagagagtcagccaagggtttccattccctgggcccttaaacccattcctcttacctgagttctccagcttgaaccccccacgccaccccaccckgtacatggagtcagaaagctgaagtttagagcaatgacaacctctctccactcctctttttccctccggagcatctacgcatcaagcctggatgacatcaaagaaaaaaagctgcttcacgtctccctccaccctccgtcggtcactctgaatcacactcacatagagagaggatcagccaaccactccagtgtggtttaaaggcaggaacactacagtagaagttcaaa

SEQ ID NO: 300109 - DNA, 538 bp, Homo sapiens
ctttggaaaattctggtgcaaagggacgctcaaggccctcaagatgggaaaccagagttccacgcctggctcttccactgatggccttgagcgggtcactctgaaactcctgctccctagcactctcctctgtacaggggttccatagaatttcttgttggaccgcagccctctgctgtccaccaggattacccaggacagtcggtggctgagcagagagtcagccaagggtttccattccctgggcccttaaacccattcctcttacctgagttctccagcttgaaccccccacgccaccccaccctgtacatggagtcagaaagctgaagtttagagcaatgacaacctctctccactcctctttttccctccrgagcatctacgcatcaagcctggatgacatcaaagaaaaaaagctgcttcacgtctccctccaccctccgtcggtcactctgaatcacactcacatagagagaggatcagccaaccactccagtgtggtttaaaggcaggaacactacagtagaagttcaaa

SEQ ID NO: 300110 - DNA, 597 bp, Homo sapiens
tggggttttataccatagttccaggatttccatttctcctgccttgatttttctcttgggatgggctgtctgcatgcacagtggcctgccagcacttgggaggggccgcatgcacagtgtatttactgcagttgtgtccatgctcacttgaggcctttttcccttaccagtcgagccttcctagaggaaggtcacataccagttaaatgccactattttgcctcttagtgtgcacgcttaagcccactcacccaactcctgagatcttattgggaagctgctgatcactagcttcagatgttttctatcttttgagagactacctttcctgggcactggctgttaccaattcttattttagagagatggttaaaaaacaacctgatgatcacctgagggtcacctgacattcctgggtgggggcctttcctgctctgctcatgtgtgcctaactacctactctaatgtgatcattccaayatttctatgatgtttagttctaaggcttgctctgcctcttcacattttattttttgcctttagtatgcctttttttttctcttgatagctggacataatgtattgagtaaaatgaat

SEQ ID NO: 300111 - DNA, 577 bp, Homo sapiens
agaagtatttatacaatgaggtagagtataaataagtagagacatttttataggtcaaaaataaaatatcagcagtttcatgtagttcagcctaataaataaatacataatgtaatgctaactttatgacttaacaccctccttgctctcagaaaaagaccrcctaagatcagggcaagcctacatgcaaataagggggcaaatcagtgggagaagtgccatagaaatatgtgcaaagtgtgatgatattagagaagaaagtgactagttatataaagaactcgttaaggaagtgataatcattgggaagagaaaataaataacttctagacagaggaagtgacatgcaaagaggcagaaaaattaaagaaaatgttatgtttagaaaagcccaagaatataggagaagtaaaagaaaggttagcttaaaatgaggttataaacatatatagggtcagactagagacaactttgtatgtcctgccaaggaattttgactttttgctgaaggcaacttgaagttactgaaggcctggtgtgataggatcaactctgccttctggggatgagaaaggaa

SEQ ID NO: 300112 - DNA, 577 bp, Homo sapiens
agaagtatttatacaatgaggtagagtataaataagtagagacatttttataggtcaaaaataaaatatcagcagtttcatgtagttcagcctaataaataaatacataatgtaatgctaactttatgacttaacaccctccttgctctcagaaaaagaccacctaagatcagggcaagcctacatgcaaataagggggcaaatcagtgggagaagtgccatagaaatatgtgcaaagtgtgatgatattagagaagaaagtgactagttatataaagaactcgttaaggaagtgataatcattgggaagagaaaataaataacttctagacagaggaagtgacatgcaaagaggcagaaaaattaaagaaaatgttatgtttagaaaagcccaagaatatmggagaagtaaaagaaaggttagcttaaaatgaggttataaacatatatagggtcagactagagacaactttgtatgtcctgccaaggaattttgactttttgctgaaggcaacttgaagttactgaaggcctggtgtgataggatcaactctgccttctggggatgagaaaggaa

SEQ ID NO: 300113 - DNA, 623 bp, Homo sapiens
ctctaccactgaggggaaaaatagctggagtgaaaatatttatcagggttctaccttgtcacctgaacctgatcactgacatcttttgaagttcttggtatattcaaaacaaaataatctttttggaatcttaagagttagatgggaccttrtgggtttcaacatctaaactcattttctatatgagaattttctaatcatttaataaacttgaaagtggtcattgagtcttgtgcttgaataggcccttgagcaaccaatttagtctcaagacagattgttccattaaaagaagggaaagtgttttgctattgtttaccattatgaagaacaatacttgagaaatggaagaaaaaaagagtctggctagcaacctcaaataaagtctttgcaattttaaactaaaatacctataagatatatgactcacgatagtggaaaaatgttatttaaaacaataataaacaataactacttccactttctaagaccttagtgcatttgggaggtagtttatatcagtgtgaaagcaaatctctgctgacctcttctatgaaaaagtttaatacaatatttcaaagtctttgccagttcttcagtcttgtgtttgaaccgagacacta

SEQ ID NO: 300114 - DNA, 564 bp, Homo sapiens
gacctttttccccacgtctgggccaattgagaaatagaatctgaaatcaaggatcaaaatatcagcttttaagtaaataatctgctttaccttttaaggtaaacttttatttatttatgatcatgagattcacttgagttgttgcatgtagcagatcttcatattatctgtattcattcattttaccttggatggacatttgtatccttgtatgtgggggctttttattaatacttctatgagtatttttgcatataaatctatgtatatttctgttgggaatggaattgctggctcaaagggtatgcacatattatgctttaactcygctaaacaggttttcacagtggttatatcaatatatgaaagttgtaattgttccacatccacattaacatttggtattgtcactctgttccactgtaagcatcctagtgggtatctactggtatctcactgtgttttttttccttgagtgcatgtgtgtacatgcaggatgtgcatatgtgtgtacatgtatcattgtggttttaatttgcctttccataatgactaatgtcatac

SEQ ID NO: 300115 - DNA, 614 bp, Homo sapiens
aaatctaagcttgaattttgacatctttcatttgtatttgtttttcgtaggcaacttagttaacttctccatattttatttacttcatrcgtactagaatatggaaggtccttcctagcacttaccaccaactatgtgtctgtttttttctctgcctttattagaatataagcttcgtgagaaagaagggtagagtctggtttatataccactgtgtccccattgcttagagtaagtcaggcatgtaggaaggcctcatatgtacttgtttaataatttttctataagtagcacaaagtccatgtctgctacgtagtaggcatcaacaactattctttcagtcggttcttattattcatggtaattgtgttctataatgtcatcacaaacaccgaattaagtaactactgaaccactgctcctaggggaaatatggggttgggttcccttgggtctctggtaacattttcttcaatagaacaatatataccttgttttatctgtgtctgtttgaagaaattatgtcttatatatgttgttgattcattaatattgaactaacagccagcagcactataacctatgcctgaagtaacttcatcaaacacatgtgt

SEQ ID NO: 300116 - DNA, 614 bp, Homo sapiens
aaatctaagcttgaattttgacatctttcatttgtatttgtttttcgtaggcaacttagttaacttctccatattttatttacttcatacgtactagaatatggaaggtccttcctagcacttaccaccaactatgtgtctgtttttttctctgcctttattagaatataagcttcgtgagaaagaagggtagagtctggtttatataccactgtgtccccattgcttagagtaagtcaggcatgtaggaaggcctcatatgtacttgtttaataatttttctataagtagcacaaagtccatgtctgctacrtagtaggcatcaacaactattctttcagtcggttcttattattcatggtaattgtgttctataatgtcatcacaaacaccgaattaagtaactactgaaccactgctcctaggggaaatatggggttgggttcccttgggtctctggtaacattttcttcaatagaacaatatataccttgttttatctgtgtctgtttgaagaaattatgtcttatatatgttgttgattcattaatattgaactaacagccagcagcactataacctatgcctgaagtaacttcatcaaacacatgtgt

SEQ ID NO: 300117 - DNA, 614 bp, Homo sapiens
aaatctaagcttgaattttgacatctttcatttgtatttgtttttcgtaggcaacttagttaacttctccatattttatttacttcatacgtactagaatatggaaggtccttcctagcacttaccaccaactatgtgtctgtttttttctctgcctttattagaatataagcttcgtgagaaagaagggtagagtctggtttatataccactgtgtccccattgcttagagtaagtcaggcatgtaggaaggcctcatatgtacttgtttaataatttttctataagtagcacaaagtccatgtctgctacgtagtaggcatcaacaactattctttcagtcggttcttattattcatggtaattgtgttctataatgtcatcacaaacacygaattaagtaactactgaaccactgctcctaggggaaatatggggttgggttcccttgggtctctggtaacattttcttcaatagaacaatatataccttgttttatctgtgtctgtttgaagaaattatgtcttatatatgttgttgattcattaatattgaactaacagccagcagcactataacctatgcctgaagtaacttcatcaaacacatgtgt

SEQ ID NO: 300118 - DNA, 614 bp, Homo sapiens
aaatctaagcttgaattttgacatctttcatttgtatttgtttttcgtaggcaacttagttaacttctccatattttatttacttcatacgtactagaatatggaaggtccttcctagcacttaccaccaactatgtgtctgtttttttctctgcctttattagaatataagcttcgtgagaaagaagggtagagtctggtttatataccactgtgtccccattgcttagagtaagtcaggcatgtaggaaggcctcatatgtacttgtttaataatttttctataagtagcacaaagtccatgtctgctacgtagtaggcatcaacaactattctttcagtcggttcttattattcatggtaattgtgttctataatgtcatcacaaacaccgaattaagtaactactgaaccactgctcctaggggaaatatggggttgggttcccttggktctctggtaacattttcttcaatagaacaatatataccttgttttatctgtgtctgtttgaagaaattatgtcttatatatgttgttgattcattaatattgaactaacagccagcagcactataacctatgcctgaagtaacttcatcaaacacatgtgt

SEQ ID NO: 300119 - DNA, 535 bp, Homo sapiens
gcacattatgtatgatttctcttgcatttaggaaaaacagacaacatttcagaactatatttggaggccatttgaaacagcaaaatctttaacaaaaaatcataaaaatgcaaaaaacgtggcactaacttgttatgagaaaaacatgggactcaacttcctctcctccctccaaacttgaaagttgctgagagaccacagagtgagttggataagtccagcttgatgagtagatgagtttaacaggacttacatacagggcactcctggatggtggcaggacagctctagagatctgtagcaccacccatctctaaactgctttcaagctcattttctggctctttgcctgctgtgtttgagtgaggagattgatatrttctcagatattctctgggatgctgggttctcagaaacacctgcttcttggctgggcaccacggtcgtggctcactgttcagccttcagggataagacagcagacatatgcctttaaatggcctggtgggggacctgtcacactacatgaatagac

SEQ ID NO: 300120 - DNA, 586 bp, Homo sapiens
ttttttggtacttcatcagagtcttgcaaacactccatgagggaaatatcttggatcagttcccatttagagataaagaaaccaatgttattaaaatacagtgatgtaaccaaggttgcatacaataaaaatgacagcaagaatttgaaacttgtgagtgttctttacatgacaaaacattatctatcatatactcagcaaactcrtcaataaaactctgataaagcttccaaaccacataaaactatgccctcaaaatttctaaaatctgcatgcctcccaaggtttgttctctccaaaaccaacctaggagcctgttaagaacccagaatgtttgctttagttaaaccaaaacaccatagattaaataacagccagtgaataacaaattctaacatggttagcataagagcaagagcaaaatggaaaaatagaatttttgcttcttcacagagactggtattatccatgaaaatcaagcatacagtttcagggtgccaggtttcttaaagagcaagaaaaaaatgtaaccctattctcagccaggctgttcagttttatcttcccatagactgaggtcatttaa

SEQ ID NO: 300121 - DNA, 585 bp, Homo sapiens
atcatgacttgttaaaatgagagtatataaaggcttgataataaattaaaactggctcaaatgagtccacrgggtacatgggcctacctagtagtcatttctctgatcccaggtatgacaagctgagtaacagcacaacacttacattggatctgtggagtgaaatctgtcatagcgtgaaattctaggtggaagcctctgatactgcaaaactcccatctaagcgagcaaaaaaataaaaaaataaaaaaaaaacaccatatcccatgaggttggcagaaattagagtcaatgtaacagagtgtagagttggtgattcctgccatttcttgacttaattcaacactctggcccctgaacaagatgaaagaatcttggaaaatgggattatattatgtcagacttaaccaaggattaaccctgattgtagccacagtcactatgttagatgaaatatctttgcttgagcagattaaaatagccccagatagtgggaatatagccactgaattatcaaatgtattctttttcattactatcagagtaagggatccgaaatagtttgaattcagacaacactatcta

SEQ ID NO: 300122 - DNA, 526 bp, Homo sapiens
taaacacatcaatttaaaaaaaaaaggacagtctttcagattagattaacaaaaaaaggtccaactatatgctaggttaactgtgcactagggaaggtaaaaagccaaatattgtatgaaatgatggacatagagtctgagttgtactgatacatggaggcctaaaatgtcatcatgacttgttaaaatgagagtatataaaggcttgataataaattaaaactggctcaaatgagtccacagggtrcatgggcctacctagtagtcatttctctgatcccaggtatgacaagctgagtaacagcacaacacttacattggatctgtggagtgaaatctgtcatagcgtgaaattctaggtggaagcctctgatactgcaaaactcccatctaagcgagcaaaaaaataaaaaaataaaaaaaaaacaccatatcccatgaggttggcagaaattagagtcaatgtaacagagtgtagagttggtgattcctgccatttcttgacttaattcaacactctggcccc

SEQ ID NO: 300123 - DNA, 510 bp, Homo sapiens
caggacaactctgaaggagtattttagctccagagcaacttttggagtaggctgaggctgtcattggtcctgccacacaactcgacttctctctactcaaacctgtttcctttatgtcccttttacggggactgtccctaagggagctctttagtaaacacatagcaaactaaactcagtgttagaatcgccttctggaggaacccagcctataacaatattttctactcaatttgaatttttctatttygtgtttgttagtctgttattttctttcaaaattatttttgggtaatttcacgtctttgttttcttattctgtataatagatacattaaggattgaaagacacatcgctggccatttacctagttttcttcttataatatgaaatactctgtatcctctatggtattcataactgtgtttgaatatttccaatgatgcacagattagatagtaatacacagctctaatgtttacaaaaccttctcttatgatcagctgaaa

SEQ ID NO: 300124 - DNA, 497 bp, Homo sapiens
caggacaactctgaaggagtattttagctccagagcaacttttggagtaggctgaggctgtcattggtcctgccacacaactcgacttctctctactcaaacctgtttcctttatgtcccttttacggggactgtccctaagggagctctttagtaaacacatagcaaactaaactcagtgttagaatcgccttctggaggaacccagcctataacaatattttctactcaatttgaatttttctattttgtgtttgttagtctgttattttctttcaaaattatttttgggtaatttcacgtctttgttttcttattctgtataatagatacattaaggattgaaagacacatcgctggccatttacctagttttcttcttataatatgaaatactytgtatcctctatggtattcataactgtgtttgaatatttccaatgatgcacagattagatagtaatacacagctctaatgtttacaaaaccttctctta

SEQ ID NO: 300125 - DNA, 497 bp, Homo sapiens
caggacaactctgaaggagtattttagctccagagcaacttttggagtaggctgaggctgtcattggtcctgccacacaactcgacttctctctactcaaacctgtttcctttatgtcccttttacggggactgtccctaagggagctctttagtaaacacatagcaaactaaactcagtgttagaatcgccttctggaggaacccagcctataacaatattttctactcaatttgaatttttctattttgtgtttgttagtctgttattttctttcaaaattatttttgggtaatttcacgtctttgttttcttattctgtataatagatacattaaggattgaaagacacatcgctggccatttacctagttttcttcttataatatgaaatactctgtatcctctatggtattcataactgtgtttgaatatttccaatgatrcacagattagatagtaatacacagctctaatgtttacaaaaccttctctta

SEQ ID NO: 300126 - DNA, 523 bp, Homo sapiens
agatgctaccagtcgactgggcactctggaattcataaagagcttgttagctagtgacattctttgcctcaaaaagaatggctggacagcacttacatgtgtagcataagctatgccttatgatgctcttargtacctgttcctcaaatggtagttctattctatagctgtctttgaattttttcctcttaatatgcatatatccaagctttaccaccaatgaggagcttcaggctattacatggctcacatggagtttctttgatggggcctcagaatctcgttcttgaacccatagatccaggatccaacctataactaaaaataggcggtttcctccttcccatgttgtcccctaagtgaattatagaattttcactgctgtgaaataaacgtaaacaataaaatattggtgtcataaccaaaaagctacatttaatacattttacataccagttaaatttacaaatatggtctccaaagccacttggactctggtgtggaccttcagtatatagctatt

SEQ ID NO: 300127 - DNA, 523 bp, Homo sapiens
agatgctaccagtcgactgggcactctggaattcataaagagcttgttagctagtgacattctttgcctcaaaaagaatggctggacagcacttacatgtgtagcataagctatgccttatgatgctcttaagtacctgttcctcaaatggtagttctattctatagctgtctttgaattttttcctcttaatatgcatatatccaagctttaccaccaatgaggagcttcaggctattacatggctcacatggagtttctttgatggggcctcagaatctckttcttgaacccatagatccaggatccaacctataactaaaaataggcggtttcctccttcccatgttgtcccctaagtgaattatagaattttcactgctgtgaaataaacgtaaacaataaaatattggtgtcataaccaaaaagctacatttaatacattttacataccagttaaatttacaaatatggtctccaaagccacttggactctggtgtggaccttcagtatatagctatt

SEQ ID NO: 300128 - DNA, 596 bp, Homo sapiens
accaaaaccttacagctaacattacacttcgaggtgaaagaatacttcctccctgattttgggaacaaggcaagtgtagtggctctcaccaccactttttttttttttttttttgagatggagtcttgctctgttgcccaggctggagtgcagtggcgcgatcttggctcactacaacctccgcctcccaggttcaagcaattctcctgcctcagcctcccaagtagctgggactataggtgcccgccaccaggcctggctaactttttgtatttttagtagagacagggttgcaccgtgttagctaggatggtctggctctcaccattcttacacaacacagtgctaagaagttccagtcaatgccataaggcacaaaaggaaataaaaggcatacagatcaacagggaagaaataaagctgcctatgattgtagaggacataattgtctgtgtagaaaatcccscaaaatctacaagaaacctagaactaagaagtttagcaaggccaacggttacaagatagacatataaaaattaattatatacactaatgatgaacatatggatattattgttacacataaatacccttta

SEQ ID NO: 300129 - DNA, 585 bp, Homo sapiens
gtgatacagagagatgcacagaagtaatgactctggttgtataaacagggagtgctctcagaaagagagagaggacagcaaaagtcaaggcagtacccactgagggagcctcacactgggaagacagaggaagtggagcttcatgaaacagtttgtttcatggctctatagttctctccacgtcagaaacctagcagggycaccacatatttcttgccactgccttactgagactggttaaatctggcccatgaatagctggaaagtgtagccatccagggggtcttgtccaaagtgagcccccaattcccatcaggatggtcattgttttgcttcggagcctaatttccataagggttccattagagggtgacaaatcatagggccaccatatattttatccaaaccaggacgccttgagagggaaatgcaactctatcttatccaaatcaggaaaccttgagagtaaaatgcagctctattaagaattataaagggagcaagcgagtaaaccagggctgtccagacaacccagtatgcagacgccatctacatatcaagaccttcatagcgccaaggaaagtt

SEQ ID NO: 300130 - DNA, 609 bp, Homo sapiens
ttaaatctggcccatgaatagctggaaagtgtagccatccagggggtcttgtccraagtgagcccccaattcccatcaggatggtcattgttttgcttcggagcctaatttccataagggttccattagagggtgacaaatcatagggccaccatatattttatccaaaccaggacgccttgagagggaaatgcaactctatcttatccaaatcaggaaaccttgagagtaaaatgcagctctattaagaattataaagggagcaagcgagtaaaccagggctgtccagacaacccagtatgcagacgccatctacatatcaagaccttcatagcgccaaggaaagttttgcccaaaccatctcatttctttcaggatcttttggatgagctaatggcctgtttaaccatactttctctttttgtatactttgatccctgcctatatttgcctgacaattatttttaataatctttcatttacccaggtatctcagagttgaatatacttgtgtagaatctgaaaacaaaatgagcatctctaacaattgattatttttctgtttcataaagaagtttcaaagtgtaaatacttggaggatggagaaag

SEQ ID NO: 300131 - DNA, 609 bp, Homo sapiens
ttaaatctggcccatgaatagctggaaagtgtagccatccagggggtcttgtccaaagtgagcccccaattcccatcaggatggtcattgttttgcttcggagcctaatttccataagggttccattagagggtgacaaatcatagggccaccatatattttatccaaaccaggacgccttgagagggaaatgcaactctatcttatccaaatcaggaaaccttgagagtaaaatgcagctctattaagaattayaaagggagcaagcgagtaaaccagggctgtccagacaacccagtatgcagacgccatctacatatcaagaccttcatagcgccaaggaaagttttgcccaaaccatctcatttctttcaggatcttttggatgagctaatggcctgtttaaccatactttctctttttgtatactttgatccctgcctatatttgcctgacaattatttttaataatctttcatttacccaggtatctcagagttgaatatacttgtgtagaatctgaaaacaaaatgagcatctctaacaattgattatttttctgtttcataaagaagtttcaaagtgtaaatacttggaggatggagaaag

SEQ ID NO: 300132 - DNA, 586 bp, Homo sapiens
agacaggaaacttttagacaataactgctctacctaagccaaataccacaggaaaaaacaaaaaaacaaaaaaaactgaggctccacctccacccatgccagcaaagagcatcatggggagcccagattttcacctttgtcaagctgtaatgaggtaacccaatactctaccaggatggggtcagagaagggtaagtagagagcaggactttcacaccattctatggtaatgagactacatttttccccccaccctacccaygtgttaaggaagccatgtggtgaacagcaataaggcactcctattcttcctgaacaggacaatatctgtggaaacctagtggggtgaaggggttcccactcagcccagcaataatgaggaacaccctttcttgggtgtcactggaggccacgtaggaaatttggactttaccccgacttggcagtaataacatttggtgctcctccatcccatgccagagtgatgttggaagaagccaattaaaatggaatgtctaaataagaaccagagtcttataatattataaccaaaatatccaaattttaagtgaaaatcatctatacc

SEQ ID NO: 300133 - DNA, 581 bp, Homo sapiens
gtgcttttccaggtgttgctgttggtgtgtaaagtaactttggccacttacaaagtgatttcacttagaggctctgatgagtctacttaattaatacaattcacggttactggtagccatctaccagtacagcctgtctaatcaaacatcaagtccttgatgatcacctattaatatgtgtgcagcaacacagggaatgtagaagtatacgacattctttatatccaaatacttcaaagctacttgagattaagctaacagctgaaacagggtctaaagcacgatgatgaatatgtggtgcaaatcacagatgatcctckacataccatggggctatattcagaaaaatccatcataagctgaaatatcaagttgaaaatgcatttaatacacctaacctactgaatgaacatcatagcttagcctagcctaccttaaatatgctaaggatagttgcattagcctgtagctggcaaaatcatttcaaaaaacacaggcaacacagtacactatagaatatctgttgtttaccctcaggatcacatggctgataggagatactgcttgctgccactgcccag

SEQ ID NO: 300134 - DNA, 526 bp, Homo sapiens
tgtaaacaacagtttcagagagtagacagcaggaagcccagtactgtgatcagagaaaaacagagaaatcartgaggtgcattttgtgatcccccatttctgtctggagccacttaccagattccagggcagagaggggaaatacagagtatatgggtcttgtggagctgtggagataaagatcagagttcaaagaggctgcagcacctgaaatttgcagtgcagagtatctgagagaagggtgctatgcagaaaaagaggttcagaaatctcagaggggggtctatttgtgtctttagccctaaactaagctaaacattcacagtgtgaaagcccttgggccagacaaagaataatcaggaaagtgttagctgaacaactatcaaaattatcagaggactagaagatatttaagatgtgaacaaatatagtggagagaactcatttagctcccagggaattccacgccttaagaacagggctagactagagctagaatgccccaggagaatcaacctctcagact

SEQ ID NO: 300135 - DNA, 526 bp, Homo sapiens
tgtaaacaacagtttcagagagtagacagcaggaagcccagtactgtgatcagagaaaaacagagaaatcagtgaggtgcattttgtgatcccccatttctgtctggagccacttaccagattccagggcagagaggggaaatacagagtatatgggtcttgtggagctgtggagataaagatcagagttcaaagaggctgcagcacctgaaatttgcagtgcagagtatctgagagaagggtgctatgcagaaaaagaggttcagaaatctcagaggggggtctatttgtgtctttagccctaaactaagctaaacattcacagtgtgaaagcccttgggccagacaaagaataatcaggaaagtgttagctgaacaactatcaaaattatcasaggactagaagatatttaagatgtgaacaaatatagtggagagaactcatttagctcccagggaattccacgccttaagaacagggctagactagagctagaatgccccaggagaatcaacctctcagact

SEQ ID NO: 300136 - DNA, 553 bp, Homo sapiens
cagactccaatcagcaatacttaccttaatagttaacgtgagtgtataccatttttttgctgtaacttcaacacgtcctaaagcatatataatccatccagctgtaacacaaaaatattatcccaatagatataattttgagatctcaatcacagaatcatataattcagtggggttctygagtggcatctgtatgtagtaaagtcagcctcaacagagagctatgtcccttcattcccagatctacaactgagttaagccaaaacatttttcatttagccatgcatttaatagcatatactgagatcctactctgagccatatactatatgtgagctcacaacagaaccagtgaaataaacttaaaaaccagtgatagtatgaggtgttagcatctgtagttcaagtacacatttatacatgactggattgaatatggaagacaagagagacagaatataaaatttccagccagtctaattggtcacatggtaatagtattaacttagagggagaaaatagtaagttaatttttggaattagtgttatttga

SEQ ID NO: 300137 - DNA, 566 bp, Homo sapiens
taagccaaaacatttttcatttagccatgcatttaatagcatatactgagatcctactctgagccatatactatatgtgagctcacaacagaaccagtgaaataaacttaaaaaccagtgatagtatgaggtgttagcatctgtagttcaagtacacatttatacatgactggattgaatatggaagacaagagagacagaatataaaatttccagccagtctaattggtcacatggtaatagtattaacttagagggagaaaatagtaagttaatttttggaattagtgttatttgaatgcctatgagaamcccaggacaaaatttcaagtaggcggtttaaaacagacaatagggactgcagacacagatttaaattcctagttccagttctgccactaactagctttgagtcattaggccactcaattaacctcactggttctatgttttcgatttcagtatcactgaggtaagttcagattggtaatgctatgaatatgtaactcttgttctaatatccttactacctacttcctctttaatttttattttatttatggagt

SEQ ID NO: 300138 - DNA, 565 bp, Homo sapiens
aagccaaaacatttttcatttagccatgcatttaatagcatatactgagatcctactctgagccatatactatatgtgagctcacaacagaaccagtgaaataaacttaaaaaccagtgatagtatgaggtgttagcatctgtagttcaagtacacatttatacatgactggattgaatatggaagacaagagagacagaatataaaatttccagccagtctaattggtcacatggtaatagtattaacttagagggagaaaatagtaagttaatttttggaattagtgttatttgaatgcctatgagaaacccaggayaaaatttcaagtaggcggtttaaaacagacaatagggactgcagacacagatttaaattcctagttccagttctgccactaactagctttgagtcattaggccactcaattaacctcactggttctatgttttcgatttcagtatcactgaggtaagttcagattggtaatgctatgaatatgtaactcttgttctaatatccttactacctacttcctctttaatttttattttatttatggagt

SEQ ID NO: 300139 - DNA, 619 bp, Homo sapiens
tagtgttatttgaatgcctatgagaaacccaggacaaaatttcaagtaggcggtttaaaacagacaatagggactgcagacacagatttaaattcctagttccagttctgccactaactagctttgagtcattaggccactcaattaacctcactggttctatgttttcgatttcartatcactgaggtaagttcagattggtaatgctatgaatatgtaactcttgttctaatatccttactacctacttcctctttaatttttattttatttatggagtcaaagcaaagagcagaaaactataaaagagatatttttaaattaaggtaagacgaaagtcaagagactgagaatcaagaaaagtcactaccagtaaggtctagcttcaaaggagtggtgtgtatcaaaaccaatctgaagtggacacagttcaatctgaacatatttgaagcacctattctggataaaatattatcctacctaacacaagggctgtaaagatgactgagaaaagtcaagctattttcaagtattaactaaattcaaaaatgagatttttccattttaagccgatcaattcccctccttatatttctataggtacagcagcaacagtcg

SEQ ID NO: 300140 - DNA, 619 bp, Homo sapiens
tagtgttatttgaatgcctatgagaaacccaggacaaaatttcaagtaggcggtttaaaacagacaatagggactgcagacacagatttaaattcctagttccagttctgccactaactagctttgagtcattaggccactcaattaacctcactggttctatgttttcgatttcagtatcactgaggtaagttcagattggtaatgctatgaatatgtaactcttgttctaatatccttrctacctacttcctctttaatttttattttatttatggagtcaaagcaaagagcagaaaactataaaagagatatttttaaattaaggtaagacgaaagtcaagagactgagaatcaagaaaagtcactaccagtaaggtctagcttcaaaggagtggtgtgtatcaaaaccaatctgaagtggacacagttcaatctgaacatatttgaagcacctattctggataaaatattatcctacctaacacaagggctgtaaagatgactgagaaaagtcaagctattttcaagtattaactaaattcaaaaatgagatttttccattttaagccgatcaattcccctccttatatttctataggtacagcagcaacagtcg

SEQ ID NO: 300141 - DNA, 619 bp, Homo sapiens
tagtgttatttgaatgcctatgagaaacccaggacaaaatttcaagtaggcggtttaaaacagacaatagggactgcagacacagatttaaattcctagttccagttctgccactaactagctttgagtcattaggccactcaattaacctcactggttctatgttttcgatttcagtatcactgaggtaagttcagattggtaatgctatgaatatgtaactcttgttctaatatccttactacctacttcctctttaatttttattttatttatggagtcaaagcaaagagcagaaaactataaaagagatatttttaaattaaggtaagacgaaagtcaagagactgagaatcaagaaaagtcactaccagtaaggtctagcttcaaaggagtggtgtgtatcaaaaccaatctgaagtggacacagttcaatctgaacatatttgaagcacctattctggataaaatattatcctacctaacacaarggctgtaaagatgactgagaaaagtcaagctattttcaagtattaactaaattcaaaaatgagatttttccattttaagccgatcaattcccctccttatatttctataggtacagcagcaacagtcg

SEQ ID NO: 300142 - DNA, 670 bp, Homo sapiens
tttcaagaaaatgaattccatatgatagtccatcattccaagtattgctctgccattgaactcagtccaggtaattctggaattaaatcaaaatccaataactgagatgaagccaatgttgacctgtcaaaggcaacactagagcaatgagaccggcatctcaagatagttaagcctttgggtatgggtgttggtccctcagtggatagcaatgaagggaccctcctaccccgaagtagttccattgccttaaggcacactgtttccagtcatttcttttcaaaatgatttctgagactgttcatattattagcaagaattatattaaatagtcaacaagactttttgcaagtatccaaggaaataaaacacagaggtgtatttttttcatcaaaacagaaaggggagagaggggctcctggttgaaaatttattgaactttaagaataagtaagtcatttacattaattcatcttatcctcaaaacaatcccaagagccactattattatccccattttaaatagggaaattgaggttaataattggtaccactgaaagtttctttatcggtctgactccaaataccatttccactacatctagttcctgcccaaacagaatatatctccaagaartacagagagcccacatacttagggaaacagaaa

SEQ ID NO: 300143 - DNA, 576 bp, Homo sapiens
taaaataatttttgtacatgaatttgtatttctttgggaagtcatgggaagaaatacaccagttaaaatatcaagttcacactcaactttctctatgacagtgggaaaaaaaaggtaatcttcccagagagcctggtctcatagtaaagagaaataatgcctaacttacagtgctgtttctgggggaaaaaaattaggycctgatactaagaagaaattcaataaatgttagtttctttcttcccacttgggtacaattagctaaatgtacagtagaaagtatggcatgaggacttctgaaaccagaaagaccaaggtttaaattctgctacttgctttgccctccttggacaagttactcactgtctctgagcctcagtttctacatctgcaaaatagttaactactcaaagtgttgtgatgaggactaaatgtgggatgccttggaatagggcctgacacacagtaagaaatcaataaatttaaaaatagctgaatacatggagcaaagtagttcacgtttcatatcctgactctgtcacttcccagctatgttaactcgggcaaatgaacctc

SEQ ID NO: 300144 - DNA, 563 bp, Homo sapiens
agttaggttgcagttcatccacaaggactcaaatatagaagtacagagtccttctcaggccatatttagtttgctttaacaaactgaattaggtggaccttgtcaattcttctggtaaagcacctatcaccttgaatgaaaaagtgagagattcttaagtccagaaaatatatgytttctccttgtgtgcttatcacagagcctggcacagagtaacttctcagtaatttttaatccatttttaattaaatttttctggccctattggcctgtattcccatcagaacatgagcacctagcatgcacggatgttcgagttcatttccgtatcccttgcatctgatccagaatccggcacatcgtgagtcctccacaagtcccgaacaataaattaattaattaaatggatatcagttaatttaactgagtttgtgacactgacagcatagcattttttgttactggactcctcggaagcatgagaatccagccgtggtgttttcttgtttacgtacctatcagtcaaatgctaagctgctcagctgtacttgttattgctctcc

SEQ ID NO: 300145 - DNA, 562 bp, Homo sapiens
aacacccataaccaactatcccaaacaaacagccaaacccctctcaaattattcttagggttggagtcaaacaacttatatttttgcctcccctggaacaagtgctttagccattatcttcatygtcctgaacctaaagatacaaaaataggaggctcagagagcttttctgatttgacatcactcacaaagggaaaggagtgcaggaggagaagatcccccaaagcagtgggtgggggtaggaaggagactatgtattaataagaaccaacactgaattattgaagactacacacatcgattacaactatgacaagcccttcagtattttgagcttcagttttcacctctgtaacgaggtgataagacaaccagcttcataacattcttgtaaaggtaacaagaatgtagccagagcgttcccattgtctggctcctgggaaggaatccacttatcatctcatttttttggtatctttttattttatccatttttttcttgctctccctcccctagtcccccaccccgacaggcctcggtgtgtgatgttcccctcgctgt

SEQ ID NO: 300146 - DNA, 647 bp, Homo sapiens
actcattttaaaaataagaaaattgagattcaaattgggtaaatactttgctcaggcagccgccttagggataatgagtagaaatcgaatttttagtaaggtacctytgtatgtattaatatcatattttaaattttccttactataacccctattttatttcatcacttcctttataatgagaataactgccttttaccttgtcccctacatccacacacatatttatagagttatttatcccctaagtcctcttaacccaagactgaacatgtgaaattcacttccctcttcctcaagggtcttgtttttgaaacatttcatcattttgttgctttccactgtgcttccctgagtatcttaccatgggggaatttatttcaaattgcatcactcacggaagacaattctagggaaaaaaatgtcaggtcaacactgaaggctcacttgatccttcacatcttcaagtggccttgctcttattaatggattgtcgtgaatgatcttttacaattttgccccaaaggtcaagaagagaaaattcaataagtagtaaaacactataagtggaaatcactacgtatgtttgcattaagccagatgtttaatagataaatgtcagatgaagaaaaactcaagaatattat

SEQ ID NO: 300147 - DNA, 647 bp, Homo sapiens
actcattttaaaaataagaaaattgagattcaaattgggtaaatactttgctcaggcagccgccttagggataatgagtagaaatcgaatttttagtaaggtacctckgtatgtattaatatcatattttaaattttccttactataacccctattttatttcatcacttcctttataatgagaataactgccttttaccttgtcccctacatccacacacatatttatagagttatttatcccctaagtcctcttaacccaagactgaacatgtgaaattcacttccctcttcctcaagggtcttgtttttgaaacatttcatcattttgttgctttccactgtgcttccctgagtatcttaccatgggggaatttatttcaaattgcatcactcacggaagacaattctagggaaaaaaatgtcaggtcaacactgaaggctcacttgatccttcacatcttcaagtggccttgctcttattaatggattgtcgtgaatgatcttttacaattttgccccaaaggtcaagaagagaaaattcaataagtagtaaaacactataagtggaaatcactacgtatgtttgcattaagccagatgtttaatagataaatgtcagatgaagaaaaactcaagaatattat

SEQ ID NO: 300148 - DNA, 569 bp, Homo sapiens
ataggtttggtgaccatccacgaggtactattcagagttgatgctgcagagaaactcaatgactaaagcctctctaaatctaccactgacttcatacagagcctcactttccatggactgctccaggcaatgactgacctcaggcaatgactaatgatggactactttggcttgagactccctcttggcctggttgaagtttttcagagctgcattgcagtttgatctgagacttccctcttaaatccccttctttccctctctccttcacagggcagataagacctgtccttcagtctgacagctttccctgccttctcttcctgccccccaccacccccattttcctcatagtcattttcccaataaatctcttgcacatttartcctgttttgatatctgcctgttggtaaatctgaactgacacaagtggcaccaggagtgatctcaagaaacaggcagtaagacggggttctgggactgtctccctgcctgacgagcaatgggatgtcattctgagtggattgtcaggcatcgctagtccctggcacaaggaggtggcccagtt

SEQ ID NO: 300149 - DNA, 529 bp, Homo sapiens
caaatgtctgagctgtcctggtagtaggttggagaaggaataaagaggctgaaggaggcaggtttgctggaacgtgtataggtgtgagttatgtaagggcagacaacctaccaaatgacttgttccttgggaggataaaaaggtcacgcttttcaccaaagtcatcaagaaagtgccagcaagatgagtgccaacatcactaagaagttgggtggtggttcctatgtaagccaagaatgatggcaagagagatggccacagagatgggattactaatctccatggtcttgatggaaccctgaagttcagggtacagtgcttaatccctggaagccagcaagccacagtgaccatagcaaggtctgaggggcagccacaggggsagctggtaaataacttggcatttctagggcaaaatacatcagaaaccagcaaggatgctacctaagaccatcatcatcaacaagaacaacatggcagaaatgcagaagaaagaggctaaatgtgctcacctgagaaaaagtcccag

SEQ ID NO: 300150 - DNA, 613 bp, Homo sapiens
aaatacaagcttccccttgctgccttcatgtatgactggacctgctgtgtgtctcctgttctcatctctatctgattcatcagcaataacttgaggacagtcaagactgctgagttcgcatggctgcaaactttattttccaggccatcttyggtaagccttggataaaatggccaagccaactgaatgataatcgaaatgcatttgttttttctgctgcactttttgcttggggttgtgcttgaaagacagtcatacatcaacttgtggccccccaggatcatatggtgagtccattgctgtggctcttagacttgtttcatctgctattttccctgaagagtttgatttttttgacattttttaatatccaaagcaatatatgtgagtcatatgcaaattaaaaaatgcagaaaattagaaaataaaatgcatccctaatcccaccatccagacataactactctggtgatttattatgtctacaattagagatagatacacaaggatatatagtagtgaggtgtgtgaggggtgtgtgtctgtgttttatacacttttttattacaaaattaaaatcatctcatacataaaattttgtaatatgcttaat

SEQ ID NO: 300151 - DNA, 613 bp, Homo sapiens
aaatacaagcttccccttgctgccttcatgtatgactggacctgctgtgtgtctcctgttctcatctctatctgattcatcagcaataacttgaggacagtcaagactgctgagttcgcatggctgcaaactttattttccaggccatctttggtaagccttggataaaatggccaagccaactgaatgataatcgaaatgcatttgttttttctgctgcactttttgcttggggttgtgcttgaaagacagtcatacatcaacttgtggccccccaggatcatatggtgagtccattgctgtggctcttagacttgtttcatctgctattttccctgaagagtttgatttttttgacaytttttaatatccaaagcaatatatgtgagtcatatgcaaattaaaaaatgcagaaaattagaaaataaaatgcatccctaatcccaccatccagacataactactctggtgatttattatgtctacaattagagatagatacacaaggatatatagtagtgaggtgtgtgaggggtgtgtgtctgtgttttatacacttttttattacaaaattaaaatcatctcatacataaaattttgtaatatgcttaat

SEQ ID NO: 300152 - DNA, 605 bp, Homo sapiens
tatacaatcatgccatctgcaaacaatttaactcaagatggaataaagacttacatgtaatagctaaaaccataaaaaccctagaagaaaacctgttttcctaattgaataccctttatttctttctcttgcctgattgccctagccagaacttccaatactatgttgaatagtagtagcaatgtttcaaaaatgagttggaacttatcctgctttctgaaacagaatgtattaaactagtcttcaattttgtgagggcaggaatagtgtctgttttattcctattacatctttagtacctagctctgtgtctattacacagtacgtgttctataaacatttgttgaatgaatccatgaataaaccaaaaatcacatctaaatagaacataatgaagtgtaaagcagttattgtgtttttgatgatctcatatcaagtcagtggagagcttgaattgtttgtggtccatctccatcttcactttgtctttttttaaaactcatcactcttccctggatctttgtggaagcacttacttagcygtaaatccacagtttctaaactcagctaaatccaagttaagatccatctaaaccccatctgat

SEQ ID NO: 300153 - DNA, 584 bp, Homo sapiens
aatcacacagaaaatggagtcaggcaggggtagattttggaaggggatgaaaatgaccttggctttgaacatattgcttttgaagtgtgtactggtggatgtagttaggagtcattggaaaatgtcagtcggaggtcagaggagaggttgatgccagacagtagttattgccatgtaagtggtggttgaagctgtggaaatagaagagcttctttaaagggacratgaagtataaaaggagaaggggcaaggggcaagttctggagtggactaaggtataaaggcaagcagagggacaaaaaaggaggaaggagacagagaagggtattcaaggacaccagaggagagccagaggagggccaggggagagtgtcctgctagaaggcaagggagaagggaatgtcagtaaatgaaacaggttcaactgggttaaattctacatgtatatgatttgtctttgtatgggttcccttatgccacctttcacttagtaaagtgctataaaattatgcattcatgaatgaattcataaagggcataaagagcaaaacttcacacaggatttggaaacattgttcaacagg

SEQ ID NO: 300154 - DNA, 584 bp, Homo sapiens
aatcacacagaaaatggagtcaggcaggggtagattttggaaggggatgaaaatgaccttggctttgaacatattgcttttgaagtgtgtactggtggatgtagttaggagtcattggaaaatgtcagtcggaggtcagaggagaggttgatgccagacagtagttattgccatgtaagtggtggttgaagctgtggaaatagaagagcttctttaaagggacgatgaagtrtaaaaggagaaggggcaaggggcaagttctggagtggactaaggtataaaggcaagcagagggacaaaaaaggaggaaggagacagagaagggtattcaaggacaccagaggagagccagaggagggccaggggagagtgtcctgctagaaggcaagggagaagggaatgtcagtaaatgaaacaggttcaactgggttaaattctacatgtatatgatttgtctttgtatgggttcccttatgccacctttcacttagtaaagtgctataaaattatgcattcatgaatgaattcataaagggcataaagagcaaaacttcacacaggatttggaaacattgttcaacagg

SEQ ID NO: 300155 - DNA, 571 bp, Homo sapiens
ttgaaacaatgactataggtctagatatcaaaaagaaaataaataatttatttcccatatagacatagctttttcataggaagtttaacacatgcacttctggttttaataaagaggagaaaaacagctattcaaactacatgcccatgaattcagctctgctcagcttagccacagccatgatgactcagaaaggccagggcccctaggggggctttctgcacaaggagcatggagaaagatgcacatgttctcccaggcaggggacagaggggtctyggagatccctgttaatgctggtgccacggctcagttcttcacagttttctttcagggcacccacacacctctctactttaactgatgttccttcactccacaagggattgctaaagagccctagcaactcagtaccatgtcacactaaaagacttccagcaagagagctaagaacgttaacgaccatgcctacttgagcctctgctgatcaccaggatagacacgcctgcccacctacttctgacatcatagctaaaagaatcatctggcaaaggatctcccaagagggaag

SEQ ID NO: 300156 - DNA, 455 bp, Homo sapiens
cgtcattctcaccctggcccctgcccacttctcctaccactcactttttcctgtatttcctctaacctcattgggctttttatactgttatttctccaacacctcaagctctttcccatctccaagtctttgccctccctgctcccactcacttaaacmctcctccctgatctttgctctcacttagatcccagcccagagaggtccaacctgaccacacagttggaacagattttgatgccccaacccaatcccaggtaaacaacctcattcttatgaaacattctcttcatagtatgtatcacaatccgaaaaatcttctcaatttttccgtttgctaatgttatggactgaatgttcatgcctccctcaaattcctatgttgaagccctaaccaccaatatgatggtattttgaggtagagcctttgggaggtaattagggttctatgaggt

SEQ ID NO: 300157 - DNA, 455 bp, Homo sapiens
cgtcattctcaccctggcccctgcccacttctcctaccactcactttttcctgtatttcctctaacctcattgggctttttatactgttatttctccaacacctcaagctctttcccatctccaagtctttgccctccctgctcccactcacttaaacactcctccctgatctttgctctcacttagatcccagcccagagaggtccaacctgaccacmcagttggaacagattttgatgccccaacccaatcccaggtaaacaacctcattcttatgaaacattctcttcatagtatgtatcacaatccgaaaaatcttctcaatttttccgtttgctaatgttatggactgaatgttcatgcctccctcaaattcctatgttgaagccctaaccaccaatatgatggtattttgaggtagagcctttgggaggtaattagggttctatgaggt

SEQ ID NO: 300158 - DNA, 455 bp, Homo sapiens
cgtcattctcaccctggcccctgcccacttctcctaccactcactttttcctgtatttcctctaacctcattgggctttttatactgttatttctccaacacctcaagctctttcccatctccaagtctttgccctccctgctcccactcacttaaacactcctccctgatctttgctctcacttagatcccagcccagagaggtccaacctgaccacacagttggaacagattttgatgccccaacccaatcccaggtaaacaacctcattcttatgaaacattctcttcatagtatgtatcacaatcygaaaaatcttctcaatttttccgtttgctaatgttatggactgaatgttcatgcctccctcaaattcctatgttgaagccctaaccaccaatatgatggtattttgaggtagagcctttgggaggtaattagggttctatgaggt

SEQ ID NO: 300159 - DNA, 400 bp, Homo sapiens
atattagacatgataagatgataattataactattaacatatactgagtacttacatgagagtcataaatgatcttaygggtattaaccccatttaacacaaccctactaagaagatattattatgcccattttctcctgagaaaactaaggcataaaaaaggttaagtaaactaggccaaggtcatatagtcagtaagttatggcatcagaatatgaacacagatggtcttgcctcagaacctggactcataactaccatgtagcctaccatcttgtatttccaacactctctgagcacagcagaggttctgccaatgggaagcccattgtctctaactacccaggcatattcacctcttgccactctaccctctccctgcctttacaaatttgctgca

SEQ ID NO: 300160 - DNA, 632 bp, Homo sapiens
agatgataattataactattaacatatactgagtacttacatgagagtcataaatgatcttatgggtattaaccccatttaacacaaccctactaagaagatattattatgcccattttctcctgagaaaactaaggcataaaaaaggttaagtaaactaggccaaggtcatatagtcagtaagttatggcatcagaatatgaacacagatggtcttgcctcagaacctggactcataactaccatgtagcctaccatcttgtatttccaacactctctgagcacagcagaggttctgccaatggraagcccattgtctctaactacccaggcatattcacctcttgccactctaccctctccctgcctttacaaatttgctgcaaagctacagatttaagactgaatttttacataaatgcacagagtagtcataaatctataaatttaagactctaaatttttaccattcaaattccttttagcttaatcatcattttatgatgtttctctgaaatatctctatcaacatctgcttggtactggcttaaatgctagactacaaaatccgctaattgcttacttgtggaatcattcacacatgtgttgctcaccccaggatgtgacttctg

SEQ ID NO: 300161 - DNA, 548 bp, Homo sapiens
ggcagtcccgtgctaagtagcacttgtttgcccgggtactgtgcttgctggcttgtgtggagtttgtgaagatctgccccttaaccctttatgcctgaagttgctattttttraatttttgtaatcagacctcggccccgaccttgagcagtaggatataaataaatcccacatgcttagcattcggaacactagacataaatgttaatgacttaaatgaggtagaaatgtttctgccccaggggaggaaataaaaggtactcctcctcacataaatctgtttcctggtcatgcccaccaaattggctgtggggtgtgacacccctctgtgtcatcccctatgtgtaagtgatcagtgtcagtttaggaggccatgactccccttcattcaacgaatcactcctttggccaagggctggaagcaggggctggaaaagctaaatattacattgcactatcttgaatagtataactaaaggaaaataaaaccaaaaacaagatctctgacctgtctccttctcactctctctatgtcctgaggcttttgt

SEQ ID NO: 300162 - DNA, 610 bp, Homo sapiens
atgcttagcattcggaacactagacataaatgttaatgacttaaatgaggtagaaatgtttctgccccaggggaggaaataaaaggtactcctcctcacataaatctgtttcctggtcatgcccaccaaattggctgtggggtgtgacacccctctgtgtcatcccctatgtgtaagtgatcagtgtcagtttaggaggccatgactccccttcattcaacgaatcactcctttggccaagggctggaagcaggggctggaaaagctaaatattacattgcactatcttgaatagtataactaaaggaaaataaaaccaaaaacaagatctctgacctgtctccttctcactctctctatgtcctgaggcttttgtcttgctgagatgatacaactaaaatcagttagggagtcatctctgattttggcatatcctaaaacaarccttgtcacatcaaggacgattgaagaacaggaatacgtttagctcagaaacaaacataaacttgggaagtcataaaaggcctgttggatgaaaggagagtacacttgttctctgtgaccccagaagacagatccaaggaagggagttgaggtcacatgtaaacac

SEQ ID NO: 300163 - DNA, 543 bp, Homo sapiens
aacactacatctactcaaccaacagctatttatttgttggattatgtcttgtgcatcaaggggtatgttaggcactacagatacagtggcgtgtgaaatcaaacttgatccctgctttcatggagcttataaactaattctcaataaattcccactgttattatttcaagatgctaagaatgggaacaatccattcactgctaaaactacatagtttaagtggtacagcaagaattcgcaaacttttacttgagcatgctaattcccaaatggcaggtatttgtacagtgaagtttcataggcagaaaccatgcagcactgaagggctggataactttrattaaacttgaaataacagggcctacgagtgtgtagatgcagcctaagaagaccatctttctgctctcaggaagtcttcccagggcattccatttccccttcagccactttacctctctgggctttagtttctcctctgcaaaatgaagtagctgtgcccaattagttctaagatctctgccagctctcacacttctcaataat

SEQ ID NO: 300164 - DNA, 543 bp, Homo sapiens
aacactacatctactcaaccaacagctatttatttgttggattatgtcttgtgcatcaaggggtatgttaggcactacagatacagtggcgtgtgaaatcaaacttgatccctgctttcatggagcttataaactaattctcaataaattcccactgttattatttcaagatgctaagaatgggaacaatccattcactgctaaaactacatagtttaagtggtacagcaagaattcgcaaacttttacttgagcatgctaattcccaaatggcaggtatttgtacagtgaagtttcataggcagaaaccatgcagcactgaagggctggataactttaattaaacttgaaataacagggcctacragtgtgtagatgcagcctaagaagaccatctttctgctctcaggaagtcttcccagggcattccatttccccttcagccactttacctctctgggctttagtttctcctctgcaaaatgaagtagctgtgcccaattagttctaagatctctgccagctctcacacttctcaataat

SEQ ID NO: 300165 - DNA, 384 bp, Homo sapiens
tcacaagatctgatagttttataaggggttttctgctttcacttggctctcattctctcttgtctgccaccatgtaaggatgtgccttttgccttttgccttctgccttctgccatgattgtgaggyctcctcagccacatggaactgtaagtctattaaacctctttttctttataaattacccagtcgtggcacagatccctgggcctcattccttcccaaagtgctcttggcttgtatgaaaggagttgtaccagcatcacaggaggcccttggtgtgaacagaggtccaggcaaaaggagttcatttccagtctccaggcagttgtctgccttagcagatttgaagatttgaatacctctttgaggcaaaccatttctct

SEQ ID NO: 300166 - DNA, 597 bp, Homo sapiens
aaccaaaacgcattcacacacatcaagggagaatcaggtagggaatcactaatcaaggtatatgytcatgtcacactgatacaaggaaggtcttagaaggtcttttcatgatcacaaaagacataagatttttttcctggatttcattcaaaatttgtttcctggattcatctagccctacagagtaggtataaatgggtgttggagggaaggaagagagttgttttctgattacatcccacagtgtatgttagttcaatgtgctgattataattgttattattattctactctaattaccttcttcattagactttgaacaacaggagggcagaaatcccatcttgttcatctgtatatccatagcaccagcccagtgcctgaaataccatgaatatttaataaattaatgttcaatggatgcacgtgtcaacatcccacaggaactggaggccgagtatgattccaaatggaagcagccctcattcaaagcggacaaccagatctgctgtctcccagtcaggggaaacttttgccaaacacaggccgtctctaattcccttttaaattgtagtcaatgttttcaccctgaactcc

SEQ ID NO: 300167 - DNA, 535 bp, Homo sapiens
ggttggattctagatacagtttagatggtagaaccagcaggctttgctgatggtccagatataaggtatatgagaaagagctaagttcaagaatgactctaagattttagcctgagcagttggaagaatggcttttccatctactgagatgaacaagagcaaggagsagcatgctttgggcagagaccaagggttctgtttgggacatgtgaagtctaggatgcctatcagacatccaaataatatgctgagtaggcagttggatatcctaatttgagattaaggtaaggagtctgtttggtgttaaaaatttgagtgctatcagcctatggatggttcttggaagtatggatgaaatttgatgtagaagagagccccaaggattgagccctgtgatgttctggtgtttagaggtcagggagaggagacagagaggtggtcaggatggtaggagagaggcaagggcaaaggaattgaggggaagagcttactggggcatctaatgctgccagtgaggtgaccagatgagggctga

SEQ ID NO: 300168 - DNA, 551 bp, Homo sapiens
aataatacatgcttaaataattatttcatatctgacaaggtctgctctttggacatgatcacatgatctgtttttctctggcaatcccaataaacacagatgggcaaacaatcccttaagctgttggaatttaggaaaatctattcttccacagcttggcactttatccattttcacccctcattcatttttgcattctttatttcatttgcatgaaaacatgatcttcctgttatccaaaaggcattcttaggcttcaggtttcctaagttttttaattatggagaaaatcttgggaatggacagaaggtcgaatgaggattataactcttcagatacaagtaaataggctcaagctctagggccagttccatcaccaactcgttgaggagctcatatttgtaaataagaaaggattgaacaaaagttgcagtttccagcataagaattccagaatggtagaactcctcaaaatattcttttggtttttaaaactctatrgaaaacacaatttgcctgcaaatctacccaaatacctaaaccataatatt

SEQ ID NO: 300169 - DNA, 595 bp, Homo sapiens
tgttgggcctgtgggtgcacagaaatcaagaagtgaagtttgagaaccttcacctagatttcagaggatgtttgttaatgcctggatgtctaggcagaagtctgctgcaaggtgagccctcatggagaacctgtgctagggcaatgcagaagggaaatgtggagttggagcccccaaacagtgtccccactggggcactggctagtggacctgtgagaagaaggtcactgtcctctagaccccagaatggcagatccaccaacascttgcatcatgcacctggaaaatccacaggcactcaaggacagctcatgaagaagctgctgaaggccatcagagcccaccctttgcatcagcatgacccagatgtgagacatggagtcaaaggagataatttccaagctttaagatttaatgagtgctccactgggttacagactttcacgggtcctgtagctcctttgtttcagccaatttctcccatttggagtggaaatatttacccatgcctatgcctccactgtatctaggaagtaactaacttgcttttgattttacaggctcataggcagaagggtcttgccttgtctcagat

SEQ ID NO: 300170 - DNA, 628 bp, Homo sapiens
atggcatatagtaggtactcaatacaaatttgtagaattttattgtttttggtcagaggtgttttcaactcagttattaacactgattctcttggactgatctaaactctgatgacagtaacacatgcctatgatgtttaaaaaggagaaaaactggttgataatggtaagtattatgaagacagctaaaattttttgagcccttaccaggtgccagccattgtgataagtattgtatgagcacatctcatttaatcctcacaacaaccctattacataaatacttgcattatcctcactttatagatgaaacaacttgaatacaaagagacctgtggcttctgtggagtcctcaggaagcttacaatcattgcwgaaggttaaagtgaaggagaaagcacatcacatggccagagcaggagcaagaggaagggaaggtatctctgggcattatgaagaaaggtgagagaacaagggcttcaatccatgttgtctaaacacaaagtttaagctcttaattattatagtattcttcttctcctaatggttctagtttaatcaacttcttcccctaaaattaagtttctaggcaataaaagtaatgaacgtatgccataatctgaaaaag

SEQ ID NO: 300171 - DNA, 552 bp, Homo sapiens
actgacatatataaatgattgattaaataaatggggaagaagagacaaattgcccacagagaagaattcaaaaaatttatatagattctctgtcctgaaggaggtaggtggaatatatagcttctcattccctaagtgtgggccatgcacggtgacttccttccaaagacaacagtatggaaatgtggggaaaaggaggattttacagtggagaaacttgacaaacattactccagccaggtgatcagggccaacatcaacagtgataagtcatgctaagagcaacgatgtgagataaatggcacttgacttttgtggtcttccttcaaaaacctgtaacaccaccctaaccatcagccaaacatcgaacaaatyccagttgagtgacattctataaaatacctgaccaggactacacagaatcattaaggtcataaaaaacaaggggagtctgaaaatttatcacagccaagaggaacctaaggagacatggtccagtgtggtgtcccggatgggatcccagaacagaaaaagcacataagataagaacta

SEQ ID NO: 300172 - DNA, 632 bp, Homo sapiens
cacattttgcttttttatatacttattcctgatgtctaagagtacaaatcaagaagayagcacttaataaatgtttgtatttgttgttgggtgtggagacagtaataaaacctctgttattgcccacttctatctctattaccttttcttcccatattagccaaagataataatactctgggaatagggatctcattattttcttgcattattcaagtttaaaaataagtttaagtgtgttataataaaaattcagaagttgaaacagcatcagttgtttatcttatgtagagatataaaccttataaacagatacaattcctttaagtatctgtgtgtctgtgtgtgcatatgtacttataatctttattttaatttttttagactctcacaaccatgtagggaaagtttatagataagttttcacataacttcagatactttttctttccagtcattaaatttttaaaaaattgtctatctgatacctagcaatgcttcatctcaaaattcaaacatatattttctacctgaacacaaaaggactttggcaatccagtgagcgcttctattaccagtacttattattttctactttggctagtaatgacagtgtactagtgatagctgga

SEQ ID NO: 300173 - DNA, 640 bp, Homo sapiens
caaatatgtagaagtcctaatcctcattatctgtgaatgtgattttatttggaagcaatgtttttgcagatgactaagtgaagctgaagtcattatggggggcactaatccaatgtgattgtgcccttaaaaaagaggaaatttgggcacacagacacacccagaggggagataccctttaaacatgaaggtggacatgggagtgatacatctgagtcaaggaatgacaaagattcccagcaaccatccaaaggtagaggagaggtgtggaacacattctccctctcagccttcagaaggaaccaaccccgccaccaccctgatcttctattttagcctccaaaacggygagacaataaatttctgtcgctcacaccacacagtttagttttatttttatagcagcccttgcaaacgaatgtaacctctaaactctatgagaaaaaaaatccacgtttttatttttcaaaaataaggttcaatattttgatttaaatccaaattctgtgcaaagtattttcatccaaaatgccctgtatatgctctaggactacacaggctccctataaaaaataaatattgatgaaattccatggatagctatcaacattatcaagccactatgtaccatgtgccactt

SEQ ID NO: 300174 - DNA, 598 bp, Homo sapiens
cagaaacaaacagcagcaaaaaaaaaaaaaaaaaaatagaaacagtaatgacatctaagaactctgtcatcttttgtttgagttactttctttcacttcccagcttctataactatagcacraaatggacaataaactgtctccttctgaagtccacagccctttcctgaaactgagtgacacagagcattaaccatttgataaatcttcatcctctagttgaattccccttgccaccccactcttcctctttatttttccccaagacgttgaataaagcaaaagcaaaacattagcttaaaaatctttcagagaaaaataaaaggcaccaactttggttattagaagtaaattaccaccttgaatcataatgcagaaatatgagacagatttttattccttattattggtgttgaattattcagtggtacccattagcaatatgataacgtggttattttatatttagatttccttatagccctcatcagcagcttcctttatacacctggcaagttgactgtgcactgattcagaaattattaacattagtgaccaggataaaatgataaaacctagatttacttttctaaaatac

SEQ ID NO: 300175 - DNA, 590 bp, Homo sapiens
aacagcagcaaaaaaaaaaaaaaaaaaatagaaacagtaatgacatctaagaactctgtcatcttttgtttgagttactttctttcacttcccagcttctataactatagcacaaaatggacaataaactgtctccttctgaagtccacagccctttcctgaaactgagygacacagagcattaaccatttgataaatcttcatcctctagttgaattccccttgccaccccactcttcctctttatttttccccaagacgttgaataaagcaaaagcaaaacattagcttaaaaatctttcagagaaaaataaaaggcaccaactttggttattagaagtaaattaccaccttgaatcataatgcagaaatatgagacagatttttattccttattattggtgttgaattattcagtggtacccattagcaatatgataacgtggttattttatatttagatttccttatagccctcatcagcagcttcctttatacacctggcaagttgactgtgcactgattcagaaattattaacattagtgaccaggataaaatgataaaacctagatttacttttctaaaatac

SEQ ID NO: 300176 - DNA, 630 bp, Homo sapiens
taatgatagtataatattatagaataagtatataaagcttactctggaaaaaaatcatagcctacaggctttgcacatttacttgatttttataatatacactattcccataagaaagttattaatttgatgtggtcagtcacacaggtggtaaatttaggacccaggatgtcaatattagggtcacgtctgtttagtggcaaagtgttacaattcactcattcactgagtgtacctcgtacctatatatctctactcacccatctctctaccaawctactatctgtcctccaagccaatatatttcaaaatattttaccatttaattattgtgacaaaactttgaaatgtaaatattgtaaataaggtatttttaaagaaagatctctgggttagagtgattttaaaaaataaactcgtagtgtctttattagagattttcaggaagattaactagcagtgggtactgtgtcccaagaaagataagtactatccaaataactgtatgggaagtattatgtatttatcaatattaattttctttctctgccaatagagtggcaaaaatgaagcagtggatcgataaataaataataaatattaaaactatgtgggcaagaagcatattat

SEQ ID NO: 300177 - DNA, 630 bp, Homo sapiens
taatgatagtataatattatagaataagtatataaagcttactctggaaaaaaatcatagcctacaggctttgcacatttacttgatttttataatatacactattcccataagaaagttattaatttgatgtggtcagtcacacaggtggtaaatttaggacccaggatgtcaatattagggtcacgtctgtttagtggcaaagtgttacaattcactcattcactgagtgtacctcgtacctatatatctctactcacccatctctctaccaaactactatctgtyctccaagccaatatatttcaaaatattttaccatttaattattgtgacaaaactttgaaatgtaaatattgtaaataaggtatttttaaagaaagatctctgggttagagtgattttaaaaaataaactcgtagtgtctttattagagattttcaggaagattaactagcagtgggtactgtgtcccaagaaagataagtactatccaaataactgtatgggaagtattatgtatttatcaatattaattttctttctctgccaatagagtggcaaaaatgaagcagtggatcgataaataaataataaatattaaaactatgtgggcaagaagcatattat

SEQ ID NO: 300178 - DNA, 630 bp, Homo sapiens
taatgatagtataatattatagaataagtatataaagcttactctggaaaaaaatcatagcctacaggctttgcacatttacttgatttttataatatacactattcccataagaaagttattaatttgatgtggtcagtcacacaggtggtaaatttaggacccaggatgtcaatattagggtcacgtctgtttagtggcaaagtgttacaattcactcattcactgagtgtacctcgtacctatatatctctactcacccatctctctaccaaactactatctgtcctccaagccaatatatttcaaaatattttaccatttaattattgtgacaaaactttgaaatgtaaatattgtaaataaggtatttttaaagaaagatctctgggttagagtgattttraaaaataaactcgtagtgtctttattagagattttcaggaagattaactagcagtgggtactgtgtcccaagaaagataagtactatccaaataactgtatgggaagtattatgtatttatcaatattaattttctttctctgccaatagagtggcaaaaatgaagcagtggatcgataaataaataataaatattaaaactatgtgggcaagaagcatattat

SEQ ID NO: 300179 - DNA, 518 bp, Homo sapiens
ctcagcctgaattcagaaccagtaactattcccagaaatcagaatagctatagatcgtcagcaaacttctctgaagtcctcttcttttcagaattttagccattctacyccttattgctccttcaactcctctggtgccttaaatagataaaattttaattatatctcaatttttaaatggtgcttagggagatcagtagcctcttaaaagctattataccctacttgaaagtggctctctggagatctttaacttatcagttctacaaatcccattctcaaataatctttcttagctgtgctaatataagaactgacatccacactgaaaatagttaaataaataaaaccctgccagggaattctactgcgaaaacagagtttagaatgcttatatactttctagtattcctaaatggggctctttcatcctcaatgtctactacaatgcaaataggatataaatcaagagactacactgctagagatacatgataatgatgatgatgataagtagg

SEQ ID NO: 300180 - DNA, 518 bp, Homo sapiens
ctcagcctgaattcagaaccagtaactattcccagaaatcagaatagctatagatcgtcagcaaacttctctgaagtcctcttcttttcagaattttagccattctactccttattgctccttcaactcctctggtgccttaaatagataaaattttaattatatctcaatttttaaatggtgcttagggagatcagtagcctcttaaaagctattataccctacttgaaagtggctctctggagatctttaacttatcagttctacaaatcccattctcaaataatctttcttagctgtgctaatataagaactgamatccacactgaaaatagttaaataaataaaaccctgccagggaattctactgcgaaaacagagtttagaatgcttatatactttctagtattcctaaatggggctctttcatcctcaatgtctactacaatgcaaataggatataaatcaagagactacactgctagagatacatgataatgatgatgatgataagtagg

SEQ ID NO: 300181 - DNA, 518 bp, Homo sapiens
ctcagcctgaattcagaaccagtaactattcccagaaatcagaatagctatagatcgtcagcaaacttctctgaagtcctcttcttttcagaattttagccattctactccttattgctccttcaactcctctggtgccttaaatagataaaattttaattatatctcaatttttaaatggtgcttagggagatcagtagcctcttaaaagctattataccctacttgaaagtggctctctggagatctttaacttatcagttctacaaatcccattctcaaataatctttcttagctgtgctaatataagaactgacatccacactgaaaatagttaaataaataaaaccctgccagggaattctactgsgaaaacagagtttagaatgcttatatactttctagtattcctaaatggggctctttcatcctcaatgtctactacaatgcaaataggatataaatcaagagactacactgctagagatacatgataatgatgatgatgataagtagg

SEQ ID NO: 300182 - DNA, 511 bp, Homo sapiens
aggtgctccacatttgtaagcaattagatcttcagtgggaggtgctccacatttgtaagcaattagatcttcagtgggaggtrctccacatttgtaagcaatcagatcttcagcgggaggtgctccacacttgtaagcaatcagatcttgtgcgatctcacccactattacaagaacagcgagggggtaaatccaggcccatgatccaatcacctcacctcccaccaagcccctcctccaacactgggaattacaattcaacatgagatttgggtcaggacacaaatctaaaccatattatagctcccgaagtctcacttgtttgaaaacttttcttcacctgctggaaggaacgtaaaaaatgagatgataatgaagaaaagctggaagtggaggaggaagaaaaagaataaaaagacagcttcttttatgggcatattccttattttcctaagtccaaaaatcctaatgagaaatcagacggcattcatttcttctacacactgaacct

SEQ ID NO: 300183 - DNA, 655 bp, Homo sapiens
gtttaactgaacaatggttttcttatttattcatgtttggattttaattgtactaccaaacatgtgatgttttgtttgtttcacttgaaaaaattaaaaaaaaaacaaagaaaacataagtagttattctaaatgaccaatatatgaaatgaaataaataaacatcactagtgctattctcttgcaaaatacctgatctgcatgtatgattttcatggtttattttctttcttgtattaataattagaatgaacagttcaagtataaactaacaaaataaagatttcccagaaatataacctcaagtttcttggatttcataaatagagaattttaaatctcttttttgtattggctttaattatttcagtgttcttacaatgtatcttttatagggtatagaaaggcactggtgattgtacatttttgacaattgtttacatccataaagatctccattagatgaaayactgagaactcttttagggcgtctgtggtcaatattatttatgcttagagaacattctagttctcctttccttgtgtcacttggagttatattttccttcaaccttggagacaggtatgaccacatggcttgccttagctagtgaaatgtgattaaaattatgctttgccacatccaggtggcaaa

SEQ ID NO: 300184 - DNA, 611 bp, Homo sapiens
atcttacattcatttatgtttttaaatgtgtattttatccttctgaaactatatttatttaattaaaaaatctattcttggtattataattttgtcaacattaaatctgctacaattaagagaattataatttctgggattatgaacagtatttttaaattcaaaatataatcaaataayaaaatcatacattttgtgccaaaccaagattttaaaggttaagttaaaagtaaaaagcttagaaatgctccacaatggaaagaactaggcaatatatgataagagaagcagactctgaattactggcagttaatcttgcaaattcacctgaaaggtaacctgaaaaaattgccttctaggttcttcagtttttaaaagaaggtcacatatatttgatatgttaaacaactgatctactcagctattctgatttatgtaagcatgtggcttacagagttcactgctcaatgatcctaagtaaaatatcagaattaaatttatcactagattgcatgattttgtatcattttctaaaacatggtgcaatcctttttttactaattttacttgtaaccttcatgttgttgtttagtaatgtttactaattttta

SEQ ID NO: 300185 - DNA, 621 bp, Homo sapiens
tgacttgcagttttttcaggtgaacactttctaccttcacttcaacaacttcttaatctgagcaagacctgtaatccattcatcctgccatcttttcactgttcttccccagtcctatraccccacttcccttttaatccagtgaagagtgcatggtccagctgctgggtcgctgccttgcatatttttcactcccttggcagttttgccatcctatttcctagcaaaaccgtaactccctttaagaccaacttttctctaactctgtcgctgaaccctcacagctgaaagtgcctagagaaaaatacacagcaagatacaaatttactttaaatccatgacctctaacctatcgcattagactcttggtgttatacattaattctactcaatttctctatcccattcaatctcctttcatacaagtgcatttcatattttctctctactcaagacttcaaaatctctacgctcttgacattctcagctttctatttcatacagaaaataggaacaatgagaataaaccacacttccacgactccttctcatccaacttcacctctgccttctcttcttgtaatttggaaacatggtcccagcttctacagaatgaggacc

SEQ ID NO: 300186 - DNA, 568 bp, Homo sapiens
tgggaatcggaaaaaaataataacttcaacagatgggggtaagggtaaactagcctaacttttaatgaacttgtaatagccagttatagcctgatgtgagagattagaatcctgaggagtcacagtcaaagactgtgtgtctgcacaaccagccaggtttttcaatggagcgttaacaaagggtgcaacctccagagtctggggcagggctgacaggctgagcacagtcctctgtcccatatcccaggtgcaagagcctttgccgtgtgcatgggcagacagcaagaaagagagagctcctgaatttaagaaactgagaggtgaatgaagagcaaaagaactgtcaggctgcatttgatggtcaatttgatgcatcaacttgactgggataaggggtgcccagayagctggtaaacattatttctgggtgtgtttgtgaggctgtttcctgaagaagattggcatttgaatcactaaactgagcaaagatgattcaccctcatcaacgtgggtgggcagcatccaatctattgaaggactaaataaaacaaaaagggagaggagggtg

SEQ ID NO: 300187 - DNA, 594 bp, Homo sapiens
tatctttttatatattaatggagtagatttgcaaacatttcaccaaagatttttgacattacattaaaatgggatattactctagaaatttttaactgtaataaccttttcagtttttggtatatagatgttgctagacttacaaaacgagttggtaagcatttattcattctgtattttttaaaagttttctggaaaattgctaatatttgttctttaagaatttgacaaaatgtttacgtgaagctattcaggcttggccttttatgtttggaatgtatttgactatgaatttcaattgtttaatagatgttaggctaacttttattattaaattcctgtaataaatatagttctatttagattttctatttattcttggaacaatttctgaattgaattttataaggaaacaatttattactgaacttaacacaaagttgtccacaatacatttcatcatacacataattatataatgttatctaataatataatatgtaattgtatattayatatagtatatttttacaattctaagatctatggcctacaactttttacattcttgatgttggaacttttttttttatt

SEQ ID NO: 300188 - DNA, 597 bp, Homo sapiens
tcttgcttacttcttgcttatgccttgtgattttttgttgaaaactagacatttgaatctaataatgtgctaactatgaacatcacattattccccttccccagggctttcttggtttgtttttgttttggttcttttgattgttgtaggctgtctctgtgctgaggactagcctgagctataaaattatataagttttctcaggttttttctgaagttaagactttctctgggtaagcagagtgatgttctgatttctcctgtatatctagtcttcaatgtctggctcacataaggaggaaaaaaaagtaaaagggaagagtcatgaaggttctggctctttaaatcccccatcagtaagtttagtaagaacaggtggcgttggcaacaataggaagacgtgtaaatctaatggcctctcctctttctctgcagcactatgatcagaagcagcaatcagtaatcagaaacatatttccaatatttggaaggcaggatcgtttttgtccaccttggctcctacatgtgcaaggtgctggaatgtggacatgactacctgctmtggggccgcaggggtgtccaaagggcagctgctat

SEQ ID NO: 300189 - DNA, 566 bp, Homo sapiens
tgatttgagctcacaagtaaacagatacataaactaacacaaaaactagcaaactagcttttckgtcctgcctcacctaccaaagaacctccatcacttatttgccattggagatcatcaaagaatcagaccataaataaaataaagcaaaataaaaattgtctctttttatttatttttggagacggagtctcattctgttgctcagtgcagtggcacgatctcggctgactgcaaccttctcctactctgttcaagtgattctcccgcctcagcctcctaagtagccaggattacaggcggccaccaccatgcccagttaattttattttttaattatttatttatttatttgtatttttagtagaggcagggtttcaccatgttggccaggctggtctcaaactcctggcctcaaatgatccacccacctcgccctcccaaagtggctggggttaaaggcataagccaccacacctggccaaaatataatctctttcaactcattaatacatttcaactacttaatggatggaataagcaaaatgctctaataagctcaaaga

SEQ ID NO: 300190 - DNA, 566 bp, Homo sapiens
tgatttgagctcacaagtaaacagatacataaactaacacaaaaactagcaaactagcttttcggtcctgcctcacctaccaaagaacctccatcacttatttgccattggagatcatcaaagaatcagaccataaataaaataaagcaaaataaaaattgtctctttttatttatttttggagacggagtctcattctgttgctcagtgcagtggcacgatctcggctgactgcaaccttctcctactctgttcaagtgattctcccgcctcagcctcctaagtagccaggattacaggcggccaccaccatgcccagttaattttattttttaattatttatttatttatttgtatttttagtagaggcagggtttcaccatgttggccaggctggtctcaaactcctggcctcaaatgatccacccacctcgccctcccaaagtggctggggttaaasgcataagccaccacacctggccaaaatataatctctttcaactcattaatacatttcaactacttaatggatggaataagcaaaatgctctaataagctcaaaga

SEQ ID NO: 300191 - DNA, 605 bp, Homo sapiens
caacgacagttgttgttttttttttcccctaattagaaatgctccctggctgggcgcggtggctcacgcctgtaatcccaacactttagacgtctgaggtgggtggatcacgaggtcaggagattgagaccatcctggccaacatggtgaaaccctgtttctactaaaaatccaaaaattagytgggcgtggtggcacgtgcctgtaatcccagctactcaggagaatggggcaggagaatcaggtttgaaccagggagtcagaggttgcaggggctgagatcccaccactgcactccagcctggcgaaaaagcaagactccgtctcaaaaaaaaaaaaaaaaaaaaaaaaaaaaaaagaaaagaaataaaaagaaatattccccagagagaaacactccaatcacataccagaacagaattagcttggctgccccaattctagatgtccagcggggaaagaggccttcctgtctaagtgcaggcataagtcaaacttccttctacagtacagtgtttcattcccagcccagccgggtcttgtttccacttttccagaatctttagggctctcatctttttgctatggtggacttgggaaaagca

SEQ ID NO: 300192 - DNA, 605 bp, Homo sapiens
caacgacagttgttgttttttttttcccctaattagaaatgctccctggctgggcgcggtggctcacgcctgtaatcccaacactttagacgtctgaggtgggtggatcacgaggtcaggagattgagaccatcctggccaacatggtgaaaccctgtttctactaaaaatccaaaaattagttgggcgwggtggcacgtgcctgtaatcccagctactcaggagaatggggcaggagaatcaggtttgaaccagggagtcagaggttgcaggggctgagatcccaccactgcactccagcctggcgaaaaagcaagactccgtctcaaaaaaaaaaaaaaaaaaaaaaaaaaaaaaagaaaagaaataaaaagaaatattccccagagagaaacactccaatcacataccagaacagaattagcttggctgccccaattctagatgtccagcggggaaagaggccttcctgtctaagtgcaggcataagtcaaacttccttctacagtacagtgtttcattcccagcccagccgggtcttgtttccacttttccagaatctttagggctctcatctttttgctatggtggacttgggaaaagca

SEQ ID NO: 300193 - DNA, 614 bp, Homo sapiens
aattctccagcaatagttcctaaccaaaaaggaatcctccaaatgccagtcaaacaattcaaaatattgattttgaagaagttaaatgagatgcaagagaaatccgaaaaccagtataagaaaaatcagaaaatgaactcagaatatgaatgggaaatttaccagacagatacatttttaaaaagaaaaagaaaaaaaaacacacgcatagaaattatagaaatgaaaaattcattgaagaaattgtaaaatacatgagaaagcttcaataattgactggatgaatcagaagaaagaacctcagaacttgaagatgggtctttttaaataatcccatcagaaaaaaatttttaataaagaacaaaacctcaacagatcaaattaaccttaaatgtaaatggataaaatgtcccacttaaaagatgatagattggcagaatggattaaatgcagagaaatgagatcagcttagtcacatgctrcacaaatcaattttctcttgttagggttgctagaataaaagaaatttaaattatagagtttgatttttataatttatgacaatattaaatcatgttcaacctccattttgtatcttgagcataaaagtacaa

SEQ ID NO: 300194 - DNA, 605 bp, Homo sapiens
caacgacagttgttgttttttttttcccctaattagaaatgctccctggctgggcgcggtggctcacgcctgtaatcccaacactttagacgtctgaggtgggtggatcacgaggtcaggagattgagaccatcctggccaacatggtgaaaccctgtttctactaaaaatccaaaaattagttgggcgtggtggcacgtgcctgtaatcccagctactcaggagaatggggcaggagaatcaggtttgaaccagggagtcagargttgcaggggctgagatcccaccactgcactccagcctggcgaaaaagcaagactccgtctcaaaaaaaaaaaaaaaaaaaaaaaaaaaaaaagaaaagaaataaaaagaaatattccccagagagaaacactccaatcacataccagaacagaattagcttggctgccccaattctagatgtccagcggggaaagaggccttcctgtctaagtgcaggcataagtcaaacttccttctacagtacagtgtttcattcccagcccagccgggtcttgtttccacttttccagaatctttagggctctcatctttttgctatggtggacttgggaaaagca

SEQ ID NO: 300195 - DNA, 632 bp, Homo sapiens
tgcaggcataagtcaaacttccttctacagtacagtgtttcattcccagcccagccgggtcttgtttccacttttccagaatctttagggctctcatctttttgctatggtggacttgggaaaagcagtggtggctgaaagagtagaaacttctcttcatttcagcccctccctgaacatctggttgtagagaagcacattcctcagtgttctgaacatttcaaaggttttattacatgcggactgacttatttgttttccttattacagacatccagatttcaaatttgccttgaaaaatcagttcctactcatgcactggttttgctgttttccaaaattatatttttcttagggtgttttctccttgttttccatctatggggcttataacttgtattcattcactgtggtttaagtgtataatgggagggagaataggtcagtgttcrtgtttcctctgtgttatttccaaagtgattattgtagaatgcaaatcagatcattttctttccatggaaaatcctctttggttcttttttgcattgaagataaagctcaagcttctaaaaatggttttcaaaatctttctgagttgatactaactatagtcataataatagtaattgcag

SEQ ID NO: 300196 - DNA, 626 bp, Homo sapiens
gcaatggctggaaagaggtggatacaaaaagaaggcaactagggattttgtggccttttactttcatagatgtgtgatgcgtattgttactttcagtgaacctgtaatacgagcccaaaagacgcaaagggttaaagaatgcaggttacgtgaagaaatgtgaaccaagtgcaacttcagcaaagtcacccaaggcggcactgatgaagagactgctaactagatagccagagaatcacgtaagggatttattttttaagtgtatgatacttctctgtgtttccttttggatctcacccccgcaagagcttgttgtccttagtttacttatgttttatttagggaaatttgaagaactaaacctttcagaaatcaaaatagtaaatgttaaaaggtggaatttcaaattctgtggtattttgagacaaaatgttttttaytgaatatttatgatggacattccttcaatatagctcactggtatcattaaccctgccacaatatttgggtttcagagcttactccataccatctgatagtcaattattaaactgtctgtactttatctctaattttctcacttatttccttttcaaatccttacctatcttgcctaaattttgacc

SEQ ID NO: 300197 - DNA, 496 bp, Homo sapiens
tttttttttccagaagacagccacttcatgagagatccagaatagaaactgcttattccaatagggaaaaatattcacagtgctgctttcttcagcttccaaggaatgcacaaatatatttttgtaacacaatatgcttattagtcattatatgaattaagctgcctcccttgcatcaatattatagctgacatggaagcaaaacttttatccttttcagatagtatcaactatttaaatrtgccctttaattttcactatattaaatttatttttggactttaatcatgctctcttgaatttgcttggttattcatatcgtatgtccctattaatactgaataagaaaattttcaataacaaattgctattcgttgttgaatactttcaaaatacatttataactgaaataatttatcaaattgtgcttttaattttgaagttgcattttgataaaataaatttattcaattttatattactagttgccaccatc

SEQ ID NO: 300198 - DNA, 479 bp, Homo sapiens
agaaacggtccaagaatagtgaacaatatcctyctcagtatagtctgtttcatcagtatttaagcgaacaagccaactgccaaacattttaattggcttcagtaaggattggcacaagtagtgggaaataaagccttgatgtattccagcacatacaaatccactaatatatattttaaaaaaccacacaattatttaaaatctaaaacacttgtggaagtagtgagtacctgtgccatggtaaagctattttctagaaaatacatgacatcccaagggcccacagaacagattaaaagcgacttggctcttaggagttgcaatgctctcaatacagtgttagaatccgtgataaatttcatttcaaatgaaaacacttgcttcctaaaaaaatgcctagggaaaattaaagtctgctcatttgagggatttgactaactggtttttgtatgttaatagaactcaacctgagcagctac

SEQ ID NO: 300199 - DNA, 660 bp, Homo sapiens
catcaaacatggtatctgtattagtccattctcacactgctataaagaactacctgagactgggtaagtaataaagacaagagacttaagtgactcacagttctgcaggctgtgcaggaagcgtggctgaggaggcctcaggaaatttacaatcatggcagaaggcaaaggggaagccagcatgtcttacatagtgggagcaggagacagagagaaagaagggggaagtgccacacacttttcaagcagccagatctcstgagaactcttatcatgagccaggaggaagtccgccccccatgattcaatcacctcccaccaggcgcctcctccaacactgggaattataattcaacatgagatttagatggggacacagagctaaaccatatccgtatcatttactgctcttccagtgttgctccagctaactggtgcaacatgttaattaaagccacgttgtcactttcctctataaccttggagtaaagaatgaagaactaatgatgtattctggaagatgcaaacagaggcaatcctataggttagatgaagagaaaatgtttccacagaaggtgggaagaatactctgcttggattgaaaaaaaatagggtatgagacactagggaaaaaagaaaagacttcaagaaaagaggata

SEQ ID NO: 300200 - DNA, 632 bp, Homo sapiens
tcatcatcatcacaaccatcatcatcaaaggacgaaggaggaaaaggtgtagaattcagatagtagggaaaaaaggagaaaggctgatttgcttcatttagtgatcaaccgcaagtagcgaagccccctttttaaaactgtaacatccagtcggaactgttatttgagagaatacatttattttgtgtttgagcagctacatacttgaggctatttgttagagtggtttactcaccacaatgttacagcaatagacattcattgaataattatttcattgcaggcaacaatgttaaaaacttaatacacattatctcattcaatccccattataaacttgtttttttaaactattataatgcccattttctaaaaggtagtagagagctgaaatactttttccarggttacatagttgtggaacctgagtttagaatagttaaataattatctccaggtaaaaactaagattatatctgtgctatctaaccctatactgaccctgaagctaacttacagagagagtccaggaaaagaaaagtaaatgagaactgagctttttaagttagaaattttaaaaaagtacataagaatctacgaagtaaggtggtaaaatactgtaaataaactct

SEQ ID NO: 300201 - DNA, 610 bp, Homo sapiens
gtattaaatttaccaaatgcatttcagtataaattgagattattatttttttctctcattttgaattacataaatagagtttctaagattatgaaaatttaattgcatttaatattatatcactatcaattttggctagaatgatgtgagaacacattttaagatgtacattcttttatagaaagctgtctgccaaggagaaggagacgacacatttgaaaacctagtatttgaccaaaggtaaagtattaccagaataatatcattttcttcgttatatttaattattattagcataattcagtatcaggaatgtttgttttatggtctgctgttattaaacttaaatgctttgttcttgrattgacaagaaaaagcaagtattacagagtctacaaaattagttctcagacaggagcaactttacccctgtttccccaggagatatttggcaatgtctagaaacatttttgtttgtcactactatggaaagtgaggctgctgctgccatctaatgggtagaggccaagtatgctgttaaacatccttcattgcacagtctagccatcccacaacaaagaatttttcagtccaaaatattaattgtgca

SEQ ID NO: 300202 - DNA, 622 bp, Homo sapiens
tagctttcgtaatctttgacattaatattggtcaaaagctatatgataactgtttgttgcagggaggtagaggtagtgactaagaaattagtacaacagcactcactaaaatattaatatatattcactttcaaattgcttagttrtgactttaacacgttaaaaacaagatagtaaatatttgttgaatgtgccaggtgcaagggagttacagaactgaacagggataaagacttcatgttcaggcccttagaacagcattgaagacacacttctgaactctggaatgctgtgatttctatgtcacatgtcaaccatttaacaaataagttccttccctccttctccctagaacaggggttagtaaaatacactccatggagtaaacttgacacactgcttatatttgtaaataaatctttttagaacaaaccacatccactcatttccttatcatctgtagtttcattcatcctacaatgacagagttgagtagttgtgaccgtgactatacgactgcaaagtttaaaatttctaccatggagcccactatagaaaatgtttgccaacccctccacttaatctggataagaatcttcttaaagataatctctatatacag

SEQ ID NO: 300203 - DNA, 622 bp, Homo sapiens
tagctttcgtaatctttgacattaatattggtcaaaagctatatgataactgtttgttgcagggaggtagaggtagtgactaagaaattagtacaacagcactcactaaaatattaatatatattcactttcaaattgcttagttatgactttaacacgttaaaaacaagatagtaaatatttgttgaatgtgccaggtgcaarggagttacagaactgaacagggataaagacttcatgttcaggcccttagaacagcattgaagacacacttctgaactctggaatgctgtgatttctatgtcacatgtcaaccatttaacaaataagttccttccctccttctccctagaacaggggttagtaaaatacactccatggagtaaacttgacacactgcttatatttgtaaataaatctttttagaacaaaccacatccactcatttccttatcatctgtagtttcattcatcctacaatgacagagttgagtagttgtgaccgtgactatacgactgcaaagtttaaaatttctaccatggagcccactatagaaaatgtttgccaacccctccacttaatctggataagaatcttcttaaagataatctctatatacag

SEQ ID NO: 300204 - DNA, 565 bp, Homo sapiens
tgcatgaaataaattagtaatacttctgtgaatgaaaagaattaatacaagaattctaaaagcaaaggtatgcctctgcttcattcccatgaatgtttcctataagtttacatgtgaaacagaactctgcraattttaattttaatcaagaaactaagttgacagtttttatttaaaaatgaaatatatatttcacacactaagttttctaatttcatttgaatcttttacaaaacataaaagtattttataatatatggcacattacaaaacttgtcttgtttggaaagtatttaatgcataaagtttaataaatcataaatcagatatgatgtgtgactcattaataacaattggtttggaaaactctccctgaagcacaaattgttggcttgcttcccaatatcactgttcaatcaacagtgattgaagaatcactgttcttcaatgcctgaagctcaatgtctaaaaacagttattttatggttttgcttgttcatcatttgtttcaggtgggaggtaaatctggttccttgctggaagaagatgtcaaaaatattcagta

SEQ ID NO: 300205 - DNA, 559 bp, Homo sapiens
tatttttctgatttctataattsctatagtgaacaaattttaaaaaaataagaagaaagaaacttcaattggtgacaaggtatcaagtaaaaatgaacattaaatgaagcaccaccttaaatgctacactttacaaagttcgacttcagctataatcaacatagtttctaattttaatcagttaatggaaagcataaatcagccactcaatttttgcttataagtaatttctgggggcaagtatatatcagagttgaagttcttgatcaactaactaaaaaatcacataaaaattctcccaccttctcattatcaaacactatttggttttcataattgcagtgttgagctctgacctacagataatgttctgatacatccaataatacttttgctgctacatcaataaaacatggttgtaaactcagcacttgccattcacatggctaacacaattatgcccgtctccataataatacaccaacataaaatcatcctcatggctacattaaagttaatttcctccaaattatatgctgtgttcataagacatgactgt

SEQ ID NO: 300206 - DNA, 386 bp, Homo sapiens
caatcttaattaaaatcaaagtcaagaaaaccaaaaggaaaattctgttctagctgaccatatttagtaaatcaaagattagtcactcatatacattgagcgcaagcttttaatgaacactgtgtgtcaaatccctgggatacaaaaatagattccagaaagttaaatctaaataagaaatatataaaattatttataatgtcataggattcttgctgtcatggaagtgtgagcaaagtgctcgtaaaaatacagataakggaagaggtaactgatgtgacttgagtcttcacttatgaagtgacataataattggtatttgatgtctgaatttgagtttgtcaaaacgaggaatgggatgatagcataaagcctcaaaatgtggg

SEQ ID NO: 300207 - DNA, 614 bp, Homo sapiens
gccatttatagtttctaataaaatctaagggaaaatgcaatttattatatcaatacaaccataacacaagaaaagatcattactgccctatcagcaactatagaaattgtgacaaactaaatatgtaagaccacatctgagctagaacatcagtcacttttttttgaaaacaatattaataccaagtgtttgatgaatatgggcagaatgttaccaatacttttattaaagatatttgattaactacaggttttttttcttccagatatttgaccagttaagtggcttctctatccatgcttgggaagtccattagttatgtctaaataaatgtatgggtgccactatacctccttccacagcctgatcaattgattggtatgagcaacagcaagtaaacacatttartacatcttccctgggattagggaccattgttcctgactgtcactagccccttgtccttcagtttcagttgccccgggggtaagtctgcctgttcctttgtgatgtgcagcgctgctgtttttaggcattaatagatgcataactgaaacctaattttatttgtccatttgcttaggacttattagagtaagtaactaaatgagtca

SEQ ID NO: 300208 - DNA, 630 bp, Homo sapiens
cttatgaatggggttagagagaaattcctagggcggtgaatatttttccaccatcaccactatctgcatgtctgggaatggtgtcaagtggggagagggcaaagcagtgaggaattggcacttgccacattggtccttcattggaacacaaaagaagactggagaacaatgtaaccgtctaggtagacccactgaaagacagcgatcatcgtggaaactaatyacccaacattgacaaaatgctcctagggagttgagctttggagaaattgtttgctgcagtgagttttgttcacaacaacaccttaggtttggcatcaattttccattgagaatgagcttggagacttgccttctgctctaatagggaggaaagcatgaacaccagaagccttcaacccttcttctatttaattttgaagacatgtttggataacatcaattcttagaaataatgcttgaaacaatttgccacattatatttttattgaataaggggattcacaatcaagagttatacatttaatattctgaatggtacacctaagctgttactttaagaattgagtaatttattctagtagttattacagcctggaatgttataaaagcagtattgtactgtggtta

SEQ ID NO: 300209 - DNA, 516 bp, Homo sapiens
tgtgagtcaattaaacctctctcctttataaattacccagtctcaggcagttctttataacagtgtgaaaataaactaatacagatgtcttcactctctaacttaccacaaatttatatttctcagacacacttggataatatctcaatcaggtcaatacagtaatcaacagtgttcactgtaatatacaataatcactaaagcaccttcatatggtgccacaaagcataccattttgaggaaatagaattaaaaatgggactttttataccagatgtaacatgacttggcaaagaaactgcacaatttttacagtaggacacaatggtgaataacttacattaccaaacacaccattaaatgggtagaatagctgtcacttctgctcagaattacatataaagagagagggtcactcacaatcttacactcatcaaaactcctattrtgaactctaccactagcacatgactgatataatttataggcaaataaatatatactcagcaactcaac

SEQ ID NO: 300210 - DNA, 483 bp, Homo sapiens
tttcataacagccctcttcaatgccatgagtctcctcattctttgtatttctcaatcctctaataaaacgcaaacattttagaaaaggcgatctttagaggccatgttcagtcactaaattctatatccatcatatcacttgccagcgtgagaagctaagaagaacttaaacacaagataggtaacaagaagatagtagacaggtatgacagggaggtctgttggggaggcgaaggaggaaggacatttagcaataatggactgatacctatgcattgaaaaggtgtttcactggaaaaacagtgaaaatagaggtacaaaataatagtatccatctatttaatttcctaaatatggccaaaggtatagtgcaactggaaatcacattgggaataaaaacaaatgtgtttagtaaagaaggttaggattccaattctgcacatacgatgctctaaatraatatgaaactgtttcttaacacca

SEQ ID NO: 300211 - DNA, 560 bp, Homo sapiens
ctgtatgtgaatccatttgctcctgagctgaatgacattggtgtcttaccttctgtagtccttcacactgtattcagaggaatgcttctgttaaaacaaactaaatatggcctgagaaggactctgtacttctatatttgagtccttgtggatgaactgcaagctaacttaataggtagacaagactgaaaacctaacttcggagtatgtgccyctaacaatcactgagtcttggccaatcccagcagccatacttcaaccagtcatagactgctgagtgttcaaactgtgttcaaataaggcagacgtcaagctgtaaccaatccatctgtttctgtacctcacttccgatttctgtatgtcactttactttttttgtctataaatttgttctgaccacaaggcacccctggagtgtctttgaatctgctgtgattctgggggctggccaactcacgaatcgttcattgctcaattaaactcctttaaatttaattcggctgaagtttttcttttaacacttctaaattgcaaatctaattatacgattaccatgctta

SEQ ID NO: 300212 - DNA, 560 bp, Homo sapiens
ctgtatgtgaatccatttgctcctgagctgaatgacattggtgtcttaccttctgtagtccttcacactgtattcagaggaatgcttctgttaaaacaaactaaatatggcctgagaaggactctgtacttctatatttgagtccttgtggatgaactgcaagctaacttaataggtagacaagactgaaaacctaacttcggagtatgtgcccctaacaatcactgagtcttggccaatcccagcagccatacttcaaccagtcatagactgctgagtgttcaaactgtgttcaaataaggcagacgtcaagctgtaaccaatccatctgtttctgtacctcacttccgatttctgtatgtcactttactttttttgtctataaatttgttctgaccacaaggcacccctggagtgtctttgaatctgctgtgattctgggggctggccaaytcacgaatcgttcattgctcaattaaactcctttaaatttaattcggctgaagtttttcttttaacacttctaaattgcaaatctaattatacgattaccatgctta

SEQ ID NO: 300213 - DNA, 591 bp, Homo sapiens
attagaagttataactgcattatatctgtgagtagagacttcaaatatattttttaaaagaggcccaaattaaatatctagagataaaaactgtaatatctgagataaaaaataaactagctggggtcaatagcacattagatattaaagaaaaaaagattaatgaccctgatggcatagaaatacaaactatccagaatgaatacacagagaaaaaagaaaattttaaattaggcagacataaattataccagtaattacattaaatgtaaatggattaaatatgcaaagtaaaaggcagagatttgcagaatgtattaaaaaataatacaactataagctgtctacaagagcacrctttagattcagagatacaaatctgttgaaactagaaggatgaggaaaaaagaaccatgcaaacagtaaccaaaagaggtaagggagctatactaatatcagacaaaacacaaattgttttgtgttttgagacacaaattgttactaaagacaaagagggacattttataatgataaaaggaagatataacagttggacatataataattgtaaacgtatatgcacataacaac

SEQ ID NO: 300214 - DNA, 554 bp, Homo sapiens
gttacagtgaccaaaacagtgtggtactggtatcaggacagccatatagacaatggaagagaaaagggagcccaagaataagtcctcatatatatggtcaaatgatttttgacaagaatgccaagactatttaatagggaaaaaaaattcttttcagcaaatggtgctgggaaaactggatatttacatgaaaaagaatgaagttggacctttatctaacaccatacaaaaattaactcaaaacgaatcaaaggcctaaatttaagatctaaaaatgtaaaactcttacaagaaagcagggcaaaccttcatgatgttggatgtaactatgttttcttggatatgacaccaaagtctcaggctacaaaacaaaaaatagacaaatgggatctcttaattttttaaaaaacaattttaaaaaacccaattttttwaaaaaaattgttcatcaaaagacaatatcaacagagtaaaaaggcaccccataaaatgggagaaaatattttcaaatcatatatctcataaggcattaatatccagaatatgtagagaac

SEQ ID NO: 300215 - DNA, 627 bp, Homo sapiens
ctttacatatattagctcatttactcgataataagttatgagagaaggctattgtcatcttcagataaagaaatggagaccaagcaaaattagagagatttgtccagggtcagtctatgaattaaaatcagagttagaactagaaaaaaaatttctcatttgtattaaagctatttcattaaaaccacattggtataataaattggatataataaaatgtttggtttgtgcttggctattaacatatctatgtatacgagtttttaaaagtaggcaacatgagcacagttgaacattgcaagttgtgaggatagaaatgtacragagaagttgggaggtgttttccagctcagaagtactatgatcttatgatcctagagaagtaaataaataaaatgaagagaagaactcggaaagaaaaagtaaaagataccaaaaaggctggttgggatggaagagtcttacaaaaatcgatcccaggaatccccacaaagagttgcaaaaaagaagccctcaggatacactaatgtcttgtgaaagccagagtaacccaggctcagacttcttgcctaaaaacagtatataacctagaaatttcttctccaaacccaaaacaggaaaaatgac

SEQ ID NO: 300216 - DNA, 627 bp, Homo sapiens
ctttacatatattagctcatttactcgataataagttatgagagaaggctattgtcatcttcagataaagaaatggagaccaagcaaaattagagagatttgtccagggtcagtctatgaattaaaatcagagttagaactagaaaaaaaatttctcatttgtattaaagctatttcattaaaaccacattggtataataaattggatataataaaatgtttggtttgtgcttggctattaacatatctatgtatacgagtttttaaaagtaggcaacatgagcacagttgaacattgcaagttgtgaggatagaaatgtacgagagaagttgggaggtgttttccagctcagaagtactatgatcttatgatcctagagaagtaaataaataaaatgaagagaagaactcggaaagaaaaagtaaaagataccaaaaaggctggttsggatggaagagtcttacaaaaatcgatcccaggaatccccacaaagagttgcaaaaaagaagccctcaggatacactaatgtcttgtgaaagccagagtaacccaggctcagacttcttgcctaaaaacagtatataacctagaaatttcttctccaaacccaaaacaggaaaaatgac

SEQ ID NO: 300217 - DNA, 661 bp, Homo sapiens
ctgggtcttgctatgttgcccaggctagccttgaactcctgggctcaatccatctgcccactttagcctcccaaaatgctaagattataggcataagcctctgcacccagccagctctcttactcttctatgtatgctctgacacggaaaacaagcttatgttgctagctacctgtgcagttaccaatgtccacctcttcatgaaacctctttaattcatgcaaataagagataggcttgccccattctccatcatttccactattacatttgcttttgcctctgcatgtgttagtggtgggaagagcayatttatacagctgtctctcagttaatagaacacatttacccaggaaaagagttcctaaacataatgcaatcacatttcagaatagtgcaaacttcttaagatcatacagttaaataatataaaatttttcaagtatatgacattattttaaacgttagcaatgaaattgatgaagaagtatttatctgctaggcttctaatgtactaaggtatattgttagatgctgtataagttttttttaagttgaacacacagatcctatttttaagaagcttataatctagttgggaagataagttttaaaatatactcaaattaagtgtaagaattaaatattagaacagtaccaa

SEQ ID NO: 300218 - DNA, 484 bp, Homo sapiens
cgtatctcactacctaatttgggaggtagtttagaaaagtactgcttttctcttttactcagatttgccgagtcgttgttgttgttgttattgttgttcttgagacgcggtctcacgctgtcactcargctggagtgcagtggcatgaacactgctcactgaagcctggacctgccacgctcaagcaatcccccacctcagcctgccaagtagcggggattacaggcacgtaccaccacgcctggctaatttttgtatttttgtacacatagggttttgccatattgcccaggctggcctggaactcttgggctcaagtgatcctcccacctctgcctctcaaagcactgagattacaggcgtgagccatcgtccctggcctatttcctgggttttaaaatgtcacttggtctcccacagaaatctttaaaatgaattagcctctatcaaaagcttccctaggccgaggcagagcttgcagtga

SEQ ID NO: 300219 - DNA, 484 bp, Homo sapiens
cgtatctcactacctaatttgggaggtagtttagaaaagtactgcttttctcttttactcagatttgccgagtcgttgttgttgttgttattgttgttcttgagacgcggtctcacgctgtcactcaggctggagtgcagtggcatgaacactgctcactgaagcctggacctgccacgctcaagcaatcccccacctcagcctgccaagtagcggggattacaggcacgtaccaccacgcctggctaatttttgtatttttgtacacatagggttttgccatattgcccargctggcctggaactcttgggctcaagtgatcctcccacctctgcctctcaaagcactgagattacaggcgtgagccatcgtccctggcctatttcctgggttttaaaatgtcacttggtctcccacagaaatctttaaaatgaattagcctctatcaaaagcttccctaggccgaggcagagcttgcagtga

SEQ ID NO: 300220 - DNA, 579 bp, Homo sapiens
tttccacatgcaaaaatccctacaaactttgccaggttacaaagcaacttaaatccaggttacaaaggacctagattagaactttaaatccaggttctaatctaaatggtaaaacaaacaagtctaatttttctttcttaaagatactgccttcatttgctattaaatgaatatatttattaataactgtctttcagcatatacatgtttatctggcaaattataacatgaggtagctatccctttgtttctagtttaaactacagtattttacaatacacccatattaatttttatttaacttaatctcatattgtattacaagttacaaaataagtatttttatttagcccctagtaaatacatctttctttattttgagatagggtcttgccctgttgtccatactggagtacagcgtcacaatcacagcycactgcagctccaacctttcaggctcaagtgttcctcatatctcagtcccccaagtagctgggaatacagtgccaccacatctgactgatttttttttttaagagatggggtctcactatgttgccctggcttgtctcgaactca

SEQ ID NO: 300221 - DNA, 543 bp, Homo sapiens
gtggtccagcactgttcaatgactttgaaagccttttacttctatctgcaatatttgtttttagataaatcaccaaaaacatctgagattccagttggttcacatgactatgtggagttgtaacttaacaaaattaaatcatattattcatgtacaaacccatactaactttataaataaggacaccatgtatacatgcccacagcagggaacattgttataagctyactcctactgatgatctcagtgatgcatggatgagtgttaacattgaaaggccaccacaatcattagtcaggacattgatcaatgtcacattgatagcagagatagcctcagacctttactggctcttcctagtgatgatggtgaaggtgttagcacctttcatttgttcagggctctgaagtcttcctgaactctaatttcatttgaacctcttgtggctcctataggatggagagggacagatacagaaaaagattcagggggttgtctaaggtcacaggcttggttaagcggtaccattaggagtagtaggta

SEQ ID NO: 300222 - DNA, 543 bp, Homo sapiens
gtggtccagcactgttcaatgactttgaaagccttttacttctatctgcaatatttgtttttagataaatcaccaaaaacatctgagattccagttggttcacatgactatgtggagttgtaacttaacaaaattaaatcatattattcatgtacaaacccatactaactttataaataaggacaccatgtatacatgcccacagcagggaacattgttataagctcactcctactgatgatctcagtgatgcatggatgagtgttaacattgaaaggccaccacaatcattagtcaggacattgatcaatgtcacattgatagcagagatagcctcagacctttactggctcttcctagygatgatggtgaaggtgttagcacctttcatttgttcagggctctgaagtcttcctgaactctaatttcatttgaacctcttgtggctcctataggatggagagggacagatacagaaaaagattcagggggttgtctaaggtcacaggcttggttaagcggtaccattaggagtagtaggta

SEQ ID NO: 300223 - DNA, 589 bp, Homo sapiens
gcctcccatcttttaaggctgataatgaagagaagaacatggaagaggaagttgttgggttttttttttccagtcagaaatactgaaagatttcttacagctgtctggtttcctgatacttaaattgtgaaactttaagttcactccattatcatttctaaaatttattttgaataagttccctttcgggggagatacccatgtgtagagaatggtatggaaatctgccaatggagggattagaaattttgtcagtttaaagacttggaccttttgagatttttgttgttgttgttttgtttgttcttcttttctgagatgaaggctcactctgtcgcccagcctggagtgcagtggtgcaatctcagctcackgcaatctccgcctcctgggttcaagcaatcctccctgcctcagccttctgagtagttgggattacttacaagcatgtgccaccacacccagctaatttttgtatttcctgtagaaatggggtttcatcatgttggccaggctggtcttgaactcctgaccccaagtgatctgcccgtctcgtcctcacaaaatgctgggattacaggtgtgagcc

SEQ ID NO: 300224 - DNA, 554 bp, Homo sapiens
  misc_feature (1)...(554): n = A,T,C or G
attaccagagcttgttccagagaggcagtgggaggctccacaggcaggcttggagggtgcttggccctaatactaaatgttggacttcatggcattaacgaaggggaatcactggagccttttagtatgaagctaatytttttgtccatcacaggcaacttcttgcctacactcttttacaatatggcatttatgacatagccaagagcgaagacacgttgaacactgacttaatgctttgagtaggtggagagttgaatgactcaaggctacttctctagagattaatttgaagctagaaagtaacatttatttctgttttctgtgacagcaataggcttcagcttgtaatcgtcatctgcaagtaggtacttgacacctcccctaagtgacctggagagtgacagatacagtaatgggcacaatccttggttntttgttttgttttgtttttgagacagagtctcactctgtcatccaggctggagtgcagtggtacgatctcactcaccagggatttggccaccacgcctggccgaatccctggttttaag

SEQ ID NO: 300225 - DNA, 500 bp, Homo sapiens
  misc_feature (1)...(500): n = A,T,C or G
cagtgccttcccaaaaggagtttaccagtagttgaggagmcaagcctaacatgggcaaacaatgctaaaaagtacctangtctagtttaaaataatgttgcacaccatacatgctacagatgctttaaaaagttgcctatcaataggagctttaaataaaactttcttgagaaatagaactttcatgggacattaagaaggaaagacagatatggagaatgattgaatgaagtattcagcaagtataaatgcagcctaagaagtggaaattagcatcgtatcgtttttttccaaataagaatgaagagatgaacttagtgaggacaattttgtgaggagttagggagttggggatctggttgcaagctcaggtaagcctgatgatgctttgttccttaccctgagagacattttaccaaaaacactgacagacattcctgatagattaaccaataccaaacgtttttgaatcctattcttatttgccacacacgtttagt

SEQ ID NO: 300226 - DNA, 500 bp, Homo sapiens
  misc_feature (1)...(500): n = A,T,C or G
cagtgccttcccaaaaggagtttaccagtagttgaggagacaagcctaacatgggcaaacaatgctaaaaagtacctangtctagtttaaaataatgttgcacaccatacatgctacagatgctttaaaaagttgcctatcaataggagctttaaataaaactttcttgagaaatagaactttcatgggacattaagaaggaaagacagatatggagaatgattgaatgaagtattcagcaagtataaatgcagcctaagaagtggaaattagcatcgtatcgtttttttccaaataagaatgaagagatgaacttagtgaggacaattttgtgaggagttagggagttggggakctggttgcaagctcaggtaagcctgatgatgctttgttccttaccctgagagacattttaccaaaaacactgacagacattcctgatagattaaccaataccaaacgtttttgaatcctattcttatttgccacacacgtttagt

SEQ ID NO: 300227 - DNA, 563 bp, Homo sapiens
ttcctgcatgcgggcagtgcgggccctgtacagaaaggtacacgagataggcatcctcacatccattgtcctgggaggaaactgaggctttgagaaacggagaacttgccgggccatttgactctacgtcatcccctcccccatcaatgccctgaacagcctcctgtacacccttaaggaacttactttgtaatgattattaagaactcagcgagaccccgagcatcacctcggcatatcgcatcctttctctagagaacccctaatgttggaagggatcagagcgcacctcctccgctcctgggagcacccccttcctaataataccttggggatgggtcggaaggaaaggaaaggagacgcgagaggtgtagtcgatgtgcctgcgaagcccaggctcctcyggagatccttccgtccgtccctacaggagaaggctggcccgggctgctccactccccggagctgcagactgagtcgccaggtttctgtgccttcaaagccctgcgcgacggccacaccaaacacccaaaccttgggcagggaccaaacggtcacttccc

SEQ ID NO: 300228 - DNA, 617 bp, Homo sapiens
gccctctccagtatatataatttcttcccaccacctagctgtcccaccagactcctgctaccatgtgatttatagaaatttatccagtaattccaagtaattttgcgtaattattttttacttaggaggtataatgtaattttgacccgtaccaaagttcatagtccttccagtagggcaatagaacaaggtctttgaaattttacttacacacagagagacataaacatacattcacaaacttcaagtgattatttaatttatattaggcaggacaccattaatccttaagaaatttacactccatttgctttytgttgtttctgggcaataacagcttaactaagtaatgatcctttttactttctcattcagtatcaaaaacaccttttgtgattgattaagtgctaaggaatggacatcttaaataactgtgaatatagctaatacagtttaatagacttaatggtaaatattagtggttttagattacagggcaaacctaaaaaggcagtatggggttttgagagaaaagaaaagtaacttcaaatgggactgaatgtgagtctcagctttttctggtactactagtattaaattggacaactcagtgaaac

SEQ ID NO: 300229 - DNA, 600 bp, Homo sapiens
aggccccacctccaacaatggggattataatttgacwtgagatttggttggggacacagatccaaaccataccagtaggtgtgtggatttatttctggattctctattatgttatattcgtctatgtgtctgtttttatgccagtcccatactgatttggttaccatagttctaaactatgatttgtagttaggtattgtgattcttcgagttttgatttggttaccatagttctaaactatgatttgtagttagatattgtgattcttccagttttgttcattttgctcagaatagttttggttactctgggtgatttgtggtttcatatgtgtttcaggattgattttctatttctgcaaaaattgttattggtattttgatagggattgcatagaatctatagattgctttgtgtagtatgaacattttaacaatactgatccttctaatccatgaacatgagatatctttccatttttttgtgtgtgtgtcctcaatttcctgcccaagtgttttatagattttattgcagatatctttcagttctttggttaattttttgtatttaattttatttgtgggtattgtaaataggat

SEQ ID NO: 300230 - DNA, 668 bp, Homo sapiens
gttttggtatattgtgtttccattaccatctatttcaagaaatatttcaattgtcttcttaatttcttcattgacccactggtgattcaggagcatattgtttaatttccatatgttcatatattttccaaaattcctattattggttyctagttttattgctttctgtttagagaatatgtttgatattgtttcaattttctttgaatgttttaagacttgtttttgtggcctatcatatggtctgttcttcggaacgatccatgtgctgaagaatatatattttgcacattctttgaataaagaatgatgcttgaataaagtgatctgtaaatatccattggggccatttgttttataatgcagataatgtctagtgtttctttgctgattttcggtctggaagatctgtccgtgggtgcttcagtgttgcatgcatatatatttacaattgctatgtgctttggctgaattcactccttcatcattatataatgactttctttttctcttcttagtttttgtctagaaatctgatttgtatgatataagtatagctactcctgctcttcttttttcaattggcataaaatatatttttccatctattttcaatctatgtgaatctttagagatgaattctgtttcttataggcaacaggtcatta

SEQ ID NO: 300231 - DNA, 192 bp, Homo sapiens
tggccttgaattttgacagagaagtaaagtaaaatgctttgaaatctcttcttcctttctctctatccatggctatttgtttcaagctctaattgtgtgtgtgccatagatctgactttcgtttagctccattcatgtagatgaattrtagatgaaattcttccaggatctgacaatctgttattaatattc

SEQ ID NO: 300232 - DNA, 472 bp, Homo sapiens
tacattgaatttatgcagcattttgtcatctgaggagcttatacaggmagttacacgattcatcaggcaattagaattttcaggtgttttcttgattatagatagacatgttttggtacttccccccaaccccagattgagaaattggggctaacaaaccagtagttgccaaagagattaaattattccaatagatattattgtctgtagatagtgggcctacacaatgtattgttttcttactgataagaaaatagattttcaaaagaaaatactgagaccttgcccaattttgccatctatctctgagaaactgagtattttctgcatattcattgcacttgttctctagaagctgccacaagttggactattttatcatttagcaaaaagagcaggggcaaatgtttttgccacatcaaactgctagaagttcatgtttctcaaatgattatcaaagtgtggaccactt

SEQ ID NO: 300233 - DNA, 590 bp, Homo sapiens
taaaaacttaccagtaacctagagttattaacacaatgtggtactaatataggtyggacaaatggatcaatggaatagcacttagagcacaaaaataagtccttataattatagccaagtaatttttattaaaggtgccaaataaattccgtgggaaaatgatagtctgttcaacaaatggtggagtaattattggatatctacatggaaaatgatgaatttatactttatctcataccatacacaaaaattaactcaaaaattgatcatatacttaaatttgaaagagctaaagcaacgaaattttataagaaaccataagagaaaatctttgagatactgagataagtaaactctttttgagtactataatgaaagcaaagcccataaaagaaaaagataaattagacctcactgaagttataattttttccctcaaaagacaccattaaaaattgaaagagaatttacgaggaagaaacatttacaaaacccaatttgataaagggcttgtatgatatgaccagatatttcaccaaaaaagactgacaatcaaatgagaagatgctcaacatcattaggaggaaaag

SEQ ID NO: 300234 - DNA, 590 bp, Homo sapiens
taaaaacttaccagtaacctagagttattaacacaatgtggtactaatataggttggacaaatggatcaatggaatagcacttagagcacaaaaataagtccttataattatagccaagtaatttttattaaaggtgccaaataaattccgtgggaaaatgatagtctgttcaacaaatggtggagtaattattggatatctacatggaaaatgatgaatttatactttatctcataccatacacaaaaattaactcaaaaattgatcatatacttaaatttgaaagagctaaagcaacgaaattttataagaaaccataagagaaaatctttgagatactgrgataagtaaactctttttgagtactataatgaaagcaaagcccataaaagaaaaagataaattagacctcactgaagttataattttttccctcaaaagacaccattaaaaattgaaagagaatttacgaggaagaaacatttacaaaacccaatttgataaagggcttgtatgatatgaccagatatttcaccaaaaaagactgacaatcaaatgagaagatgctcaacatcattaggaggaaaag

SEQ ID NO: 300235 - DNA, 575 bp, Homo sapiens
agtcaataaaatatattggcaaggatgtggattaacaggaattaccgtatattgcttgtgagaacataaaatactgcaaccactttagagaatatctactcaatgaaaatgaaaacacacattcacacaaagactgctcctaaatgttcatggcaacattattcataatagtaaaaaactggaattaactttaatgtcaatcagttgctaaatggacaggcaaaatatggtcttcatrcaatggcatataattcagcaatgaaaaagaaataactactggttcatgctgtgtcataaatgaacctcaaaaatgttatgctgaatgaaataatccagatatgagatcatatattatatgaatttgtttatatgcagtgtccaaaaaggcaaatttatagtatcagaaagtaaattagtaatttcttgaggctggaaggagaatgggaattaactgtaaatgggcatgagggattttattcaggggatgaaaacattctaaaattaatttatggtgatggttgaacccctgaataaaattactaaaaatcattgatttgtaaattgaaatgggtgaa

SEQ ID NO: 300236 - DNA, 524 bp, Homo sapiens
aggcacagaagatggaaaaatttcatagagagtgctcatgttgctgtatctcaaaccatagaagaatttcaaaaagagcagtgccacataataaataaatgtgaacatactttccaaggagagccatgtccaaaaacataaaaataagctayttattatgattcaagacttcaaaatatagttaatgatcacgtaagttggtcaggtcttattgactatctccatgaaattgcccataatctattcctgtcatatactttttcatatgtcaaatattcttttcgtttcttttagttttttctgttttaaaaaagtttttttttataattttaaattgtcaggattattttttacaattcactatgccatacatttcatgttagcatcatttccagtattggcctataacttgtgtagggactttttgagagttctaattcattttatgcattttttgcaaatttgactccttgaaagggcattatgacaacatttactttataagcattgtgtgtatatgtaaa

SEQ ID NO: 300237 - DNA, 639 bp, Homo sapiens
catgaaaacaaactaatacatgtattatatatgatatctagtgtctgtaattttaggatttgggttctttttcttcttaaatgctcagtgttatatgtatttgaagtgtaatattgggtagcagtttgcaacatttacatttcatttgtagtgttttayatccctagaaatcaaagcttattaaatggatttcaaaataaagacaaggctcctattttattaagaaaattttgatgttcataaaatcagcaggaaagattgaaacagactgaggactgggcagctgtaacaaatagattccatatttcatctcagaaatggtatcaggtaatcatcctgatgccatgaccacatattagccaaggaagcctgcaccatcaacatcactaactcagctcccggataatatcactacctccaggtaatccactactcacttgtttcattattccctcctttgaaatttcggtgagtgcattttattggtgagtctaggtcatgtgcttgctaacaatatgcatggaagctttggacatgaatttctggcattttcagattctatgtttgcaagaacactcataaggtgagagtttttgccaacattagaaggggagacatcaaatgggcagccaaaaagaa

SEQ ID NO: 300238 - DNA, 639 bp, Homo sapiens
catgaaaacaaactaatacatgtattatatatgatatctagtgtctgtaattttaggatttgggttctttttcttcttaaatgctcagtgttatatgtatttgaagtgtaatattgggtagcagtttgcaacatttacatttcatttgtagtgttttatatccytagaaatcaaagcttattaaatggatttcaaaataaagacaaggctcctattttattaagaaaattttgatgttcataaaatcagcaggaaagattgaaacagactgaggactgggcagctgtaacaaatagattccatatttcatctcagaaatggtatcaggtaatcatcctgatgccatgaccacatattagccaaggaagcctgcaccatcaacatcactaactcagctcccggataatatcactacctccaggtaatccactactcacttgtttcattattccctcctttgaaatttcggtgagtgcattttattggtgagtctaggtcatgtgcttgctaacaatatgcatggaagctttggacatgaatttctggcattttcagattctatgtttgcaagaacactcataaggtgagagtttttgccaacattagaaggggagacatcaaatgggcagccaaaaagaa

SEQ ID NO: 300239 - DNA, 639 bp, Homo sapiens
catgaaaacaaactaatacatgtattatatatgatatctagtgtctgtaattttaggatttgggttctttttcttcttaaatgctcagtgttatatgtatttgaagtgtaatattgggtagcagtttgcaacatttacatttcatttgtagtgttttatatccctagaaatcaaagcttattaaatggatttcaaaataaagacaaggctcctattttattaagaaaattttgatgttcataaaatcagcaggaaagattgaaacagactgaggactgggcagctgtaacaaatagattccatatttcatctcagaaatggtrtcaggtaatcatcctgatgccatgaccacatattagccaaggaagcctgcaccatcaacatcactaactcagctcccggataatatcactacctccaggtaatccactactcacttgtttcattattccctcctttgaaatttcggtgagtgcattttattggtgagtctaggtcatgtgcttgctaacaatatgcatggaagctttggacatgaatttctggcattttcagattctatgtttgcaagaacactcataaggtgagagtttttgccaacattagaaggggagacatcaaatgggcagccaaaaagaa

SEQ ID NO: 300240 - DNA, 545 bp, Homo sapiens
aatttgcacattttcaccctggatgctatggatcttttatctctgacccttgtsagtagtgtgtcatggcccagagtttctgaactgaagtaataattatagtttgattgactggttgtaccacatatcttagttcattgtttggactgaaatagagctaaagtcagtgactggaggaaaatatcaaggtactttacggaagaaaaaaatgaatatacttctgagaccctctaaatagacaatgtatatgagtggaatacatgtgtgattagggtgttttatattcaagaaaccaaggcatttggactaggcattcatattgtgatttaatgaagagccttaatagcttggaaggaatgagaattctcaggagcatattccaaagttgtactaatagggagtacttagaaagcacaagtaaaccagatagcagaataagaaggtcaaaaaaggggaaaatgctcaataatagcactgattaaaacctcagattgcaatggaaggtctgtaaatgaggagatttctttggctgtctcaaaggcact

SEQ ID NO: 300241 - DNA, 571 bp, Homo sapiens
gattgaagttttaaaaaaggaaaaattccaagatgctatgctaaaaatgtcaaacttacataataggccattgcctacaaaagtggtatggtttgactgtgtccccacccaaatcccatcttgaattttagttttcataatccccatgtgtcatgggagggacctgatgggaagtaactgaatcatggaagtggttaccttcatgctgtcctcatgacagtgagttctcaacgagatctaatggttttatcaggggcttccgctgtcactcagttctcattctctctcctgccaccatgtgaagaaggatgtgtttgcttccccttccaccataattgtaagtttcctgaggcctccccagccatgctgaactgtgrttcaattaaacttctttcccttataaattacgtagtctcaggtatgtctttattagcagtgtgagagtggactaatacatgaggcaaaataatttttaagcaaaagagtaaaatcagtcacagttctttcttttgtagagaaaaatgtcaaaattaatatgaacaataaattgtaaaggctagagaatttgact

SEQ ID NO: 300242 - DNA, 626 bp, Homo sapiens
gtaataacattatgtctacatttatgataattttaattatcagaaaacaaagtttgtaaaaagtgtgaacattatttcttataaatattagatgtacatatctaatagcttagtcaatcttataattcaccartgaaaaagtactctacaatgataataaaaatattttattgtgcccaacttactgacttactgagaaaaattacactgttagaattacaggaaggttttttttacaaagcataacgtttactgaaacttggacatacttgctttacctggctcagttaccaacgaactgtacaaaatgaaatgattccaatagtcaagggtttccattaacctggcactgtacaaaatgaagcctccctgtatgtcacttgcaccattgaatcttatgtttatacaattttattgtgccaaaaaggaataataaatagtttaaacctttgaaatactcattggagaagttggcttaaaaaatctagctgttcttgataagatttgcttttaaaataatgaagtaaattttaaaaatcaataatgtgttcatttttagtaatgtttttgtttgttaaaatttaacagtgttttaatataaatattaataattgaaatatgaaaaa

SEQ ID NO: 300243 - DNA, 585 bp, Homo sapiens
ctgtaagtttacaagtaccattgaatttaaatgaaatttaaattcaaatcaaccatataatataggtacttttatttttccaatgtaaacaatttaccaagcttaaggaacttcaatagccattatgagatcatatatctggaagatggtagaactgaagttcaaacccagttttagataattctaaatcccatggttttgaaatgtttcaggttaaacaatcctracaaaaatccagttaattctacagatgtaatagttatttgttgtattatttaaatagttgaacaactacctaataactatttgtaatgtgccagtcactgttgtatgtgctggccatagaatactgaacaagactgagaatattttttgctcaagaaacatgacggaagggggatgagtaaattactagatggatggatggatggatagatagatagatagatagatagatagatagatagatagatagatttaaatagtgaaagggtgctacaaaggatataaaaaaagaagctaatggaatcaacactgatggaattgagaaaggggatgcagcaagaccagtttagactggatgat

SEQ ID NO: 300244 - DNA, 556 bp, Homo sapiens
ctgacttatcagttgtcaggttattagacaatctagtaatgttaacggataacttccagaagttatgtgtaattttgatataatgacatagagttgttaatatatttagggatgaattgtcaccattattgtattgtactataaaatgctatagctaaaaataaatatataaacacataaaatatataggtgatatataaaatatgcaacaaatataaaatattgaaaatagttttggatagaggtgatgagtatgttgtacttattttaatattcactatgcttttaagtatacttagctgttttgaaataaatagtttaaaaaagctattacattagtttacgttttagaaaacctcaaaatgcaaggatcagctaggtaagmaaaccagtattttggaaaatgagaaaagcactttgggaggccaaggcaggagaattgcttgagcctaggcatttgagactagcttggggcaacatagtgagaccctatctctaccaaaagtttttaaaaaaaaaaaattagccaaacatggcagtgcatgcctgtagtctc

SEQ ID NO: 300245 - DNA, 556 bp, Homo sapiens
ctgacttatcagttgtcaggttattagacaatctagtaatgttaacggataacttccagaagttatgtgtaattttgatataatgacatagagttgttaatatatttagggatgaattgtcaccattattgtattgtactataaaatgctatagctaaaaataaatatataaacacataaaatatataggtgatatataaaatatgcaacaaatataaaatattgaaaatagttttggatagaggtgatgagtatgttgtacttattttaatattcactatgcttttaagtatacttagctgttttgaaataaatagtttaaaaaagctattacattagtttacgttttagaaaacctcaaaatgcaaggatcagctaggtaagcaaaccagtattttggaaaatgagaaaagcactttgggaggccaaggcaggagaattgcttgagcctaggcatttgagactagcttggggcaacatagtgagaccctatctctaccaaaagttttwaaaaaaaaaaaattagccaaacatggcagtgcatgcctgtagtctc

SEQ ID NO: 300246 - DNA, 596 bp, Homo sapiens
ctgcagtgatgtattcactgccttaataataggttgtaattgtcctctttcattcacagaaaaatctggtgagccgtgtaaactggaatagcatttaacttctaaaataagacttgcaccagaataacaatgcttcacatataatggcaatagtgatcctctcaactgtatcttttgtccttttcctgagtaaagtttagactgcccttattctgaaactatttctaaatctattatttagatatgttattcagtatattctctcaaatgataaatgcctaaataagtttaagacactataaatgacacagaacatgaccatgaaacatgctattaaaaatccaaagcaatgaaataaggctaaaatcaaatcagcctttgaatgttttaaggagatggacaccacaaatgatagaattcatattttktgatactctccactgaagaggacgtgtccagcacaaagccatgaagaatatagttaagataagtttttaggtccaaccaatatctcaatgattatgtgcaaaaggatatggctatattaatttcatctcttgattaaagaaatcataaaaatcaaacaagatagccca

SEQ ID NO: 300247 - DNA, 596 bp, Homo sapiens
ctgcagtgatgtattcactgccttaataataggttgtaattgtcctctttcattcacagaaaaatctggtgagccgtgtaaactggaatagcatttaacttctaaaataagacttgcaccagaataacaatgcttcacatataatggcaatagtgatcctctcaactgtatcttttgtccttttcctgagtaaagtttagactgcccttattctgaaactatttctaaatctattatttagatatgttattcagtatattctctcaaatgataaatgcctaaataagtttaagacactataaatgacacagaacatgaccatgaaacatgctattaaaaatccaaagcaatgaaataaggctaaaatcaaatcagcctttgaatgttttaaggagatggacaccacaaatgatagaattcatattttgtgatactctccactgaagaggacgtgtccagcacaaagccatgaagaatatagttaagataagtttttaggtccaaccaatatctcaatgattatgtgcaaaaggatrtggctatattaatttcatctcttgattaaagaaatcataaaaatcaaacaagatagccca

SEQ ID NO: 300248 - DNA, 597 bp, Homo sapiens
aaaacccattttctggggagaaattcaagctggctgcagaaattggtgtaagtaaagtggagcctaatgttaatagccaagacaaccaggaaaatgtctccaggtcatgtcagagacattcatggcagcccctctcatcacaagamcagagggctaggaggaaaaaatggtttcatgtgccaggcccggggcctcactgctctgtgcagccttgggacatggtgccctgcatcccagccactccagctctagccatggctaaaagtggccaaggtacagctccagctgttgcttcagagggtgcgagccccaagccttggtggcttccatgtggttttgggcctgcaggttgcaccaagggcaagagttgaggcttggaaaccttggtttcagaggatgtatggaacctcgtagatatccaggcagaagtctgctgcaggggcagagccctaatggagaacctctactagtgcagtacggagggaataggtgggatttgagccctcacacagagtccccactggggtactgtctagtggagctaggagaagaggaaccaccatcttccaggccccagaatggtagatctactaacag

SEQ ID NO: 300249 - DNA, 632 bp, Homo sapiens
tttgaaaatatgcatcctgaccatgtggtaggaaggaaaacccattttctggggagaaattcaagctggctgcagaaattggtgtaagtaaagtggagcctaatgttaatagccaagacaaccaggaaaatgtctccaggtcatgtcagagacattcatggcagcccctctcatcacaagaccagagggctaggaggaaaaaatggtttcatgtgccaggcccggggcctcactgctctgtgcagccttgggacatggtgccctgcatcccagccactccagctctagccatggctaaaagtggccaaggtacagctccagctgttgcttcagagggtgcgagccccaagccttggtggcttccatgtggttttgggcctgcaggttgcaccaagggcaakagttgaggcttggaaaccttggtttcagaggatgtatggaacctcgtagatatccaggcagaagtctgctgcaggggcagagccctaatggagaacctctactagtgcagtacggagggaataggtgggatttgagccctcacacagagtccccactggggtactgtctagtggagctaggagaagaggaaccaccatcttccaggccccagaatggtagatctactaaca

SEQ ID NO: 300250 - DNA, 632 bp, Homo sapiens
tttgaaaatatgcatcctgaccatgtggtaggaaggaaaacccattttctggggagaaattcaagctggctgcagaaattggtgtaagtaaagtggagcctaatgttaatagccaagacaaccaggaaaatgtctccaggtcatgtcagagacattcatggcagcccctctcatcacaagaccagagggctaggaggaaaaaatggtttcatgtgccaggcccggggcctcactgctctgtgcagccttgggacatggtgccctgcatcccagccactccagctctagccatggctaaaagtggccaaggtacagctccagctgttgcttcagagggtgcgagccccaagccttggtggcttccatgtggttttgggcctgcaggttgcaccaagggcaagagttgaggcttggaaaccttggtttcagaggatgtatggaacctcgtagatatccaggcagaagtctgctgcaggggcagagccctaatggagaacctctactagtgcagtacggagggaataggtgggatttgagccctcacacagagtccccactggggyactgtctagtggagctaggagaagaggaaccaccatcttccaggccccagaatggtagatctactaaca

SEQ ID NO: 300251 - DNA, 546 bp, Homo sapiens
aaaatacaacattccctgctacactcttttcctgaaggtgattacactcacctcattttaatgaggtttaaggcataaggtcattgtgtaaagtggctgctaggattcttttgttatttacaggtagacaagagtaaaggatggtttctaacacatgaaagtgtgggtaaacaacccaaggggagactagcgtaaagatttattgtgtccactctacagttgttatgcatttaggttcaaatattttactattataaataatgctataatataatatccttgtaaagaaaacattgcatatttgtgtattaatacatcaacgtttatgattaatttcagaaattaaatgccaattcaaacagaatgtatgttttccaattttatagaaagaaagtttaggcctgtttatgttgtcatcagtagtgactgggtgtkaatgagagtgcttctctgcaaagtctccaaaattaagtgttatcaattttttaagtctttgcctatctaactggtaaatgtattttgataagggtaaaatgtatttcattt

SEQ ID NO: 300252 - DNA, 658 bp, Homo sapiens
gtgtccccaccattatacaatatattcatgtaacaaacctgcacatctacctcctgaatttaaaaaaaaaagagtgtaacagtgtcactgtcactgctgtaaaaaagaatagactaaataacgtaggagtggaaactaatggtattatgagaaatgtgatgtggataattcacttttacaggaaagaggaaatagaaatgtactcctraagaggcgtagaccgtgttcccatccaacccaaggccctagctcaccatagggcactgtcttctctgacctgaacaagacactgaacctgaaattctccctctctaaccctcatcaacaattgccttgatatgatttggctctgtgtccctacccaaatatcaccttgaattataataatccctatgtgtcaagggcaggaccaaggtaattggatcatgggggtggtttcctccatgctgttctcatgagagtgagtgagtctcatgagatctgatggttttataagggtctggcattttccctgctggcactcattctctttcctgccatcctatgaagagatgccttctgccatgattgtatgtttcctgaggcctccccagccatgtgtaactgtgagttaattaaaccacttttctttataaattacccagacttgggtatttct

SEQ ID NO: 300253 - DNA, 658 bp, Homo sapiens
gtgtccccaccattatacaatatattcatgtaacaaacctgcacatctacctcctgaatttaaaaaaaaaagagtgtaacagtgtcactgtcactgctgtaaaaaagaatagactaaataacgtaggagtggaaactaatggtattatgagaaatgtgatgtggataattcacttttacaggaaagaggaaatagaaatgtactcctgaagaggcgtagaccgtgttcccatccaacccaaggccctagctcaccatagggcactgtcttctctgacctgaacaagacactgaacctgaaattctccctctctaaccctcatcaacaattgccttgatatgatttggstctgtgtccctacccaaatatcaccttgaattataataatccctatgtgtcaagggcaggaccaaggtaattggatcatgggggtggtttcctccatgctgttctcatgagagtgagtgagtctcatgagatctgatggttttataagggtctggcattttccctgctggcactcattctctttcctgccatcctatgaagagatgccttctgccatgattgtatgtttcctgaggcctccccagccatgtgtaactgtgagttaattaaaccacttttctttataaattacccagacttgggtatttct

SEQ ID NO: 300254 - DNA, 599 bp, Homo sapiens
tgcttatcagatcaaccccatagtctctgtccaaaaactccttaatctgattttacttttgatttgcacaaaacatagctgtgaaataaaaatggtctcagaagatggtattggtgatgccaaatatttaaataaaaataattatttattatttgaatattttattagtattacatattaatatccagacatttccaaataccttttgaggttacatatgaacaatcatagtgaatggaatttagcatttttgttaagtatatttaattgtttaatagccttaggtatattctcatacatatttttggctgacaaaacatatgaatattaattttacaactttactatcttactgtattataaaaaatgtaaaaaagactctcactagctttacctttttagastaaacatagctcctaatttctagagctcactcagtgatacaacccttttataagatccatctgtgggtctccagaaaactgtgaaaatgcattgtgtatatatctctaggtaagagttattttgcaaccaaaacattaagagattctctaaaattaatctaatgaggaagaaaagcagaaaggctatcagcaaaa

SEQ ID NO: 300255 - DNA, 599 bp, Homo sapiens
tgcttatcagatcaaccccatagtctctgtccaaaaactccttaatctgattttacttttgatttgcacaaaacatagctgtgaaataaaaatggtctcagaagatggtattggtgatgccaaatatttaaataaaaataattatttattatttgaatattttattagtattacatattaatatccagacatttccaaataccttttgaggttacatatgaacaatcatagtgaatggaatttagcatttttgttaagtatatttaattgtttaatagccttaggtatattctcatacatatttttggctgacaaaacatatgaatattaattttacaactttactatcttactgtattataaaaaatgtaaaaaagactctcactagctttacctttttagactaaacatagctcctaatttctagagctcactcagtgatacracccttttataagatccatctgtgggtctccagaaaactgtgaaaatgcattgtgtatatatctctaggtaagagttattttgcaaccaaaacattaagagattctctaaaattaatctaatgaggaagaaaagcagaaaggctatcagcaaaa

SEQ ID NO: 300256 - DNA, 574 bp, Homo sapiens
cacagtagatgttattgatgttttgatagcatagttattttactcgaaattctaaaaatataagtcatagcttttcttatgtaataaatataatattttaagaatctttaagaatcaactccacaaaatgaccattttttcttgcaattatgaccaggtaaaaattctgataagatccaccatgaaaaaagatataaatacaacaacaacaacaaaataaataaataaataaaaagctgctttgaggacatgacatgaaatttaatgaaaatcaatcaaaaatttgaagcagtaataataggaatgtttcccatgtaatttgtggactgtgtacaacagaatctcttggagcagtggaggaaagagtatgagtcaaaatgtaaatttttaggctccactttcgaaccattcagccagattctctgagtagtaggacccaggactctgtattttaaaaagccttggaggtgatccttatggtctcttatgtttgaatgtcaatgtcagctttgagactaatccaccaaaattcttaagaaaawggagtgagcatttttagtttacctgttataaa

SEQ ID NO: 300257 - DNA, 608 bp, Homo sapiens
agacatttaatcaaacctatatccctaattctaggtttctgtcagtctttctccctccttgatttttccgtagtcatattacatttcccattgtcacattatctaaaattacacatcaaagctgtcttaactttgctatctttttkcttggtaagatcagtcacaccattaaaaaacacatttatgtgatgttatctgattctatttcttcttattaaaactttaaaaatgttatgcccaggatttcagtttcctagacctctatcttattgcaaatattatttgattgacttgtggctgaatgtagtagaactgctcagaaaaaaataatgcgaagttaatagtgtgctgatatctcaatatgatacaataaaatctcattcatcagaagtcaatgtatactttatgtgtgttatcttaggtcatagataagactcaagggattctgcaactgtttttttttctcactgccctgtcccttatagggcagaggctcagttaacaaagagtgcaagcctccagtatttttaataatgattttcaacattaagaaataaagcaaaagatattttcaagtttatttttggtcaagcaaagaccatataaag

SEQ ID NO: 300258 - DNA, 592 bp, Homo sapiens
ggccccataacagcaggcacattgccctctaactctgcaaggcaaaactgaataaaataaaccttgaaataaagaaaaattaaaattttcattcacttttcaaatgcactgtgcttttcatcacaaaatacagctttagaaaggacagaaagaaggtcttcctgtgtgtgacacacagttctacagcacaaattctgatcagtcttataagatgttatatctctatttccggaatcatcttttgtacattggccaagataatttattcaaaagacatgtttttaagttgtggcacaccaactcaatcaataactctctacctcaccactgatgaaagttacacaatgattaaggaagaaaaagcctcataaatgggaaagtagaaacttatacrtaccttgctatttctgccctctccagtatatataatttcttcccaccacctagctgtcccaccagactcctgctaccatgtgatttatagaaatttatccagtaattccaagtaattttgcgtaattattttttacttaggaggtataatgtaattttgacccgtaccaaagttcatagtccttccagtagggcaata

SEQ ID NO: 300259 - DNA, 558 bp, Homo sapiens
gctgggattataggcacctgccaccatgcctgactaatttttgtatttttagtagagacagagtttcaccatgttggccaggctggtcttgaactcttgacctcaggtgatccacccgcctcggcttcccaaagtgctggtattacaggcatgagccattgtagaccggcccggatttttttttttcttttttaatgtctctgagatattcctgacctgagaggaatattgtggcttagtgccctggactgggagttggaacacttgggatctagtttgggcttttgaaggtagttaatttaactacctttcctgaatttcagtttcctcatctataaagtgaaggggatagattagatgatgtttataagctcttctagttttaatattttaaaacgcatgatattcccaaggagatttcttaagcagaggtgttcctgtatgtagatattacttactcttagrctgtaagatactgagggagaggaaatattatttctttagcctcagtgcctgtaacagtgcctgacatacagtaaagactcaacatacatattt

SEQ ID NO: 300260 - DNA, 586 bp, Homo sapiens
ttatcacatcagttgatgaacaccttgttattctcataccatagcctttaaagataactcaagatttctctaattttatttcttcttcaagggaaagaaacttgtgtatggcacagtggaaacaatgaagttgaagggtacggcttaatggatgatgaaaatgagatgttcgggggacaagagaggggtaagttctgtcttcaatgaacctttgcattgctttgtttgggatcattctatctcatgccctgctttgaaacaatgagttttgaacaatattcaagttgaagaaaacttagcttttggaacttagctttttgatctggataggttcatgggaaagaaggcaagaagccatatgtgcctgcctctactgcagggtgggcaattagcaaagggccaggataaatgagtctctgggttwtttaaatatgattcagtctagttcctgtgggcagggaatcttatgaggatttctctctctctctttctctccctgtgtcacacacacacacacacacacacacacacacacacacacacacacaaacacacagacagctggagtagcagtggctaagttacc

SEQ ID NO: 300261 - DNA, 586 bp, Homo sapiens
ttatcacatcagttgatgaacaccttgttattctcataccatagcctttaaagataactcaagatttctctaattttatttcttcttcaagggaaagaaacttgtgtatggcacagtggaaacaatgaagttgaagggtacggcttaatggatgatgaaaatgagatgttcgggggacaagagaggggtaagttctgtcttcaatgaacctttgcattgctttgtttgggatcattctatctcatgccctgctttgaaacaatgagttttgaacaatattcaagttgaagaaaacttagcttttggaacttagctttttgatctggataggttcatgggaaagaaggcaagaagccatatgtgcctgcctctactgcagggtgggcaattagcaaagggccaggataaatgagtctctgggttattwaaatatgattcagtctagttcctgtgggcagggaatcttatgaggatttctctctctctctttctctccctgtgtcacacacacacacacacacacacacacacacacacacacacacacaaacacacagacagctggagtagcagtggctaagttacc

SEQ ID NO: 300262 - DNA, 356 bp, Homo sapiens
gcacttgttatgtcctagttcaggaggctcaaacccccaggctgtggaccagtcctggtccatggcttgttaggaaccaggccacacaacaggaggtgagtggtagatgagcaagtattactgcctgagctctgcctgctgtcagatcagcagctgcattagattatcataggagtgtgaaccctattgtgaactgagcatgtgcgggatctaggtttcatcctccttgtgagagtctaattcctgatgatctgaggtggaacagtttcatcctaaaaytaccctgcttcaccactctttctggtttcttccatgaaactgaacccggatgccaaaaaggtgggggaccactatct

SEQ ID NO: 300263 - DNA, 356 bp, Homo sapiens
gcacttgttatgtcctagttcaggaggctcaaacccccaggctgtggaccagtcctggtccatggcttgttaggaaccaggccacacaacaggaggtgagtggtagatgagcaagtattactgcctgagctctgcctgctgtcagatcagcagctgcattagattatcataggagtgtgaaccctattgtgaactgagcatgtgcgggatctaggtttcatcctccttgtgagagtctaattcctgatgatctgaggtggaacagtttcatcctaaaatyaccctgcttcaccactctttctggtttcttccatgaaactgaacccggatgccaaaaaggtgggggaccactatct

SEQ ID NO: 300264 - DNA, 356 bp, Homo sapiens
gcacttgttatgtcctagttcaggaggctcaaacccccaggctgtggaccagtcctggtccatggcttgttaggaaccaggccacacaacaggaggtgagtggtagatgagcaagtattactgcctgagctctgcctgctgtcagatcagcagctgcattagattatcataggagtgtgaaccctattgtgaactgagcatgtgcgggatctaggtttcatcctccttgtgagagtctaattcctgatgatctgaggtggaacagtttcatcctaaaattaccctgcttcaccactctttctggtttcttccatgaaactgaacccrgatgccaaaaaggtgggggaccactatct

SEQ ID NO: 300265 - DNA, 453 bp, Homo sapiens
tttccctaagagctattcagggtgtctgtcacctcgagccagaagagacttcctcagaggatccacccaagacaaagctgccatcagttccctgagtgaaacccttccttctctgtcagctgcatgtgggctgcaccactttgcctcaccttccaccagaagaatcctgcccctgcttctccacttgaccaacaccttttggtcttagaagacccgagtcaaaatgtcacctgctccaggaggccttccctgacaccccacgagctggttcagggggcccctccactgtgcttgtgccagccctgtcacgaaggattctgytggcattccctctgtctcagtctatcccctcacttgattctgagctctttgcaagcaaggatggtatttgttttattgagtatgtttaattgtttcatacgaaaagcacacacaggctgggtgcagtggctc

SEQ ID NO: 300266 - DNA, 559 bp, Homo sapiens
ttatattaatgcaagccaagtctcacatgctttcctgttagtcctattatgccactaatttatattgaaattttatctaaaactctgaaatctgtttctttgttgcaacaacattaacaacaacaataatataactagcatacacactgtttattgtaagccaggtgagtgtagatgctatatagatattaactcatccaatcctcccaacatacctaagagacaattacttttatgattaccaatttacagctgtggaaattgagatgcagagaactcaagaacaagcacttaatttgcttgtccaagatcacacagctggtaagtcgtagtccctggagttggaccagacacagtcctcgagtctgtgctctactcactcttttagctgcatttccactgctagatttttaaaacgaagcatgggcttttctayttatttctcttcaattttatctcattagagttcagtttatcgtttaagccagtcaataattttgggatgaccatttatcattatctcttttcaccaaccttccagtttcttaccccattgaaa

SEQ ID NO: 300267 - DNA, 536 bp, Homo sapiens
ttcgggttttttaattcttcctgattcaatcttttttaaatttttgtaattatcttaatgtattttcaatgtgagaattgaagctcagttcctacatcagtacttattctccactgaaagaattcttttaaaaacactcctttggttttgttttgttgtgtttttttgtttattactagttcaatcttggtagataatatgtgttcaggaatttatccattcctctaggttttctcatttcttggcatatacttcttccttgtaggaaaaaaaaagaaaacaaaatttctgggggcttcaggatggctgactagaggcatcrggcactagcctcctccacaaaagagaaccaaaatagaaagtagataattaccctttgaatagatcacctaagagaacactggaattcaacagaaagtgacagaaaactcctaaggccagaaaggagagggaagagaagcagcctgcccagcaaggattggctgggagccctgagagcctcctcagttcagagaaagagtaagtgagaaattccc

SEQ ID NO: 300268 - DNA, 549 bp, Homo sapiens
ccaacaagaactcctgcaatcctagccacaggagagcccctcgaccctgatggagcctgagactaacataaggagctgcctggagactgcttaacggtatcattccagggatgggctcatttggagttctatacacctcccccaagacctaagcagctacagcatggtatcattttgagagatcagccatcgccagactgcatcgtgccctagagcccgataccscttgcatctccacatccctggagccctatcgtcatccccatcagtagttactgcaactgttggctgccaccatggtcaaagtgcacccacctctctggcagccactcttcctccctcagcagtgggactggccacatgaatttgcacatgccctgagtacaggctcctctacctaagctgctgctgctggcagttgctactggggccaaagtgcaagctactagcagcaatcccactgcccctagctgtgtgactgccgcacatttgtgtgtgcattgaagacagacttccctacccatgtccaccaccaccactggttgctgc

SEQ ID NO: 300269 - DNA, 485 bp, Homo sapiens
gggtggggggctaggggagggataacattaggagaaatacctaatgtaggtgacaggttgatgggtgcagcaagacaccaaggcacgtgtatatctatgtaacaaaattgcacattctgcacgtgtaccccagaacttaaagtataatagtaaaaaattaaaaaaaaarataggtgtggggcagataaaaggagccagatggtaactgtctaaagtttggcctaatgctccacttttcttacctttattctgatcgccaaagtcagaatcagaagttctacttctggaggatcagattcaaattttagtttgagcaactttcctttaatgttggcaatgaccacttatataagaatgaaccatgggtggggtggaggaatctgagattttgtgtgtattcgtgaatgaaagattccagttttgcaccaactttgagtgaaaaaatggaaaggggagagatttagttatatttactgatagaacag

SEQ ID NO: 300270 - DNA, 551 bp, Homo sapiens
cgtttaaaaaatttacattgtttagtttatattgtttactgctataccataatttatataattttccctctatcgatggacacttttcaattgtttgccatttttgactgctatgaacaatgttgcagtgtgcatctttgaaggtccctcctggtgtctgagtatgaatgagaagtagaatgtccaagacataaagtgtgcacattttaacttatagaaggcaatgcacaattaagagacaatattcttaaatataaaatattgagtaaaaggttaaatttttcttttttattaaagcacctcatatatgcacccttttgattcttatcatcaaattcctttttcactaggaactgtgaaagcatgaggttggtgggcaatagtgcttgctacctgcctaggttgccaaagattctacaagtgtggccaagaagctgaaagcatcaccaaatgcctgggctgtatcatcacacttaacttgyttattgaacttgtgagttcacaagtttattgaactagtgagtcattggaagcatctaaaaagtgggagg

SEQ ID NO: 300271 - DNA, 481 bp, Homo sapiens
accttcactaaaaggaagacagaaaggaaagaaagaagagaaaaccacaaaacaaccagacaacaaataacaaaatggcaagagtaagtccttacttaccaacaacattgaatgycaatggactaaactcttcaatcaaaagacatagaatggctgaatggataaaaaaaaaaaaagacccagtaatctgttgcctacaagaaacacaggtaagctataaagacagatatagactaaaaataaggggatggaagaatatatcccatgccaatggaaaccaaaaaagagcaggaacagctatacttttgtcagacaaaatggatttcaagacaaaaactaagagacaaagaaggtcactatataatggtaaaggggtcaattcagtaagaggataaaataattttaaatatatttgcactgagcactggagcacctagaaatataatacaaatattattagagttaaagtgagagataaacc

SEQ ID NO: 300272 - DNA, 596 bp, Homo sapiens
atagtatttgcaagcctcatggtaacctcaaaccaaataacatagaactgatatgcagacacacacacacaaagcaagaaactaagttgtatcaccagacaaaattaccttcactaaaaggaagacagaaaggaaagaaagaagagaaaaccacaaaacaaccagacaacaaataacaaaatggcaagagtaagtccttacttaccaacaacattgaatgtcaatggactaaactcttcaatcaaaagacatagaatggctgaatggataaaaaaaaaaaaagacccagtaatctgttgcctacaagaaacacaggtaagctataaagacagatatagactaaaaataaggggatggaagaatatatcccatgccaatggaaaccaaaaaagagcaggaacagctatacttttgtcagacaaaatrgatttcaagacaaaaactaagagacaaagaaggtcactatataatggtaaaggggtcaattcagtaagaggataaaataattttaaatatatttgcactgagcactggagcacctagaaatataatacaaatattattagagttaaagtgagagataaaccccaatataa

SEQ ID NO: 300273 - DNA, 633 bp, Homo sapiens
ctgggtatagaaggaaaatacatcaacataataaaagccatgtatgacagacccacaactaatatcatatggaatgggaaaaaattgaaagccttttatctaagatctgaaacacaacaaggmtgcttacttttaccactattatttaacataatgctggaagtcctagctagagcaatcagacaagagaaagaaataaagtccatccaaattggaaaggaaaaagcaaaattatcctttttgcagacaatattatctcatatttggaaaaacctaaagacttcaccaaaaattaaatgcctaggaattaatttaaccaaagaagcaaaagagctctataatgaaaactataaagcaccgatgaaagaaatggaaggggacatcaaaaaatgaaaaatattctatgttcaggatcagaagaatcaatattgttaaactgtccatactaccaaaagcaatctacagatccaatgcaatacctatcaaaataccaatgacattcttctcagaaatagaaaaaacaatcctaaaatttatatgaaaccacaaaagacccagaatagccaaagctattctaaggaaaaagaacaaaactggaggaatcacattacctgacttaaattatattacaga

SEQ ID NO: 300274 - DNA, 633 bp, Homo sapiens
ctgggtatagaaggaaaatacatcaacataataaaagccatgtatgacagacccacaactaatatcatatggaatgggaaaaaattgaaagccttttatctaagatctgaaacacaacaaggatgcttacttttaccactattatttaacatartgctggaagtcctagctagagcaatcagacaagagaaagaaataaagtccatccaaattggaaaggaaaaagcaaaattatcctttttgcagacaatattatctcatatttggaaaaacctaaagacttcaccaaaaattaaatgcctaggaattaatttaaccaaagaagcaaaagagctctataatgaaaactataaagcaccgatgaaagaaatggaaggggacatcaaaaaatgaaaaatattctatgttcaggatcagaagaatcaatattgttaaactgtccatactaccaaaagcaatctacagatccaatgcaatacctatcaaaataccaatgacattcttctcagaaatagaaaaaacaatcctaaaatttatatgaaaccacaaaagacccagaatagccaaagctattctaaggaaaaagaacaaaactggaggaatcacattacctgacttaaattatattacaga

SEQ ID NO: 300275 - DNA, 633 bp, Homo sapiens
ctgggtatagaaggaaaatacatcaacataataaaagccatgtatgacagacccacaactaatatcatatggaatgggaaaaaattgaaagccttttatctaagatctgaaacacaacaaggatgcttacttttaccactattatttaacataatgctggaagtcctagctagagcaatcagacaagagaaagaaataaagtccatccaaattggaaaggaaaaagcaaaattatcctttttgcagacaatattatctcatatttggaaaaacctaaagacttcaccaaaaattaaatgcctaggaattaatttaaccaaagaagcaaaagagctctataatgaaaactataaagcaccgatgaaagaaatkgaaggggacatcaaaaaatgaaaaatattctatgttcaggatcagaagaatcaatattgttaaactgtccatactaccaaaagcaatctacagatccaatgcaatacctatcaaaataccaatgacattcttctcagaaatagaaaaaacaatcctaaaatttatatgaaaccacaaaagacccagaatagccaaagctattctaaggaaaaagaacaaaactggaggaatcacattacctgacttaaattatattacaga

SEQ ID NO: 300276 - DNA, 505 bp, Homo sapiens
gacagctagcacatgaggtgttgggaagaatattggaaaactagacaagacagggcttctatgtgaccgtagttaattttgctaccccactgatatttcaacaatgaacattttttaaagttttctttaaaccatggtactggtggacatgttcatgtctttctccttcatgaaattataaaaaycatcatggtggaagggactggctgggacattcagcaggggtgcatgccatgcacagacagctgaagtttccactctaggaagttccctttttaaagttatggtgaagagtggaattaatgtttagtgtaaccctcctgataatcttggaataccccgaaggtcatttcatctaatttttcaaactgtaaatgacttggctaattttaggattattggtttatgtcccccttctttagtagttgccagtattcaaacaatctctccttatccatgaacttattatctgcaatgtcatttctgctgtaataagaactttaaa

SEQ ID NO: 300277 - DNA, 615 bp, Homo sapiens
catgtgtaaagttgtatcctcaactacatttaaaaaatgttatgagtttgatgtagaaggcttaactaactggggagctgtttgctaaaattccctaaaaagcaaataaatgttttgcttttggcttccaagtcctgccactatcacaatgacttggtgagggagggataaggtttacagtgcttcctaggccctcttgttttccacattcttttgtttctctcttttgctgtgctgctcctttagtgtccagttttgagcagacttaagtggagtcacttaaaaaaaaaacaggattgactttagaagaagcaatgtaaaatactcatttggacccacattctgtttataagattgcttggtaacctgtgctgcaatgttgcttttctaaaggcctgagagaaggggagagaggtgtgccaaagtgtgcatctgcaggccgaagatgaggcctggacttcctgctccaggtgcacaggtactgctctcctccctttgctgtgcttaaagtactaagtgctttctggccccgattctcaggagcctggtgtggccaaatcctcggtcagtcacaggcacrgcaggttcaaaatggagacacttagctccagattt

SEQ ID NO: 300278 - DNA, 553 bp, Homo sapiens
atgctttttcctgctgtcatacctcctaaattcctgctatgaaggaatagaaatttaagaagtgggatgtttatagccttatagggctacttactgtaatccctgccctcttcacttatttaacacctattatgtggctggcatacttttaggcgttgggaatacacccattaacttaaataaatagtctgtaatcttgttcttccattcatttgaaaagagctaggcaataaaggaataaatatgtggtaatttagattaagtgccttgaaaaaaaaagcataaaaagggaatagagggtcaaggtggcaaggtatgtttgtgatgtctctaataaagagacacaaatgatgtaaggaggtgatctctagagatacctgcggagaaaatgtttctagaagaagtagcarcaagtacagaagtcataaagcaggagcttgctcaggcagtaagtaggactagagaaagcaaaggagacagtggtgggagaggggatcagaaagatggggttggtgtggtgtagattttttaagcggcatggccctgaacattt

SEQ ID NO: 300279 - DNA, 513 bp, Homo sapiens
ccaggtggcttccacatatgagactctattgagaaattgtattaactaaaaaggaagaggtaaaaatatctgtttaggtgagtaaatacccccatactactcctaataataattttataagactttattgagatatcattcacatatcatacaattcaaccatttgaagtataagattggatggtatttagtatattcacagaattgtacagtcatcmtcacaatcgattctagaatatttcatcaccccaaaagaacaccaaaacaattagaaatcactttctatttcccccccaaactctaccccccaacctggggcaaccacatgtctactttctatccctacatatttgcttattctgtagatttcatataaatggaattacacagtatatggtcctttgttactggcttttttttttaacttggcacaatgttttcaagtttcatccatgttgtagtatatattagtccttcatttctttttatgaacaagtaatattccattgtatg

SEQ ID NO: 300280 - DNA, 594 bp, Homo sapiens
aaaaaaatggaagactatctagcaaaatgtcaatggttgttatttccagatggtaaattttttaacctttttctttttttttgcatttttccccagtgagtgtattatttccataatcagaaagaaaaataataaaattattctcattagaaggataaaaggtcttattatataaaactatcattgactagatttttctcctgtttttgtattttaccaaatagttaaaaaaatccaaattgttttcttttaatgcattgattttyatctctcttggtatactctatttttaatactcatatccttatccaaaaataactttcagtgtctctgataaattgaaaacaaaaaaaagcaaaggaagtaatcatctttgatttattggttcctgatgtttgaattcacacagacaaaaatcaggacagatatatttctctctgattaacagagcaaccactgtatttataactctgtaacactaaggaattattgagcacctttttgtataaggtgcttgaaaggatatttagttttataagacacagcctccactctcaaagtactatagaatctataacttccagatgccaaaca

SEQ ID NO: 300281 - DNA, 597 bp, Homo sapiens
aaggtgcttgaaaggatatttagttttataagacacagcctccactctcaaagtactatagaatctataacttccagatgccaaacatgaaactggtgctgaatccaacccgaaagaatttactcccaaaggattaacacttggcctcttaagtacagctttagtgcattcttccattcccctctgcctcagttgaatacactacacccagaagatgtgcatggcagagtctgaaggaattatcagctgtcaagtacatgaagagggtcagttggaccttagttataggcagaatgggtgatgggttgcttgctgtgaaatgaaatgaggtgtgccaggccatcctctggccaaaaactaatctatctccaccaagacctcaagtaacctgaaattcttgtattagagatatattgctttgaatcttgaagactttttacccttcaaatattccccatgaataggaaaacatcctttgagtgacaacaactaagcaactgttagctcccatcttgaaaagatataaatttaygtgctattttttcagaaccataaatcagggtacatggtaagtttgagaatacttttgtaaatagt

SEQ ID NO: 300282 - DNA, 404 bp, Homo sapiens
gaactctgacttagggttcagaaaaaaatggcccataaatttatggatcaagtctctyactggacagtagcttgtgattatagaaatgatgcaatagaattgttagcttagtttaaatttgttatgttgttataaactaagaaaaattaatctcgatttaacccactctgcttcatggaccaaatgttacatcccaaatgtctttgaatataactgacaatggtccaggccaaagaacaatagataaaaggaatacactaacaaaaatagtaaatgataatggaattctcttcttaatcagattttctgattacctaaggattaggcaaatcaacttttgcaaaaataaactttctaaaatgtatgagtcatccttaagagtacaaatctggtgaatgaaatta

SEQ ID NO: 300283 - DNA, 404 bp, Homo sapiens
gaactctgacttagggttcagaaaaaaatggcccataaatttatggatcaagtctcttactggacagtagcttgtgattatagaaatgatgcaatagaattgttagcttagtttaaatktgttatgttgttataaactaagaaaaattaatctcgatttaacccactctgcttcatggaccaaatgttacatcccaaatgtctttgaatataactgacaatggtccaggccaaagaacaatagataaaaggaatacactaacaaaaatagtaaatgataatggaattctcttcttaatcagattttctgattacctaaggattaggcaaatcaacttttgcaaaaataaactttctaaaatgtatgagtcatccttaagagtacaaatctggtgaatgaaatta

SEQ ID NO: 300284 - DNA, 576 bp, Homo sapiens
taaatttccacacagatagatagatagatagatatctatatttagatagacagatgtcttagctatatgctaggagctatttacctaagtacctagcacatagctaggacatctgtctatatctatttatgtatctatcatctgtctatctattgttattcatatttatatttatatctacaaatrtaagtagacaatgatagacagatataagtaaataacgtgcctagatataagtaaaaagagtgcctacctctttactagccaagcatgcaataagagagtgttaatattaatgataatgaacactttacattggtacatctaagacttaagtatctggagtttcctctactatatttgacttgtctctttttgccactgtctttaccattcagatcttagtcataaatcattgcagtcatttctccttatggataagttatctttaatgtattctctaataggtgaagcatttattttttatttatcatattgatcagttctctaacttgtggatttcttcatttcaccatgtgagtagattatataatttaaagtctccttaggaaaaaa

SEQ ID NO: 300285 - DNA, 617 bp, Homo sapiens
actcacttggtgagttggttgtttaatgctgtctctttataagtcatcactcaaatcaaatttcaggttatgccagtgtttggggcctcatctcagctcaactcaggaagaattgttggttcaacccactggccacttgccaagtttatcctttaccttgggagaaggtacttgtcatctatatgcatagaacacgacaatcttgggagctaacgccaaaagaaataaaaaattgtcatctctgtggttttatattcagtttctagataagcaaaatgccttagagccttcactgtgatttcaatccaattcccaaacatttaaaacagcagagatataataaagcagacatttagctaaacagtgagctcaattatgctttgcacagacaacacgaactaratgttaaataaatgccaatatttatcaatatttatcagtgttttccatttccagactccagaatttcaacttcccataaattccttaggagtaaaagtataaccataatcagagcttctattaatattaatttagttcttgtgtatttgaactttgacatttcttgaaagaatataattcttttaaatctgagaaaaaccttcaggatctattag

SEQ ID NO: 300286 - DNA, 530 bp, Homo sapiens
ggttgacaaatgcagaagtccagtccgttatgccccacaataggttgatcctgctatcctgcaatgatttaacactttgctatttattaaatgttctggagccattttcatttcgggtaggagcaggtggggagactgtaccttggttgcttagtatatttacattccagaaatattgagggcttttcaggagcactgcctagtttgagggagcatgtcttttcctacgtggatctcccagtcagatttatcagttaggtcctatggtmatagttactaaatgttttgagtgcaactccacatgtcaataaaagtacaccctctgcctccctgatctcatgactaaatttccatcctgttttcatagccgaattgtgacatttgtttgaagaacctttcttggtagccccatccccttaattctttggttttcaaaatggctgcataccaaaaattaccatgaatttgaattccctgtatctcctccccaaccaacagaatcagaatctatcaaagtgggactattgtgt

SEQ ID NO: 300287 - DNA, 577 bp, Homo sapiens
ttcatagccgaattgtgacatttgtttgaagaacctttcttggtagccccatccccttaattctttggttttcaaaatggctgcataccaaaaattaccatgaatttgaattccctgtatctcctccccaaccaacagaatcagaatctatcaaagtgggactattgtgtgtaatcatgctcttttagttcatgattacttcaggacttacttctcttcaggtcaaatatccatttactctcttattatcactcaatcagacaggcatgctgagtttatgaaacaatctagggcattgctttggttttattattatctctattgtgcaggtgtggaaatggagactcagagatgttaagtgaattgcctaagatcagataaagagcaagggataacggtggactcaaacccaggtygtctagtgccaaacccctgctctttcactatgccacagaagactcctcctcctccactcatggcattttatctttctaacatggttgacaagtccacaatcactgtgcccagttcaatgggggatttttatcctcacccctcatcctctctcttcaccaac

SEQ ID NO: 300288 - DNA, 596 bp, Homo sapiens
ttgtaaaataaatacatagtattagtttcctgtggctacagcagacagttaactttctgtgatcttgctgaattcttaaaagaattctcttccttgaggcatatatacagattcttcaggatctccatttctggaaccaaaaaacactcccgatgatcctaccaggcagggagacatccacctaggtgcatctcagagaagcacagggactagactggtttgacccaggaagtcaagcagcagctctcctcaccaaaaaaagaaaagaaawgaaatgaaaaagcctcccaacaaccccaatcaggcagagaaactagtatctcttgaaataggctggtataagcataatatgttttatgtgaggatcttggtaaccacaaaggaaaattctttagtagaattacaaaacaaaaatagaatggatttaaagtgtactggtatagtaaaccataaaaccacaaagtaacggcaacagaggaagaaacaaaatatgtacaaaacaagaacaaaactagtgaaatggtagtagtaagtacttctttatcaataattactttaaacataaattgattaaaatctccaataaaaagacatag

SEQ ID NO: 300289 - DNA, 596 bp, Homo sapiens
ttgtaaaataaatacatagtattagtttcctgtggctacagcagacagttaactttctgtgatcttgctgaattcttaaaagaattctcttccttgaggcatatatacagattcttcaggatctccatttctggaaccaaaaaacactcccgatgatcctaccaggcagggagacatccacctaggtgcatctcagagaagcacagggactagactggtttgacccaggaagtcaagcagcagctctcctcaccaaaaaaagaaaagaaaagaaatgaaaaagcctcccaacaaccccaatcaggcagagaaactagtatctcttgaaataggctggtataagcataatatgttttatgtgaggatcttggtaaccacaaaggaaaattctttagtagaattacaaaacaaaaatagaatggatttaaagtrtactggtatagtaaaccataaaaccacaaagtaacggcaacagaggaagaaacaaaatatgtacaaaacaagaacaaaactagtgaaatggtagtagtaagtacttctttatcaataattactttaaacataaattgattaaaatctccaataaaaagacatag

SEQ ID NO: 300290 - DNA, 621 bp, Homo sapiens
ataggctggtataagcataatatgttttatgtgaggatcttggtaaccacaaaggaaaattctttagtagaattacaaaacaaaaatagaatggatttaaagtgtactggtatagtaaaccataaaaccacaaagtaacggcaacagaggaagaaacaaaatatgtacaaaacaagaacaaaactartgaaatggtagtagtaagtacttctttatcaataattactttaaacataaattgattaaaatctccaataaaaagacatagactgactgaataaataaaacaaaaacaagacccaactatatgtactggcctacaagtcactcacctcactttgaaggacacacacacagactaaaagtgaaagatggagaaaaatattccacacaaatagaaacaatgtagcagaggtagctgtatttatatcagacacaatagactttaagtcaaaaattgtaaaaaagaaaaaaagaaagacattatataataataaaggtgtcaattcatcaacagaatataacaattgtaagtatatatgcacccaacattggagcacctaaatatataaaacaaatatttaagaacccaaaaagagagagagagattgcaatacaata

SEQ ID NO: 300291 - DNA, 621 bp, Homo sapiens
ataggctggtataagcataatatgttttatgtgaggatcttggtaaccacaaaggaaaattctttagtagaattacaaaacaaaaatagaatggatttaaagtgtactggtatagtaaaccataaaaccacaaagtaacggcaacagaggaagaaacaaaatatgtacaaaacaagaacaaaactagtgaaatggtagtagtaagtacttctttatcaataattactttaaacrtaaattgattaaaatctccaataaaaagacatagactgactgaataaataaaacaaaaacaagacccaactatatgtactggcctacaagtcactcacctcactttgaaggacacacacacagactaaaagtgaaagatggagaaaaatattccacacaaatagaaacaatgtagcagaggtagctgtatttatatcagacacaatagactttaagtcaaaaattgtaaaaaagaaaaaaagaaagacattatataataataaaggtgtcaattcatcaacagaatataacaattgtaagtatatatgcacccaacattggagcacctaaatatataaaacaaatatttaagaacccaaaaagagagagagagattgcaatacaata

SEQ ID NO: 300292 - DNA, 547 bp, Homo sapiens
ggcagccgtttgggcacacatccagctagcagcaggagtttttttttttttttttttcataccccagtggtgcttggaatgccagcgagaaagaaccgttcactcccctggaaagggggctgaaaccagggagccaagtggtctagcttagcaaaacccacccccatgaagctgagcaagctaagatccactggcttgaaattctcgctgccagcacagcagtctgaagttgacctgggatgctccagcttggtggggggaggggcatcaaccattactgaggcttgagtaggcagctttcccctcatagtgtaatcaaagcaaccagaaagtttgaactgggcagagcccatygcagcttggcaaagccactgtagccagactgcctctctagattcatcctctctgagcagggtatctctgaaagaaaggcagcagccccagtcaggggcttatagataaaactcccatctccctgggacagagcacatgggggaaggggcagctgtgggtgcaggttcagcagacttaaacatttctgcctgcc

SEQ ID NO: 300293 - DNA, 580 bp, Homo sapiens
aagccactgtagccagactgcctctctagattcatcctctctgagcagggtatctctgaaagaaaggcagcagccccagtcaggggcttatagataaaactcccatctccctgggacagagcacatgggggaaggggcagctgtgggtgcaggttcagcagacttaaacatttctgcctgccagctctgaagagagcagtagatctccaagcatagcactcatgctctgctaagggacagactgccyccttgagtgggttcctggcccttgtgcctcctgactgggagacacctctcagcaggggttaacagacacctcacacaggagagctccagctggcatctggcaggtgcccctctgcgatgaagcttacagaggaaggaacaggcagcaatcttagctgttctgcagcctccgctggtgatacccaggcaaacagggttgggagttgacctccagcaaactccagcagacctgcagcagaggggcctgttagaaggaaaactaacaaacagaaaggaatagcattgatatcaacaaaaaggacatccacacaaaaactccattcaaaggtcacca

SEQ ID NO: 300294 - DNA, 606 bp, Homo sapiens
gtacttttgctgttctaacttggtgtcactcatgtagctgtcatcaaatggtggccaatactataacatccaagatggcttccagtgtcttggcaggatggctgcaaggttgggctgaacttgggtggtaggatgggcaggcctcttcatttctatctagtctccaaggtctcaccctctctttgtggtcttcctrcatcttctctctacatgatatctctgtatcatgtcagctggacttcttatatgaaaacacaagggctctcaaaagctcaggagaagctgtcaggcctaaaaaggcttaggcttaaaactggaatggtgtcactacatttcactggttgaagccagtcagtccaatatagaagcagattacacaaaggcataaatactgggaggttcattgctaactggggaccatctttggaaactctcatagtcagtgatttgaagtcattatcatgtcaagcctcatcaacatcatcacaactgcagcaacaacaacaacaacaacaaaaaccagctaatatttctggggcccttagtatttaccaagcatgattattagtactttacatttattaatgtatttaaatctagagagaa

SEQ ID NO: 300295 - DNA, 575 bp, Homo sapiens
atcaatttttatgtgttcatgcatgcctaatacttctctcctttattaacgtgctaataagtcttatgatcmttaaaatggattgtgggctcaaactgtctctgtttatacttgaactctccttgacaaccacagatacaaacttataaggctcaatatgaattaggatgccacagagtacagttaataattgttttcatatcagtatgtctcaatctctttttctctcttcccccctcctcttaatatcacactctacatatgctgaatcaaatttttccaattcaaaagatatacaatgctactttctagaacaaatatttaaaacatgttaactacataaaacattaagtcccattattttaatctccatcacagaacaaagaaaaatctatgaatctataggaaggtagaagaagggatggtgaagtgtagcagccagggcaccaagataaataataaaagaagaagcaaaatagagctatggcttggaaaattgttcaaacgttttaattaatttgatattttagccaatcattgtagagtcagagaatccctaattgaaaagaattatt

SEQ ID NO: 300296 - DNA, 608 bp, Homo sapiens
gacagctgaactgcaaaaaagtaagaaggatgaaatctgagatcattttttaaagaaggatttgctaacttttagaaatgcttaatacaaatggctaatatatatagctgtgtatgtaaatataatagctaaaccagtaattcacacgcatttactctttaaaacaatccactgatgtaagtacccttcttatawgtgaagaaactgaggcttatagaggttatgtaacttgctgggatcgcagaactggtgagtggcacagctagcattttaatctagacaatgtggctccaaatttcaggctcttagtcactacatcatatcacatccaccatttcctacgtgttgaattctccttatttgtcaggattcagttaactcttaactgcaatgaggacttctctaattcctcacctggatttactcactatattctttaggctctcagtaacttttacttgtacctttactatagcatgtgtcatattacagtttaatctcttatggttttatattttataacaaacattgcaaattgcagaccgaattgggcagaagggtcattttgatttactgaagtaatgtttaagtatattttattttgagtg

SEQ ID NO: 300297 - DNA, 608 bp, Homo sapiens
gacagctgaactgcaaaaaagtaagaaggatgaaatctgagatcattttttaaagaaggatttgctaacttttagaaatgcttaatacaaatggctaatatatatagctgtgtatgtaaatataatagctaaaccagtaattcacacgcatttactctttaaaacaatccactgatgtaagtacccttcttataagtgaagaaactgaggcttatagaggttatgtaacttgctgggatcgcagaactggtgagtggcacagctagcattttaatctagacaatgtrgctccaaatttcaggctcttagtcactacatcatatcacatccaccatttcctacgtgttgaattctccttatttgtcaggattcagttaactcttaactgcaatgaggacttctctaattcctcacctggatttactcactatattctttaggctctcagtaacttttacttgtacctttactatagcatgtgtcatattacagtttaatctcttatggttttatattttataacaaacattgcaaattgcagaccgaattgggcagaagggtcattttgatttactgaagtaatgtttaagtatattttattttgagtg

SEQ ID NO: 300298 - DNA, 608 bp, Homo sapiens
gacagctgaactgcaaaaaagtaagaaggatgaaatctgagatcattttttaaagaaggatttgctaacttttagaaatgcttaatacaaatggctaatatatatagctgtgtatgtaaatataatagctaaaccagtaattcacacgcatttactctttaaaacaatccactgatgtaagtacccttcttataagtgaagaaactgaggcttatagaggttatgtaacttgctgggatcgcagaactggtgagtggcacagctagcattttaatctagacaatgtggctccaaatttcaggctcttagtcactacatcatatcacatccaccatttcctacgtgttgaattctccttatttgtcaggattcagttaactcttaactgcaatgaggacttctctaattcctcacctggatttactcactatattctttaggctctcagtaacttttacttgtacctttactatagcatgtgtcatattacagtttaatctcttatggttttatattttataacaaacattgcaaattgcagacygaattgggcagaagggtcattttgatttactgaagtaatgtttaagtatattttattttgagtg

SEQ ID NO: 300299 - DNA, 547 bp, Homo sapiens
ccaacatagcctactccccatttcacaagtatatgttttttctttttttcaaaagactcagttctttttgggttttggctatgctactctttggtattcaagtgtgttgagttatgagagttcccttccaatttctgttcacaatcatccctgtgcatgtagatcaatttcattagcttttgctggttcagtttcagtttacttttatggtcatatctttttagactttcatctttcttgatcatttactgtttaagaatttctagtgtcatctacctgttagtcaacttaagaatatgctatttcagaggacaggcactttttttcttttttttttcctatagccaacatttctttttttcycttcttttctttttagttagatgagttctgagatgagagtccctctttgccaacatttttgccaatttcattttatcctcttgttttttgttatacccacttcttcatccaccaaatatctacggagtggctgctgtgtgtatagtatgaactaggatctatcagaacacaaaaatgaatcaaa

SEQ ID NO: 300300 - DNA, 602 bp, Homo sapiens
tccttagcctgttgggatatgaaattatcagcaagtcaaagcaagataaggcaaggcaaggatttatcaggygctctccgtttttagcagaataagacttccaggtgatatccagaaggttgacattttcagtcataaatatatcatgcttatgtgtcagctttataatttaattggggaaaacatcaatttcattttctgtctgggaatttttgttgataactgtagcagtttagtcatcataatattgagtgaatttttatattcccaataatgtctttttgtctttggatagaagcttctagaaaaaaattacacatttacattattatacataaatgtatatgtatagtttacacaaaagtgtatatgtacatatataaaagtatacatttatattataataattacatagattaaaatccaattagctacattatgtgttgctagtttagatattataatttttaggagatagtctaaactagatggactaaaaactaaacactgaaactttttttcctgctttttgaatcatcttagacatactttttattctcttcaagtcccagtttttcctgtgaaatgtgagtggttattac

SEQ ID NO: 300301 - DNA, 621 bp, Homo sapiens
gctgtccttgtcaatctgtctcagatatgttgatggatgtgcactgagttctgctagcatgctaaaaatgtccttgttccagcactcactgactcactagatcatccatgagttggtgagcatctcctcctagatccttcaaagaactgtacagatcatgcagtcaatacaggacttggggattagattgggawagtttgtgttgcagatatttcaatgcgactgtcattctaagaaaatcctgccctagactttcagcaattgttcaaaacctgtctcagtcattggtaaattgtcactgtcacactgttcttacaatgttggcttcactgtcagtggcagattaggaagaaagccctgggaagcaaaccacagatgcatttgtctttaagctttaagagtgaattttaacacatagtgtatcttaatttaaatccaagtgggatcagtggcggatcaaatttcttttgctttcacattcatcttacaaagctgtttttagaaggaaaatgattagatctagacctcttcactggccatcttatggtatttgaagttgaaaagtcactcagtgattatgaatggaagagcatctgataacctcagcaactgaaaggaaag

SEQ ID NO: 300302 - DNA, 576 bp, Homo sapiens
tcatggtatatttttgagattttgccacattggtaattcagtttcactgttgagtatctttcattatatgaatacaatataagttacatatctgggctatcagtgacaactgtttggtttgtttccaggtttttagtttacaaacaatgctgttgtgaacattcttctacatgcttccttgtatacatggtgaagagttcctcggaggaacatgcctagaaattgaattactgggtcagagagttcaaatttactaggtaacgccaaaccattctaaatatttttgagtatacgttctcaccagcaatgggtgaacatctctattgtttcatatctgtgtaaacatctgatattacctgctttyttaattttgccaacttggtgaatatgaaatgactttaatttgcatttttatgactaataaggttggatatctttttatatttatataggttaaaacagagagcccaggaaacagatctacacatatggaaacctgacttatgacacagtaagcattgaaaatcattgaggcaaagatagactgtaacagtttattctccctgtagaaaaata

SEQ ID NO: 300303 - DNA, 520 bp, Homo sapiens
acaaaataaacctaccagaaatcagtagtgtgttttttacactaataatgatttagctgagaaagaaaacaagaagaaaagcccatttacaatagctataagaaaaataaaatacctagtaataaatctaaacaaggaggtgaaagatctctacaaggtaaacttaaaaacactgatgagagaaacacaaacaaatggaaaaatatcccatgctatggatgaagaattaatatcattaaaattatcatattgcacaaagcaatctacagatttaakgcaatgcttgtcaaaatatcaacataattcttcccagaattagaaaaatcatcctaaattcatatggaaccaaaaaagagcctgtatcgccaaagcaatactgaacaaaaagaacaaagctagaggcatcacattatttgacttcaaaatgtattgcaaggctatagtaaccaaaacagcataaaaatagacacataaaccaatggaaccaaatatagaaataaatccacttatttatagccaa

SEQ ID NO: 300304 - DNA, 475 bp, Homo sapiens
tattccctaatttcccccttttttaaaattctacagcttaaacttcttgagacttggcagaaagccttgttgttacccaaaacttagacactttaagacaagaaggaaataaggaagtacttcaggcaagagctaagtgaaaatttttgtgccactcacatttaaaaaaaaaataggggcagacaaaaattggtacaaccacactttggaaaactggcagcatctaccaaagctgaagatcatatccctcatcagttagcatctccacttctgggcttatacccaacagaaatgtgtaagcatattcaccaaaagaatgctcrtggaaacactatttatagtacttcaagattagaaaccacccaaatgtccataaagagtagaatggatataaaaatggtgatattcatacaatggaatactctatagaaataataacaacatgcaacaatatgaatagatcctacaaacataa

SEQ ID NO: 300305 - DNA, 665 bp, Homo sapiens
ttttgttttattcctagcatctagcagtgcacttggcacagggaagacactcaataataaattgttgaatgaataaatgaatagatgaatgatttagtcacataggctcgataaatgagattttgtcttatccttcagacttggattttgctttggcaactttcctacattatcagcacctcaaagaccagccctagtcctgttctcttgggacttagatcctgactctgaacccctatctatgtttctctctcattgtttcctaacagacttttccccagtgccaattgcctgaatgtctgaacacttctatccctggatacccccattattacagtgtatttttctgtagaatcattcattacctgatcttctttttgtcaacaaataatttttgagtgaattccatatgctgggaattatgcaatatcttcgggatgaaaagagcaaggggacacagccttcagatatccaggacttattgttccaataccctgttttgtctttyggcttagatcttaggttctttataaacagttctgtccatctccaaagatgagagtctagttttagggcaaaattctttcccagtatgccctgtactgctgtagctaacaagccacatctaacagagtcagaaattagagaccagccccgtagaatgt

SEQ ID NO: 300306 - DNA, 581 bp, Homo sapiens
cccaaaagcaattgtgacaaaaacaaaaattgactaatgggacctcattaaactaaagagtttctkcacagtgaaagaactatcaatagagtaaacagacaacctaaagaaggagagaaaatatttgcaaattatgtatctgacaaaggtctcatatccagaatttatgaggaacttagataaataagcaaaaccaactccattaaaaaatagtcaaaagacacgaacagacacttctcaaaacaagggcatacgcacagccaacaagtatatgaaaaaatgctcaatatcactaattattagagaaaagcaaataaagactacagtgagctatcatctcataccagtcagaatggctattatttcaaaaaataacagatgctggtgccactgcagagaaaagtgagtgcttatactctgctgttggtgggaatgtaaattagttcaacctaatttacatcaggtggaaatgtaactgtggaaagcagtctgaggatttctcaaagaactcaaaacagaactaccattcaacccagcaattctattactgggtatatacccaaaggaatataaatcattct

SEQ ID NO: 300307 - DNA, 581 bp, Homo sapiens
cccaaaagcaattgtgacaaaaacaaaaattgactaatgggacctcattaaactaaagagtttctgcacagtgaaagaactatcaatagagtaaacagacaacctaaagaaggagagaaaatatttgcaaattatgtatctgacaaaggtctcatatccagaatttatgaggaacttagataaataagcaaaaccaactccattaaaaaatagtcaaaagacacgaacagacacttctcaaaacaagggcatacgcacagccaacaagtatatgaaaaaatgctcaatatcactaattattagagaaaagcaaataaagactacagtgagctatcatctcataccagtcagaatggctattatttcaaaaaataacagatgctggtgccactgcagagaaaagtgagtgcttatactctgctgttggtgggaatgtaaattagttcaacctaatttacatcaggtggaaatgtaactgtggaaagcagtytgaggatttctcaaagaactcaaaacagaactaccattcaacccagcaattctattactgggtatatacccaaaggaatataaatcattct

SEQ ID NO: 300308 - DNA, 564 bp, Homo sapiens
attgatattttgtatgattttagtcatttcraattcatttatttctgctctgatctttagtatttcttttcttctactaattatggttttgatttgctcttgcatttctagttctttaagatgcattgttaggtttatttgaagtttttcttcttttttgatgtagacacttataacctcttctcttcatactgcttttgctatatctcataggctttggtatgttgtgtttccattatcatttgtttcaataaatttttcaattttcttcttaatttattgactcactggtcattcaggagcatattgtttaatttccatgtatttatgtagttttcaaaattcctcattattgatttctagctttactccattgtggtcagagaagatgcttgatattatttcaattttttgaatgttctgagacttattttgtaacctaacatatggtctatccttcagaatgatccaagtgctgaggaagaatgtgtattctgcacccattggatgaaatgttctgtaaatatccattagttccatttggtttgtagtgcagattaagtc

SEQ ID NO: 300309 - DNA, 564 bp, Homo sapiens
attgatattttgtatgattttagtcatttcgaaytcatttatttctgctctgatctttagtatttcttttcttctactaattatggttttgatttgctcttgcatttctagttctttaagatgcattgttaggtttatttgaagtttttcttcttttttgatgtagacacttataacctcttctcttcatactgcttttgctatatctcataggctttggtatgttgtgtttccattatcatttgtttcaataaatttttcaattttcttcttaatttattgactcactggtcattcaggagcatattgtttaatttccatgtatttatgtagttttcaaaattcctcattattgatttctagctttactccattgtggtcagagaagatgcttgatattatttcaattttttgaatgttctgagacttattttgtaacctaacatatggtctatccttcagaatgatccaagtgctgaggaagaatgtgtattctgcacccattggatgaaatgttctgtaaatatccattagttccatttggtttgtagtgcagattaagtc

SEQ ID NO: 300310 - DNA, 564 bp, Homo sapiens
attgatattttgtatgattttagtcatttcgaattcatttatttctgctctgatctttagtatttcttttcttctactaattatggttttgatttgctcttgcatttctagytctttaagatgcattgttaggtttatttgaagtttttcttcttttttgatgtagacacttataacctcttctcttcatactgcttttgctatatctcataggctttggtatgttgtgtttccattatcatttgtttcaataaatttttcaattttcttcttaatttattgactcactggtcattcaggagcatattgtttaatttccatgtatttatgtagttttcaaaattcctcattattgatttctagctttactccattgtggtcagagaagatgcttgatattatttcaattttttgaatgttctgagacttattttgtaacctaacatatggtctatccttcagaatgatccaagtgctgaggaagaatgtgtattctgcacccattggatgaaatgttctgtaaatatccattagttccatttggtttgtagtgcagattaagtc

SEQ ID NO: 300311 - DNA, 504 bp, Homo sapiens
tgttatttattttctcttgctgcgtttaggatgmtttctttatccttgacctttggaagtttgattattaaataccttgaggtagtcttctatgcattaaatctgcttgtcgttctataaccttgttatacttggatattgatatctttctctaggtttgggatgttctctgttattattactttaaataaactttctgccccatctctttctctacctcctctttaaggccaatagctcttcaatttgcccttttgaggctatttctagatcctgtaggcatgctttttttttaattattttttcttttgtttcttctgactgtgtattttcaaataacctgtcttcaagctcacaaattctttcttctgcttgattaattctgctattaagactctaatgcattcttcagtatgtcaattgcatttttcagctccagaatttctgcttgattctttttaattattttaatttatttgttaaatttatctgatagaattctga

SEQ ID NO: 300312 - DNA, 620 bp, Homo sapiens
ttcattagcatttcttttcccagaaggaaaacattatctcccaaataaaattcaagtgaactaaatcgcttccaacctcagcatcatttcaggcttggtgtcacttgtagattcaagactgagtcctatttaatctactcaggttccaytcctaataggaaaaatgccaagaaacaaagaaaagatgcatcccattttcagaggcaatcaccgtctacactttagactgatcataaagcagttcaatttatcaacgtcttacagagtcagctctccctggcatagtcaaatctgactgcattcattctttcaccaagcatttactgagtgtctactatatgccaggtactgggctggccactagagaaacaaagatagtattttaaatcaagaaactcatagtttacctgcaaagacagaaatataaattactattaaatcatataatcaatatcttactgatggtttgaacaagataatatgggaatacagactggtaagcaatgaggagccacaaatgggtaagactgtgtccttgcttttgaggttataatctagatgggaaatcaagaaaaatgcaccctaactctgttaggccatttatggtaagtgccaaatgt

SEQ ID NO: 300313 - DNA, 516 bp, Homo sapiens
gttttcttcctgtaatctcagcactttgggaggccaaggcagaagaattgcttgaggctagaagttcaagcccagcctggacaatatggcaaaactttgtctccacaaaaatttaaatttaaatttaaatttaaatattagccagtcatggtggcatatacctgtagtcctagttactctagaggctggaatgggaggattgyttgagcccagggattgagcttatagtgagctacaattgccccactgcactgtagcctgggcaacagagcaagatcctgtctcaaaacaatagcaatgaaaaaaaaaatgaataaggttttctgacaggcttaatggccacacaatgaaaaggtacatttttccttgagtttcagcttctgaagcaaagtttgtcctggtagataaagagaaagccaatctctttcctgtggaaataaaaccttcacttgatttgcctaatgctgcctcctttctaaatggtgggcccctagaaatcaggaccaaaggatttgt

SEQ ID NO: 300314 - DNA, 649 bp, Homo sapiens
atgtggacgcattaaagaaatatttatgaagtaaaactgacaggtctggataactaattagatgtacagggtagaggaggatgacagctcaaagatgactcttcggcttctaacttgagtaattggttgactgttggtactgctaattgtgggtayatcaagttggagatgctagtataagttgaggttggatttctttttttacaaagtttgatgtaattttaaaataccatttaagatgaatggtttgtaactgaatacaagtctgccgctcagaggaagattggtcttggaaaaataaacccagcatctaagtgaataattatcagctcaagagtatgtgagatcacccaggcatagaaaacaacctgagagaggagaagcataaaaagagaagcctgaggaacaacatttacgggaatttccaatagctgaagacagccattgtgttccttctttggatttttctcttctacactaaacatttaccgattttttcattgtatcttctattcaattgccttcaaagatgcttcatgttgctgatttttcttctaaaacaggatgctcttgattgatgctaatccatgagctgtggactgactagagctgagaagatggtctccattctggatgtcataaggaacag

SEQ ID NO: 300315 - DNA, 618 bp, Homo sapiens
taatcacatcggggtaagtggagtttccatcccctcacatattcatcatttctttgtgttataaacattctaattgtgccccctcagttattcaaagatgtacaacaaattattgctgactgtagtcaccttgttgtgctatcaaacactagatcttattcgttgggcctaactatatttttgtacccattaactatctctatttccyactccctcttccccggcaacccttccctgcctctggtaaccatcattctgctttctggctttataaattcagttgttttaatttatagctcccacaaatgagtgagaattttccagcttctaaaggccacccacattccttggctcctggcctccttcctccatcttcaaagtcaccaacgtaacatctctgtgacccatgttccatcaccacatctctttctagacacagccaggaaaggctctctacatttaaggatttgtataatcagatttggcccgcttggataatcaggaataatctccccattgcaggatttttcctttaccctaatcacatctacaaaggctcttttgccatatcagataacatctattcataggttcaagggattaggatagcaatatctt

SEQ ID NO: 300316 - DNA, 618 bp, Homo sapiens
taatcacatcggggtaagtggagtttccatcccctcacatattcatcatttctttgtgttataaacattctaattgtgccccctcagttattcaaagatgtacaacaaattattgctgactgtagtcaccttgttgtgctatcaaacactagatcttattcgttgggcctaactatatttttgtacccattaactatctctatttcctactccctcttccccggcaacccttccctgcctctggtaaccatcattctgctttctggctttataaattcagttgttttaatttatagctcccacaaatgagtgagaattttccagcttctaaaggccacccacattccttggctcctggcctccttcctccatcttcaaagtcaccaacgtaacatctctgtgacccatgttccatcaccacatctctttctagacacagccaggaaaggctctctayatttaaggatttgtataatcagatttggcccgcttggataatcaggaataatctccccattgcaggatttttcctttaccctaatcacatctacaaaggctcttttgccatatcagataacatctattcataggttcaagggattaggatagcaatatctt

SEQ ID NO: 300317 - DNA, 450 bp, Homo sapiens
tttcaaccatactgacaaaagcaatctacaaattcaaggcaattaccatcaaaataccactgtcattcttcacagaactagaaaaaacaattctaaaattcatatggaaccaaaaaagagcctgcacagcccaagcatgactgagcaaaaagaacaaatctagaggcatcatattacctgatttcaaactgtaccataaggccatagtcaccaaaacagcatggtactggtataaaaataggaacatagaccaatggaacagaatagagaacccagaaataaacccmaatacttacagccaactgatcttcaacaaagcaaacaaaaacataaagtgaggaaaggatgccctattcaacaaatagtgcttggataattggcaagccacatgtaggagaatgaaactggatcctcatctctcaccttatacaaaaatcaactcaaggtgga

SEQ ID NO: 300318 - DNA, 530 bp, Homo sapiens
agacataaataacccattacctgcttttaaggagctcagaggttagtgacagaaataggcaaagagcaaaacatgacaatgcactatagacatatagatttatagacaatcccacagttagggagctgagggacttgacgggaagaatcacttcctgttttggatggtcaagaaacctttatagaagtggaaatgcttgagccaagtctttcagaatgctcaggaataacccagacatcaaagcttgggagggaaaggcatatgcaatgacacagaggcacaaaacaacaygaaggggaagggctaggatgagactggggagaaaagcaagagcaaaatcttgcagcatcttgattgtgatgctatggagcccgagctttatctgaagttgatgggattccctgaataaattttaagcatagcaatgacataggcaaatttgaattttagaactattttttggtctgccgtggagaggatggatgggagggggaagaacgagagctttgtttagaggctgctgtagtaat

SEQ ID NO: 300319 - DNA, 585 bp, Homo sapiens
attgtagttttttgagaggaggacagagagaaactaacacagcagaggagctgaggtaattggaagagttactgaagagatgccctgcaggtctaggttgctctctaagggcaaaggaagggatgtaagggagtagggaagaaagggggagagaatctgaaaggtagaaagtgtttaaacrggtaaccactgagggcaactgccatctcatcccaaggggaaacttagtgtagaacaaacacctcagagatcttcttctgcaaggggcaaggggactggggtttctatatgcccactcctgttggtcactccttgagagctttaatttcccagcactccagcccaccttagatgtaggcagagtcatgccagcagccaaagaaagccctcaggcaaagaaaccaagtgctggcaaatgcaagcagatgttgggccagaatgtacagaaaaagtagatgcaatggaataggaacaagcacttgagggcatctgctgtgactcccaaatccccagcccagataatagtgctgggtacattacaagctcccagtgaatatctggatgaatattacaatcaatgaagga

SEQ ID NO: 300320 - DNA, 585 bp, Homo sapiens
attgtagttttttgagaggaggacagagagaaactaacacagcagaggagctgaggtaattggaagagttactgaagagatgccctgcaggtctaggttgctctctaagggcaaaggaagggatgtaagggagtagggaagaaagggggagagaatctgaaaggtagaaagtgtttaaacaggtaaccactgagggcaactgccatctcatcccaaggggaaacttrgtgtagaacaaacacctcagagatcttcttctgcaaggggcaaggggactggggtttctatatgcccactcctgttggtcactccttgagagctttaatttcccagcactccagcccaccttagatgtaggcagagtcatgccagcagccaaagaaagccctcaggcaaagaaaccaagtgctggcaaatgcaagcagatgttgggccagaatgtacagaaaaagtagatgcaatggaataggaacaagcacttgagggcatctgctgtgactcccaaatccccagcccagataatagtgctgggtacattacaagctcccagtgaatatctggatgaatattacaatcaatgaagga

SEQ ID NO: 300321 - DNA, 606 bp, Homo sapiens
tgtgtgttgctgtgacagcaagtatttaaaaggaaaataaagaagcgacaagctgcgacatgctatcattaagcaatcataacttcctccccatattacgacaatagatgtcactctctcatctggaaggcaggccacgtatagaaacaccatgtcacaaagcttttcagacaaagacgtagtgggggtgagttcattgggtgcagaatagaatattttgatgggttgcatccaacccatttcccaccccccaactcctacatgctctgataaaagtcagatctgtaaagaacttcaaaggctccccagtctgacaaacagtaataaaacaagaaatcgaaaaaaaaaaaaaatctgccaaagtgcwtggaggaagcggagctgccaagtgctatgatggttctgttttagtaatcagcagactaactgcagggcacttcctcctagcgggaagccgagtctgggctgtcaactgtgaaggagtacagaaaggtcaggcagcaaagggattctaaaggcctggaataagcgattgcacattctttctggtgatttttcttctagtccacatcccaccccaagcccacagcctgcttcatcccaact

SEQ ID NO: 300322 - DNA, 617 bp, Homo sapiens
agatgaggaactgaggctcagacacttaggtgagcccagggctccttgctcaaaatcctcgctttctatcacagcttccaagcaaggcagyataagggaatcccagaacaggaaagtaaccagtaggaaccaatattaggtcctcaggaaccttggaagacactaggaagcacagatattcagtgaagacctcatgtgacctcagaaaaaaaaccctcccaactgaggattttggccaggtgaaattattcccctgtccaatccatactaaacctttcacccgaaacagaagatatcacttcttaaaattgtggaggatgaagcagtcctacttagaaatatctggtctccagattcagctgcaatgccccgtattcaacccccagatctcttcacatttctggttctgtcttccagcttgggtctcaatttgcccatgacaccaagtggatctgttgactgaccatgtgcccctgaaccagctcatgcctcagctaggcagtttcagggtctcctaccaggtaaccaatcaagctttctggaaggacttttagagtcatgaaagtgtcgttggagtccactatgacttttagctaagtggaaaaagcaaaataaga

SEQ ID NO: 300323 - DNA, 570 bp, Homo sapiens
atccatactaaacctttcacccgaaacagaagatatcacttcttaaaattgtggaggatgaagcagtcctacttagaaatatctggtctccagattcagctgcaatgccccgtattcaacccccagatctcttcacatttctggttctgtcttccagcttgggtctcaatttgcccatgacaccaagtggatctgttgactgaccatgtgcccctgaaccagctcatgcctcagctaggcagtttcagggtctcctascaggtaaccaatcaagctttctggaaggacttttagagtcatgaaagtgtcgttggagtccactatgacttttagctaagtggaaaaagcaaaataagaaagtatttcttcaccttaatttaacttagatgctggcctctctaggaggccttttttgaatgctcctcttcccctgcagtgccctcccagtctgtgttagatgccactcctatgtcctccgtggtgcttttcactttcctccaagacagcactcaatgagtactgtaattgtgtgcacatttatctaccactgcttctaacttgtgaaacatg

SEQ ID NO: 300324 - DNA, 538 bp, Homo sapiens
agatgccactcctatgtcctccgtggtgcttttcactttcctccaagacagcactcaatgagtactgtaattgtgtgcacatttatctaccactgcttctaacttgtgaaacatgtattctctcttttactgctaagtccatggtacctgttgcaatgtctttaacatgataggtattcagtaatgaatgaactaggtaaaaaaatgtatctgtaaagacagagctataataggacacagaaaaatggaaagttccatacaatgctgatatgaagtgattttgttttctttttgtgatttgaaatattatttatgctgctccaaagaaaaataagataaacttctaaaaawtttttttaattaaacttttaagttcagaggtacatgtgcagatttgttacataggtaaacttgtgtcatgggggtttgttgtacagattacttcatcacccaggtatcaagcccagtactcattagttatttttcctgattcctccaccctctaccctctgataggccccagtgtgtgttgttcccc

SEQ ID NO: 300325 - DNA, 438 bp, Homo sapiens
tgaactgaaccccctatctttcaccataccaaaaaaacctacttaaaatggattaaagacttcctttgtgatttaaaatttggatttaattgcttttccaaaggttattggaatacaggtggtatttggttacatgagtaagttcttcagtggtgatttgtgagattttggtgcacccatcacccaagcagtatacactgcaccctacttgtggtcttttatccctcggcccctccaacccttctccccaagtccccaaagtccattgcatcattcttaagcctttgtgtcctcatagcttcgcycccacatataagtgagaacatacaacgtttggttttccattcctgagttactacacttcgaacaatagtctccaatctcatacaggttgctgcaaatgccattaattcatttcttttatggctgagtagtatt

SEQ ID NO: 300326 - DNA, 555 bp, Homo sapiens
attatgttggctgtgggtttgtcatagatggcttttattacattgaggtatgtgccttgtatgccagttttgcaaaaagttttaatcataaagagatgctggattttgtcaaatgctttttctacatctattgagatgattatgtggtttttgtttttaattctgtttatgtggtgtatcacatttattgacttgcatatgttaagccatccctgaatccctgayatgaaaccctcttgattgtggtggattatctttttgatatgttgctggaagcatctatgttcaccaggaatattggtctgtagtttcattttttggttatgtcctttcctggttttgatattagggtaatgctggcttcatagaatgaattagggagggttccctctttctccatcttgtggaatagtctcaataggattgataccaattcttctttgaatgtctggtagaattatgctgtgaatctgtctggtcctggacttttttgttgttggtaatttttaaatcaccatttcaatcttgctgcttgttattggtctgttcagggta

SEQ ID NO: 300327 - DNA, 555 bp, Homo sapiens
attatgttggctgtgggtttgtcatagatggcttttattacattgaggtatgtgccttgtatgccagttttgcaaaaagttttaatcataaagagatgctggattttgtcaaatgctttttctacatctattgagatgattatgtggtttttgtttttaattctgtttatgtggtgtatcacatttattgacttgcatatgttaagccatccctgaatccctgatatgaaaccctcttgattgtggtggattatctttttgatatgttgctggaagcatctatgttcaccaggaatattggtctgtagtttcattttttggttatgtcctttcctggttttgatattagggtaatgctggcttcatagaatgaattagggagggttccctctttctcyatcttgtggaatagtctcaataggattgataccaattcttctttgaatgtctggtagaattatgctgtgaatctgtctggtcctggacttttttgttgttggtaatttttaaatcaccatttcaatcttgctgcttgttattggtctgttcagggta

SEQ ID NO: 300328 - DNA, 555 bp, Homo sapiens
attatgttggctgtgggtttgtcatagatggcttttattacattgaggtatgtgccttgtatgccagttttgcaaaaagttttaatcataaagagatgctggattttgtcaaatgctttttctacatctattgagatgattatgtggtttttgtttttaattctgtttatgtggtgtatcacatttattgacttgcatatgttaagccatccctgaatccctgatatgaaaccctcttgattgtggtggattatctttttgatatgttgctggaagcatctatgttcaccaggaatattggtctgtagtttcattttttggttatgtcctttcctggttttgatattagggtaatgctggcttcatagaatgaattagggagggttccctctttctccatcttgtggaatagtctcaataggattgataccaattcttctttgaatgtctggtagaattatgctgtgaatctgtctggtcctggacttttttgttgttggtaattttkaaatcaccatttcaatcttgctgcttgttattggtctgttcagggta

SEQ ID NO: 300329 - DNA, 482 bp, Homo sapiens
gggttaattcaaagaacttgtctttgagctctgaattttttcttctacttgttcaatctattgctgagactttccagagcattttgcatttctataagtgtgtccaatgtttcctgaagttttttgtgttttatttatgctatctatttcattgaatagttctcccttcacttaccattttttcaatttccttgcmttgagttccacatttctctgttgccttccggattagcttaataactaacctcctgaattctctttcaaataaattagggatttcttcttggtttggatccattgctggtgctctagtgtgatcttggggagtggtgttatacagctttgttttgttatattaccagagttggttttttggttccttctcatttggggagcctctatcagagggaaggtctagggttgaaggctgttgttgagattcttttgtcccatagggtgtccccttgatggagtactctccc

SEQ ID NO: 300330 - DNA, 482 bp, Homo sapiens
gggttaattcaaagaacttgtctttgagctctgaattttttcttctacttgttcaatctattgctgagactttccagagcattttgcatttctataagtgtgtccaatgtttcctgaagttttttgtgttttatttatgctatctatttcattgaatagttctcccttcacttaccattttttcaatttccttgccttgagttccacatttctctgttgccttccggattagcttaataactaacctcctgaattctctttcaaataaattagggatttcttcttggtttggatccattgctggtgctctagtgtgatcttggggagtggtgttatacagctttgttttgtyatattaccagagttggttttttggttccttctcatttggggagcctctatcagagggaaggtctagggttgaaggctgttgttgagattcttttgtcccatagggtgtccccttgatggagtactctccc

SEQ ID NO: 300331 - DNA, 564 bp, Homo sapiens
agacacgcatgaaatttggtgctgtgactcggatcgggggacctcccttgggagatcaatcccctgtcctcctgctctttgctccatgaaaaagatccacctacaacctcgggtcctcagacccaccagcccaaggaacatctcaccaattttaaatcgggtaagcggcctcttcttactctcttctccaacctctctcactatccctcaaccactttctcctttcaatcttggcgccactcttcaatctctcccttctcttaatttcaattcctttcattttctggtaaagacaaaggagacatgctttatccgtggacccaaaacgccggtgctggtcacggactcaggaaggcagccttcccttggtatttaatcattgcagggatgcctctctgattattcacccacgtttcagaggtgtctgaccacgcagggatgcctgccttggtccttcacccttagcagcaagtcccacttttctgggggagrggcaagaatcctgaccccttctctccttgcctctaccccttctctgcttttctggggggcaagaacccccca

SEQ ID NO: 300332 - DNA, 589 bp, Homo sapiens
ggtgagtctttaattcggggactgctgtttctacaagaagagggaaatttggacacagagaccaacccagagggagaatgccatgtagcagtagaggcagagactggaatgatgcagctacaagacaggaccrtcagggattgctgacaaccaccagaggctaggagagaggcatgggacacgcttccctcagagcctccagaaagaaccacatttgctggcactttgaatctggacttctagcctttcagaactgtgaaataataaatttatattgttttaagccctccagtttgtgatagtttgtgatagcagccctagaaattacaaggtcaacatataaaagtcatttgtgtttctaaatagtagcaatgaataactgaaaactaaaatttttaaacattatttaaaatagcctagaaactataaaatatttcatggtatatctaacaaagtgtgtccaaagttcatgcactgaagactataaaatattactgaaaggtattaaagaagattgaagtcaatggaaaggtatattgtgtacatagatcagaaggcccagttttgttaagaggcaattctacccaaa

SEQ ID NO: 300333 - DNA, 589 bp, Homo sapiens
ggtgagtctttaattcggggactgctgtttctacaagaagagggaaatttggacacagagaccaacccagagggagaatgccatgtagcagtagaggcagagactggaatgatgcagctacaagacaggaccgtcagggattgctgacaaccaccagaggctaggagagaggcatgggacacgcttccctcagagcctccagaaagaaccacatttgctggcactttgawtctggacttctagcctttcagaactgtgaaataataaatttatattgttttaagccctccagtttgtgatagtttgtgatagcagccctagaaattacaaggtcaacatataaaagtcatttgtgtttctaaatagtagcaatgaataactgaaaactaaaatttttaaacattatttaaaatagcctagaaactataaaatatttcatggtatatctaacaaagtgtgtccaaagttcatgcactgaagactataaaatattactgaaaggtattaaagaagattgaagtcaatggaaaggtatattgtgtacatagatcagaaggcccagttttgttaagaggcaattctacccaaa

SEQ ID NO: 300334 - DNA, 558 bp, Homo sapiens
acaagagcccatctgcaatgccatcatagggarcacaactgtttaactgaacggacctattctcatgactaagagactgattcaagaagatgtgggatgcttgtttcaatagggatttcttttccccttttaccaacttcgtatctcacaatctctaacccaaatctccccaaacctaccaacttgggctttaatatgtgacactctaaaaataaaagtttcaaatgggggactagaggaaaataaaaatattcaccccaaaatatttctttgacatgttttgagatggctattcagagggcctgcagacagaatagccctgaaaagctgacttttgtggaggagatttgcatctctagagaagatctccatccgtgaaatcaacaggcaggctttctctgctcactcccttgtctagatctaggaaggactggctcacgagagaaagtgactgaaagtctcacacctttgggggtttaacagtaacttatactttctgagagctgctacctgtgaggtatcatctacaataacaaggccacctttgccagccttgcc

SEQ ID NO: 300335 - DNA, 558 bp, Homo sapiens
acaagagcccatctgcaatgccatcatagggaacacaactgtttaactgaacggacctattctcatgactaagagactgattcaagaagatgtgggatgcttgttycaatagggatttcttttccccttttaccaacttcgtatctcacaatctctaacccaaatctccccaaacctaccaacttgggctttaatatgtgacactctaaaaataaaagtttcaaatgggggactagaggaaaataaaaatattcaccccaaaatatttctttgacatgttttgagatggctattcagagggcctgcagacagaatagccctgaaaagctgacttttgtggaggagatttgcatctctagagaagatctccatccgtgaaatcaacaggcaggctttctctgctcactcccttgtctagatctaggaaggactggctcacgagagaaagtgactgaaagtctcacacctttgggggtttaacagtaacttatactttctgagagctgctacctgtgaggtatcatctacaataacaaggccacctttgccagccttgcc

SEQ ID NO: 300336 - DNA, 592 bp, Homo sapiens
agtttgcagtaacccttgaaatatctggcagtacaagaaacaacagatctatgcccacaatctcattttacaaattaggaaactaaggcctagagaagtttcatgtaagcccaaagccacacagctaagtcagtggcattgccaagactagaacccaggactccttaatcccaggtgaggctctgcagtctgcaggctcactcctagtaagttcagactggtcacatagcstgcggacattggcaggtggcatagtatgagagcagtggttcatcaccttcagggcaggcaggcagctgccacaatcctgaggctggcaccccatacacacagcaggccaccctcgaccagccagctgagacttacctaaagggaaatgtgcagcatcaccagccaataagcatcacctagagacatggctgtcttaacgtgagacagagaaaatggacaccttctagctttaaaaggcctgtttcatacttctctcccgaatcttattccctggagtctagactctatcatactaggttccctgcttgagaataaacttttccactaagcacttaatctttggccttgtagtatgttattt

SEQ ID NO: 300337 - DNA, 521 bp, Homo sapiens
ccgagggtggtctgacaacaacatccagtgaggaactgagaccctcaatctgacagcccatgagaaactaaatcctatcaagagcratgtgagcttggaagctgagcttcccaagttaatcctggaggtgactacagcccagccatcatcttgatagcagcctggagaggccttaaagtagaagaccagctaagatgtgccacagtaatacatgtgtgttattttaaaccactatgttttaggggaatttaaaatgccagaatagatacctaatacatcatcctagacaacacacacacacacacacacacacacacacacacacacactctctctctctctctctacttgtacacattttaaaaactcaatcaatcctagtcatctataggtagtaagactcttcatatatgggctcagcactgactattttttaagatcaagattagatcggatcaaggcaataatatattggtagttttacatccttctcttctaacgaaactgatctaaactgattg

SEQ ID NO: 300338 - DNA, 394 bp, Homo sapiens
tgaatgtatttataagtgagaaggacatgagtttggggggtccaggggtggaatgctattgcttgaatgttcccttcgaaactcatgttcaaatttgtaactgtgatggtgttaagaggtaattaggccatgagggctcctccctcatgaatgaattaatgttgttgttgtgagagtgggttcattatcacaagagtaggttgttataagagagttcagacttcccttactatctcaagctctcttgcccgtctgccttccaccatgggatgacatagcaagaatacttgcaccagatgcagccccttgatcttggacttccaagtctcaagaagcatkagccaagtgaatttattttctttacaaattatccaatctcaagtattccattata

SEQ ID NO: 300339 - DNA, 605 bp, Homo sapiens
atgtcctatggtcctgttgacattgtctagctctcccattcttttctgaaccatagcatgtatgattctcccactttgtgagtctcttgtaaaacatgaaataaaggggcttaaagacaaaagaaggcagttcagagttctacttgagtcgttaaagactttgaatgctaaatgaggcccagtttttctccttcttgaattaaattatttaaagatctttttttctaagaaragaaagttatgcttcaagacagactctggatgatatcaggggctatcctgaatgcaaacaacagtttagggagaaaacaaatctatgtccaatttgtgggtagtcaccaatacacttttacactacaaatttagtaacagacattaggggtcatccaatgccctattttcaagtaatatactccaatgaggttatcaaatggtacaggaatttgcaatgtagagattatcaggttagggcaaagcaaaagaatgtagggatgagggaatgcagtgacctttatttgtaaggtctgaaaaaaagtgaaatagtctccaaatacacactaccattgcctaaatctttcccaagctctatttcttaaaaaccttgg

SEQ ID NO: 300340 - DNA, 548 bp, Homo sapiens
tggggcagcgcgggggcggggggagcgcggtagtggggatgtgagaaacgccagcrttctaacaagaacagagtgatgccagaaagacgcaggaaatgtttcaaagcatgacaagcactgtccaatctgtagctaattccttataaaaataagaatgtggcttataattgttaggtgcctggagggtaattagagtttctaattgttctcatccacaatctcatttttgacccttcatcagagagcgagagatgccgcccattgcgaaagtgcgcgttctggaaacgtgctgcatctgcggggctttggcgaacgtgctctgctgggccagagaggcgggacatatcagacttagagcctccaccagaagggggttgggggcagagggttggcctggtccagtcaccctcttgaagggaatttaaccaccagggtatgtgggcagtatatttagggtgtttcagtagcaagcacagatcactttgtttggagataagaagagaaaaaaaaaacgaaacaaaaaaaaaaataccttgcatagagttgtt

SEQ ID NO: 300341 - DNA, 548 bp, Homo sapiens
tggggcagcgcgggggcggggggagcgcggtagtggggatgtgagaaacgccagcgttctaacaagaacagagtgatgccagaaagacgcaggaaatgtttcaaagcrtgacaagcactgtccaatctgtagctaattccttataaaaataagaatgtggcttataattgttaggtgcctggagggtaattagagtttctaattgttctcatccacaatctcatttttgacccttcatcagagagcgagagatgccgcccattgcgaaagtgcgcgttctggaaacgtgctgcatctgcggggctttggcgaacgtgctctgctgggccagagaggcgggacatatcagacttagagcctccaccagaagggggttgggggcagagggttggcctggtccagtcaccctcttgaagggaatttaaccaccagggtatgtgggcagtatatttagggtgtttcagtagcaagcacagatcactttgtttggagataagaagagaaaaaaaaaacgaaacaaaaaaaaaaataccttgcatagagttgtt

SEQ ID NO: 300342 - DNA, 578 bp, Homo sapiens
aaggaagttcatagcaataaatacctacatcaaaaaagtagaaaaattacaaatgaacaatttaacaatgcacctaaaggaactagaaaagcaagataaaatcaaacccaaaattagcagaagaaaagaaataataaatatcagagcagaactaaatgaaatagagatattacaacatgcaaaagatcaacaaaacaagaaactgtttccttgaaacaataaacaaaactgataaactgctagctagactaaccaagaaaagaagaggaagaggcaaataaataaaatcagaaatgaaaaagaagacattacaagtgataccaaagaaatacaaaagatcatccagagactattatgaaaaactgtacactgacaaatcrgaaaatctagaggaaataaagaaattcctggaaaaatacagtctaccgggattaaatcaagaagaatagaaattttgaacaaagcaatgataagtaaaaagtgaatccagaataaaatgcctcttaacaaagaaaagctcagggctagatgaattcataaccaaattctaacacttgtataaacaagaactaatacca

SEQ ID NO: 300343 - DNA, 264 bp, Homo sapiens
atagacatatggatgataactgtaaaattatttctgctttattgtatatttaaaatttccataataaaatgttggaaaaatgcatttcaaccagaagaaaatatatttatattgtmtgattaaattcatgcaaagtttaacaggcaaaagtaatctttacataaggtggtcagaataattgttacccttggggatgtggtctgggagagtgcttcataaagtgtttttgggttgctagaaatgttctatatcttgatctgagtg

SEQ ID NO: 300344 - DNA, 584 bp, Homo sapiens
tctcaagacctgtttattcttaaagacaaaggtaaaccttcactccctgagayatttctgcagaaacaactttctccttgaaatgcttttgtagttctatgtaccacttacctgacaggtaactctaggcaacatttctatgttgttcaactttttcactgtccacattttatgcctttaaacctggaggaagctctttgaagataagagccatgttgggattttgagtgcatgtgagataaatctgaggatattttgcaagattagttcacacatggcactgcaactgtgaaatggaagaatgattgtgaagtcatctgtgcatctgtaggccagagttgatttttttaattaaataaataaatagaagaactcatctgtgcagatgcaggaaagcttaattcacaattgcatctccaaattacctctaaaactgttatgtgtctattcctttaatgttaggatataatattgtcattgttcagatgacacattgttcactcagccagggtatcttgactcaattgaaagttagagttaagaaatctgggttccttcctgttttctagaactacctggctgtg

SEQ ID NO: 300345 - DNA, 565 bp, Homo sapiens
tagtactccgcagcacctatgttcccatccttatgtccatgtgtacccaatgcttagctctgacatatgactgagaacagaaacacatagatatttatgttaattaaaatattactaatactaaggatatgtaatatataatttataaataatagaatacgtaataccatttattataaagctcctgaaaycaattagttcttgatgtgatttcattcattgttttttgccaaactcctttatccatagctgttacaagctctctattcccaactccagatatcttttcatgtccttgctagtgtgcctctctgcatgacactgagccatttttgtaacttgtcatatatgcaattaagtaagtgcaggtgaccatagtgtaactatggtatggggaacagcttatttgttgcttgctggaaatggtgctgcatgtttagccctgagttcctcaggtgcagcacaactcattgcatgcctagcttccatgtgggcccatcatgttgccttgttgccttgactagccaatttcaagctactaatgcgatgtctctggatgtagagt

SEQ ID NO: 300346 - DNA, 610 bp, Homo sapiens
tcctcaggtgcagcacaactcattgcatgcctagcttccatgtgggcccatcatgttgccttgttgccttgactagccaatttcaagctactaatgcgatgtctctggatgtagagtaatgaatagtgcaccattaaatcgtatttcaattttgtaaattcagttgacataaataacctcaaaagcataggtaataaaatgttgtaaaataattaagaagtgatgaacatttattatttttgttttaacataatcattaaattgtaagtttaccattgggtacacatggayataaagatgagaacaacagacaatggagaattcaagaggagataagaaaagagagaaggaaacaagggttgaaaaactgcctattgggtgctatgctcactccctgggtgacaggttcaacagtactccaaaatgtagcatcatacaatatacctttgtaaaaaatctgcacatgtatccccagaatctaaaatagaggttgaaaaagaaaagaaaaaattaattaaaaatttttaaaattgtaagttaatttaattcttttgttgtttgattttgagactgagtttcactccagttgcccaggctggagtgcaatggt

SEQ ID NO: 300347 - DNA, 550 bp, Homo sapiens
cagagaacttcccaaacctaaggaaagataaacattcaagtacaagaatgtgatagagcaccaagcagatttaacacaaagaagactacctcaaggcatttaataagcaaactctcaaaggtcaaagataaagaaactatcctaaaagcaacaagagaaaagaaacaaataacatgcaatggagctccaatacatctggcagcagattttcagtggaaaccttacaggctaagaaagagtagcatgacatattaaaagtgctgaaggaaaaaaaacttttaccctagaatagtacatctgatgaaaatattcttcaagcatgaagaaataaagactgtcccaaacaaacaagagctgaggaatttcatgaacaccatatctgtcatacaagaaatgctaaaaggaattatttaatttgaaagaaaatgatgctaawgaccaataagaaatcatctgaaggtacaaaattaactggtaacagtaagcacacagaaaaacacagaatttaacactgtaattttgatgtgcaaactactcttatttaagtaga

SEQ ID NO: 300348 - DNA, 501 bp, Homo sapiens
tgtgttaaagaagtgtagagtttttattggttttctttttgcttgtttgtttgtttttgcaatcaatgttaagttgtcatcagttcaaaataatgggttataagacagcatttgcaagcttaacggtaacctggaattgaaaacatacaatggatacaaaaaaagaacagcaagaaatgaagtcataccaccagagaaaatcatcttcacttaaaggaagacaggaaggaaggaaagaaggaagagaagaccacaaaacaaccagaaaacaaaaaaacacagtgaacaaagtaagtccttacttatcaataataatgttgaatgtaaatggactaaactctccaatcaaaagacatasagcagctgaatggattaaaaatacaagacccaatgatctgttgcttagaagaagcttcaactataaagatacacatagactgaaagtaaagcaatgaaaaaagatattccatgtcaatggaaaccaaaaaagaggaggattag

SEQ ID NO: 300349 - DNA, 595 bp, Homo sapiens
attttttataacacaaaggataaatgcttgaggggatactccattttccatgatgtgattattacacactgcatgcctgtatcaaarcatctcatgtaccccataaatatatacacctactatgttactacagacaaaaaaaagtgataatttcaactgattctggaaaagcattcaataaaattcaacatcctttcataataaaatccataaaaaactgggtacagaaggaacatacctcaacatattaaaattcttatatgacagactcagagctagtgtcatactaaatggggaaaaatgaaagccttttctctaagatctgaaacacaacaaggatgcctacttttaccactgttattcaatatagtactgtaagtcctagatagagcaatcagatgagagaaagaaataaaaggcatccaaaatggaaaagaagaagtcgaattatccttgtctgcagatgacatgatcttatgttttggaaaacctaaaggcccccccccaaaaaaattattaaaactaataaaaaaattcagtaaagttgcaggatacaaaatcaacacacaaaaaccagtagcatttatacatacca

SEQ ID NO: 300350 - DNA, 539 bp, Homo sapiens
gtcctagatagagcaatcagatgagagaaagaaataaaaggcatccaaaatggaaaagaagaagtcgaattatccttgtctgcagatgacatgatcttatgttttggaaaacctaaaggcccccccccaaaaaaattattaaaactaataaaaaaattcagtaaagttgcaggatacaaaatcaacacacaaaaaccagtagcatttatacataccaacaatgaacaatctgtaaaagaaatcaagacagtgattccatttacaatagctacaaataaaattaaattcttaggaattaacttaaccaaagaagtgaaagatctctacaatgaaaactataaaacactgatgaaaggaactgaagaggacacaaaaaatggaaagatattccatgttcatgtattggtagaatcaacattgttagaaagttcatactgcccaaagaaatctacagattcaatgcaatccytattaaaataccaatgacatttttcacattcttcacagaaataaaacaaaatctgaaaatgtatatggaa

SEQ ID NO: 300351 - DNA, 566 bp, Homo sapiens
aattatttacagtaaacacctatgtatttttatcatcacaatacctagtttctttgtgcaccaattttcttgattcccacttcttctggatttaattttttctgatgaattataccctacagtagtttttgcagtgagaatctgatagtattaaacttagtccttaaatgtctgaagatgtcttaccattttacaattactcttgaaggcataaaattatacattcacaattattttcacataacactttcaccaggttcttttattartgaaaaataagctgccaaccagattgatggattttatggtgtcttcattgcaatgtccatatgtgggtttatttttattccttctgctgtgtgtacacattaggcttttctaatctgaaggctcctgtgtctttaattttagaaaattttagttattacctaactcttttagaccctcttcccaattatttgtatttttttcttctaaaattcttatcagacagatattgttgcttctcagcctccaagtctgttaatttctctgtcattttttttaaatcatgttttctgtcttca

SEQ ID NO: 300352 - DNA, 499 bp, Homo sapiens
tgtgcagttttctgtttggtctaagattggttagttttcctataggctaaagaataatgtgctaagaactgagcccccggctgagactgtgggatttaaaagggggagaaaggyaaacagcattccatcaagttgtactttgggcactgggaaaatatgttggttgtgctgtcaagaaattgactttttggctgcatgataaaggtgaactctggcactccaaaactggatggaaatcacaatagctccttctagaaaagtcaaagcaaaatagagacattttctctggtgcttcagatccgtaagaacattatctgaaaagagagatcacaactcgggaaaaggggaaaataggaaaacattgcctgttgcctttagtaataaaatttcacttagcaaatttcctaagatttttgtcattctgggcctcagtctttgtttctttcatttgtgttagagaatatttgaagttgtactgagaaaaaaatagtagtagtgt

SEQ ID NO: 300353 - DNA, 666 bp, Homo sapiens
attcactggagattgtgtaaccaatctccagaactttttcatcttgcaaaactgaaactctatacccatgaaacaactccccatttccccatctccccagcccctggaaaccacaattttctctttctgtctccatgagtttgactactctggatacctcagataagtagaatcatatagtatttgtcctttaggaggcttgtctcttatccttcatttattcatttacttgatgatttatttatattggtatagactcatggacacctgttttatattttgggttatattccaacactattttgttgctcaacttagtaaagatatggccattgaaagctttttctgtggattcctgggtccctttgacatactcccatcattacggtggggtttttagttttatttgttttgttttactttctcataccaaaggagcatcattttgtgtgtatgctgggacagtcctagaattagtcatttctctaagagctctgattctttttatgggagaagggtgttagaaaccaagttctgagtgccaggtatgcttgttsctactagagtattattgcttctaggccctctcagctgacacagcaaggaaatacatgtgtgtatactacctcatgtatattcaccacagatctatgaatatttctatat

SEQ ID NO: 300354 - DNA, 531 bp, Homo sapiens
tagaaatcattgtgactacattggtctttatcgataattttatgtagcataatccatcaccatgttagatgttggggcagggaagagggtattactttgtctttcacttggtactcagacagctctctcatattgatttcttggcttgcatgtttgttaaatgatgatttgcacttttccagtattatgtttatccagattatgtttcagatgtgtctataacatgtcatcattaacaacaaacatttattgaacacttacggtctgtggatcaggctccagactaggtactgggaataataagagaaaggtaatgtgacccctaccctgcagggttttaktatctatcggaccatgtctttaaaaaaaaaaaaaaaaaaaaagaaaagaaataaaagaaaaaaaagatacctaatagcttatatccagtgagtgctacaggcagtaagtactcttggagtttagagaagggagtgattggtgaggactggatggtcagggaaggctgtaggaatgagatgaaatttgaaa

SEQ ID NO: 300355 - DNA, 574 bp, Homo sapiens
gcctactcaaaattgttttacagacarttgtgtgcagacgaaaatatttggtaatgactggcctggaagattaagtccaaactctcaaggctgttcttctagacaccttcttagcttccattccttccctttccacactctatgcttccgccacgttttggccactgccctgccagagactgaatatacaaatggacaatggtcagaccatatatgaaaagagaaaacttggccgggtgcggtggctcacacctgtaacccgagcactttgggaggccaagacaggtggatcacctgaggtcagaagtttgagaccagcctggccaacgtggtgaaactctgcctctactaaaaatacaaaaaaattagccatgcatggtggtgagcacctgtaatcccacctactcggaaggctgaggcagggagaattgcttgaacccaggaggcagagatagcagtgagctgagactgggccgctgcactccagcctgggcaacagagcgagatgccatctcaaaaaaaaaaaaaaaaaaaagaaaagaaaaaagggaaaactttaacccatgaccagcag

SEQ ID NO: 300356 - DNA, 585 bp, Homo sapiens
agagtaagcctgaggaagtggctcatactcatgacttagtttaagaaagaaataaatgaaataaaaaaaattttcaagtaaaaccatttctcgggatggcataacacaaagatacaaatcaataccactagcattaaaaaaaaaaaagtgtaactcttactacattctagaagaatatttttttcagactaagggttgcaacccaacagagaattgcaagatcactatttaaaaaaaaaacatgaagcaaaatagaatagaaaacatcagaatatctcacatgtaataaaggtagatatttctttgtttcaattatgggtatgtgaggcactggatyggaatataaaaatatattcctatgcaccgtagcagaagaaatttaaaatattgctctaagaagttctttgcaaacttggctaataatcaaaactatctaagagctataaaaatatacaatttttcaggtctccttgtaagaagaggtccagagatctgtggagaatgcctcagaaaatgctacaaaccatgagtcatttactctaattagaatgagcagtgaaaaaattaacagtagtgagaaagcat

SEQ ID NO: 300357 - DNA, 454 bp, Homo sapiens
aactgatgggtttggaaaggagattttgttttaaggctawaataaaagtcatacatatggtgttccagtactggttttagtatcctccattgcagcaattgttctcaacctagaagaagctgtgagcttttaaaattctcaatgctttttgcacattgattctgtatcctgagatgttgcttatcagcttaaggagattttggcctgagacaatggggttttctaaatatataatcatgtcatctgcaaacagagacaatttgacttcctctcttcctatttgaatgccttttatttctttctcttgcctgattaccctggccagaacttccaatactatgttgaatgggagtggtgagagagggcatgcttttcttgtgcctgttttcaaagggaattcttccagtttttgcccattcagaaggatatgaacagactctcaaaagaagacatt

SEQ ID NO: 300358 - DNA, 454 bp, Homo sapiens
aactgatgggtttggaaaggagattttgttttaaggctaaaataaaagtcatacatatggtgttccagtactggttttagtatcctccattgcagcaattgttctcaacctagaagaagctgtgagcttttaaaattctcaatgctttttgcacattgattctgtatcctgagatgttgcttatcagcttaaggagattttggcctgagacaatggggttttctaaatatataatcatgtcatctgcaaacagagacaatttgacttcctctcttcctatttgaatgccttttatttctttctcttgcctgattaccctggccagaacttccaatactatgttgaatgggagtggtgagagagggcatgyttttcttgtgcctgttttcaaagggaattcttccagtttttgcccattcagaaggatatgaacagactctcaaaagaagacatt

SEQ ID NO: 300359 - DNA, 484 bp, Homo sapiens
gcaggtaaagaaatatttaagtttttgtgcattcattcaagtagcattatcaaatacccatttaataatagttctgtaatagtgaacagggagaaaatgtaaaacaaggtttcatttctcccatcacttataatctgtgtgaagagatacagcacatttgtttaaagacaaaacatctaatgaatgatagacaggtaattagtgatctcagagtttgaaggcagagctcactataaattagaatggttagaaggactgagtgggatgagtgtttgaaagacctcaagtgacaaccagtgttctgtgggaaatattatcctccagacaatggaacacccttggacatttttaagcaaaagctagaatgtactaacataacttgagaaatgactttgaggcatggcttcctgraaataaattaattctttagttttccaatgcagagttacaataattttcaggcattatagtgccttcccagctc

SEQ ID NO: 300360 - DNA, 518 bp, Homo sapiens
ctcttacctgtacatacgccccttatttaaaagatggcataatgaatcccagagaaataaagtgattttctgaagcttacagagctagtggaacctgagctggcatttcaggcattccatttctctgtcaccctacttgaattgcatttcacttacattttgttatacactgtttatcattgctttatgattgtctctttggtctatatcttacacctgcaataaactgaactcctagaggtcaaggaccatttcttatactatcccagcaccatataccctacactgaggcatagagaagattccagcagacattcctcaactcgaatagaatgcttttcagaatgaagttgccccatggacctgtaggtacctctgcaacagcacttggtcatagggtcttgagaatacascaatctgtactcactcctctgggagtaagacgtcaccagctcctagccaagtagttccgtcatgttggggtctttactgttaccactggcttccaaacagaggca

SEQ ID NO: 300361 - DNA, 492 bp, Homo sapiens
ttgaactcgggcagggtaaagtttaccatcaatgaaatgagggtctgttatataaattaccaatgtaaacaggattgtaaaagggacaatttaatctacttacaagaatgaattgttttcaagcacttaagttgcataaatttacatayagtgtgctaattacaaatgattgatatccagtcattcaaacacatctggtaggagccctgttctctaacaatttattagacactagattgcattacttgaaatatttgaaaatggtataaatgtatcttttatatatgtgtattcacacacatttatataaaagacagtccttgcttttcatggagtcatgtcattggaaacctcaccacaaagattatcaagcacagatcactgagaaccaagtaacacttttaggtacgaacagtgttataattaggactggtgtgcctgacccaggaatcacaccaagtaaatcacggaatcaatcagccttatgttata

SEQ ID NO: 300362 - DNA, 492 bp, Homo sapiens
ttgaactcgggcagggtaaagtttaccatcaatgaaatgagggtctgttatataaattaccaatgtaaacaggattgtaaaagggacaatttaatctacttacaagaatgaattgttttcaagcacttaagttgcataaatttacatacagtgtgctaattacaaatgattgatatccagtcattcaaacacatctggtaggagccctgttctctaacaatttattagacactagattgcattacttgaaatatttgaaaatggtataaatgtatcttttatatatgtgtattcacacacatttatataaaagacagtccttgcttttcatggagtcatgtcattggaaacctcaccacaaagattatcaagcacagatcactgagaaccaagtaacacttttaggtacgaacagtgttatrattaggactggtgtgcctgacccaggaatcacaccaagtaaatcacggaatcaatcagccttatgttata

SEQ ID NO: 300363 - DNA, 609 bp, Homo sapiens
ttaagtatattcttatgatgcaaccatcaccaccctcattcatctccagaactttttcatcatctcaaacagaaactctgtatctattaagcaataactcctagtgccctctccacctgcctctgctaacctttattacactttgtgtctccatgagtttgcctattttggatacctcatataaatggaatcctacaatattttttaaactgcaytggcatcatctaaatattttaaagcctcattattgacttcaaaattgatacattggaggacataaatatttcaactctggttctttcattatttatatttgttttcttctcttcttgtatttaataatatagaaagcaggcttgctgataaagagtcaacaaagggaaccaaaaagaagtatatatttacaaatagaaacagttgcctgtgtgctagttgttcagggtaatgttgaatattcatcaatgattacatgtgtatgacagccagtttcatattcacctttctcctccagtccctgcctcttgtcttttcctttccttattcagtcatcattaaaaaccatcaaggaaacaggcaatcatggtaacatggggtgtagtcaataggcag

SEQ ID NO: 300364 - DNA, 609 bp, Homo sapiens
ttaagtatattcttatgatgcaaccatcaccaccctcattcatctccagaactttttcatcatctcaaacagaaactctgtatctattaagcaataactcctagtgccctctccacctgcctctgctaacctttattacactttgtgtctccatgagtttgcctattttggatacctcatataaatggaatcctacaatattttttaaactgcattggcatcatctaaatattttaaagcctcattattgacttcaaaattgatacattggaggacataaatatttcaactctggttctttcattatttatatttgttttcttctcttcttgtatttaataatatagaaagcaggcttgctgataaagagtcaacaaagggaaccaraaagaagtatatatttacaaatagaaacagttgcctgtgtgctagttgttcagggtaatgttgaatattcatcaatgattacatgtgtatgacagccagtttcatattcacctttctcctccagtccctgcctcttgtcttttcctttccttattcagtcatcattaaaaaccatcaaggaaacaggcaatcatggtaacatggggtgtagtcaataggcag

SEQ ID NO: 300365 - DNA, 575 bp, Homo sapiens
tatctgttcccctctgttgaggaaatgttctctttgttaatgtcatcccattactcctcatcacctctccttgtactaggttgagtaattcctttgcctccttagaagttaaacacttcaaatatttataggctgtaacttgaaaagctttgggctaatggatcatgtttctacctgagggactccttcattttccaaaattactgtaggcacataatctttaatcctccattatttctgatttctccaggttaagcatctgtgggtggcagcaaatttaactgatatctccaagctgccttttaaagataaagacctttcttccctacctttaacatttgagmttttaagagaacaaattggttctgtactttctggcataggaagtctgattcagccaaaccaaacattaagactgaagagatgcagctgtttcttgaaccggaatacaggtaacttttattacaaaatattgctagagctttacattgttcattgaataagcagctgtgaatcatcaaatgagagaatatctatgaaaggggttcataaaatataaaattaattaaaataaa

SEQ ID NO: 300366 - DNA, 580 bp, Homo sapiens
tgggggaaggcagagtgagtgtcattcttaatagagatgctgacatggtgggagagatcttctatgacatgctcccttccaggaagaaaactcatttcctaggtgtacatatctgatctgccctgtgctttaaaatagaaatgatgagcccaggtcaggggctgccctggggtgggagggaaacataatcaatgcaaaaattgacctggtaacatacactcacatgaggtaatggcttactccataataccgtttaaagtgaaactcaggaaatggtttaatatatgaccaccaattcagtcaaaataaaaccaggtgactttgatcttaatctaagctctgtcacttattagctatgtgtcctgagacaggttgcactacttttgggctcagtttcctcttgtgcaaaatgcagggctgtgttgcagcatctcagggccctctttcagcttcatgcattaggattctctgtagtaccacagccaggttgctrgcaaacagagccatacatttcatttctaagcatctaaaggaaatttacttttaaatagtagttatcactagtggaaaaataattgaa

SEQ ID NO: 300367 - DNA, 634 bp, Homo sapiens
taaaataatattaaagttctatctaagacaaacattctgcatgtcttataagacacaaactgtactattatttgtggcaggggttctttactgctgtttaattggacttctagttttatttctgtaatatgtggtataaagcttcagtgaagttcaaatgttataattaacaaaaattgattagtgttccgcttaaatacatttatactatgtattgtatgtatgctctggacacagtcacaattatagattaaaagctcaatatataaatataagtctcagtgacacaataagaaaagttctgatatcttttggaggaaaaatgttagcaggtggggtcaaattacagcatatcaccttaaagtagtactgttcttgtgaaatctcttaagtatgtttattttcacatccctcaggaaattgtatggaatagaaagaagtgcatacagaacaaaaatgacacctatatttaataggagctcctcttctagggctgctaccttaacaccagacaatagatgaggcactagggtctaactttattattttgtaaacaatatattcagctagtaaaatagaattgaggaacaaaaagyaactctcaggttgcaactatttctcattttagatccct

SEQ ID NO: 300368 - DNA, 606 bp, Homo sapiens
ttgcttcccatccctgcaactgtggactctgatggtcttcttattcctgtttctaaaggaaaaggattcttcsaaaagataaaccaatagttttgttaagcttagagttgaaatttcacatagatgttttgtgccctaatgctagtgaaccatcagggaaaaaagaaccttagagacaggtaatttattgtgactctcacgaggtattggggtgctgctgcacaatatgggtgagaatggtcaagtctgaaatgaaggatatctcatgaaatgcctcttagagctcttatccttgctgattagagtcaacagacagctaatctgatgggacagaactgcaaatgacccagaccatttataaatgaagtttcgggacaacacaccctacaggaaataatgactatccagaagaatatggaatggctagtggaagaactttggccctgaccagttagagcaatatgcactgcaataattataaacatttatttttcactttcatattgcctgtgtatacatgtatcgatgtgtttccctctcctattcccctatcatatagcattgtatgtgttagtagcgaggatttttttataatttcagagttta

SEQ ID NO: 300369 - DNA, 641 bp, Homo sapiens
ggcaggctgacatctttgctgtttgggtgacttagccattctagccttttggctttgaggagtccaagtgtaccagggtcaggaaggataccccagcacaacacagctgctctacaaaaatgtggccagactgcttttttwaagcgagttcccaatcctttacctcctcactgtgtgggacctcccaaccagacctcaaactaacccagccagcattatccacccaacagagataggaagcctccctgggacagagcttccagaaggaggggtaggaagccatctttgctgttttgacaacttagcctttggagagtccaaaacaaccaggggtagaagtggtatcccagaacaacacggctgttctaaaaatacatagtaagtctgcttttttgagctactctccaaacctattcctcttcactgggaggggcctcccaacgggggcctacagtcacccccaccagtgttctgcaccagacagagatatgaagcctccctgggaaggagtttccagagggaggggtgggacagcatctttgctgtttaggtaacttagctattctggtctccagactttggagagtccaagaggaccaggagatgaagtggacacccagcacggcacagatgccctgtga

SEQ ID NO: 300370 - DNA, 641 bp, Homo sapiens
ggcaggctgacatctttgctgtttgggtgacttagccattctagccttttggctttgaggagtccaagtgtaccagggtcaggaaggataccccagcacaacacagctgctctacaaaaatgtggccagactgctttttttaagcgagttcccaatcctttacctcctcactgtgtgggacctcccaaccagacctcaaactaacccagccagcattatccacccaacagagataggaagcctccctgggacagagcttccagaaggaggggtaggaagccawctttgctgttttgacaacttagcctttggagagtccaaaacaaccaggggtagaagtggtatcccagaacaacacggctgttctaaaaatacatagtaagtctgcttttttgagctactctccaaacctattcctcttcactgggaggggcctcccaacgggggcctacagtcacccccaccagtgttctgcaccagacagagatatgaagcctccctgggaaggagtttccagagggaggggtgggacagcatctttgctgtttaggtaacttagctattctggtctccagactttggagagtccaagaggaccaggagatgaagtggacacccagcacggcacagatgccctgtga

SEQ ID NO: 300371 - DNA, 641 bp, Homo sapiens
ggcaggctgacatctttgctgtttgggtgacttagccattctagccttttggctttgaggagtccaagtgtaccagggtcaggaaggataccccagcacaacacagctgctctacaaaaatgtggccagactgctttttttaagcgagttcccaatcctttacctcctcactgtgtgggacctcccaaccagacctcaaactaacccagccagcattatccacccaacagagataggaagcctccctgggacagagcttccagaaggaggggtaggaagccatctttgctgttttgacaacttagcctttggagagtccaaaacaaccaggggtagaagtggtatcccagaacaacacggctgttctaaaaatacatagtaagtctgcttttttgagctactctccaaacctattcctcttcactgggagggrcctcccaacgggggcctacagtcacccccaccagtgttctgcaccagacagagatatgaagcctccctgggaaggagtttccagagggaggggtgggacagcatctttgctgtttaggtaacttagctattctggtctccagactttggagagtccaagaggaccaggagatgaagtggacacccagcacggcacagatgccctgtga

SEQ ID NO: 300372 - DNA, 546 bp, Homo sapiens
aggggtaggaagccatctttgctgttttgacaacttagcctttggagagtccaaaacaaccaggggtagaagtggtatcccagaacaacacggctgttctaaaaatacatagtaagtctgcttttttgagctactctccaaacctattcctcttcactgggaggggcctcccaacgggggcctacagtcacccccaccagtgttctgcaccagacagagatatgaagcctccctgggaaggagtttccagagggaggggtgggacagcatctttgctgtttaggtaacttagctattctggtctccagactttggagagtccaagaggaccaggagatgaagtggacacccagcacggcacagmtgccctgtgaaaacatggtcaggctgcttttttaagtgggtcccctcttccattcctcatcacttgatggggcctcccaactgggttctccatctaccctcacttgtgttctgtgactgatgaaagtttcaaatctccctgggatggagctttcagagggcggggcaggcagccatctttga

SEQ ID NO: 300373 - DNA, 546 bp, Homo sapiens
aggggtaggaagccatctttgctgttttgacaacttagcctttggagagtccaaaacaaccaggggtagaagtggtatcccagaacaacacggctgttctaaaaatacatagtaagtctgcttttttgagctactctccaaacctattcctcttcactgggaggggcctcccaacgggggcctacagtcacccccaccagtgttctgcaccagacagagatatgaagcctccctgggaaggagtttccagagggaggggtgggacagcatctttgctgtttaggtaacttagctattctggtctccagactttggagagtccaagaggaccaggagatgaagtggacacccagcacggcacagatgccctgtgaaaacatggtcaggctgcttttttaagtgggtcccctcttccattcctcatcacttgatggggcctcccaactgggttctccatctaccytcacttgtgttctgtgactgatgaaagtttcaaatctccctgggatggagctttcagagggcggggcaggcagccatctttga

SEQ ID NO: 300374 - DNA, 546 bp, Homo sapiens
aggggtaggaagccatctttgctgttttgacaacttagcctttggagagtccaaaacaaccaggggtagaagtggtatcccagaacaacacggctgttctaaaaatacatagtaagtctgcttttttgagctactctccaaacctattcctcttcactgggaggggcctcccaacgggggcctacagtcacccccaccagtgttctgcaccagacagagatatgaagcctccctgggaaggagtttccagagggaggggtgggacagcatctttgctgtttaggtaacttagctattctggtctccagactttggagagtccaagaggaccaggagatgaagtggacacccagcacggcacagatgccctgtgaaaacatggtcaggctgcttttttaagtgggtcccctcttccattcctcatcacttgatggggcctcccaactgggttctccatctaccctcrcttgtgttctgtgactgatgaaagtttcaaatctccctgggatggagctttcagagggcggggcaggcagccatctttga

SEQ ID NO: 300375 - DNA, 594 bp, Homo sapiens
agactggatatatatattagtttttattaatttgattgctttatttctttgaaggttattgytgtttgttcatgggctaaatcatatttttgcttctgaatatcattatgtgacactgcgagtaacactctggatatcagaaataaacgccaaactgtagtttcaaacttaagtctttggtttcttggatacactttaattttcattccttataagctacttactctgtcagggtccttgcccttgaaattagttacaagatgttttcaagtagacattttactgttctgtctctttatatacctaatgatgaattttctggggatttctagcagcaatgtttcctcatctcagcccttcatactacaattgcctaatatattcaaaagcatcttcccaatagagttaacaactccttttttcccaaaggtctagactccttagggatataactacacagttacacatatacatgtgtatcatatgtatctgatatttctatgtcgatgaattcattctttttctactttctcatcatattcttcagatttttgaaagtttaatttatcctttgtggatcagaggcaatgacat

SEQ ID NO: 300376 - DNA, 594 bp, Homo sapiens
agactggatatatatattagtttttattaatttgattgctttatttctttgaaggttattgttgtttgttcatgggctaaatcatatttttgcttctgaatatcattatgtgacactgcgagtaacactctggatatcagaaataaaygccaaactgtagtttcaaacttaagtctttggtttcttggatacactttaattttcattccttataagctacttactctgtcagggtccttgcccttgaaattagttacaagatgttttcaagtagacattttactgttctgtctctttatatacctaatgatgaattttctggggatttctagcagcaatgtttcctcatctcagcccttcatactacaattgcctaatatattcaaaagcatcttcccaatagagttaacaactccttttttcccaaaggtctagactccttagggatataactacacagttacacatatacatgtgtatcatatgtatctgatatttctatgtcgatgaattcattctttttctactttctcatcatattcttcagatttttgaaagtttaatttatcctttgtggatcagaggcaatgacat

SEQ ID NO: 300377 - DNA, 594 bp, Homo sapiens
agactggatatatatattagtttttattaatttgattgctttatttctttgaaggttattgttgtttgttcatgggctaaatcatatttttgcttctgaatatcattatgtgacactgcgagtaacactctggatatcagaaataaacgccaaactgtagtttcaaacttaagtctttggtttcttggatacactttaattttcattccttataagctacttactctgtcagggtccttgcccttgaaattagttacaagatgttttcaagtagacattttactgttctgtctctttatatacctaatgatgaattttctggggatttctagcagcaatgtttcctcatctcagcccttcatactacaattgcctaayatattcaaaagcatcttcccaatagagttaacaactccttttttcccaaaggtctagactccttagggatataactacacagttacacatatacatgtgtatcatatgtatctgatatttctatgtcgatgaattcattctttttctactttctcatcatattcttcagatttttgaaagtttaatttatcctttgtggatcagaggcaatgacat

SEQ ID NO: 300378 - DNA, 563 bp, Homo sapiens
gaggtaattgaatcataggggtaagttttctcctgctgttctcacaatagagagtaagtctcatgcgatctgatggttttataaagggtagytcccctgcacaccctcttatctgccagcatgtaagacatgcctttactattccttcaccctccaccatgattgtgaggcctcctcagccaagtgcaactgtgagttcattaaagttctttatctttaaaaaccacccagtcttgagtaggcctttattagtagtgtgagaacagactaatacagtaaattggaaccaagggtggggtgctactgtaaagatacccagaaatgtagtagtgactttggaacaggcaggggttagaaaagtttggagggctcataaggaagtacaaaaatgtgggtatgtctggaacttcctagaaacttggagggctaagaagacaggaagatgtgggaatgtttggaactttttagagacttgttgaacagttttgaccaaaatgctaatagtgataaggacaataaagtccagcctgaggtagtctcagatatagatgaggaacttattg

SEQ ID NO: 300379 - DNA, 563 bp, Homo sapiens
gaggtaattgaatcataggggtaagttttctcctgctgttctcacaatagagagtaagtctcatgcgatctgatggttttataaagggtagttcccctgcacaccctcttatctgccagcatgtaagacatgcctttactattccttcaccctccaccatgattgtgaggcctcctcagccaagtgcaactgtgagttcattaaagttytttatctttaaaaaccacccagtcttgagtaggcctttattagtagtgtgagaacagactaatacagtaaattggaaccaagggtggggtgctactgtaaagatacccagaaatgtagtagtgactttggaacaggcaggggttagaaaagtttggagggctcataaggaagtacaaaaatgtgggtatgtctggaacttcctagaaacttggagggctaagaagacaggaagatgtgggaatgtttggaactttttagagacttgttgaacagttttgaccaaaatgctaatagtgataaggacaataaagtccagcctgaggtagtctcagatatagatgaggaacttattg

SEQ ID NO: 300380 - DNA, 548 bp, Homo sapiens
gctgcagacctcaatgacagcctgtgaaagtagccagaagggaggttgtaccctgaaaagccaaaaggatggagctgaccaaggctgtgggagcccaccttttgcatcaacataatctagatatgagacatggagtcaaaggagatcattttggatctttaaggtttactgactgccctattgaattttggatttgcatgcagcctgtagcccctttgttttggccaatttctcctattttaaatagatgtatttatccaatgcctgtacccccattgtatctaggaagtaacaggtctacaagtcaaggaatgcagacagcctccagttgctttagattttacaggcttgtaggcagaagggacttgtcttctctcagatgagactttgggctgtggacttttgagataatgctgaaatgaattaagactttggggaactgttgggaagacatgattgtttttaaaatgtgaggacgtgagatttgggagcagcycagggaaaaataatatggtttggctgtgttcctatcaaatttcatcttgaat

SEQ ID NO: 300381 - DNA, 406 bp, Homo sapiens
tgaaattaaagttgttaatcagttgacattaaaatggggagaatgtcctggattatctggacaggcccactgtaatcacaaggtttcttaaaaataaaataaacagcagaagagtasgtcagagaatattaagtacaatgtgtaaaggaattaactgaatatttctgtctttgaacatggaagaatgggtctacaagttaagaaatgcagacagcctctagttgctgggaaagacaaggaaacttctcctgtcgagactcctaaaataatatagctctttgacctacagaattgcaagataatacatttttgttgttttaagtcattaagtttgtggtaatttgtttcagcagcagtagtaaattaatacatataattatttgattttacctagaagttgacaagt

SEQ ID NO: 300382 - DNA, 603 bp, Homo sapiens
catgaaatagtccatactccatgggaatgaaatgccctggctagaagctcaggctgtgtttttgtccatctggtctgttacataacaaaataccttaaaatgggtaatttataagcaacagaaatttattactcatagttcctcaggtcggagagtccaagattgagatgccagcaggtttagtgtctggtgacagcccgtttccagattcacgggaagctgttctcactgctgtcctcacgtggctgaaggcatgaaaaagctcccttgggcctcttttcttcccgagggctcctctyccatgacataatcacctccccaagtccccaccacctataccactgcctcgtgggtgatgtgcagcatatgattttaaagggacccaaatgtccacagagaagcagaccgcagatcttggagaggtctgacgtctgtggtgggaagggtgaacttgcacccaggagaacatctcttcagagctacattttcattctgaaattttacgcaaagaaatcctgagactgagcctaaactgtcagttttctgggtccacttggcattcagccagtgttgtgagctgtgatgtgaagatatagatgccac

SEQ ID NO: 300383 - DNA, 603 bp, Homo sapiens
ttgccaacctgtcagagtaatccaatagtttgctaatttaaggcaaggtctttatttgaaaacatcaaatgtgttttactgtacacatctgtgtcagggacaatcctgccaacatacaagcttttgctcatttcaataaatcagcgatataagtatcaagaggaaaatgtgcttgagggtttcaggagccgcgggtttctgagcatgcagaggcaagggaggcagagtgctccgggctctacccggcattccagggaggtgttaatgactttaagcctgtcaagaatgtctctagtttatatagaagagacaattcatcggtttaatataaaggtgtaacatttcctacaggtgagctccactgatcaagggataaaaaggaacttttgttgccactttggaaagatgtactgcagaktttaacccatgcttttgatgtaaacttcgaaagcttccaaggcttcccatggggacctgtattggcagatgctgggccagtctgcaggatgacacagcacattgacttaaaatgccagagaacagaatggcacgaggctccgtggggtcagtgctgggccactagagctgcagagtagtttcccc

SEQ ID NO: 300384 - DNA, 455 bp, Homo sapiens
aattacaaaattagcattttgtctattttttacatttacctttttgaaattttttaatctcattctctatatctatctctgtttatgtctgtgggtagatgctagagaaatatagagagatggataaatgtcttgttaaacctcacatacccagatagatccaacattctattatcacactagataaaatgaacwattctttaatattagtttaacccacaacatttgctcagttttctattttttccaaatgagttgtagaactgattttatcagcttcatgtctttgcattgcattgctgtgatttttttttttgttattttaaatacagaatagcccttcctcttcaaattcttaatttttcttcatgataataaacttttttaagagatcaaggcttatgattactttttagtgccaacattctggacgtgtcacattattttctcatgca

SEQ ID NO: 300385 - DNA, 638 bp, Homo sapiens
cacttggttacagtggcaacaaacttgcatctgatggatttagcatccactgatgatactgcctgcataaagaattttactgggggattgcaaacttatttttaattctattattgcttctatatttataaattgacgttatgatgtaagaatacctttaactcataaatgggggttatctatacttccatctaaattttttgaggaaggaattaacaccttccatttaaaatatattcctcacagtatggagttgatgtcrtagtcacctgcagtgatggacagtgaatttatttgtttttgccactccatatataataaagtaacacattttattagtttgacatgctacaatcaattacatttatcatttttggttgacaccaatgattccccaatttagcaagttaaaaaggaagaagccaggaagtgtgtgctaatttttgtctttttgatgaaagacattttaactggggtgagatgatatctccttgtagtttggatttgcacctctctgatgattagtgatggtgagcagtctttcatgtaactgttggccatctatatgtcttgttttgagaaatgtattttcagataaattgtgcattcttcagttggattatttgtttttgttttac

SEQ ID NO: 300386 - DNA, 564 bp, Homo sapiens
tgtttgtcttttaaaatcccatgtttctgaaagggggaattcttactagtttccatcacaccattctcatttggtttcaagaacaaagactattatgaaagagaaaacaaaatacaaaaacacaattgtgactgttaattacatactttaataacataattgtcacattttgaccaatacactaaatgtctatatacatgcataaatttctttgrcaatacccctaggtggcagggtaatattacaatactttagtttggaagacactgggtaccctaaccttgagagaaagagaaagagaatatgtgaaacaaatttccagaatccttaatcttaaatttggacatctccaaaaataggcagcataaaagaggttggtagtcgctcataggcagttttcatcaccaatacagaaccatagaatgtgcttgagtgtccaaaattgtgttaataagaacttgtttttcttttatattgaagaagtgggaagaagtgtggtctcaaagccaattttctccatgaggcatcaaaaagtcatttattggattataagttctttaggaa

SEQ ID NO: 300387 - DNA, 564 bp, Homo sapiens
tgtttgtcttttaaaatcccatgtttctgaaagggggaattcttactagtttccatcacaccattctcatttggtttcaagaacaaagactattatgaaagagaaaacaaaatacaaaaacacaattgtgactgttaattacatactttaataacataattgtcacattttgaccaatacactaaatgtctatatacatgcataaatttctttggcaatacccctaggtggcagggtaatattacaatactttagtttggaagacactgggtaccctaaccttgagagaaagagaaagagaatatgtgaaacaaatttccagaatccttaatcttaaatttggacatctccaaaaataggcagcawaaaagaggttggtagtcgctcataggcagttttcatcaccaatacagaaccatagaatgtgcttgagtgtccaaaattgtgttaataagaacttgtttttcttttatattgaagaagtgggaagaagtgtggtctcaaagccaattttctccatgaggcatcaaaaagtcatttattggattataagttctttaggaa

SEQ ID NO: 300388 - DNA, 564 bp, Homo sapiens
tttttatttgctagtaacttggtctttataattgcaggttaaggtttaagtttctattgcaatatgttttacaattaatgtttctgggtcaaaattttcaggtgtattatgagcctctctcaacgtgtaaatttaagttttatttcaagaaagagtgtgtgtgtgtrtatgtgtaactgttactgttttaaaattaattttgcttcactgtttcgtttttcctcaaaagcaaaggtttaatactgggggagctaattgctccaattatacctctattggagcctctttacgtattttccacacctattcttttcagattcttttgataacatacttaattctttcttatttcctcagcttttttactcatattcgatatttttaatactacatttccagttatacatgtccttctcaacaattgtaatttaatcttaaggttgatttttttgtttgtttgatttttcttttgagataaggtctcactctgccactcatgctggagtggagtgcagtggtgtgatcacagctcactgcagccttgacatccccaagcttaggtga

SEQ ID NO: 300389 - DNA, 564 bp, Homo sapiens
tttttatttgctagtaacttggtctttataattgcaggttaaggtttaagtttctattgcaatatgttttacaattaatgtttctgggtcaaaattttcaggtgtattatgagcctctctcaacgtgtaaatttaagttttatttcaagaaagagtgtgtgtgtgtgtatgtgtaactgttactgttttaaaattaattttgcttcactgtttcgtttttcctcaaaagcaaaggtttaatactgggggagctaattgctccaattatacctctattggagcctctttacgtattttccacacctattcttttcagattcttttgataacatacttaattctttcttatttcctcagcttttttactcatattcratatttttaatactacatttccagttatacatgtccttctcaacaattgtaatttaatcttaaggttgatttttttgtttgtttgatttttcttttgagataaggtctcactctgccactcatgctggagtggagtgcagtggtgtgatcacagctcactgcagccttgacatccccaagcttaggtga

SEQ ID NO: 300390 - DNA, 609 bp, Homo sapiens
cacgtcagccccagcacatgacttactaaagatgctagaataagttactgaactggagcaagactggaggaaggtgggctggataggggacacctgctgtaagctggcgagaggcgatggtgaccaggccagtactttgcaagtggctcccagggtggtgatggcgagaagtgggaaatctaagaaacgtgcagaaagcaaagtcagcagcactgtggactgatggaatctgtggggagaggaaggaatcgatccaggatggctgctacttctctggcttgggaagcagccctgaaacaatggcaatgcagtgagaccccaggtagaggactgtcgaggagggcacagcctttgttccgaatgtgrgatgtgtcagtttcctaggtcaggcaccagaggggacagtcaccagcctgttaggtaaatgaggaggcatttcagggggagacggaggtttgaggtgcatcattaaggaaagggagataaagccacaggcatccttgagaaaaacaggagtgacccagaataagatttgaagaacaagaaactttgcgggacaggagtcagagctgcaggcatgcacagtgagcaggaggtcacagatgctca

SEQ ID NO: 300391 - DNA, 569 bp, Homo sapiens
acataccaagcaactgtcacagaatagatgctctgtttataatgatgattattagttatgcttcttaaattcaatgattatttacattcatgacacattacaatggtgattcctgaatctctataacaaagtgaaaatgttacactggtggaattggcaaataaaaatgtataatctggctgtgaaatcctttgaatgatatgcttgtgagatcaaaatggcacacttcaactcccttcatccattggagggttaatcaaagacttcccaaggcctgcaagaggagaggccaggtgtgttcatctcactgctctgcctctgggcactgtgactggcacaagtaggtgctcaaaaggactggattctrtaacgcctttaaaaatattagagaaaccatctgatatcatttggctctgtgttccacccaaatctcatgttgaattgtataataattcccattgttggaagaggggcctggtagggggtgattgaatcctggggcaggcttcccccttgttgttctcatgatagagttctcatgagatctggttgtttgaaaatgtgtagca

SEQ ID NO: 300392 - DNA, 569 bp, Homo sapiens
acataccaagcaactgtcacagaatagatgctctgtttataatgatgattattagttatgcttcttaaattcaatgattatttacattcatgacacattacaatggtgattcctgaatctctataacaaagtgaaaatgttacactggtggaattggcaaataaaaatgtataatctggctgtgaaatcctttgaatgatatgcttgtgagatcaaaatggcacacttcaactcccttcatccattggagggttaatcaaagacttcccaaggcctgcaagaggagaggccaggtgtgttcatctcactgctctgcctctgggcactgtgactggcacaagtaggtgctcaaaaggactggattctgtaaygcctttaaaaatattagagaaaccatctgatatcatttggctctgtgttccacccaaatctcatgttgaattgtataataattcccattgttggaagaggggcctggtagggggtgattgaatcctggggcaggcttcccccttgttgttctcatgatagagttctcatgagatctggttgtttgaaaatgtgtagca

SEQ ID NO: 300393 - DNA, 623 bp, Homo sapiens
taccaggcttatgtccacctacaagattaagaaagtcatctgttcccattgcagctaatcctctctgttttgttgaccctaaatgaagcgtaaagatactggccaatgctacacacctgtgttccatcagtcaggacttcctgtgtcaagtcctcacccacaagttctcaggggcccccgggctccatgttgttgacgtgatacgatgcaggcttttaccaggacaattttgtgatcatggattcaacagtcctccacaagattctgaactcctgggaagcacaggctagctcacctatttttctttaatgtcttgctcagtttattggtatttggtagaaaataaatgtgtggagtaaaggtgtttcattatctacagctgcataacaaattatccccaaaatttatttaatgtgttacaaccaaaaccatattatcttactgtttctgtgggtggaaaggtgggtgcagcttccttgggtccttctggccyaagatccctcatgaggctgcagggagggtgtcacactgcgctgtggtctcctctgggaactcacctgtgaagggtgaagttctgcttccaaactcactcctgcagttgttgcagcaagcatgttgcagca

SEQ ID NO: 300394 - DNA, 586 bp, Homo sapiens
tccatcccttgctggctttggccagaacctgaccttggtttcgtctctcatgggcctcttcacagggtagctcacaaccttacacctgcctgcatcagaataaacaagtacaagaaaatgcctgacagagaagctgcatctcgggagcccatgaacaccccagcacctccgctgcactctgcttccatgaagtgagtcctcaggtcccacaggctttcaagggcaagggattacagwagggtgtgaactctggaacagggactgcaggggacccttctgtaacaaattcctattcgaccatctgtgatctgttttagttcacacctgtcttttgcattatgaaaacttatatccaccttcatcctggagagatgtggatcaaaagtggacttgctgacagctccaacagcaatctcgccattgctgagccagcactgtaatgtttctctagatgtttgaagtttcacctcagatattcctcatcttcgcttggacataacctctttccttttgaaggtatattcgtggatatgccgtaggacacattctccatagattttaactgggtcagcaatttacttctact

SEQ ID NO: 300395 - DNA, 549 bp, Homo sapiens
ggaggaggggggagggatagcattgggagatatacctaatgctagatgatgagttagtgggtgcagcgcaccagcatggcacatgtatacatatgtaactaacctgcacaatgtgcacatgtaccctaaaacttaaagtataaaaaaaaaaaagataagaaaccttgcagaaaccaccttaaccaagggatgaacatcaaaatcaccaataataagacatgctgacatcatgaacctcttgataccattcacagaggatacttcgttggcgttcctgccaaaaatgcatacctcattccaagcatgagaaaacatcagacaaacccaaactggaggcattccgcaaaataactgatcartattcttcaaaagtgtcaagatcataaaaaataagacaaactgagaaacagtttaaaattggaggagactaaagtgaaataacaactaaatgtgggattatggaacagaaaaggagcatcggtagaaaatgggtgaaattcaaataaagtctgtagtttatagtgtcaaaaaaaaaaatagactgaaaag

SEQ ID NO: 300396 - DNA, 563 bp, Homo sapiens
caggccgagacaaggggccctaaacaaaggcgtgctcgctcagcctcagctggagacaaggtgcccggagccgcctcgcctcccggagagaggcctggagcagcaggtggcagcattgtcacagacctgaggccagcctgggctgcggggacaccgtccgtccggcaggaagttttgcatgtggagggtacttcgacctgttgtggatttattgttacctccttgagggctccaatgttcgcctgccactaaatccagtcatkagagtcgcccagcgcttggggtcgacttgtctgaattacttgcctcggtcactgttttgactgcgcgacataacctgcattctttctcctcgattctgccagactgaggtcttgggaccacagagaagccgtgaacgtctgtctctcggagctttaaaaaaaataacgcagacagcaacggcaaagtggagtggaagagagagaaggaagtggggagaagagatagtgggaaatccaatgtaatgtcctcttttcctctttaacgttgagagtaagataactccatgtaggtcggaaaca

SEQ ID NO: 300397 - DNA, 406 bp, Homo sapiens
cacattctaactgtctgtctgtctgtctgtctctctctgtctgcatgtgcacacacacagacagagacacacatgttttcttgccctctctgtctgagtaaattagtagtgatttcttatatctgtttcatagttcacaagaaaacctccttccattagaggtatgtccagctgccacaatggaggccaaaaactgacaccactgaattgcagaggcaggttatgtttaaaatgacgccagatkgaaggaccaggattcattaaatcgggcagagtttctcattaaacgtgggaattgacagtcagaaataactgtcatttggggcttttttatagtccccctactcaataatttttttttgcactagtgatattatctttagaataaaataataaaattgtgact

SEQ ID NO: 300398 - DNA, 566 bp, Homo sapiens
ataattgctgttgtgttttaaaatattggtggaactttattaagatgctattgaatatatgaattaaattgggaagacttgtcatcttaatgaaatagaatcttcccatctaagaagcaggtatgattttcaatatttcatcatatgtttatacatacaacatggcttttaaatttcatttcaggaaagtatagaaatatgggctgacttgctatcattttttttttttttgagatggagtttcattcttgttgcccaagctggagtgtaatggcgtgatcttggctcactgcaacctcggcctcccaggttcaagcaattctcctgcttcagccttctgagtagctaggattacaggcatgcgccaccacagatgactaattttgtatttttagtagagacagggtttctccatgttggtcaggctggtctcgaactcccaacctcaggtgatccacccgccttggcctcccaaaatgctgggattatagccatgagccaccrcgcccggcccaagagttgctatcttaatgaaatataaccttcccatctaagaagcaggtatg

SEQ ID NO: 300399 - DNA, 596 bp, Homo sapiens
catctttttctttctgcgggttggagcattactctgcttaccacaatatcatagtgaaggaactctagtacaatgaaactagaaaagaaaaaccatgagaattatagaatattgaaagaaagaaagaaaattgtctgtacgtagactatatggttattggtgtcagatgttcaaagcatgcacaaaaaagcactccctgatataatacatgagttcaacaatattgctgcttcaaaagtcaatatacaaaaattaattgtatttttgtacattagcaatccacaattagatagtaatttaaaacatatacaacttgtaataacaccaaaaaaacttgaaatatttatgtctagatctaagaaaatttgtttaagatttgtatgatgaaaattataaactttggacagaaaagtcaaagaaagactaaatgaaaaacagagtatttatgaattggaaatctgaattttgtaaagatgtcaatttccccaaattacaaatttgaaacwattctaaccaaatccctgcagacatttttgttgaaagcaatagccaattgtaaattttatatggagatccaatatatccataactgaagt

SEQ ID NO: 300400 - DNA, 617 bp, Homo sapiens
ctgatgtttgaaggcaggaagcatccagcacgggagaaagatggaggccagaagactagctagtctagtctttccacgttcctctgcctgtttttatcatttgtcttccccaagagggaaacacaagaaaggctaacagggtggggtttgccagtgtcagggagagagaggcccccctccaatgtggagacagaggtcagcatgcaggtgaacaaaggcccagacaagagcccagtggatgcgattgtcatttgagtatctcagaatgactggctggtgagtgtccatgcagtcccataaatggcaacactttaaacttggcggagcccagctcaccctatctgcacaaaatctccctcctccagcggtctttgaaattcccataggtgcatattttcactcacaatgctggttcaaggaatcctttggcttggagctgagagagttgccttggaacatgtcttcctctccaccgtcacagggccaaggaaacagtggggcttaacmtctgttgcccccggccctgatggggctgcaactccactgtcagctgatctgcaccatcctgagaagctcggatccactcttctgcaggagaatagtgtgtctgtgtgcat

SEQ ID NO: 300401 - DNA, 589 bp, Homo sapiens
atagcttgttggtaaatttgggaggacaagtcaggtgccagtttggatgttcaggaagcactggcactgttaagggggcgcaggtgggtgactgctgccagccctatgagactgggaccatcctgcaggcttgactattgctcctggaacattgagggctacctccagggagatggaccaggcaaaggctcacaggaaaaatcggagtggactggcagggagggtgcatatctggagtcagattctgagcgaccagtaggacagtgctgaggcatccagacagaggtgacagagcctggaccttggaaagaggaggcaaggtgagggcgaccatcgtgaggatgcaggcagggcaaggagcatgggctgacgctgaacaccaagcacgtgaggacttttctgctttggaagcttgttgttcaatgggcaaagtaattcatctcaatggtagttacgatctgttttggaagcttggtttctttgggctaagtaattcatctcagtggcagttatgatctgctttggmagcttggcattcaatggacaaggtaattcatctcaatggtagtaacaattttacaagaaacgt

SEQ ID NO: 300402 - DNA, 476 bp, Homo sapiens
cattgccctccagcccaggcgacastgtgagactctgtttcaaaaaaaaaaaaaaaagaataggcttatagagttgttgtggggaggaggacctcagaggatatatactatgaacaggatatataactgttgctgttgacctggatttggctgaagaaggtttgtcaggtttctctgttataaagttactctttttccctcttgacatactgtattctctgtacagaaattgccatgcacagcacacactgaaggagtagggagttatgctgtacctccttgggggttaagtatctacataaattatttagaattcttctgtataggaaatttgtctattctatcttatttatttatgtatttaatatgggctcatgggtatttattttccaaattttaaaaaagcatttccttattttctggcattacaactgcttcacatcacacatttcctgccccaatcctataaccagccc

SEQ ID NO: 300403 - DNA, 589 bp, Homo sapiens
ctggttccactcagattttctttgcctttttaaaaaaataaattttgcttttacctacaaaataggttttagtcttaacttgaaaaaaatggcactaaaaatcagcagcactgcattacagtgcttctgtcataagtaaatttttcagttgctcattaaattagcagtaagattataaataaaaaaatttgattccaatgaaaaccagtaaaatatgtttccatattgctaaagggattagaaattggtatagcttttccagaaagaaatttggcatgtgccctatgtcttactccataattcttcctrtatgaatatatcctaatgaaatagtcaaaaactggacaacgatatatgcacaaaatctactaataatagctttatttataacagtgaagaaaggaaagcaatctgacattatggagagaaataattaactgtgatacatatttatacatggtatgtgttcatttgatggccattaaatgacaccattttatttgtgatcagaaaatgtttacggtaagttaagctaaagcaacattaaaaggtatggtattggatataagactttcagaagagtagtgta

SEQ ID NO: 300404 - DNA, 589 bp, Homo sapiens
ctggttccactcagattttctttgcctttttaaaaaaataaattttgcttttacctacaaaataggttttagtcttaacttgaaaaaaatggcactaaaaatcagcagcactgcattacagtgcttctgtcataagtaaatttttcagttgctcattaaattagcagtaagattataaataaaaaaatttgattccaatgaaaaccagtaaaatatgtttccatattgctaaagggattagaaattggtatagcttttccagaaagaaatttggcatgtgccctatgtcttactccataattcttcctatatgaatatatcctaatgaaatagtcaaaaactggacaaygatatatgcacaaaatctactaataatagctttatttataacagtgaagaaaggaaagcaatctgacattatggagagaaataattaactgtgatacatatttatacatggtatgtgttcatttgatggccattaaatgacaccattttatttgtgatcagaaaatgtttacggtaagttaagctaaagcaacattaaaaggtatggtattggatataagactttcagaagagtagtgta

SEQ ID NO: 300405 - DNA, 566 bp, Homo sapiens
tggagaggtgttatggtcatttggaggagaacaggcactctggcttttgagttttaagtgtttttgcatcgattctttctcatctttgtgggcttatctacctttgatgtttgaggttgctgacttcaaagatggggtttttgaatggggtcttgaagtcttttttgttgttggtcttcttgttttatgcctgattttcttttaacagtcaggtcactctaccatagggctgctgcagtttgctgggggtttgctccagaccccagttgcctcagtttttcctttacctggaggtattaccagtgatggctgcgaaacaggaaagatggcagccaaatttttgccctggaagctgtatgtcccagggaagtactgacttgttacctgcctgaatacaactgtaggaggtggctggagacccctgttcggaggtctcacccagtcaggaggaatgggatcagggacctgtttaaagaagcagtctggctgctttttggtagaggaggtgtgctgcgttggggraaacccttcctcatctggtctgtttgtattctccaaagccagca

SEQ ID NO: 300406 - DNA, 577 bp, Homo sapiens
ttcacataaatcatgacaaaaagagacagcaaaggtagatatacttatatcaaccagatagactttaagtcaagctgtcatagaaaaaaagagaaactttatataatgataaaagagtaaattcatcatgaagatataactattataaatatatatttgtataaatatatatatttaatatccaatgttagagcacctaaatatatgatgcaaacattgccagaactgaaaagagaaatagacagtaatacagtagtaggaaatttcagtactcactttcaatagtggatagaacattcaacataagatcaataaggaaaaagaggacttgaaccgcactgtatgggcctaaagacaaacattccatccaagagcagaatagtatacattcttctcaagcacacatggaacattcttcagatagatcatgtgttaggtcataaaacaagtttgcaaatgtaagaagattgaaatmataccaaatatcttttctgaccatttcattatgaaactagaaatcaataaaaaaaggaaaattggaaaattcactaatatatggaaattaagcaacatattc

SEQ ID NO: 300407 - DNA, 595 bp, Homo sapiens
agggtacacatgtttagatttagaaaacaatgccaaattattttcaaaaatggatgcatcagtttacacttctaccaacacatgtaagtgttccagttgctgcacatgctcataaacatttgtcatactgctccttttgtttccctcagtctaatgggtaaaaagatatctcacaatggtcttaarttgcatttcccagattactaatcaggttgatcagctttttatttgtttgtttatttacttgttggatattcatgttttttttgtcgctttcccattttactttggtgttataaatctgttgcatattgatttgaaggaattctttatatattatatacattatatatatattatatataatatatatataatatgtatatatatatgtgctttgttggataggtagatagccaacatattataccagtttatgggtgtatatagtgaatacattctcacggtttatggtgtattttttctaccttcttttttttcttttctttttgttgagagtaagatcttgctattttgcctaggctagtctcaaaacttctgggctcaagttatcatcatgcctctgccaccgtat

SEQ ID NO: 300408 - DNA, 580 bp, Homo sapiens
gccaccatgccaggctaatttttaatttttttttgttgttgtgtagatgggattttgctgtattgctcaggctggtctcaaactccyggcctccaggggtcttcctgtcttggccgcccaaagtgctgggatttcaggtgtgagacactgtacccagtcttttctagcaatttttaactttcttctaagttttaaaatactttatcacaatacttatattattcttttttcccactaagttgttcttccaccctaccttgtagtaaacctttcatatgtaacaggttgtctaccaaaaaactttacaaaacatattccattatttttcccaccccacttgtagaaagagactctgaaaggataattggcccaaagtcacacagttggtggtagagctgaactgcacttgttaactttaggaatcacacaggtggttgtcatagaacacaatatccatttcctaatccctgagttgaaggaagtgagctatgatattatttgtctaaaagaggttaaaaagctcaactcataaaatgttttaccttccatttgtgacactgaagcacaccttaaagccccc

SEQ ID NO: 300409 - DNA, 501 bp, Homo sapiens
  misc_feature (1)...(501): n = A,T,C or G
ggattccctgtagaatgtagcttttcctcacaagagacagctttccagggccatttcaaaatatgtcaaagaaatatattttggggtaaaacactttaattattttaagggtctgctatctgtcatgtgatgctatactagagtcacgttggaatttggtgtcttattgctacagggtctgttttgtcagtcttaaaatctctgttttaatgttaatgctgaacagctgcncctgaattccaaargaagaggatataatgaggcatgtctgatcccccttcccatcatggcttgaactagatgttcaggtttactttggaatgtccttcctggatgagaggtgggtccatcagtcagttgggggtcttataattttatttttggtttacaatacccaacatatatagggtcatccaagtagttgttaagagtcagaaacaggagtactaagtcattttctaaattctattaataactgtattagcagccaattttagaaaa

SEQ ID NO: 300410 - DNA, 591 bp, Homo sapiens
gtaccaatttgatcatgttcgtgaacaccaattacctacctacatacatactactttagataactaaagagactacaaatcattttgtcttctaaagtgttaattcttgttcttacagcaatctctttcacagctttgtaattcttccaccatcatggttcaatctctgatgaaggatcagtcaacatcctaaaattgcgcaatacactcaagactctgaaattaatctgaattttttgtactgtttccttctgtttttgtcactctttatgaagacaaccggatgaaatgaactcaatatagacatgagtaactcatgttctcccaggccacttaagggtgagraagaaagagccaaattagtaacaatgaaaatggctaaatctgcatacccacaagttctcttaactcctttcaaatgcctcccagctaagtgaggaagttccagaggtttcccaccggtgttcctttaggtatatttccaagttccactggagcctccctattctcctgctcctgacaatgagcatttgtatcctcaagccatgtagaaaacattctagcaacaaccagtacaagcattagaagtgc

SEQ ID NO: 300411 - DNA, 603 bp, Homo sapiens
ctctgtgcttcctttggctgcaataccttggatatctggctgccagaaccttttcttcttgacttggttatgttggtgatactacatcctcctctctcatttattgcatttgtcctttccattcaggaaagtgaagagaaagtaggacatacagtatgttagattatagagcaagacgataccttaggaataacacatcccagcatttttaattgagccttacacaaataagtgacttgccaaagttcacatatatatttggcagaccccagaatgaaattcaaggrttttaactgcaagttctgtgttttagtgaactcaaccttaatattactatcttgcatgtttgtcttgccatttgttgagacctggaaacacaatttgtatcaacttgtttgtgcatcctttccataatcacacacattggttactggatattacagtgatagtgcaaatagtctgttagccactgtgcaaccatgggtcaatgccatatagcaggtcttatttggactgcttagtaacttgagactaaaaaaaaaatgtgtttttataaaataaaataaaaatgcacttttactacttaaatgtgtgtttttggag

SEQ ID NO: 300412 - DNA, 598 bp, Homo sapiens
caatgtccttattgctcttttgagatcctttgtttcattctgtcataaagttctggtgttcctgggccattccagaactctgacattagcctagaccacagctctaatcctatgcttttcaaaaggtgatcctataatactatttttctttttcaccagrtaattgacataattggtcaactcctaaccatctcttcctttgcataggaacattaaccaatcataggatatccaccaaacacagtataatgtagggattaagacacataacccacatgtacatcctgtttttataacttgaaaatatatccagaattcagcttcttgaattaccatctgccattacctgcaccactaccaactagatccaagccaccatcattgctaatgtgtattattgccacagcttcctagtatttctggttttgcctttgatcccactgtctattctcaatacagcagcaaacatgattatgttaaaacagaaacaagatcatgtttcaaaactcttcccaaattcctataatagcttttactttatttggggttaaaaaccaaagtgcttataattgtctagaaattctaataagagtttggg

SEQ ID NO: 300413 - DNA, 422 bp, Homo sapiens
attcaccaattcaccaacagttgtaccaaaagagctaaggtgaagatcactaatgatcttaatgttactaaatttaaaagtaaaatttcggtccccattttactttacctattagcattattttgtgggaactgatcatgttttcctccttatactgctttcttcatatgacttccaggataccacacttctcaagttctcctcatacctcacttgccatatttctcaatctcstctactggctgtcttagtctgttttgtgttgctattaaagaatacctgggactgggtcatttaaagatttatttagctcatggttctgcaggctaagttcaaggacatggccctagctcctggcaaggtctttcatgctgtgtcacaacatactggagaagtcaaagcagatgtagccatctacaaag

SEQ ID NO: 300414 - DNA, 471 bp, Homo sapiens
taccttgcagcagtgacaattgactaaaggctctggctgccccaggattctttagcaccctgagggtggaagggatcagcatcctggcacatctgttaacttactgtgactcatcagcttcaccattccgttcatccccttcagaccagctaagaatctaatttttcacaaatactttattaacatatataaatttcctaagtcaccaaatagaggaactttagtttgaggtccgttttgggaaatcacaccttttcttgagaggctctagcaagagtttcttgtaatactctgtttctctgttgttatataaagcattttacttttcacagatttccacaattaatgtggcaaatcctttaatgatattgggggaaatgcttcttttccatttatgctgcttcctgggactcrtggggagctcaatcatgtaatccctggcattctctcattgccttattgtctcttatc

SEQ ID NO: 300415 - DNA, 532 bp, Homo sapiens
tgcttcctcacccctaaactctccagctccctacatccttcctctgcagcccacagaatggaagtggtaaagtagccctcccatctgacagcagaggccagggctgggcctctctgttctctcagcttttcacaccaggaaagggaggcagaactggactgagtatcttgatagtcctcaggctacttgaatgatcgccctcagtatgttttatttggtcactgtggaacatggaaggtcatcaccgaggaacttctgcattggaatcctctacctcggaagaggaataaaaaagtacgtctctggagcgtcttccctccgacgttatccggcagttgtccccccctgctgctatctccaaggcaatcagggccagtttatgtctacagggtccccttcactgacgatctgagacactaggcaggttggaaagggtggagtggtgctaggagcaaattattcacctgaaraaaatagaaagttagatccttctgtttaggattgaagaaaataatggtgtttcccaaaggcc

SEQ ID NO: 300416 - DNA, 493 bp, Homo sapiens
aaatattattcattgtctgacaaccctgagtggaatatgactaattccacctagatgacctcctggggaaactcgttttccaattggggatttataagaaaataattcattgcatctgctaagtgtgtcagtgcatgtgtgtctatgtattgaggagcttattaacaatgatgtcatataaatgtattggttatcagaaaccagattttaaggtgtattggcctcccaggactttccaaaataatcttggatgatattgataaaaggtttagattctggtattaaacaaaccatattggtattatcctagttatgaccaagctccttaaacaatttaaacctgtactgtatgatatgtgtattgggttttaaaatttccctatgtaacaactgacgatgctgracacaaattatggagaggttagcaaggacaacaattgcaaaacaattaaaaaaatgcctttatttgcatactaacacatgagaatttact

SEQ ID NO: 300417 - DNA, 619 bp, Homo sapiens
ctcatcattttatcaattctggtagtgtttgcatttgttcttggaaatgttgccaatggcttcatagctctagtaggtgtccttgagtgggttaagacacaaaagatctcatcagctgaccaaatttctcactgctctggtggtgtccagarttggtttactctgggtcatattattacattggtatgcaactgtgtttaatttggcttcacatagattagaagtaagaatttttggttctaatgtctcagcaataaccaagcatttcagcatctgggtgttactagcctcagcatatttcatttgctcaagactgccaatttctccaaccttatttttctccacctaaagaaaaggattaagaatgttggtttggtgatgctgttggggcccttggtatttttcatttgtaatcttgctctgataaccacgggtgagagtgtgtggacaaaagaatatgaaggaaatttgtcttggatgatcaaattgaggaatgcaatacagctttcaaacttgactgtaaccatgccagcaaacgtcacaccctgcactctgacactaatatcttttctgctgttaatctattctccatgtaaacatgtcaagaagatgcagctcc

SEQ ID NO: 300418 - DNA, 619 bp, Homo sapiens
ctcatcattttatcaattctggtagtgtttgcatttgttcttggaaatgttgccaatggcttcatagctctagtaggtgtccttgagtgggttaagacacaaaagatctcatcagctgaccaaatttctcactgctctggtggtgtccagagttggtttactctgggtcatattattacattggtatgcaactgtgtttaatttggcttcayatagattagaagtaagaatttttggttctaatgtctcagcaataaccaagcatttcagcatctgggtgttactagcctcagcatatttcatttgctcaagactgccaatttctccaaccttatttttctccacctaaagaaaaggattaagaatgttggtttggtgatgctgttggggcccttggtatttttcatttgtaatcttgctctgataaccacgggtgagagtgtgtggacaaaagaatatgaaggaaatttgtcttggatgatcaaattgaggaatgcaatacagctttcaaacttgactgtaaccatgccagcaaacgtcacaccctgcactctgacactaatatcttttctgctgttaatctattctccatgtaaacatgtcaagaagatgcagctcc

SEQ ID NO: 300419 - DNA, 619 bp, Homo sapiens
ctcatcattttatcaattctggtagtgtttgcatttgttcttggaaatgttgccaatggcttcatagctctagtaggtgtccttgagtgggttaagacacaaaagatctcatcagctgaccaaatttctcactgctctggtggtgtccagagttggtttactctgggtcatattattacattggtatgcaactgtgtttaatttggcttcacatagattagaagtaagaatttttggttctaatgtctcagcaataaccaagcatttcagcatctgggtgttactagcctcagcatatttcatttgctcaagactgccaatttctccaaccttatttttctccacctaaagaaraggattaagaatgttggtttggtgatgctgttggggcccttggtatttttcatttgtaatcttgctctgataaccacgggtgagagtgtgtggacaaaagaatatgaaggaaatttgtcttggatgatcaaattgaggaatgcaatacagctttcaaacttgactgtaaccatgccagcaaacgtcacaccctgcactctgacactaatatcttttctgctgttaatctattctccatgtaaacatgtcaagaagatgcagctcc

SEQ ID NO: 300420 - DNA, 563 bp, Homo sapiens
ctattctacttttgaaatgcactgaaggcatgattccattgaattctagcttcatttttgtctgttgaaaatcaggttgtcatttagacagttattccctttaacataatctgtcttttcctttagttacctttcaggttttttattggtctttgatgtcctgtcattttatattaatttggttttagttatcttgtctgaagtttgatggtttctaaaaatatatgaactgatacactttaccacttttggaaaaatctccacaatgcttctggcccattttctctcttctaatcttctggaactgcagaagtatgttagttgttctgattgtagcttcaatgtctctgaccctctagccttatattttctacctcttggtctctttatgcttcattctgggcagttatcttccaattcactaattctttcttatgtttaactggttctcaamtctgtctattggattctcaatattcattactcttttttatcttattgttttaggggtagaaatgaacttttattctcttgctataaatcattttttaatggagaaacta

SEQ ID NO: 300421 - DNA, 577 bp, Homo sapiens
ataataaaacctaataaacagtaagagaaaaaattataacattaacatcgatgttaccacaccttggtcagaaaatagaatttgccagtaatccagacactcccaatatatgtcttcttgctgayatttcccgtttatctcctccctcctgattatcccaattgttatgatgatcactcatatgtttcactgtagagttttatcaccaatgtaacaaattacaatatattaaaaatatttttcttgaactttatgtaaatgagattatactgaatgtatttttccatcttgataattcctctcacatttgtgagtattattatctatgtagctcaaatttgttcattttctttgttgtattattctgttgtaaacatgtctgtctagttcattaattttgatcactgtatagtattccattgtataagtatgccacaatttgtttatccatttggaggtctgaaagacatttggaggacatgcataaagataaatttatattcttatttcataccatacacaaaaaataactcatatttgattatagagctatacgtaaaaggtgagattagtaact

SEQ ID NO: 300422 - DNA, 577 bp, Homo sapiens
ataataaaacctaataaacagtaagagaaaaaattataacattaacatcgatgttaccacaccttggtcagaaaatagaatttgccagtaatccagacactcccaatatatgtcttcttgctgatatttcccgtttatctcctccctcctgattatcccaattgttatgatgatcactcatatgtttcactgtagagttttatcaccaatgtaasaaattacaatatattaaaaatatttttcttgaactttatgtaaatgagattatactgaatgtatttttccatcttgataattcctctcacatttgtgagtattattatctatgtagctcaaatttgttcattttctttgttgtattattctgttgtaaacatgtctgtctagttcattaattttgatcactgtatagtattccattgtataagtatgccacaatttgtttatccatttggaggtctgaaagacatttggaggacatgcataaagataaatttatattcttatttcataccatacacaaaaaataactcatatttgattatagagctatacgtaaaaggtgagattagtaact

SEQ ID NO: 300423 - DNA, 447 bp, Homo sapiens
ccattatgtggagcaagacaaggaacactgaaaacagcctaggtccacctccatgccactttccaaccscctaaacccttcttcacatctcctgagataagcaatatccataatttatattgattatttccttaattttcttcacactttaccaactaggtatgcaaccctaaactccatcgcttggtctggcctgctttgaactctgtgtaggtgcattcctacatgttcttgttgtttgtggcttcttggactcaacattatgtttctgaaatttagtcacatagttgcaagtacatgtggttttttttcacttctctatattgttccgttgcatggaattaatgtaatgattcacccatccttaatgtacatttggtctgcttcttttttgaagttatgaataattctactagagaattctttcatatatcatttgatgcaatt

SEQ ID NO: 300424 - DNA, 447 bp, Homo sapiens
ccattatgtggagcaagacaaggaacactgaaaacagcctaggtccacctccatgccactttccaaccccctaaacccttcttcacatctcctgagataagcaatatccataatttatattgattatttccttaattttcttcayactttaccaactaggtatgcaaccctaaactccatcgcttggtctggcctgctttgaactctgtgtaggtgcattcctacatgttcttgttgtttgtggcttcttggactcaacattatgtttctgaaatttagtcacatagttgcaagtacatgtggttttttttcacttctctatattgttccgttgcatggaattaatgtaatgattcacccatccttaatgtacatttggtctgcttcttttttgaagttatgaataattctactagagaattctttcatatatcatttgatgcaatt

SEQ ID NO: 300425 - DNA, 447 bp, Homo sapiens
ccattatgtggagcaagacaaggaacactgaaaacagcctaggtccacctccatgccactttccaaccccctaaacccttcttcacatctcctgagataagcaatatccataatttatattgattatttccttaattttcttcacactttaccaactaggtatgcaaccctaaactccatmgcttggtctggcctgctttgaactctgtgtaggtgcattcctacatgttcttgttgtttgtggcttcttggactcaacattatgtttctgaaatttagtcacatagttgcaagtacatgtggttttttttcacttctctatattgttccgttgcatggaattaatgtaatgattcacccatccttaatgtacatttggtctgcttcttttttgaagttatgaataattctactagagaattctttcatatatcatttgatgcaatt

SEQ ID NO: 300426 - DNA, 636 bp, Homo sapiens
gcaaatcaactgtcaagtctcaaggagagatccctcttggagcacatagttagatgaacttgcccgaagggactgtctggtgaggggatagtaaacagttttgtgcatttctaaaaagttaagtagaaagtgggaaacatagggaaaggggcgaggaaaagagacaaaaaattaaaaaaaaaacaaaacaagtatctcttagaaaaatgggggtattggttagtctgactttcccaaacagccaccaaggggttggataatgtaaggaagaaaagcaaagatggtagttctgccacaaaataactttggccaaaggtaaatagaaaacaaaagacagctaggatacattctcccttttctctcttccatggactaatatttgctgtggtttccccttgtaacccttctggaaaagtaccgggagccaagtgcatgtatctgatgatcaccatgctgtctgtctcacctcattgtgaagtgacaacggcaaagtcatgtcaacatcatgatacatggttttacatcttcttttgcctcagtttccacatttacccctcattgctrccctggacttgccttcccaaataaatgtcatcactgtaaactcagacactggctctagttctagacacccaa

SEQ ID NO: 300427 - DNA, 556 bp, Homo sapiens
aacagcttaaccagttgcaaagtttgmtagctttttttttttttcatttcttttgtgttcacttcttttgtatcagcaaagcattgaaggcagcataagtcatactgagggagaaagagatgttccctaaaaacaagagtgtgtttggcagctgctgggaagttccctaacattcttgtgatggggtctgctaaccccgagcagctggcactcacagctgaacctggccctgtgcaaatataccagaatcctttatatgcttttcaaaaagtattacaataagtgccatctaattttgacattccaccttgtctctacttcacacacctgatatagctgcatcaaagctatattacagtgatacttcccctagaattggggaatagccaaacttttgctctgagaaatgcttcttctttgataagcctataacctcaacctgaaactagaaaattcaagcaactgcagattttgtcaagagtttcgttttcactggtttaccacatcaaattatccatttatccaaccactaatgtgttcattaacgtatcatttt

SEQ ID NO: 300428 - DNA, 556 bp, Homo sapiens
aacagcttaaccagttgcaaagtttgctagctttttttttttttcatttcttttgtgttcacttcttttgtatcagcaaagcattgaaggcagcataagtcatactgagggagaaagagatgttccctaaaaacaagagtgtgtttggcagctgctgggaagttccctaacattcttgtgatggggtctgctaaccccgagcagctggcactcacagctgaacctggccctgtgcaaatataccagaatcctttatatgcttttcaaaaartattacaataagtgccatctaattttgacattccaccttgtctctacttcacacacctgatatagctgcatcaaagctatattacagtgatacttcccctagaattggggaatagccaaacttttgctctgagaaatgcttcttctttgataagcctataacctcaacctgaaactagaaaattcaagcaactgcagattttgtcaagagtttcgttttcactggtttaccacatcaaattatccatttatccaaccactaatgtgttcattaacgtatcatttt

SEQ ID NO: 300429 - DNA, 599 bp, Homo sapiens
gttattgagcaagggtagagggtcctcctgcaagcttggtgccttttctaccatgcaggggtctgtccagcagaccctgactcaatgacagaggaataacatacaccgacatgtatgttttgtttgtcagtccagccgagcatccgggccacttaacagactctaaggaagagtgctgtcagctgccgccccaacttgctggccttcttggcatttatttagaacacattaaatgacaaaaactttgagtcaacaccattagagggtaatcaactctgtcaccttcccccaggagagcaatcctgcctgtgagtgatgaaaggttagctttaggactacctgagtaarcaagctctttagataaactactctacattcctttgtgtctgtgcccaaagtgctctggctctggcaaagagactggctgccttcagccaaactatctgaagttatgcaaaaacttttggtcttccaagaaggtcttttttttattttataattttccctaccattctgactgaacccctgcactaccagatagttgaattggcacctgcctttgcagaaatacattataaaagtggccaagtaggtatgct

SEQ ID NO: 300430 - DNA, 599 bp, Homo sapiens
gttattgagcaagggtagagggtcctcctgcaagcttggtgccttttctaccatgcaggggtctgtccagcagaccctgactcaatgacagaggaataacatacaccgacatgtatgttttgtttgtcagtccagccgagcatccgggccacttaacagactctaaggaagagtgctgtcagctgccgccccaacttgctggccttcttggcatttatttagaacacattaaatgacaaaaactttgagtcaacaccattagagggtaatcaactctgtcaccttcccccaggagagcaatcctgcctgtgagtgatgaaaggttagctttaggactacctgagtaaacaagctctttagataaactactmtacattcctttgtgtctgtgcccaaagtgctctggctctggcaaagagactggctgccttcagccaaactatctgaagttatgcaaaaacttttggtcttccaagaaggtcttttttttattttataattttccctaccattctgactgaacccctgcactaccagatagttgaattggcacctgcctttgcagaaatacattataaaagtggccaagtaggtatgct

SEQ ID NO: 300431 - DNA, 543 bp, Homo sapiens
ttagaggttcaaacaatgatagttaaacagttaaacacactatggtacatatacgtgatacaaattacaacgaaaaacagcaatgattttacaacgaaaaacagcaatgattttctgatataagctgtcagttcttaattataaatagagatcataaattcctcaaatgaaatatcatataaaaaaatgtgtgaaatacacatgggttcataattctgagaaatttcttatcctactttggtataactgaacagtttatatgaaaagttgattaaaggtatgttatggtaaatattaaattttcatatacattcagacatacacacacacgcaaatgtatattatatatatatacttttatataataaacttaggtaaaagacttttctatgtcaacttttggaaattactcaaatacatagactacggaaaaacttgtgggaaatataaaatgttccagacaccatcaatttgttttctgctagaaaacacacaatgcrcctcttgtgaatctatggagttgactggttctgtccttttgcc

SEQ ID NO: 300432 - DNA, 602 bp, Homo sapiens
ataatatatttaactcagcaagacgctattattttattcagtcaacattcatttagaattatgcacatatttatcatttctgttaatttttattccttcttgcatgcttaaccttgtattttcaatattttttatctgaaaaatatcatttggatttctgtttatgaaggtcctctattcttttgaaacacactaaagacatgattccattgaattctactttccatttttctgttgaaaatcaggttgtcatttagaaagttgttccttttaaaataatctatcttttcctctggctacttttcagattttctactggtctttgatgtcttgtgacattttatgttaatttgtttttagttatcttgtctgacctttgatggttactaaaaatatatggattaatacmttttatcacttttgggaaaatctccacaacattgattctgccctattttatcccttttaatcttccagaaatccagaagtatgttagatgctctgattgtagcatcaatgcctcttatcctcttagcttggcattctttgtcttgtggtctctttaggcttctttctttatagttgtcttccaattcactaat

SEQ ID NO: 300433 - DNA, 569 bp, Homo sapiens
ggaaaaatacggggttggcaggtgacatgatgtcaaatttctacaagttgtaactaaaataagaaagtttctacttcaactctctagagttgtataagaatgcatataartagtttctttccctcctagtacgtaatgagaagattaataatttctatgagacatttctcctaattcaaaatttttatattaaaattataatgcatacatagaaatgtgccaaaacaaaactggaaaactgggaaatagagcaatgtatcataaacagtcgagtaaccatcatgtagggcaagacaaggaacactgcaaacagcctagttccacctccatgacactttccaagcctctatacctttcttcatatctcctgaggtaagcaatatccattatttgtgatgatcatttccttgattttctttatactttatcaacaaggtatgcaaccctaaactcaatagcttggtttggcctgctttgaactgtgtataggtgcaatcctatatgttcttattcatggcttcctggacttaacattatgaatctgaaatttaatcagacagatgcatgta

SEQ ID NO: 300434 - DNA, 560 bp, Homo sapiens
agaatttaataccaatctggcagttgggtaaagaatgcactatggggagataggaatgaacagaaaacaaagaaaattcaattggtgatcaaaatagctctgacccaagaaaacagaaacagaaacataaatattgccaagaataattaaaaaaagctaagaacaatcaagaaaaagctaagctgtgctagtattaggtgactatataaactgaatttctawaaatgcttaaaattcaaaactggacaaaaccaatttgttaaaatataccactaaccttatttataaatgattcctagcattaaggaatagtctcttttccggttttataacagtatcctcagcactgcagcctgcatcaacactgctcagcttcttcttggctcccccaagccatcaccacccaccacctccctctaatgtcataatatgtcaactacaggtagaactcaagaactaaaggaaatggctgctcttccaaaggagacaatgtcagtaataaggatgaaatatcagaagatgaagatggccaatagagagaaggttactatccttcagaa

SEQ ID NO: 300435 - DNA, 578 bp, Homo sapiens
tcatccttccatcgacagaaaaccgcatagaattaaatgcaagcaatctgatattattaagtcacactaaaataaattatgtctttcagtgcaagcaggggtacctaaaagactccacagaatgacaaagaccatgtcagaaataagtgtttcctatattttagctctacctcagactactgaatatttctagtactgctatagaaagactgagtcaatttactcctcttttctaccgagcccaccatcctctatgaaactgacatacatatctatttatgaatgaactactcacacaagggaatgctgaaaagatctgatggatactcttgttactsaatattactgaatgtctgttgataatgtatactgttgttaccagaatgcaatttttaaaagctgttagtttattagattaactggagagttcagtaggattgacagtaagatacatgggcaaaccacgtttcattgccctttaccatgcttcacagataaggtctgtcacaaactgaaggtttgtggcaaccctgcatcaagcaagtctatcagtgccatttttccaatagcatgtggtc

SEQ ID NO: 300436 - DNA, 449 bp, Homo sapiens
gcagtcccattatttaggaagacccttagtttggagtaggctttgtgcatctcagggcactgtatcttgataacaggtaagcctggttgctttcttggagttttggtctatttttgtaccatacacaggttgagtatttctcatccaaaatgctgggactagaagtgttttagatttcagagtttttcaaattttggaatatttgcattttacttactaactgagcatctctagtccaaaaaaccaaaatctgaaatgctccagtgagaatttcctttgagagtcacgttggygttcaaaaagttttggacttttcaagtatttcagacttcagattttcagattacagatgcacagcccgtactgataagctgctcaattaaccagttacatatttcaatctgaacttataatacaattttggctcacacagggtttaatgtgtcagt

SEQ ID NO: 300437 - DNA, 589 bp, Homo sapiens
actctgaaactattttgtgtgtattacagaataatttgtttctggaacctttttgtgtttgaaaggaagtgtttgtctgaacacaatgagatatatcaaaagggcagaaaagagtgccaaaatcataaaatatctagagattaataaaatatgtgcaaaacataaaacattgctaagagaaattaaaggagacgaatataaatctatgtttatggattggaagatttagtatgttcaggaatgtccattctaaattaacctagagatctaatacacaaccagcaggttgtgtatgtgttgaaagagatgggagtagtgacaagctgattctaaaatttatatggaaacacaaaggacctggaacagctatggcaataytgacgaaaaacaaggttagagatcttcattatcagatatcgaacttataaactacaatatttaaggcagtgtggtactggcttgaagataaacggacaaatagaacataatggagagtgtagaaataaatccaaaaatatatagtcactttatttatgacacaaggcccactacaattcagcggggaaagaattttctttttaacaaatgg

SEQ ID NO: 300438 - DNA, 589 bp, Homo sapiens
actctgaaactattttgtgtgtattacagaataatttgtttctggaacctttttgtgtttgaaaggaagtgtttgtctgaacacaatgagatatatcaaaagggcagaaaagagtgccaaaatcataaaatatctagagattaataaaatatgtgcaaaacataaaacattgctaagagaaattaaaggagacgaatataaatctatgtttatggattggaagatttagtatgttcaggaatgtccattctaaattaacctagagatctaatacacaaccagcaggttgtgtatgtgttgaaagagatgggagtagtgacaagctgattctaaaatttatatggaaacacaaaggacctggaacagctatggcaatactgacgaaaaacaaggttagagatcttcattatcagatatcgaayttataaactacaatatttaaggcagtgtggtactggcttgaagataaacggacaaatagaacataatggagagtgtagaaataaatccaaaaatatatagtcactttatttatgacacaaggcccactacaattcagcggggaaagaattttctttttaacaaatgg

SEQ ID NO: 300439 - DNA, 617 bp, Homo sapiens
agagagtgataatagcagactgcatgcatcagaataaagcatccatcaactcctagacatggcaagagaaaatactcaaagcgaggaatagagagaaaaaaaatggggaaaaaaaaaaaaacagtgtcaaaaatctgtgatagtatttttaaaaagttgaacatacatgtaattagratccccaaagaagaagagagaaagaatggggaaaataaagtatttaaaaagaagatcttggctagaaattttccaaaactgattaaaaataaaaactaacccacaaaacaaaagcgttcaatgaacaaagcacatctaggttcaccaccatcaaccaataaaaaacaaatatataatgaaaattctcaaacaacagagaaaagacacattacattcagaggaacaacaacaaaaattatagctgacttcttataaaacggtagaaaccagaagataatggaatggcatctttaaagtgctgaaaggtaaagctatcaacctataattcttatgcagcaaacatatacttcaaaaatgaaggcaagataacatttttagacagacaaaaactaagggacttattgggatatctttatcacaatgctaaataaaattcttaa

SEQ ID NO: 300440 - DNA, 520 bp, Homo sapiens
atgtcttctttgaaatgctactcccttaactaagagtttcgtgtttggagagattaatgggagaatcaggaaacttgtaatcctctctctgcaaaaagatccacaatattgatctgggcaatgatttcttggataagactgcaaaagcacaggcaaggaaagcaaaaatagccaaataggattgygtcaaactaaaatgcttctgcacaacaaaggaaataattaacagtatagagtcaacccgaggattgggagaaaatatctgcaaaccatacctctgataaggccccaatattcaaaatatataaggtactcaaataactcaatagcaacaaaacaactcaatttttaaaatgggcaaagaatctgaagtcatttctcaaaaggaaagatacaaatggccaacagatgtatgaaaaaaaaaatgctcagcttctcaaatcataggggaaattcaaattaaaaccacaatgagatatcaatgtacacctgttagaatggctattatcaaaacagacaa

SEQ ID NO: 300441 - DNA, 572 bp, Homo sapiens
agaatggctattatcaaaacagacaaatgataagtgttggagaggatgtggagaaaagggaactcttgcacactgttggtgggaacgtaaattcatacagtcattctagaaagccatgtaagtttcctcaaaaacactataaatagaactcgcaatcccacttcagagtatatatacaaaggaactgaaatcagtacatcagagatgtctgcactcccatgttcatttcagcattattcacaatagccaagatacggaagcaaccctaagtgtccataaagagattaataaggaaaatgtgctatacatacccaatggaatatgacacagccttaaaaaaagaaggaaattatgtcatttgagacactatgaatggaactgaaagatacwacactaagtgaaataagccaagcacaggaaggcaaatactgtatgatctcaattacatgtggaatctaagagtcattctcataaaaacagagaacagaaaggtagttaccagaggctcaggggagagatgggtaatggggagatgatccaaggatatcaagtttcagttgggcaggaggaat

SEQ ID NO: 300442 - DNA, 572 bp, Homo sapiens
agaatggctattatcaaaacagacaaatgataagtgttggagaggatgtggagaaaagggaactcttgcacactgttggtgggaacgtaaattcatacagtcattctagaaagccatgtaagtttcctcaaaaacactataaatagaactcgcaatcccacttcagagtatatatacaaaggaactgaaatcagtacatcagagatgtctgcactcccatgttcatttcagcattattcacaatagccaagatacggaagcaaccctaagtgtccataaagagattaataaggaaaatgtgctatacatacccaatggaatatgacacagccttaaaaaaagaaggaaattatgtcatttgagacactatgaatggaactgaaagatacaacactaagtgaaataagccaagcacaggaaggcaaatactgtatgatctcaattacatgtggaatctaagagtcattctcataraaacagagaacagaaaggtagttaccagaggctcaggggagagatgggtaatggggagatgatccaaggatatcaagtttcagttgggcaggaggaat

SEQ ID NO: 300443 - DNA, 588 bp, Homo sapiens
gcacaccctcactcagctgccatacaacctgggaggctctgaggttggacaatttcctgagggcagagccactgtaactacattcctttttcaccaaattactaaaatacaggttatggtccaacatcttccatgaatatgggctcagctttgcttaactaacawaagaggcagattttttctagtacacttttgagaactgcaaagctagaggaggagaataaaatttgtttatctacaaggaatgttctgagttagaatcactgtgaaatgatatgacttgaaacaaatctaaactagtgttctcgacgtccaccctctcaccccaatgcatacaggctactaagtaagtcctgttattttgctaaacagaaaagatgcagcaatcagaatacctaaaattttaaaaaaaatttttcccattatagttgatcagttgacatttcagcattccctagtggttaaaaaaaaaaaaagtctctcctgcaatattaccaccaactgtcagaaaatatgaaagctcctattgtgcaaattttaaaacattctaagcttgctaaacatttaccacatttactcatacatctc

SEQ ID NO: 300444 - DNA, 588 bp, Homo sapiens
gcacaccctcactcagctgccatacaacctgggaggctctgaggttggacaatttcctgagggcagagccactgtaactacattcctttttcaccaaattactaaaatacaggttatggtccaacatcttccatgaatatgggctcagctttgcttaactaacataagaggcagattttttctagtacacttttgagaactgcaaagctagaggaggagaataaaatttgtttatctacaaggaatgttctgagttagaatcamtgtgaaatgatatgacttgaaacaaatctaaactagtgttctcgacgtccaccctctcaccccaatgcatacaggctactaagtaagtcctgttattttgctaaacagaaaagatgcagcaatcagaatacctaaaattttaaaaaaaatttttcccattatagttgatcagttgacatttcagcattccctagtggttaaaaaaaaaaaaagtctctcctgcaatattaccaccaactgtcagaaaatatgaaagctcctattgtgcaaattttaaaacattctaagcttgctaaacatttaccacatttactcatacatctc

SEQ ID NO: 300445 - DNA, 588 bp, Homo sapiens
gcacaccctcactcagctgccatacaacctgggaggctctgaggttggacaatttcctgagggcagagccactgtaactacattcctttttcaccaaattactaaaatacaggttatggtccaacatcttccatgaatatgggctcagctttgcttaactaacataagaggcagattttttctagtacacttttgagaactgcaaagctagaggaggagaataaaatttgtttatctacaaggaatgttctgagttagaatcactgtgaaatgatatgacttgaaacaaatctaaactagtgttctcgacrtccaccctctcaccccaatgcatacaggctactaagtaagtcctgttattttgctaaacagaaaagatgcagcaatcagaatacctaaaattttaaaaaaaatttttcccattatagttgatcagttgacatttcagcattccctagtggttaaaaaaaaaaaaagtctctcctgcaatattaccaccaactgtcagaaaatatgaaagctcctattgtgcaaattttaaaacattctaagcttgctaaacatttaccacatttactcatacatctc

SEQ ID NO: 300446 - DNA, 588 bp, Homo sapiens
gcacaccctcactcagctgccatacaacctgggaggctctgaggttggacaatttcctgagggcagagccactgtaactacattcctttttcaccaaattactaaaatacaggttatggtccaacatcttccatgaatatgggctcagctttgcttaactaacataagaggcagattttttctagtacacttttgagaactgcaaagctagaggaggagaataaaatttgtttatctacaaggaatgttctgagttagaatcactgtgaaatgatatgacttgaaacaaatctaaactagtgttctcgacgtccaccctctcaccccaatgcatacaggctactaagtaagtcctgttattttgctaaacagaaaagatgcagcaatcagaatacctaaaattttaaaaaaaatttttcccattatagttgatcagttgayatttcagcattccctagtggttaaaaaaaaaaaaagtctctcctgcaatattaccaccaactgtcagaaaatatgaaagctcctattgtgcaaattttaaaacattctaagcttgctaaacatttaccacatttactcatacatctc

SEQ ID NO: 300447 - DNA, 505 bp, Homo sapiens
cttatttttctttgatcacacgtcagtgagtccatggccaaaatgagtctatctttggcccwactctcacattcagatatattctacactttcacctgaacttgggatactccatggattgctggtcctacctcaattatttttcctgcttgttctctgccttatttgtccttctacttcctgagcccctaatttattcatgtgaaaaagcaaaattgcacaatgtaaattctgtgagaacagcttcactctaaggtaaattataatgtcttgtattattcaggaaatgactggatgttgatgttcatatatatcatctactaaaatgatagaatgaatgctttagacactttagaaatagattgttctatttttctctacttgactgatgatttcttgggatcagaacagatattcacaatattaaaaccacagtaaatggttttgtggttgaaaccaatgacaaataattttttgtctttgaatctgatgtcctccacatcta

SEQ ID NO: 300448 - DNA, 505 bp, Homo sapiens
cttatttttctttgatcacacgtcagtgagtccatggccaaaatgagtctatctttggccctactctcacattcagatatattctacactttcacctgaacttgggatactccatggattgctggtcctacctcaattatttttcctgcttgttctctgccttatttgtccttctacttcctgagcccctaatttattcatgtgaaaaagcaaaattgcacaatgtaaattctgtgagaacagcttcactctaaggtaaattataatgtcttgtattattcaggaaatgactggatgttgatgttcatatatatcatctactaaaatgatagaatgaatgctttagacactytagaaatagattgttctatttttctctacttgactgatgatttcttgggatcagaacagatattcacaatattaaaaccacagtaaatggttttgtggttgaaaccaatgacaaataattttttgtctttgaatctgatgtcctccacatcta

SEQ ID NO: 300449 - DNA, 550 bp, Homo sapiens
caggctgtgacagtaggtaaaatctgtacaccaaacaccaattcccttgatggtatttggatccatttccaattgagaagcagtcatctatcctttttcattagcttcgccttcactggtgagaagttagtgggaagtaaagactctggaggcctggagttgttgggttttaaaattttatgcctggagggtaagtccactstagtaaatgcaaagttatttttaaacttaaagccatggaataccactacattatagtaaccagctattttgttaacctacattcattcatgtattgtttgtatgaatgttctgtttccagcataatggcttttaaaaattaaagatataaattagctattattagagaaacagcatgatagtaaaactcccctaaattggcataacaaaatattactaatagactctagaggggacggacagtctctaaagaataaacaaaccattgagtagagaacagaaatcccacccaaccagtaagtgctctatgctgatcttcaaacaatgagttcctgggtcttagcaataa

SEQ ID NO: 300450 - DNA, 550 bp, Homo sapiens
caggctgtgacagtaggtaaaatctgtacaccaaacaccaattcccttgatggtatttggatccatttccaattgagaagcagtcatctatcctttttcattagcttcgccttcactggtgagaagttagtgggaagtaaagactctggaggcctggagttgttgggttttaaaattttatgcctggagggtaagtccactgtagtaaatgcraagttatttttaaacttaaagccatggaataccactacattatagtaaccagctattttgttaacctacattcattcatgtattgtttgtatgaatgttctgtttccagcataatggcttttaaaaattaaagatataaattagctattattagagaaacagcatgatagtaaaactcccctaaattggcataacaaaatattactaatagactctagaggggacggacagtctctaaagaataaacaaaccattgagtagagaacagaaatcccacccaaccagtaagtgctctatgctgatcttcaaacaatgagttcctgggtcttagcaataa

SEQ ID NO: 300451 - DNA, 550 bp, Homo sapiens
caggctgtgacagtaggtaaaatctgtacaccaaacaccaattcccttgatggtatttggatccatttccaattgagaagcagtcatctatcctttttcattagcttcgccttcactggtgagaagttagtgggaagtaaagactctggaggcctggagttgttgggttttaaaattttatgcctggagggtaagtccactgtagtaaatgcaaagttatttttaaacttaaagccatggaataccactacattatagtaaccagctattttgttaacctacattcattcatgtattgtttgtatgaatgttctgtttccagcataatggcttttaaaaattaaagatataaattagctattattagagaaacagcatgatagtaaaactcccctaaattggcataacaaaatattamtaatagactctagaggggacggacagtctctaaagaataaacaaaccattgagtagagaacagaaatcccacccaaccagtaagtgctctatgctgatcttcaaacaatgagttcctgggtcttagcaataa

SEQ ID NO: 300452 - DNA, 571 bp, Homo sapiens
aacgtaaacagttccaggtgcaggggctttaagactattacaaggtgatagactaggggctttgggcgttgtcaatcagatgaattcttggggactgtggatatagcttgccacagtatcttatcagttaattgcattcttggatgtgctgggagtcagcttgcacaagttaagtccttgaggaaggggctgccagtgaaagagccaaaatggagtttgtctggttctcttagctaagggagaaacaaggctaggtgaataaaggaagaaacaaggttgggcattacattacaaggtaattccaaatggttttccaagtggtagtaccaatgacattcccactcgcaagacatgctctttgacctcaccaacacatgatagacttaaatttttgctgttcaagtatygggggaaattcagcccccgatatttcacgtgggttattttctattttccctaagtgcccgccagtctgagaaataaaggggaagagtacaaaagagagaaaatttaaagctgggtgtctgggggagacatcacatgtcggcaggttccgtgatgccccctgagc

SEQ ID NO: 300453 - DNA, 503 bp, Homo sapiens
gatataaacaacccagtatagagccaactcaatactgaagagcaaagtcagaggactgacactaccccacttcaagacttactataaagttactgtaatcaagacagtgtggtatttgtgaaagaagacacgaacagatcaagggaacaaaacacagagcccagaaatagactcacatatatagtcaactgatatttgacmaaggagcaaaggcaatacagtggagcaaaaattgtcctttcaacaaacggtgctggaacaactagagatccacatacaaaaaaataaatctagacatagactttacacccttcatgaaaactaactcaaaacagacaacagatctacatgcacattgcaaaactataaagctcctagaagataacattggaggaaacctagatgaccttaggtacgatgatgacttcttagataaaacaaaaaggtacaattcatgaaagaaatgattgataagctgaacttcactaaaattaaaaacttct

SEQ ID NO: 300454 - DNA, 503 bp, Homo sapiens
gatataaacaacccagtatagagccaactcaatactgaagagcaaagtcagaggactgacactaccccacttcaagacttactataaagttactgtaatcaagacagtgtggtatttgtgaaagaagacacgaacagatcaagggaacaaaacacagagcccagaaatagactcacatatatagtcaactgatatttgacaaaggagcaaaggcaatacagtggagcaaaaatwgtcctttcaacaaacggtgctggaacaactagagatccacatacaaaaaaataaatctagacatagactttacacccttcatgaaaactaactcaaaacagacaacagatctacatgcacattgcaaaactataaagctcctagaagataacattggaggaaacctagatgaccttaggtacgatgatgacttcttagataaaacaaaaaggtacaattcatgaaagaaatgattgataagctgaacttcactaaaattaaaaacttct

SEQ ID NO: 300455 - DNA, 581 bp, Homo sapiens
ataatttaccacccaacaagtttactactaggtaaacaccctagagaaactctcaacataggtgccctaggagatatgtgaagaatgtacagcattatttataactaaaataagaagttggggagagaggagagaacctaaatgtccttcaacaagaaaatgaataaatgaattacgctttatttatatgatggaaaatataaagcagtgaaaatatttgaattctagttacatataagtagcagaaatctgagtgaaaaaatagtacttataaaatgccatttgtataaaccttacaaagaatgtgaacatttaataataaaaatttatactatttagtaatccacatatggtaaagttataaagaaaagcaaattgattacgattcaaaaagtcagaatagyggttacctctaggaacagtgaggggatgagctcagggcatacaggacttaaaagtaacaataaggttctattttccatttggagagtaggctcccggttgtttattttatgactgtgtttataacttccttgcacattataaatgttcttttatatgtataaattgttaagaaaatg

SEQ ID NO: 300456 - DNA, 581 bp, Homo sapiens
ataatttaccacccaacaagtttactactaggtaaacaccctagagaaactctcaacataggtgccctaggagatatgtgaagaatgtacagcattatttataactaaaataagaagttggggagagaggagagaacctaaatgtccttcaacaagaaaatgaataaatgaattacgctttatttatatgatggaaaatataaagcagtgaaaatatttgaattctagttacatataagtagcagaaatctgagtgaaaaaatagtacttataaaatgccatttgtataaaccttacaaagaatgtgaacatttaataataaaaatttatactatttagtaatccacatatggtaaagttataaagaaaagcaaattgattacgattcaaaaagtcagaatagcggttacctctaggarcagtgaggggatgagctcagggcatacaggacttaaaagtaacaataaggttctattttccatttggagagtaggctcccggttgtttattttatgactgtgtttataacttccttgcacattataaatgttcttttatatgtataaattgttaagaaaatg

SEQ ID NO: 300457 - DNA, 537 bp, Homo sapiens
atggataatgaaagtgtgatgcatatacataatggaatattattcagctataaaaagtaatgaaatcctgtcatttgtggcaacatagaagaacctagaggacattatcttaagtgaaataagtcaggcacagaaaagacaaaatactgcatgatctcactcatatgtggaacctaaagaagttgatctcctagaagtagagagcakaatggtgctcactagaggtggggaggctatggggcagggagaaatagggagagataagtctatgggtataacctctggtgttctaatgcatagtagggtaactatagttaataatatcgcattgtatatttcaaaataggtagaagaggagactttgaatgttctcaccacaaagaaatgataaagttatgaagtaatgggtatgctatataccctgatttgattattacataatgtgtacatgtatcaaaacatcataatgtaccccatgaatatggacaattatgtttcaatttaaaaaattaaaaatacgtgagttgtgtactgttt

SEQ ID NO: 300458 - DNA, 559 bp, Homo sapiens
atgatgctatttccaatttttcatcgtataggaatcatgcatgcacacacatacacatatacaacacacacacacaggtatctcattaaatctttttcttgggtgtatgcatgtgaatgtgagtgattgtgtgkgtgtgtgtgtgtgtgtgtgtgtgtagacagtaacctaaataatcaaccaacacaattatggaagtcattgcaaataatttttatgttcaataaccatgatttgatttgtcccatttggggataaacaaggtgattgaatacctgaaggtatttctcaaccttcttctctcttgcctacttcccactacagaagcctagaaaatccaatactcacacctccatccttccttacagaaagtgtggcagtgtgatccagctatggtcaatgatatttataggaaatacactggggactcttctgagagaggcactcggggagaacctctgtcctacaccatcttctgcttcctgcttttgaatgtttgagggacatgatctttggagctgtgcaggtcatcttgtgacaaagaaggataagtcaaaag

SEQ ID NO: 300459 - DNA, 559 bp, Homo sapiens
atgatgctatttccaatttttcatcgtataggaatcatgcatgcacacacatacacatatacaacacacacacacaggtatctcattaaatctttttcttgggtgtatgcatgtgaatgtgagtgattgtgtgggtgtgtgtgtgtgtgtgtgtgtgtagacagtaacctaaataatcaaccaacacaattatggaagtcattrcaaataatttttatgttcaataaccatgatttgatttgtcccatttggggataaacaaggtgattgaatacctgaaggtatttctcaaccttcttctctcttgcctacttcccactacagaagcctagaaaatccaatactcacacctccatccttccttacagaaagtgtggcagtgtgatccagctatggtcaatgatatttataggaaatacactggggactcttctgagagaggcactcggggagaacctctgtcctacaccatcttctgcttcctgcttttgaatgtttgagggacatgatctttggagctgtgcaggtcatcttgtgacaaagaaggataagtcaaaag

SEQ ID NO: 300460 - DNA, 559 bp, Homo sapiens
atgatgctatttccaatttttcatcgtataggaatcatgcatgcacacacatacacatatacaacacacacacacaggtatctcattaaatctttttcttgggtgtatgcatgtgaatgtgagtgattgtgtgggtgtgtgtgtgtgtgtgtgtgtgtagacagtaacctaaataatcaaccaacacaattatggaagtcattgcaaataatttttatgttcaataaccatgatttgatttgtcccatttggggataaacaaggtgattgaatacctgaaggtatttctcaaccttcttctctcttgcctacttcccactacagaagcctagaaaatccaatactcacacctccatccttccttacagaaagtgtggcagtgtgatccagctatggtcaatgatatttataggaaatacactggggactcttctgagagaggcactcrgggagaacctctgtcctacaccatcttctgcttcctgcttttgaatgtttgagggacatgatctttggagctgtgcaggtcatcttgtgacaaagaaggataagtcaaaag

SEQ ID NO: 300461 - DNA, 575 bp, Homo sapiens
agtcaccagaagacatggaggaacacaaaatgcacattgctaaatgaaagaagtcaatctgaaaaggctatctactggccgggtgtggtggctcacacctgtaaatccagcactttgggaggcgaggcaggtggatcacttgaggtcaggagttttagactaccctggccaacatggggaaaccccctctctactaaaaatacaaaaattagccgggcatggtggcacacctgtaatcmcagctacttgggagactgaggcaggagaatctcttgaacctgggaggcggaggttgcagggatctgaggtcaccccattgcactccagcctgggtgacagagcaagactccatctcaaaaaataaaaataaataaaaacaaatatatatatatataatgaaaaggctatatactgtatgatatcaactctaagacatcccataacatatcaaataacaaaaggatcagtggttgccaggggttaggagagagaaagagattagtaggtaaaacacaggggattgttagggtggcaattctattctgtatgatactgtaatgggaatacctgacatt

SEQ ID NO: 300462 - DNA, 575 bp, Homo sapiens
agtcaccagaagacatggaggaacacaaaatgcacattgctaaatgaaagaagtcaatctgaaaaggctatctactggccgggtgtggtggctcacacctgtaaatccagcactttgggaggcgaggcaggtggatcacttgaggtcaggagttttagactaccctggccaacatggggaaaccccctctctactaaaaatacaaaaattagccgggcatggtggcacacctgtaatcacagctacttgggagactgaggcaggagaatctcttgaacctgggaggcggaggttgcagggatctgaggtcrccccattgcactccagcctgggtgacagagcaagactccatctcaaaaaataaaaataaataaaaacaaatatatatatatataatgaaaaggctatatactgtatgatatcaactctaagacatcccataacatatcaaataacaaaaggatcagtggttgccaggggttaggagagagaaagagattagtaggtaaaacacaggggattgttagggtggcaattctattctgtatgatactgtaatgggaatacctgacatt

SEQ ID NO: 300463 - DNA, 575 bp, Homo sapiens
agtcaccagaagacatggaggaacacaaaatgcacattgctaaatgaaagaagtcaatctgaaaaggctatctactggccgggtgtggtggctcacacctgtaaatccagcactttgggaggcgaggcaggtggatcacttgaggtcaggagttttagactaccctggccaacatggggaaaccccctctctactaaaaatacaaaaattagccgggcatggtggcacacctgtaatcacagctacttgggagactgaggcaggagaatctcttgaacctgggaggcggaggttgcagggatctgaggtcaccccattgcactccagcctgggtgacagagcaagactccatctcaaaaaataaaaataaataaaaacaaatatatatatatataatgaaaaggctatataytgtatgatatcaactctaagacatcccataacatatcaaataacaaaaggatcagtggttgccaggggttaggagagagaaagagattagtaggtaaaacacaggggattgttagggtggcaattctattctgtatgatactgtaatgggaatacctgacatt

SEQ ID NO: 300464 - DNA, 516 bp, Homo sapiens
actgacagccagctgcttatcagttaagcttccctttgactatggagaggaaagaaagctttgcagatgggagtagagtcagggtatagcattcagacttccctgatcccggaaatacttttaaggattattttaggaattgtatctattatgtttaatttaaatgagaatatcataaaggaaaaaattaagctccctatagctatgacatgtatagggacaaatagagaggctactgagaagagaatagatattttctatggacagaggaatacaatatagtagaggtggytggaaatgtcaccttcactctgtcataaagacttaaactgaaagtgagctcagaggtcatcatctaattcttccccatctttgtatctctaggatttggcatatagtaggtctttaataaatactagatgaatgaatcaacacataacagaataagtgaatgaatgagaagactctgccagttactacctgtgtgactctgagcaatgtagctaatggaaccac

SEQ ID NO: 300465 - DNA, 559 bp, Homo sapiens
attttgggaggattcctttaatgacaactatatggtagaacccacatagttgcaaattgcagtgcagtgtataagagcaaacacactgttgaggggaccaggtggcacccatactttctttcaagaatatctgtggggccatacatgtgcattggccatttgaccataagaactcagagaaggagccargtcaatcagttaaataaatgctattacagtgaaattgaaatttctttcttttattaagaaaaataaagttctattttttaatccatcctaatggatttttaatgcaaacttcatatttaaaaagaccatggctttagaacaggcttctcaaaggacagtattgttctccgagcatctgtttatttaaaattcagattcccagatcccatcccacagctactgtatcaaagtcccaaagagaagatggggagaggagaggagaaaggagtccatgtgtttaataacctccccaagtgattcttgtgcacatatatatatatacatacatgtagatatgtgggggaggacagagtcttgcttgttgcccagg

SEQ ID NO: 300466 - DNA, 587 bp, Homo sapiens
ttacaaaataaaaatgaactttgccatgagataaccagtaaataatattctgtaaccattggtttgcgagttgttttggagtggacataccagtttatcagcattgctcaggaataataactggatttagacctataccacctggttttgctggagcccagggataaggagggagagggrgcttaatggtcaaggctgaccaatagctgggatgttcctatgtgaccagctccttgtaggagacactcaacaaaccttgagcttcctggtacctttgcatatgtgtggtggttgaaaaaccagagacaaagtgtgtccgtgcgaactggaaacaggaggacgaaaagccattgaggacactactgatgatgcatatgataaccattaataaattagcactatcttttctcatatttcagataagaaaatcaacaaaaatatacatgtatttttctttgtgtagcctcataggtttatattgcacaccccaggcaaggcgtacacaacacattggagactactggatatgaaagatacttaggaaatacctgggctggagatatagatgtgttgataatcagcacatt

SEQ ID NO: 300467 - DNA, 611 bp, Homo sapiens
ccctactccccgaaaaagttaaaaactggcaaatccctataacaatagttttcaatacattgggcatcaagcaaagaatgacagtgatcaatgacagatgaaagacaaatgagatgagccctgtgatcaacttactgccttgtgaaagtttcyactttgcaacctaagggggaaactggcagaatgagaagccatccctgggatctgaggaggccaaactgaaaattcaagcagctagaatttgcagagcagggtaacagaaagaagaaaggagacagcaaaacagagagaaccacaggcatttacagagtccctatcctcctccctgagctcaagtgttccgctgaatactgatcagtctggagaaagaagaatatgaaagaattagtaggggcagtgtccagtgtttacatagctctgagaatggtagatgttaccaccaggtacattgaagaatataatttatggaacactgaatacggtactcaagaagatcttgcctacatagtgggaaatgcatagcctgagattgagcactgatctggattcacctaactcatcttaaaagcaacacctgaaatgatcaaactgcattccagaagaaagcacac

SEQ ID NO: 300468 - DNA, 607 bp, Homo sapiens
tgccatttggcttccatctattgcacatagaacctgaagatctgggagtctcagggtctctcaagggcttgttggagctctggctggctacaagggtttctgtgggctgtcttgcttcctccttgagaaacacctgtttggcatgaaactcaatctggttccaagactactgagttatgttgtgtgtgtgtgtgtatatatatatatatataaccacaacttaaaagaaacttaaagtataataataataaaatttaaaaaaaataaaaaataaaaaaagagaatatataattcaaagttaaaaaaaagaaaaaagaaaataaaagcatatcagtaaactggggaaaaaaattccataagcacagtatatatgtaactggagtcctcaaaaaagagggtaaacatcagaaaaattatttgaagaaatggtggcttaatttttccaaatgtgatgaaaggtataaaaccacagatccaaaaagctcaaaaaaccccgaacrcaagaaatatgaagaaaactacaccaatttatatcataatcaaatttctcaaaaccagagataaaggtaaaatcttaaaagtagttacaagaaagcaagagatatta

SEQ ID NO: 300469 - DNA, 565 bp, Homo sapiens
gatttggtaaaggaaacccagcaagaggtgagcgttttgttttcaaattatgtcaaatttaatttggcgggaaattattagtagttaattgaaaaatttcccaaagacctaaaattcttggccttcattaaatatttaaagaattttaaaatgtgtcccaattttaggaatctcaattagcaaagcttatggtaagaaactcaccctgatgacagagcaattggggacagaaaggytgggcctccttgactccacatggcccatgagatagggggagtgaaggctctgtcgtagagctgggccttcagggtggcagagttgaaggcaggtgtatgtcaagcacaccctggggcttgcctggatcctggcaatttggaagtggcaaggcttcatttggagaagtagaagtaaattgttccagtgcagcataaagttcagagacatatgaggtggggtatccacaaagtggtacccagccctggctcagaccactatcagtgataccacctctgcagatgagtgaggcactgggatactgcactttattaataggtacaagtccaca

SEQ ID NO: 300470 - DNA, 565 bp, Homo sapiens
gatttggtaaaggaaacccagcaagaggtgagcgttttgttttcaaattatgtcaaatttaatttggcgggaaattattagtagttaattgaaaaatttcccaaagacctaaaattcttggccttcattaaatatttaaagaattttaaaatgtgtcccaattttaggaatctcaattagcaaagcttatggtaagaaactcaccctgatgacagagcaattggggacagaaaggctgggcctccttgactccrcatggcccatgagatagggggagtgaaggctctgtcgtagagctgggccttcagggtggcagagttgaaggcaggtgtatgtcaagcacaccctggggcttgcctggatcctggcaatttggaagtggcaaggcttcatttggagaagtagaagtaaattgttccagtgcagcataaagttcagagacatatgaggtggggtatccacaaagtggtacccagccctggctcagaccactatcagtgataccacctctgcagatgagtgaggcactgggatactgcactttattaataggtacaagtccaca

SEQ ID NO: 300471 - DNA, 501 bp, Homo sapiens
gcttgcctggatcctggcaatttggaagtggcaaggcttcatttggagaagtagaagtaaattgttccagtgcagcataaagttcagagacatatgaggtggggtatccacaaagtggtacccagccctggctcagaccactatcagtgataccacctctgcagatgagtgaggcactgggatactgcactttattaataggtacaagtccayacctatttaatagccctcttcgttgtgactctggtggccactagaaagtttttacataagactgcagagtaaggaaaccttcctgccaccaagaggtgacccagccattactcctcaagccctttgggcatttagggaaagaagaaactgtgccaaggagtgaggctgggaagactcagaggcctgatgaaaaagggtgtgtccaccatgctatggggtctccactttacttgtaagcagtgaagaaccacagaggcagggcgccatcagatcagatgtgaccagatg

SEQ ID NO: 300472 - DNA, 473 bp, Homo sapiens
tcctaaaattatatttctctccaattagcattcacatcttgactagtctcatatccatctccagctggggccgcagggggctgacatccgatgctgccgcttccctatgcacaggctcaccaggagcagtcttcgctcatcttctccagttgggccatctggcacgtgcttggaggggtaaacaccgaggggtctttaatacccagctggatgtcaaaaaaccgcgtagacaatatcacactgtagtttatggtaaaggtttcctggacaggatagcaatccttgactgtatagatgccaatccaggtttcatctataagaggaaaaaagttgacttttraataaagaagacaggcaagaagttcatattttttcttatggtggtaaaatgtacataacataaaatttaccattttaccatttttaagtgtttggtggccttgagtacattcacatttgttgaccatcagcac

SEQ ID NO: 300473 - DNA, 434 bp, Homo sapiens
cgaatcaattcccagtccaccatgatgactgtgctgctctgtgctgcatttcataatgcattattttgcacccttgatattgtttgaaagggtctgccctttccgtactttcttcaagtcgcctaatacttgaacaaatgcttttagaataaatgatattatcaagtttggttttgttctataaactaatggtgcccttttgctatagatcttacagtccattggcgtttcaaaccatggaaattcactttgcaactcctaatgatgcaaatgccataaagagaggccagtgagaggaacacacttagggggaacggcagggctctggaagggagacaggtggygatcccaaattagaaatcaggtcttaaaggggccacaagcgagatgacatctcaaaaagagggtttcctttgtcacaacagatgtgaaaa

SEQ ID NO: 300474 - DNA, 605 bp, Homo sapiens
acaatgttttaaacttgtactatatccaggagctatgtagatatataaaatattttcttatttaaattccacatgtgtacaatgtaggtattattttcattgcaccaatatgatagatgagacaataattttctcaaagacactcaattaagttggctgactgcaaagagttttaggcaataagatttacattcyttacctttagcttatcatcttccaaagatgatgctttaatcattgtcagctggttattgatcatattgttctttgagcccatccccatgggatttgaaaaatctgcttctaagcatatctggaacttttttacattttcctttttttttttttaagatggaagtctccactatgctgcccaggctggagtgccatggttattcacaggagtgatcgtagagcattatagcttcaaactcctggcctcaagagatcctcctgcctcagcatcctgagtacagcgtacaggcatgtgctaccatgcccagccatatcctgaggttttcacttacaataactgaagctcttaccttgccacctcaggccatctactaaaaaggcatagatattatttcagggaaagaaatgcc

SEQ ID NO: 300475 - DNA, 605 bp, Homo sapiens
acaatgttttaaacttgtactatatccaggagctatgtagatatataaaatattttcttatttaaattccacatgtgtacaatgtaggtattattttcattgcaccaatatgatagatgagacaataattttctcaaagacactcaattaagttggctgactgcaaagagttttaggcaataagatttacattctttacctttagcttatcatcttccaaagatgatgctttaatcattgtcagctggttattgatcatattgttctttgagcccatccccatgggatttgaaaaatctgcttctaagcatatctggaacttttttacattttcctttttttttttttaagatggargtctccactatgctgcccaggctggagtgccatggttattcacaggagtgatcgtagagcattatagcttcaaactcctggcctcaagagatcctcctgcctcagcatcctgagtacagcgtacaggcatgtgctaccatgcccagccatatcctgaggttttcacttacaataactgaagctcttaccttgccacctcaggccatctactaaaaaggcatagatattatttcagggaaagaaatgcc

SEQ ID NO: 300476 - DNA, 605 bp, Homo sapiens
acaatgttttaaacttgtactatatccaggagctatgtagatatataaaatattttcttatttaaattccacatgtgtacaatgtaggtattattttcattgcaccaatatgatagatgagacaataattttctcaaagacactcaattaagttggctgactgcaaagagttttaggcaataagatttacattctttacctttagcttatcatcttccaaagatgatgctttaatcattgtcagctggttattgatcatattgttctttgagcccatccccatgggatttgaaaaatctgcttctaagcatatctggaacttttttacattttcctttttttttttttaagatggaagtctccactatgctgcccargctggagtgccatggttattcacaggagtgatcgtagagcattatagcttcaaactcctggcctcaagagatcctcctgcctcagcatcctgagtacagcgtacaggcatgtgctaccatgcccagccatatcctgaggttttcacttacaataactgaagctcttaccttgccacctcaggccatctactaaaaaggcatagatattatttcagggaaagaaatgcc

SEQ ID NO: 300477 - DNA, 591 bp, Homo sapiens
tttaaaaatataacaaaaatatgccaaagtctttttaaaaaaattagtttaacagatgcctctgtttgaatagcatatattctatcaattaattcttcatagaatgaaggaaaaatcaaaatatgagtatttgaatagagtctttaaaaatcartttcaaaattcattaagtgacttcaaaatttacagcaagtcaattattttaaggaagaacaattcttttcaaatcattcaaacaattttagagtggcacatactgaacttttaaggccactttaatagcttacagatcaagtaagtagggagttgagactatagttccacatattttccatataaacacttcataatatttgatagagtattgcaaacaaacacgcatgcacacacacacactttaaggtgatttctgaatcggatatgtgattctcaattcaaatcatcacaaggcaatgtataaacaaataaatatatgcttcacacacactcatacacatacacacaaattctagctgtgtgtatttgtctccctggcctctctttctttcttattttttttggatattggtacattacttgtaatataaagtc

SEQ ID NO: 300478 - DNA, 544 bp, Homo sapiens
tgaatagagtctttaaaaatcagtttcaaaattcattaagtgacttcaaaatttacagcaagtcaattattttaaggaagaacaattcttttcaaatcattcaaacaattttagagtggcacatactgaacttttaaggccactttaatagcttacagatcaagtaagtagggagttgagactatagttccacatattttccatataaacacttcataatatttgatagagtattrcaaacaaacacgcatgcacacacacacactttaaggtgatttctgaatcggatatgtgattctcaattcaaatcatcacaaggcaatgtataaacaaataaatatatgcttcacacacactcatacacatacacacaaattctagctgtgtgtatttgtctccctggcctctctttctttcttattttttttggatattggtacattacttgtaatataaagtcaaactcttgagcccagcctccatgttgggccccataagttgatgcagtatacttctccagcaaaatcactcagttttacataac

SEQ ID NO: 300479 - DNA, 544 bp, Homo sapiens
tgaatagagtctttaaaaatcagtttcaaaattcattaagtgacttcaaaatttacagcaagtcaattattttaaggaagaacaattcttttcaaatcattcaaacaattttagagtggcacatactgaacttttaaggccactttaatagcttacagatcaagtaagtagggagttgagactatagttccacatattttccatataaacacttcataatatttgatagagtattgyaaacaaacacgcatgcacacacacacactttaaggtgatttctgaatcggatatgtgattctcaattcaaatcatcacaaggcaatgtataaacaaataaatatatgcttcacacacactcatacacatacacacaaattctagctgtgtgtatttgtctccctggcctctctttctttcttattttttttggatattggtacattacttgtaatataaagtcaaactcttgagcccagcctccatgttgggccccataagttgatgcagtatacttctccagcaaaatcactcagttttacataac

SEQ ID NO: 300480 - DNA, 544 bp, Homo sapiens
tgaatagagtctttaaaaatcagtttcaaaattcattaagtgacttcaaaatttacagcaagtcaattattttaaggaagaacaattcttttcaaatcattcaaacaattttagagtggcacatactgaacttttaaggccactttaatagcttacagatcaagtaagtagggagttgagactatagttccacatattttccatataaacacttcataatatttgatagagtattgcaaacaaacacgcatgcacacacacacactttaaggtgatttctgaatcgratatgtgattctcaattcaaatcatcacaaggcaatgtataaacaaataaatatatgcttcacacacactcatacacatacacacaaattctagctgtgtgtatttgtctccctggcctctctttctttcttattttttttggatattggtacattacttgtaatataaagtcaaactcttgagcccagcctccatgttgggccccataagttgatgcagtatacttctccagcaaaatcactcagttttacataac

SEQ ID NO: 300481 - DNA, 544 bp, Homo sapiens
tgaatagagtctttaaaaatcagtttcaaaattcattaagtgacttcaaaatttacagcaagtcaattattttaaggaagaacaattcttttcaaatcattcaaacaattttagagtggcacatactgaacttttaaggccactttaatagcttacagatcaagtaagtagggagttgagactatagttccacatattttccatataaacacttcataatatttgatagagtattgcaaacaaacacgcatgcacacacacacactttaaggtgatttctgaatcggatatgtgattctcaattcaaatcatcacaaggcaatgtataaacaaataaatatatgcttcacacacactcatacacatacacacaaattctagctgtgtgtatttgtctccctggcctctctttctttcttaytttttttggatattggtacattacttgtaatataaagtcaaactcttgagcccagcctccatgttgggccccataagttgatgcagtatacttctccagcaaaatcactcagttttacataac

SEQ ID NO: 300482 - DNA, 583 bp, Homo sapiens
tggtgtaaagttacacttgttaaaaccatgtgatgcaatagtagacgtaaagataaatgaaacagaggaaaaactcttgaaacaggttttaatgcataaaatacagcttttcattatgaaggaaatatggcacatcaatagaaaatgaatgtattatttggtaaatgttgaaaatattcytatttgtaaaaaaatacattcttttcactttatactgtgctttacaataactttcaaatggattaaatagataaatattctaagaactttaaaaaaaggacaaaattagtgactaaatatgttatatctgaaaagaaaagtaatttgtaaacataaaagtaatgtaagaaattacaaggaaaaatatcaatacacatatctgactgcataatattatacatataaaaatcacaaataatgatagaaaggcaaataaaaattgagaaacatacttgaaaagatatgaaaaaatagtaatcttactaaagagttcataaaattaatatttaaacattgagatcatgatatagaaatatatatacagaaatttatatagagaagttcaaatagtaatacaaataga

SEQ ID NO: 300483 - DNA, 632 bp, Homo sapiens
caactcactgcagtgctcttcatagacacatcttgcagcatttttcttaaggctatgcttcagtttttctttgtaagccatcacaagccatagtggtaggtttgccctttggtacagaaggtgagttaaagctggtggaaaaggcttattgcattgcattcagagtaacctgtgtgcatactctagaagagtagggaaaataatgcttgttacaattcgacctaatatgtgcattgtaaaataaatgccatatttcaaacaaaacacgtaatttttttacagtatgttttattaccttttgatatctgttgttgcaatgttagtgatgttttaaaatgtgatcgaaaatataatgcttctaagaaggaacagtagtggaatgaatgtctaaaagatctttatgtgtttatggtctgcagaaggatttttgtgatgaaaggggattttttgaaaaatctagagaagtagcatatggaaaaytataatgtgtcttttttacaatgacttcagctctgtttttagctagaaactctaaaaacaaaaataataataaagaaaaataaataaaaaggagaggcagacaatgtctggattcctgttttttggttacctgatttcatgatcatgatgct

SEQ ID NO: 300484 - DNA, 595 bp, Homo sapiens
gcctatgcaaccttctctatttttttaacaaatcaaacttaataatataactggttaactacaggaactgaagaattagagtatagcagagttgccaatagatgctctctgtctagacttcttttaagatacatgagaacttacataaatagccttagttcttacttttcagctctaaaccaatgcagtctgatcacacttttggtttctctccttggatacctataasatggtctatcgcattcttacagcaaaaccccttactagcttgagggtgtttctggttggggtaaccagtccctgagtgaaaaagaagagcacatttttactgcaaggatgtacctgctattattaccattcaaagagcaagaatgattgtttggaatcatggaatgaaaaggttgaataagacctcagaagtcataacctcgcttgttggagaaaggttgtataagtttgtctgatttcttgcacatagctagaggcagatctgggccctcaaatttcctgaattttgatttaccagtccaaagtccactgacttcttggtaacataaatctgggctgctagagggactatttatttatcaccata

SEQ ID NO: 300485 - DNA, 574 bp, Homo sapiens
gggtcaaggtgcatgactgagccagtactagagaatggggactgttctgtctgggggaattcatgtagacactgacctcatcccagcgaagtcatcctcatgtatttggctgatgggatagaggcagtttctgcacaggtgtcccattgcctacttactgagcctgtccctgaattcagacccacatccccaccctcctgggtatctcatcagctgacagttctcagcctcaagctccaacttttcctgctgatttttcaggccttacttgtctcagccacagtggtccaggccatgcttttactacctaaagtccagccgaaattcaagaccagcccatttagcagaagccctggtgactttctagccttttaaaatctttctcccccagaggcaagaagatatttccaagtactgctaaccccagtccttacatgyctacctcttgctgctgtgttccacccactaaatacaatcccctcgagaccaagacgaactcaacttaaagcttaattggatagatctctttagacattgattattagatttctagctacttcaattagaaagaaat

SEQ ID NO: 300486 - DNA, 620 bp, Homo sapiens
gagcatacaacagcctggtcatctcagccaatactggacaactctgatagaccaatctagctgtggttagcagaggctgttgtctggtctgcactacatcttgacttgccgtcatccccatcctgcttctttgccctgtcttcctcatggcatcattactcaatagcctgaacaagaaacttccagcttcccagaaaatgcaacctgcaataagtatgaaagttagttttctaagctgtcatggtacagtcctaggcttctgcttattatttatatctmaatagcacatatattccattaaattttgttaactttataaattctgccttcctaaactcattgacaaattgtcaggaactgaaaaaagagaagacatgcaattaaagaggtttcttatacgtattttatacacacgtgtgtgtgtgtgcatgtgtgtgtgtatgtacagtcatgtacctcttaataatgcagatactttctgagaaatgtgacattaggttatttcattgtagtgcaaacatcctagaatatacttacagaaacctagatagaatagcctcttacacacctaggctatctggttcagcctatggctcctgggctataaacctgtatagcat

SEQ ID NO: 300487 - DNA, 620 bp, Homo sapiens
gagcatacaacagcctggtcatctcagccaatactggacaactctgatagaccaatctagctgtggttagcagaggctgttgtctggtctgcactacatcttgacttgccgtcatccccatcctgcttctttgccctgtcttcctcatggcatcattactcaatagcctgaacaagaaacttccagcttcccagaaaatgcaacctgcaataagtatgaaagttagttttctaagctgtcatggtacagtcctaggcttctgcttattatttatatctcaatagcacatatattccattaaattttgttaactttataaattctgccttcctaaactcattgacaaattgtcaggaactgaaaaaagagaagayatgcaattaaagaggtttcttatacgtattttatacacacgtgtgtgtgtgtgcatgtgtgtgtgtatgtacagtcatgtacctcttaataatgcagatactttctgagaaatgtgacattaggttatttcattgtagtgcaaacatcctagaatatacttacagaaacctagatagaatagcctcttacacacctaggctatctggttcagcctatggctcctgggctataaacctgtatagcat

SEQ ID NO: 300488 - DNA, 422 bp, Homo sapiens
actgggctgtctgtgtggtgtgcagagatgaaaaatggacacattcctgccctcagggagctcaacctactgggagagatagaccacagcccaaaagtgtgggcaaacctagggctcccttgaaagttataagcaggtgttgtttgtttgttttgagaaagggtctccctctgtcgcccaggctagagtgcaatggcaagatcacagctcactgcagcctcaaagtcccagggtgaagcgatcttcccacttcagcctcccaagtagctggaaccataggctcatgccaccatacccaggtaattttcttttttttagagaccacgtctcactatattgcccaagctggtctcaaactcctgggctcaatcaatcctccygcctcaacctcgcaaagtgctgggattgcaggtgtgagtcat

SEQ ID NO: 300489 - DNA, 569 bp, Homo sapiens
gtatgtcacctcaggaccactgtgatatttgtgttaactgtacaaaatgattgtaaaacatgtgtgtttgaacaatatgaaatcagtgcaccttgaaaaagaacagaataactgatttttagggaacaagggaagacaactataaggtctgactgcctgtggggtcrggcaaaaagagccatatttttcttcttgcagagagcctataaacggatgtgcaagtaggagagatatcgctaaattcttttcctagcaaggaatattaatattaataccctgggaaaggaatgcattcctggggggaggtctataaacagctgctctgggagtttctctcttatgtggttgagataaggattgaggtattccctggtctcctgcagtaccctcaggcttattagggtggggaaaaactccgccctggtaaatctgtggtcagaccagttctctggtctcaaccctgttttctgctgtttaagatgtttatcaagacaatacggggggggggaggagccaagatggccaaataggaacagctccggtctacagctcccagcgtgagtgacgca

SEQ ID NO: 300490 - DNA, 569 bp, Homo sapiens
gtatgtcacctcaggaccactgtgatatttgtgttaactgtacaaaatgattgtaaaacatgtgtgtttgaacaatatgaaatcagtgcaccttgaaaaagaacagaataactgatttttagggaacaagggaagacaactataaggtctgactgcctgtggggtcaggcaaaaagagccatatttttcttcttgcagagagcctataaacggaygtgcaagtaggagagatatcgctaaattcttttcctagcaaggaatattaatattaataccctgggaaaggaatgcattcctggggggaggtctataaacagctgctctgggagtttctctcttatgtggttgagataaggattgaggtattccctggtctcctgcagtaccctcaggcttattagggtggggaaaaactccgccctggtaaatctgtggtcagaccagttctctggtctcaaccctgttttctgctgtttaagatgtttatcaagacaatacggggggggggaggagccaagatggccaaataggaacagctccggtctacagctcccagcgtgagtgacgca

SEQ ID NO: 300491 - DNA, 511 bp, Homo sapiens
tacatttatttctcccttcaatttccattagattataaattttatgagggcacgggtcaatgtttttattyactactatatccctagcacagtatctactacatagatgtttataaagacatgcttatgaacaaattaatgttctttaatcctttgcacctgaatgccttcatccatgaaacaagaatataaaataatttcttctgttcttggggaatgttttaacattgcacattatttgatgctattataaatgatttgcttttctttttcgcttttacttcaactgccaattgttcattgctagtatgagaaatacaactagatcttgcaaattgatttatattctaactaaacttaaattctagtagcttttttatagcttgcttaaggctatgtgtacaatcatgacatctaaagaataaatagttttacttttactttgtaatctgtaagattattccttttacttgtcttatttcattggctaggacctttggaacatgtttaa

SEQ ID NO: 300492 - DNA, 511 bp, Homo sapiens
tacatttatttctcccttcaatttccattagattataaattttatgagggcacgggtcaatgtttttattcactactatatccctagcacagtatctactacatagatgtttataaagacatgcttatgaacaaattaatgttctttaatcctytgcacctgaatgccttcatccatgaaacaagaatataaaataatttcttctgttcttggggaatgttttaacattgcacattatttgatgctattataaatgatttgcttttctttttcgcttttacttcaactgccaattgttcattgctagtatgagaaatacaactagatcttgcaaattgatttatattctaactaaacttaaattctagtagcttttttatagcttgcttaaggctatgtgtacaatcatgacatctaaagaataaatagttttacttttactttgtaatctgtaagattattccttttacttgtcttatttcattggctaggacctttggaacatgtttaa

SEQ ID NO: 300493 - DNA, 511 bp, Homo sapiens
tacatttatttctcccttcaatttccattagattataaattttatgagggcacgggtcaatgtttttattcactactatatccctagcacagtatctactacatagatgtttataaagacatgcttatgaacaaattaatgttctttaatcctttgcacctgaatgccttcatccatgaaacaagaatataaaataatttcttctgttcttggggaatgttttaacattgcacattatttgatgctattataaatgatttgcttttctttttcgcttttacttcaactgccaattgttcattgctagtatgagaaatacaactagatcttscaaattgatttatattctaactaaacttaaattctagtagcttttttatagcttgcttaaggctatgtgtacaatcatgacatctaaagaataaatagttttacttttactttgtaatctgtaagattattccttttacttgtcttatttcattggctaggacctttggaacatgtttaa

SEQ ID NO: 300494 - DNA, 511 bp, Homo sapiens
tacatttatttctcccttcaatttccattagattataaattttatgagggcacgggtcaatgtttttattcactactatatccctagcacagtatctactacatagatgtttataaagacatgcttatgaacaaattaatgttctttaatcctttgcacctgaatgccttcatccatgaaacaagaatataaaataatttcttctgttcttggggaatgttttaacattgcacattatttgatgctattataaatgatttgcttttctttttcgcttttacttcaactgccaattgttcattgctagtatgagaaatacaactagatcttgcaaattgatttatattctarctaaacttaaattctagtagcttttttatagcttgcttaaggctatgtgtacaatcatgacatctaaagaataaatagttttacttttactttgtaatctgtaagattattccttttacttgtcttatttcattggctaggacctttggaacatgtttaa

SEQ ID NO: 300495 - DNA, 601 bp, Homo sapiens
gtaattaagtactgtacctgcttttgctgaccattatattcctagtgcttggcagatttcctggccacaatacataccttactcagcgagcatttactgaatgaagggcatggatgggtaccatggtgatttcaaaaaatggctggccattgagttaataaaacaatttcacttacaaatacttaggaccaaagcaacaaaatacttacaaatacatttaataaaatatttgtaaaactttgacaactacaatgcattgttgaaagacttacataaatggaaaaacattctatgttcatggacgaaaagatttaatattattaagatagtaatactcccctgtcaattcaatccctatcaaaatcttagatatcttttttgcagaaattaacaagctgatcctaaaagtcatgtagggccaaggcaggggattcagaatagccaaaacaatcttgamaaaggcaaacgaagttgaaaaactcacccttcccaatttcaaaacttactacaaagtacagtaatcaagacagtgcagtacagacataaggatagacacataggtgaatggactagaactgaaagtccagaaataaacccaaac

SEQ ID NO: 300496 - DNA, 606 bp, Homo sapiens
tatcaataataacattaaatatgaatacattagatactctaatcaaaaggcagaaattgtcagactgcatttaaaatttttaactatatacagtctacaagaggcacactttagattcaaagagacaaataaactaaaaagtttaaaaatggaaaaagatattccatgcaaacaataatcctaagagagctgaagtggctcattaaggatcaaaaatattaccagagcaaaaaaaagcattatatgaaaaggtcaattaatcaagaagatatagcaattctatacatacctaacaacaaagccccaatacacatgaagcaaaaattgacagaattaaagggagaaacagacaactcaacagtagtagttgatacattcaacatccactctsaataatgaataaacagctagacagaaaagtcagcaagagtatagagaattcaaacaccatcatcaaacaatttaagacatctacagaacattctattgaacaacaactaagtacacatcattttcaagtgcacagagaacattctctaaggcagactacatgctagggcataaaaaaatcatactaaattttaaaaggttgaaagtatgcaaagt

SEQ ID NO: 300497 - DNA, 603 bp, Homo sapiens
ctctgtctcaaaaaaaaaaaaaaaaaaaaaaaagcacacatatacattcagactaagaataaaagaaaatttcctcaccttgctgaagatcatctaggaaaaacttacagctgaactcatacaaataatgaaagatttcccccctaaaatcaggaacaaggcaaggatatccactctcatcacttccattcaatgttgtcatggaatttctagtctgtacaattaggcaacaaaaacaaataaaagcattcmagattggaaaggaaaaagtaaagctgtcttccttcacagacaacataatcctgtgtttagaaattcctcaggaatccattaaaaactactagaactaataaaaagtttaccttgtttacagatttcttcttctccttctaacctattatatttaagtttccagagacctacagaaaagcctgaagtctatcatttaattatttttatatttaagttaatctataaggctatgacttaaaggaatactattagtccttaattcaattgttaattattgtcattttcctaggatggatcagtcatcctattcagtggttatttcctgagtaattccagaaaatatgctgcctt

SEQ ID NO: 300498 - DNA, 612 bp, Homo sapiens
agcagaccataaaggtcagcctcccagattaggtaagggtggaaagtgggtttggaggattaaacagatcaccagcacatagggtaacttttcctcttgctagacatttagtttgcatctgattcttcactattacaaatagtgaacacccttacccagcaaatgtttaactgggggagggrccctgatttgtggtgttttccacggtattcagtatatggtgtgaatacagggacatatacacagtgaactatgtcactattagcaagctaccattgtgaaatcactggatgaggagctgggaagaggtgtgctcagttggttctcatagtcgatcaagccatcacctacacacggttgtgtgtcctcagagttttgtccccatgttggattgcattcttagaataaattcttagatttagaatgactggaacaatagatccaaatactttgtgggatcctgtactggtcagaccctgtaggatcctgtattattttgccacaacaaaatgccatagactgagtggcttaagcaacagaaatttattttctcatggttctggaggctggaagtccatcatcagggtgctagcatggttgggtcctggtgag

SEQ ID NO: 300499 - DNA, 612 bp, Homo sapiens
agcagaccataaaggtcagcctcccagattaggtaagggtggaaagtgggtttggaggattaaacagatcaccagcacatagggtaacttttcctcttgctagacatttagtttgcatctgattcttcactattacaaatagtgaacacccttacccagcaaatgtttaactgggggaggggccctgatttgtggtgwtttccacggtattcagtatatggtgtgaatacagggacatatacacagtgaactatgtcactattagcaagctaccattgtgaaatcactggatgaggagctgggaagaggtgtgctcagttggttctcatagtcgatcaagccatcacctacacacggttgtgtgtcctcagagttttgtccccatgttggattgcattcttagaataaattcttagatttagaatgactggaacaatagatccaaatactttgtgggatcctgtactggtcagaccctgtaggatcctgtattattttgccacaacaaaatgccatagactgagtggcttaagcaacagaaatttattttctcatggttctggaggctggaagtccatcatcagggtgctagcatggttgggtcctggtgag

SEQ ID NO: 300500 - DNA, 509 bp, Homo sapiens
aatcacaataataataattcaaaaataacccatgttaccaccctcaacacaagaatctgcactgttgcatcacatcctccatctacatacacatgtacatattagcccaacgactaactgcctgggcttcgaagtgaactgctgggtctgactcctggcccctcagtcaaggagtggacctgagaccttgggcatgttccttaagctctctgtgcttcccttttctcgtggctgcaatgggaattgccatggtggtgcctattccatagggttgctatgagggctcaaggaggagatacatataaagcatttagaaagtgactgccacagagcaagccataaatgaatggaagctgttcattgtgatatccacagaagtgtttaatttctactacttttctgtgtgtttttgtttttgtctttgttttggttttggtttttgagaaagagtctgtcacccaggctggagtgcagtggcawgaacacagctcactacagcctcagcctcc

SEQ ID NO: 300501 - DNA, 562 bp, Homo sapiens
ctattagtgtagctgtgtatccattagatgaacacccatccctcacgcattagagcaataagtgattgtgccgtgtagctcagcatacttttcaaagaacctttcatgtccattacagtccttggtaaactcaacagccccctgaggtagacgttacaagttattagtatcttcatgttacagaaaaggaacagattcccagagaaggtacgtgccttaccccacagaggcctaaaagcacactagaggcaaaaacaggactagcacgtcggtttcatctacctctttcccctgcaccatcaggctccttctgggaattctccaccacacttcttaagctctacaatgagcccaaccctgtgccaggcactgtaatttaaaaaagaagaaaagaaagtycctcctcagggctccaggttggtggggagaataagtaaaatcttccaatacaattcactcaggtacaatccacagagagaacaattaagaggacactgaattttcccagatgccactgatgacttctatttctagtatacgagggaggaaaaaaatgctactg

SEQ ID NO: 300502 - DNA, 562 bp, Homo sapiens
ctattagtgtagctgtgtatccattagatgaacacccatccctcacgcattagagcaataagtgattgtgccgtgtagctcagcatacttttcaaagaacctttcatgtccattacagtccttggtaaactcaacagccccctgaggtagacgttacaagttattagtatcttcatgttacagaaaaggaacagattcccagagaaggtacgtgccttaccccacagaggcctaaaagcacactagaggcaaaaacaggactagcacgtcggtttcatctacctctttcccctgcaccatcaggctccttctgggaattctccaccacacttcttaagctctacaatgagcccaaccctgtgccaggcactgtaatttaaaaaagaagaaaagaaagttcctcctcagggctccaggttggtggggagaataagtaaaatcttccaatacaattcactcaggtacaatccacagagagaacaattaagaggacactgaattttcccagatgccactgatgacttctatttctagtatacragggaggaaaaaaatgctactg

SEQ ID NO: 300503 - DNA, 617 bp, Homo sapiens
aggatcctgaactttgctgatgctcatgtaatcatgtgcaagctcacagagagaggggtacatgtgagaatgtatatgtgagagagccggtgtgttttcttaataatgggatcctactacgtacatttctaggtatcttgcttttctcacttaaaatatctcagctgagggtggcttgattccttacaggtttgtaattttagatgragtgtctatttcatcgaagctttatctatggaatgtgtggagcctgggttgaggatccagcactccagcaagtgcttctacttcctttgcctggatcccaggccaccaccaagccaactcctcttctgttgtacagtatcccagattgcacaggtagtgtggacctcaaacccaagcagcagcagacctgcagggataaagtcttcaaagagatttgtatttgtgccactgtttctggggttcactgtttttaattgtaaaaagataaagataagctccagaatattatctggaggagaaggagtaagaataaatctcagaactagagaagtatctttagtaagtaagaagaatgttcagggttaagaaagatgatactgggcaggaaagagaaaagagcaaagcaacaa

SEQ ID NO: 300504 - DNA, 469 bp, Homo sapiens
ggtggcttgattccttacaggtttgtaattttagatgaagtgtctatttcatcgaagctttatctatggaatgtgtggagcctgggttgaggatccagcrctccagcaagtgcttctacttcctttgcctggatcccaggccaccaccaagccaactcctcttctgttgtacagtatcccagattgcacaggtagtgtggacctcaaacccaagcagcagcagacctgcagggataaagtcttcaaagagatttgtatttgtgccactgtttctggggttcactgtttttaattgtaaaaagataaagataagctccagaatattatctggaggagaaggagtaagaataaatctcagaactagagaagtatctttagtaagtaagaagaatgttcagggttaagaaagatgatactgggcaggaaagagaaaagagcaaagcaacaagaggtacgccaagaggctaca

SEQ ID NO: 300505 - DNA, 555 bp, Homo sapiens
actccctggtaaatatctggtggtggagcttatctgcatcctgcttaaacattaaacaaaattaaaaggggmattaaagggccgggcacggtgtctcatgcctgtaatcctagcactttgggaggccaaggcaggcagatcatttgaggtcagtagttcgagaccagcctagccaacatggggaaaccccatctctactaaaaatacaaaaattagccaggcatggtagtgggtgcctgtaatcccagctacttgggaggctgaggcaggagaatcgcttgaacccaggaggcgaaggttgcagtgggccaagattatgctgctgcactccagcctgagtgacaaagcgagactctgtctcaaaaaaataaaaaataaattttaaaaaagaggcataaaagactactcaactctaaattaataaagtttaaagtctagatgaaaaagaaaattttctaagaaaatagaatttgcctacagattcctcagaagaccaaaaatttaagtggtccagtttctggagaagaaagttgtcagaacactgcctcctgaaaa

SEQ ID NO: 300506 - DNA, 624 bp, Homo sapiens
ttctggaaacttcctcagtactatggtcttccccacatactatttctttccrtggcagtagcaagttggccaattatttttttatcagcctcaagctgctactgatgtctcaggcagttcagcacaaggcttaagacctgggttcaagtaagacccccgtactcactagatgtgcaacctcagataattccccaagcttcattgtcctcatctaagaaaaggagataacaatggcacttacctcttagtttaatgctggtgcatgaagtatgcctggcacagggtaagtgctcaataaatgttaacgtctattgttcctatgaaatataatgatatgattgttttatttgcactttttcaatcattaaaaaaagtcactttccaaatagcatccttgcgtgacaataatcagatatgggaagatacggcagcacacatttccagattaagattcactttttccttcagaacagaggctttatttttgaagggatgccctcatatttgtaacattttttgtctcttggaccagaagaaggtactgagttattagggtgtcaaaatccaggaagtaataaagtcccaaacaaacaaacaaacaaaaaattaaaaattaaagtccca

SEQ ID NO: 300507 - DNA, 564 bp, Homo sapiens
tctctctgcaaccagaggaatttctaacaaatgctaggagcctctcataatcaacttcagattattaagcaataaagaatagctgtgaactgttgtttgtaatgtgttttatttaattacttgtttrttctgaggtaacttctcattgaaaatgtggtaaggtgctccctcttttccactagtgagatctgaaagcaaagctttgaaaacagacaaacctagaaaacatctgcacctgacatatgccaggtccccacacgggctttggtacattatctcatttaatcttcacaacatgatgacagagaaatagtggaacatccttaacacaacaaatcccataggctcaaagcagttaaatttccatgagagacagctgacttaataccctgagctgtactttcccattcaagttccctggctttaattaccatcccagtaatacccaaggtgacagtttctctcttaatactctgacacctcccttccaggaccaatgtactttcccttggttcctctgaccatagctggaacaagataaaactttcaaaagacattactaat

SEQ ID NO: 300508 - DNA, 564 bp, Homo sapiens
tctctctgcaaccagaggaatttctaacaaatgctaggagcctctcataatcaacttcagattattaagcaataaagaatagctgtgaactgttgtttgtaatgtgttttatttaattacttgtttgttctgaggtaacttctcattgaaaatgtggtaaggtgctccctcttttccactagtgagatctgaaagcaaagctttgaaaacagacaaacctagaaaacatctgcacctgacatatgccaggtccccacacgggctttggtacattatctcatttaatcttcacaacatgatgacagagaaatagtggaacatccttaacacaacaaatcccataggctcaaagcagttaaatttccatgagagacagctgacttaataccctgarctgtactttcccattcaagttccctggctttaattaccatcccagtaatacccaaggtgacagtttctctcttaatactctgacacctcccttccaggaccaatgtactttcccttggttcctctgaccatagctggaacaagataaaactttcaaaagacattactaat

SEQ ID NO: 300509 - DNA, 564 bp, Homo sapiens
tctctctgcaaccagaggaatttctaacaaatgctaggagcctctcataatcaacttcagattattaagcaataaagaatagctgtgaactgttgtttgtaatgtgttttatttaattacttgtttgttctgaggtaacttctcattgaaaatgtggtaaggtgctccctcttttccactagtgagatctgaaagcaaagctttgaaaacagacaaacctagaaaacatctgcacctgacatatgccaggtccccacacgggctttggtacattatctcatttaatcttcacaacatgatgacagagaaatagtggaacatccttaacacaacaaatcccataggctcaaagcagttaaatttccatgagagacagctgacttaataccctgagctgtactttcccattcaagttccctggctttaattaccatcccagtaatacccaaggtgacwgtttctctcttaatactctgacacctcccttccaggaccaatgtactttcccttggttcctctgaccatagctggaacaagataaaactttcaaaagacattactaat

SEQ ID NO: 300510 - DNA, 477 bp, Homo sapiens
atacatggtgtgtggaaggggtgtgtgtttgtatataaaatatgtgtgcatataattggtgagacacctctgccaaaataggccatgctgtaaaatactcagaaaagtttcacctgcctcatggggcattcaggattagggaagctgatacaaacacaaaagagagcctaggcactaagttagagagaccaagagagctgactaatttaaaatatccatatatacaattaagttttaaaagcaggtactagaacaacatgtatgatcccatttaaatagaactgcartagaatagtatgtggaccaaggataggatattaacagaggtcatctctggataatgaggttttctttcctgagtgcctaaaatgaatatggatcgtttttataggcaaataaaattaataatgctatcttcattttgttaaaaaatgaattaagtaattaggaaaattaagacagcctccagcccccaag

SEQ ID NO: 300511 - DNA, 615 bp, Homo sapiens
ctattgtgagactacaattaatttagcctcatttttgtgatgaaatttgacacaattaacraacacttgccaataataagaatcaaccaggtatattcttaattgattccagttcagtttagagggtaatggctccacatatcttcagaatctaatgaagattagaaaccttgtcccaaaaaaaacacacagacacacatgtacaatattctacatacaacttcagggggcccattaaaacccccaagcctactggaacccaggttaatgcatgtcccaggaatttaatctttttcaattcaccatgtatttttaaagaaatggaattgtgtcagagtgtatgtagttgacacttcagttataaattctctcaggaaagacctagaaccacattcacatggtctggttaggttggtagcgagattaattaatcacaaaggcaaccaacagtgtcatgaacctcatgccacatagaatggcatatttcagcatgcagtcaggggtgtttcaaaatcatcatgtagtccttgagactgtaatacccatgcctggaacctgttacaacctggaggcatgaaaatggctctgctcacagatagacctgggtctgaaagc

SEQ ID NO: 300512 - DNA, 536 bp, Homo sapiens
tgggctgtcttgcttaggaactcctggggtgttgcaacccgttttttctgccattgggttagttacaacaaatgccaataagtcacctccactttgtctcacttgttctttgcagcagcagctcagccttggaaggacgttgcctgagaaatkaagaagctcattaacttgggtcggtagattggacagtgtagcacctgtagaccttgaatcttaagatgccttgtgtgatcagccagagaaatgaaaactaatcaggagggtgaaactgcaatggggcccgcagtgaatagtgaggaggcacagccaacaggctgaggcccagactcagtggtagcccttgcaacccagcttgactggcctgtgctgggaaatgcagctggcctaagaaatgattaaatcctcaaacgtctaggacaaacattccaaccatcctaccagactagatcatgtacatatatatccatttgtcccacaagggaatttcagaaaaaaagtgacgtctcattgaactaatgaagatgtcgttctcccac

SEQ ID NO: 300513 - DNA, 536 bp, Homo sapiens
tgggctgtcttgcttaggaactcctggggtgttgcaacccgttttttctgccattgggttagttacaacaaatgccaataagtcacctccactttgtctcacttgttctttgcagcagcagctcagccttggaaggacgttgcctgagaaatgaagaagctcattaacttgggtcggtagattggacagtgtagcacctgtagaccytgaatcttaagatgccttgtgtgatcagccagagaaatgaaaactaatcaggagggtgaaactgcaatggggcccgcagtgaatagtgaggaggcacagccaacaggctgaggcccagactcagtggtagcccttgcaacccagcttgactggcctgtgctgggaaatgcagctggcctaagaaatgattaaatcctcaaacgtctaggacaaacattccaaccatcctaccagactagatcatgtacatatatatccatttgtcccacaagggaatttcagaaaaaaagtgacgtctcattgaactaatgaagatgtcgttctcccac

SEQ ID NO: 300514 - DNA, 606 bp, Homo sapiens
cttggctgtaggtaacatgaactacaaggcagctgcagcctgcgtcaccctgaagagagcatccattgctcaactcccaacatggccactgcctgaagatctcattaccactgctgcccacagtgctgtctccctctcctcctttgagtctttgctcaaatgtcactttctcaacaaggccactgmctgaagatctcattaccactgctgcccacagtgctgtctccctctcctcctttgagtctttgctcaaatgtcactttctcaacaaggccaccttatttgaaaccaccatccccttccccagcactctggatttctctcatcctgttacaccttttcctctgttctacgttttcccctgacactgatttccttctaacaaatcatgtaagatccaatccaagatctaagatgcagggactttttatctaatttgccacaggtatatgtagcctaagcacctagaaaagcactcatagcaggctcccaataaacatttgttgaaagaatgactgaatgagtaaatggcagtagccaccaattcctcttccagtgttttacccactatttttgtgtacaaggtctaagaggtaatagaggagg

SEQ ID NO: 300515 - DNA, 561 bp, Homo sapiens
ggtcagctaagtttaatgcctaggaccggtcaagtaagagaaggactaatacttgactattagacttagtaatgttcaggtcactggttaccctaactagtgagtttatacagaggacaaaaggcaaaacctggattagagtaggtttgagagaaaatggggagattttggagacagagagtttagagaactatttgtagataatctgctgcayacagatgcagagcaatggggtagcagctgatagataaaaggcgtcaagagaaccttttctaaggtggcagcaataacagcatgtttgcatgctgatgggaatgataacaatctagagggaaaatgaatgatgcagaaaaggaaagggagaattaccaaagtgatgttcttgactagggatgagctgaggtccctagacaacaggcattggaaactagtgcaaaaatcgatgtcccacaaatagcaccataatccacctaataacatgagcaaaacacccgagtcatcttcattcctacttagcctctcttgctcacaagacacatatgcacacgagcacacagaaac

SEQ ID NO: 300516 - DNA, 614 bp, Homo sapiens
gaggcctcatttatacatcaacgtagccattgtttactgggcacctattatggaggcgatagaccctgtgtactcttcaacagagaccacctcggagctccctctcaattgccgatgagcttttaatccagtgcaggtgaccttgaggtgcctcagactcctgctccctgctttgggccactttatgtaggtttaccttttccacrgaggtatggcagcacttccattcatttgtccagttttctagttcagaaagtttgcgggagtatttttcctgataataatgctaacaagttatcacttaaattttttgaaaaattaataagagaaaaataatggtcatctatacttctactacccaggaaaaatgagcatatcctcttcaaggctttgttatttctttttccctttatttttagtgttggtcaaagggctcaggagaggacttggttgaaactagtgtatacagaagggaatgtggggttttctaattattcaagcttgcattgtcctttatgccgaaaaccggtggaaaggaactcgagatggattactaacagcttcaggcttggagcctgtttccagcactttgctcaaatcattgtccacatgtt

SEQ ID NO: 300517 - DNA, 604 bp, Homo sapiens
ccagtgaccactctctccatggcctatactttgcactttctcagtaaatcttgctgaacaaaaagtgagaagccagtgaacataaaagcacattttagggaagagtttgacatcaaacaaataccagcagcaggaaaacagctccacctcctttccatatccagcctctgtctaagacctcccctacctgaaagttagcaggaacatcagggaaaaaaaaataaaaccaaaaaaaaaaagccttaagtctttcaggttgcacctgcaaacaggtcctggaaatgggttgtggttgcacaagggcaatgaaattaagtgaatgtgtagttccccttgtggttcatttatgcacrcactcccaaaccccacgaccacacagagttgatgaatcacttgttcttctgtttaactgaatgtctaagacaagatatcattcccattgctgaaaacatccagaaaattcattaacaggatgacataatacagaagcatgctcacttagtatgaccctgtaactgtagataccagcttatcgagttggcatactttaattatgaactgcaagatagataaaactcaatatccaatttatgaaaatgcaaac

SEQ ID NO: 300518 - DNA, 536 bp, Homo sapiens
cagcatccccagtcctcctccaatccctgctatttttttttcccatagcacttatcacttctaatatacagcataattttcctccctttttatgtattgtctgtcttcctctccaggaatctaagctccacgagagcaaggatttttgtctgttttgttctattgatgcatccacaaggcctagaacagtgcctggtacataataggggctcaataaatattttttaaactagtggagagatattaataatataaaattttcccaagtcatccctttatcacttatgagaattgcatctatcatcccacttgcagttttagctaaaactgaggttcatgctaatcmttaaccttgaatggtactcagactttgaaacaaagaataactaaaggccctagcacttcatcctcaaaccatgccccttctgttatgatcacagatgagctcttctggaaaaattcctcacacagggcctcaggatcccccatccctgaaatttccaggtgatgtctttccctctcaagtgtagagtgga

SEQ ID NO: 300519 - DNA, 536 bp, Homo sapiens
cagcatccccagtcctcctccaatccctgctatttttttttcccatagcacttatcacttctaatatacagcataattttcctccctttttatgtattgtctgtcttcctctccaggaatctaagctccacgagagcaaggatttttgtctgttttgttctattgatgcatccacaaggcctagaacagtgcctggtacataataggggctcaataaatattttttaaactagtggagagatattaataatataaaattttcccaagtcatccctttatcacttatgagaattgcatctatcatcccacttgcagttttagctaaaactgaggttcatgctaatccttaaccttgaatggtactcagactttgaaacaaagaataactaaaggccctagcacttcatcctcaaaccatgccccttctgttatgatcacagatgagctcttctggaaaaattcctcacacagggcctsaggatcccccatccctgaaatttccaggtgatgtctttccctctcaagtgtagagtgga

SEQ ID NO: 300520 - DNA, 524 bp, Homo sapiens
ttccctctctggaggacttcgtcttgtttcagagcttggcacctggtcgcttctctcagagtcaggagctctcatccctggcaggaaccaacccctggctttctcactctctcaacaccccaaagctcttaaagccctagaagggtcccaggtaactaaccacagctccttcacccacaaagcagtgcagaaagccagagctggctcaagtaaagggagtcccaagtgtgaaagtcaatctccgcgaacatgaaagctgccctggcagttaataaggggagcyctgagcttctgattctatgggaaggcaagatggctgggaccatctcagtccagaagcaggctaagcctcccttagccctcaatgcagacttaaatagaaaacacgcagccctgcccaagaggggcagtgcacactccaaacatccactgcagcagctcgctaggttgagagggttttgactgaaaccaaagagaaggcatcgtggcacacactccttggagtgttacagtgcccctccctt

SEQ ID NO: 300521 - DNA, 559 bp, Homo sapiens
agcaaaaatccagttaagtcagtttagcaagaatttctctacccttgatgtctcttcctagtaacttttcatcctccgaccacctccctttccccraaccctgctccttggttataaatccccgtttttccatgttgtattcagaattgagctcagttcaatactgaggtgtcttttcccctattgcaataatttctaaataaaatctgtgtttagtactttactgtctggctctcgttctccttaacggtatgtatgtgtatattatatgtgaatatatgtatatgtatatgtatatgactcatttattttattcatcatctatctttcccactaaattgtaaatcctgaaggcaggagactttgcctgccttgttgcctctatgtctccaatacctacaagagtgcctagcacacatagtaagtgctcggttaacatttattgagtgaataaacacatgcacgcatgaatccagctccaaagcttgcactcttaatcactatgttttattgtgtttctataaatgatcattctttttaccttatttaaatataaatt

SEQ ID NO: 300522 - DNA, 559 bp, Homo sapiens
agcaaaaatccagttaagtcagtttagcaagaatttctctacccttgatgtctcttcctagtaacttttcatcctccgaccacctccctttccccgaaccctgctccttggttataaatccccgtttttccatgttgtattcagaattgagctcagttcaatactgaggtgtcttttcccctattgcaataatttctaaataaaatctgtgtttagtactttactgtctggctctsgttctccttaacggtatgtatgtgtatattatatgtgaatatatgtatatgtatatgtatatgactcatttattttattcatcatctatctttcccactaaattgtaaatcctgaaggcaggagactttgcctgccttgttgcctctatgtctccaatacctacaagagtgcctagcacacatagtaagtgctcggttaacatttattgagtgaataaacacatgcacgcatgaatccagctccaaagcttgcactcttaatcactatgttttattgtgtttctataaatgatcattctttttaccttatttaaatataaatt

SEQ ID NO: 300523 - DNA, 559 bp, Homo sapiens
agcaaaaatccagttaagtcagtttagcaagaatttctctacccttgatgtctcttcctagtaacttttcatcctccgaccacctccctttccccgaaccctgctccttggttataaatccccgtttttccatgttgtattcagaattgagctcagttcaatactgaggtgtcttttcccctattgcaataatttctaaataaaatctgtgtttagtactttactgtctggctctcgttctccttaacggtatgtatgtgtatattatatgtgaatatatgtatatgtatatgtatatgactcatttattttattcatcatctatctttcccactaaattgtaaatcctgaaggcaggagactttgcctgccttgttgcctctatgtctccaatacctacaagagtgcctagcacacatagtaagtgytcggttaacatttattgagtgaataaacacatgcacgcatgaatccagctccaaagcttgcactcttaatcactatgttttattgtgtttctataaatgatcattctttttaccttatttaaatataaatt

SEQ ID NO: 300524 - DNA, 559 bp, Homo sapiens
agcaaaaatccagttaagtcagtttagcaagaatttctctacccttgatgtctcttcctagtaacttttcatcctccgaccacctccctttccccgaaccctgctccttggttataaatccccgtttttccatgttgtattcagaattgagctcagttcaatactgaggtgtcttttcccctattgcaataatttctaaataaaatctgtgtttagtactttactgtctggctctcgttctccttaacggtatgtatgtgtatattatatgtgaatatatgtatatgtatatgtatatgactcatttattttattcatcatctatctttcccactaaattgtaaatcctgaaggcaggagactttgcctgccttgttgcctctatgtctccaatacctacaagagtgcctagcacacatagtaagtgctcggttaacatttattgartgaataaacacatgcacgcatgaatccagctccaaagcttgcactcttaatcactatgttttattgtgtttctataaatgatcattctttttaccttatttaaatataaatt

SEQ ID NO: 300525 - DNA, 537 bp, Homo sapiens
cagggtaggggccaggcatggtggctcatacctgtaatccttgcactgtggggggccaaggtgagaggattgcttgaggccaggagctcaagaccagcctgggcaacatagcaagacctgggtggcatacacctgtggtccctactacttggtaggatgaggtgggaggattgatcacttgatcccaggagtttcaggctgcagtgagccatgatcacaccactgcacttcagcctgggtgacaggagccagaccatgtcacaaaaagttasaaaaagaaaaaaaaaacagagagggagagagactatacacaggcaccaccacatttggctaatttttaaatattctgtagagacaaggtcttgctaggttgcccaggctagtctaaaactcctggcatcaggctgggcatggtggctcatgcttgtaatcccagcactttgggaggctgaggcaggcaaatcacctgaagtctgaagttcaagaccagcctggccaacatggtgaaactctgactctaccaaaaatacaaaaatt

SEQ ID NO: 300526 - DNA, 537 bp, Homo sapiens
cagggtaggggccaggcatggtggctcatacctgtaatccttgcactgtggggggccaaggtgagaggattgcttgaggccaggagctcaagaccagcctgggcaacatagcaagacctgggtggcatacacctgtggtccctactacttggtaggatgaggtgggaggattgatcacttgatcccaggagtttcaggctgcagtgagccatgatcacaccactgcacttcagcctgggtgacaggagccagaccatgtcacaaaaagttacaaaragaaaaaaaaaacagagagggagagagactatacacaggcaccaccacatttggctaatttttaaatattctgtagagacaaggtcttgctaggttgcccaggctagtctaaaactcctggcatcaggctgggcatggtggctcatgcttgtaatcccagcactttgggaggctgaggcaggcaaatcacctgaagtctgaagttcaagaccagcctggccaacatggtgaaactctgactctaccaaaaatacaaaaatt

SEQ ID NO: 300527 - DNA, 537 bp, Homo sapiens
cagggtaggggccaggcatggtggctcatacctgtaatccttgcactgtggggggccaaggtgagaggattgcttgaggccaggagctcaagaccagcctgggcaacatagcaagacctgggtggcatacacctgtggtccctactacttggtaggatgaggtgggaggattgatcacttgatcccaggagtttcaggctgcagtgagccatgatcacaccactgcacttcagcctgggtgacaggagccagaccatgtcacaaaaagttacaaaaagaaaaaaaaaacagagagggagagagactatamacaggcaccaccacatttggctaatttttaaatattctgtagagacaaggtcttgctaggttgcccaggctagtctaaaactcctggcatcaggctgggcatggtggctcatgcttgtaatcccagcactttgggaggctgaggcaggcaaatcacctgaagtctgaagttcaagaccagcctggccaacatggtgaaactctgactctaccaaaaatacaaaaatt

SEQ ID NO: 300528 - DNA, 537 bp, Homo sapiens
cagggtaggggccaggcatggtggctcatacctgtaatccttgcactgtggggggccaaggtgagaggattgcttgaggccaggagctcaagaccagcctgggcaacatagcaagacctgggtggcatacacctgtggtccctactacttggtaggatgaggtgggaggattgatcacttgatcccaggagtttcaggctgcagtgagccatgatcacaccactgcacttcagcctgggtgacaggagccagaccatgtcacaaaaagttacaaaaagaaaaaaaaaacagagagggagagagactatacacaggcaccaccacatttggctaatttttaaatattctgtagagacaaggtcttgctaggttgcccaggctagtctaaaactcctggcatcaggctgggcatggtggctcatgcttgtaatcccagcactttgggaggctgaggcaggcaaatcacctgaagtctgragttcaagaccagcctggccaacatggtgaaactctgactctaccaaaaatacaaaaatt

SEQ ID NO: 300529 - DNA, 546 bp, Homo sapiens
tagctgggattacaggtgtgagccattgcacycaactggtgtagccactttagaaaacagtctggcagtttctcaaaaggctaaatgtacagtcatcctataatgcaacaatttcactcctaggcatatatcccagaaaaataaatgtccacacaaaaacttgtacaacaatcttcatagcagcattattcataatgaccaatacatggaatacatggaaacaacccaaatatccaccaactgatgaacagataaacaaaatgcagtgtgtctctaccatggaatactgccatagaaggaatgaaatattgatacacactatgacataaaggaactttgaaaacactgtgctaagagggaaaaaaagccacaaaagatcacatattgtacaattctatttgtccagattaggcaaatctatagtgacaaaaaaattaatcaatggttgcctaaggctgggggcgaaggtaggtggggagagtaggaggtagtggctaaggggtatggatttctctatagggtaatgaaaggttctaaaagtgactg

SEQ ID NO: 300530 - DNA, 546 bp, Homo sapiens
tagctgggattacaggtgtgagccattgcactcaactggtgtagccackttagaaaacagtctggcagtttctcaaaaggctaaatgtacagtcatcctataatgcaacaatttcactcctaggcatatatcccagaaaaataaatgtccacacaaaaacttgtacaacaatcttcatagcagcattattcataatgaccaatacatggaatacatggaaacaacccaaatatccaccaactgatgaacagataaacaaaatgcagtgtgtctctaccatggaatactgccatagaaggaatgaaatattgatacacactatgacataaaggaactttgaaaacactgtgctaagagggaaaaaaagccacaaaagatcacatattgtacaattctatttgtccagattaggcaaatctatagtgacaaaaaaattaatcaatggttgcctaaggctgggggcgaaggtaggtggggagagtaggaggtagtggctaaggggtatggatttctctatagggtaatgaaaggttctaaaagtgactg

SEQ ID NO: 300531 - DNA, 510 bp, Homo sapiens
ttaagtgaaataaggaagaattatggagaatttaaaaatctatgctatttataggcacctagtaacagctcagtaaatattagctgctactattattatttttatggtaatttcactcaattaaaaaytgtcattaaaaattaccattgtcatggaacataatgtctcctacagtataattgtacaatacagatacaaacagatacaatttgtcccttggtatatggggggattagttccagctctcccatttctgtgtataccaaaatccatgcatactcaagttttcgaagtcagtcctgtggaatccacatataacacaaatgggaaaattagtgaggtgtggtgacaagcacctgtagtcccagctacttgtgaggctgaggcaggaggattacttgagcccaggaggttgaggctgcagtgagccataattgcaccactgcactccagtctgggcaacagagtgagacagaaggttgactttttaatagaatttttctgttcact

SEQ ID NO: 300532 - DNA, 510 bp, Homo sapiens
ttaagtgaaataaggaagaattatggagaatttaaaaatctatgctatttataggcacctagtaacagctcagtaaatattagctgctactattattatttttatggtaatttcactcaattaaaaattgtcattaaaaattaccattgtcatggaacataatgtctcctacwgtataattgtacaatacagatacaaacagatacaatttgtcccttggtatatggggggattagttccagctctcccatttctgtgtataccaaaatccatgcatactcaagttttcgaagtcagtcctgtggaatccacatataacacaaatgggaaaattagtgaggtgtggtgacaagcacctgtagtcccagctacttgtgaggctgaggcaggaggattacttgagcccaggaggttgaggctgcagtgagccataattgcaccactgcactccagtctgggcaacagagtgagacagaaggttgactttttaatagaatttttctgttcact

SEQ ID NO: 300533 - DNA, 510 bp, Homo sapiens
ttaagtgaaataaggaagaattatggagaatttaaaaatctatgctatttataggcacctagtaacagctcagtaaatattagctgctactattattatttttatggtaatttcactcaattaaaaattgtcattaaaaattaccattgtcatggaacataatgtctcctacagtataattgtacaatacagatacaaacagatacaatttgtcccttggtatatggggggattagttccagctctcccatttctgtgtataccaaaatccaygcatactcaagttttcgaagtcagtcctgtggaatccacatataacacaaatgggaaaattagtgaggtgtggtgacaagcacctgtagtcccagctacttgtgaggctgaggcaggaggattacttgagcccaggaggttgaggctgcagtgagccataattgcaccactgcactccagtctgggcaacagagtgagacagaaggttgactttttaatagaatttttctgttcact

SEQ ID NO: 300534 - DNA, 565 bp, Homo sapiens
ccgttgtgatatccttccccctgcccccccgcctttttgttttgttttgttttgttttcattatttatttgtttgtttgtttgtttgagatggagtcccgctctgttgcccaggctggagtgcaatggtgccatcttggctcactgcaacctccgcctccaggttcaagcgattctcctgcctcagcctcccaagtagctgggattacaggtgctcaccaccacgcccagctaatttttatatttttagtagagatggggtttcaccttgttggtcaggctggtctygaactcctgacctcaggtgatccacccgcctcgacctcccaaagtgctgggattacaggtgagagccaccgcgcccggcttttttttttgtttgtttgtttttacattccttctttaatcctgatagctgataatttcctttattaaaaaaaaaagttgggattgtccaattttaatttttgaattctattttatccaacatccctgtgcgtgtttgggggcactggatgagggggtagctaccttagtccagtctttcatgttgccagaagttcccc

SEQ ID NO: 300535 - DNA, 571 bp, Homo sapiens
ggttgggggagttagggtctagactcaagtagttgtaaacatgttcttcacctgccagaatggtcagagtggcataagaagatcattatttattctctgtagggcttccagcatcatggccctcaactgcyagaatgccgttagtgccctccagccatggtgactccccaaacaccccatcatttaagaacttccaaacaccttctgtggtggagttctgcccactgggactcattgacctagaatcctttttcttttttttgagacagggtcttgttctattgcccaggaggctggttttgaactcctgacctcgagtgatcctcctgcctcagcctcccagagtgctaggattataggcgtgagccaccacacctggcctgacttagaatgttagacctgaaaaaagttaataatcttgttacacatctcagtccagacaaaaaactgtgttgacagaaagactagagaaagttgatacaaagacatctaaaatggccaagaggacatagagattatgggacagattagaaaaatgagacacagaggggcagtgggcagtttcaaaaca

SEQ ID NO: 300536 - DNA, 571 bp, Homo sapiens
ggttgggggagttagggtctagactcaagtagttgtaaacatgttcttcacctgccagaatggtcagagtggcataagaagatcattatttattctctgtagggcttccagcatcatggccctcaactgccagaatgccgttagtgccctccagccatggtgactccccaaacaccccatcatttaagaacttccaaacaccttctgtggtggagttctgcccactgggactcattgacctagaatcctttttcttttttttgagacagggtcttgttctattgcccaggaggctgrttttgaactcctgacctcgagtgatcctcctgcctcagcctcccagagtgctaggattataggcgtgagccaccacacctggcctgacttagaatgttagacctgaaaaaagttaataatcttgttacacatctcagtccagacaaaaaactgtgttgacagaaagactagagaaagttgatacaaagacatctaaaatggccaagaggacatagagattatgggacagattagaaaaatgagacacagaggggcagtgggcagtttcaaaaca

SEQ ID NO: 300537 - DNA, 631 bp, Homo sapiens
tggggacagcttcccctttgcctgtacaggtggagaagccraggacaggctcagggaaccggagaccgagaaggcgctgtcctcttcactgcacgtgccctggaccagtgccggccctgatcatgcagctcttccaggcccactgcttcttcctgtccactaggccacagccgccctccaggcccactatgcacacatcttcccctccaaggtttgttctgcccctgccctgactcccagccctgtgggggtcctgaccgcacctcacctggctcagactcttgacgctgccctggctgccccaccactgcctctgcccgagagtcacgtgaggctgagagtaggggcaggggcagcagtggtgccagttggggggcggtccagtgggaggagcctcagcctcacgggctgctccgtgggactgatgactgcatgatcttctgggcacctcacggatcttcaactgcaggtgaaacggatgctggtggtgggtgcagggccgctgggagctgctgcatggttcccagaggctggactggggcaggtgccaactgaagctgctggggcagcatgggcaggatgttctgcacacaaaccttggagaagacgatgtgtgcatagcgggtccact

SEQ ID NO: 300538 - DNA, 631 bp, Homo sapiens
tggggacagcttcccctttgcctgtacaggtggagaagccaaggacaggctcagggaaccggagaccgagaaggmgctgtcctcttcactgcacgtgccctggaccagtgccggccctgatcatgcagctcttccaggcccactgcttcttcctgtccactaggccacagccgccctccaggcccactatgcacacatcttcccctccaaggtttgttctgcccctgccctgactcccagccctgtgggggtcctgaccgcacctcacctggctcagactcttgacgctgccctggctgccccaccactgcctctgcccgagagtcacgtgaggctgagagtaggggcaggggcagcagtggtgccagttggggggcggtccagtgggaggagcctcagcctcacgggctgctccgtgggactgatgactgcatgatcttctgggcacctcacggatcttcaactgcaggtgaaacggatgctggtggtgggtgcagggccgctgggagctgctgcatggttcccagaggctggactggggcaggtgccaactgaagctgctggggcagcatgggcaggatgttctgcacacaaaccttggagaagacgatgtgtgcatagcgggtccact

SEQ ID NO: 300539 - DNA, 631 bp, Homo sapiens
tggggacagcttcccctttgcctgtacaggtggagaagccaaggacaggctcagggaaccggagaccgagaaggcgctgtcctcttcactgcacgtgccctggaccagtgccggccctgatcatgcagctcttccaggcccactgcttcttcctgtccactaggccacagccgccctccaggcccactatgcacacatcttcccctccaaggtttgttctgcccctgccctgactcccagccctgtgggggtcctgaccgcacctcacctggctcagactcttgacgctgccctggctgccccaccactgcctctgcccgagagtcacgtgaggctgagagtaggggcaggggcagcagtggtgccagttggggggcggtccagtgggaggagcctcagcctcrcgggctgctccgtgggactgatgactgcatgatcttctgggcacctcacggatcttcaactgcaggtgaaacggatgctggtggtgggtgcagggccgctgggagctgctgcatggttcccagaggctggactggggcaggtgccaactgaagctgctggggcagcatgggcaggatgttctgcacacaaaccttggagaagacgatgtgtgcatagcgggtccact

SEQ ID NO: 300540 - DNA, 631 bp, Homo sapiens
tggggacagcttcccctttgcctgtacaggtggagaagccaaggacaggctcagggaaccggagaccgagaaggcgctgtcctcttcactgcacgtgccctggaccagtgccggccctgatcatgcagctcttccaggcccactgcttcttcctgtccactaggccacagccgccctccaggcccactatgcacacatcttcccctccaaggtttgttctgcccctgccctgactcccagccctgtgggggtcctgaccgcacctcacctggctcagactcttgacgctgccctggctgccccaccactgcctctgcccgagagtcacgtgaggctgagagtaggggcaggggcagcagtggtgccagttggggggcggtccagtgggaggagcctcagcctcacgggctgctccgtgggactgatgactgcatgatcttctgggcacctcacggatcttcaactgcaggtgaaacggatgctggtggtgggtgcagggccgctgggagctgctgcatggttcccagaggctggactggggcaggtgccaactgaagctgctgggkcagcatgggcaggatgttctgcacacaaaccttggagaagacgatgtgtgcatagcgggtccact

SEQ ID NO: 300541 - DNA, 489 bp, Homo sapiens
ctaatttttgtatttttagtacagacggggcttcatcatcttggccaggctgatttcgatctcctgacatcgtgatcygcctgcctccccctcccaaagtgctgggattacaggcgtgagccaccacgcctggccaaggcctgctcctcttatctataccccctacccctgcagctgtgccgggggaaagctgggcagtttccctcctccgagcccctgtacataccatgaattgtgggaccttcagagcttttcacttttcggaaaatagctcctgctggggctacaagatggagtgtgaagagggccttgggccacagggaggcgcctgtggactaaggggagttcatgcaccccttctttccccagaggggctggactcaggtgagtatgggggtgggggctcctgcacttcgacacaggcagcggaagggttttctccccattccctctgcactcccaacttgagctatactttttaagaaagtg

SEQ ID NO: 300542 - DNA, 489 bp, Homo sapiens
ctaatttttgtatttttagtacagacggggcttcatcatcttggccaggctgatttcgatctcctgacatcgtgatctgcctgcctccccctcccaaagtgctgggattacaggcgtgagccaccacgcctggccaaggcctgctcctcttatctataccccctacccctgcagctgtgccrggggaaagctgggcagtttccctcctccgagcccctgtacataccatgaattgtgggaccttcagagcttttcacttttcggaaaatagctcctgctggggctacaagatggagtgtgaagagggccttgggccacagggaggcgcctgtggactaaggggagttcatgcaccccttctttccccagaggggctggactcaggtgagtatgggggtgggggctcctgcacttcgacacaggcagcggaagggttttctccccattccctctgcactcccaacttgagctatactttttaagaaagtg

SEQ ID NO: 300543 - DNA, 489 bp, Homo sapiens
ctaatttttgtatttttagtacagacggggcttcatcatcttggccaggctgatttcgatctcctgacatcgtgatctgcctgcctccccctcccaaagtgctgggattacaggcgtgagccaccacgcctggccaaggcctgctcctcttatctataccccctacccctgcagctgtgccgggggaaagctgggcagtttccctcctccgagcccctgtacataccatgaattgtgggaccttcagagcttttcacttttcggaaaatagctcctgctggggctacaagatggagtgtgaagagggccttgggccacagggargcgcctgtggactaaggggagttcatgcaccccttctttccccagaggggctggactcaggtgagtatgggggtgggggctcctgcacttcgacacaggcagcggaagggttttctccccattccctctgcactcccaacttgagctatactttttaagaaagtg

SEQ ID NO: 300544 - DNA, 489 bp, Homo sapiens
ctaatttttgtatttttagtacagacggggcttcatcatcttggccaggctgatttcgatctcctgacatcgtgatctgcctgcctccccctcccaaagtgctgggattacaggcgtgagccaccacgcctggccaaggcctgctcctcttatctataccccctacccctgcagctgtgccgggggaaagctgggcagtttccctcctccgagcccctgtacataccatgaattgtgggaccttcagagcttttcacttttcggaaaatagctcctgctggggctacaagatggagtgtgaagagggccttgggccacagggaggcgcctgtggactaaggggagttcatgcaccccttctttccccagaggggctggactcaggtgagtatgggggtgggggctcctgcacttcgacacaggcagcggragggttttctccccattccctctgcactcccaacttgagctatactttttaagaaagtg

SEQ ID NO: 300545 - DNA, 625 bp, Homo sapiens
attttctggaaagatgtacaagacttaaagtggtcactggggataagggtggaggagagggactgtcactttttatactttttattatgtgcatgaactacttaaaattttttttaaaacaaagtgaatctttaatgtttataagaaaaaatgtgtataggagaaaagataggaaagaaatattccaaatgctagcaagtgacagatgtattgacaatgaagtcatgcgkgattattttcttttttcaattctttcccaaattttttggtaaagtgatgatataattttataccaaagataacttaaaaaaatagaaccatgtaaaagctaaagaaacccttcagagatgtttttggaaagaaaaatttaaatgaaataagcaaataaatacatatgctcctcccaaatgtatcattttgggaaaaatatctggatttccataccttgttttgcataaagcagggctgacccagactccctctgtccttttggtgctggcggtcgtgattgctgctggcaagtataggaatcagagagctgagcaaataacattttctgtcatccatgctggcccaagtctgtttctggggtaataagctgggaaacagcagtgaggttttagaa

SEQ ID NO: 300546 - DNA, 608 bp, Homo sapiens
acatgacaagctacatgacaaaattagagacatttttaagcaccacaggaaatatatttttcagactgcatcacagttcctcaaaatatcacctgtgattgattgtcatgatgtgctaagtcaggcacgtgccttgaatgcccaagtggctgctgtagttgactgctgtggcagtaaccatgacacaaaatacatgtggatgggattattttaaattcacaagtgcttacaaaaagaaaatgacaaattcaagtccattaactctcacctcaggccacagtctgagcaccacagctttcacgcccagtctaaaagcagctcttactttttgtagctacaaagttagtactgctgaaactcgtataccaaacttagttgtgtgacttgctgaattacaaacaacaggtgaatttacagtccctccacacttctcatgtgaaagttaggaaactgamtggtaaagaatgggattctgaaacttggaaaggagacacctggttggacctaaatgaacatgagtccatcatacttcaaaaagacaaagccagaaaaaaaaaaattcaaggcagctttaaaataaatcctcattttgaaaagaattaagattt

SEQ ID NO: 300547 - DNA, 438 bp, Homo sapiens
tggtggttcacgtttgtaatctcatcattaagggaggccaaggagagaggatcacttgagaccaggtttgagaccatagagaagctctatatctacaaaaaaaaaaaattgtayagaattaagcccttcagaaaattatctgagtgcccatcttcttaattatcctaagggcggtatatagctagaaccattattaatgtagaggaaagaattcattacatataacgaatagctttaggcttaattctcttgaggaacccctactgagaagggctgttttagatacaacttccaattagaggaaatacagagaaaagaaaaacatgctaaaggaaacgaaggagaggcaatcagaaaatcataaaggtaagataattctataaaatgactggtacaatctcttcaacaagtcatgttattttaaacaaggaacagaat

SEQ ID NO: 300548 - DNA, 534 bp, Homo sapiens
aactttggttataacagaccatctggtattacatcaattcataaactaccagaaaagattcactaagaccaggcacagtggctcayacctataatcccagcactttgggaggccgaggcgggcagatcacttgagatcaggagtttgagactaacctgactaatatggtgaaaccccatatctactaaaaatacaaaaattagccaggcatggtggcacacacctgtaatctcagctacttgggaggctgaggcaggagaatcgcttgaacccgggaggtggatgctgtagtgagccaagaacacactactgcactccagcctgggcaacagagcaagactgtctcaaaaaaaaaaaaaaaaaaaaaaaaaaaaaaaaacaacacaaaaaattcactaaatactccctacaaagaacctttttaaagacaccaaagctaaaatatgaggccacagttcccagaaagaagggaatggaagagcagagagttcagttcactctttggctccacttttcccctcatggcatttgcca

SEQ ID NO: 300549 - DNA, 534 bp, Homo sapiens
aactttggttataacagaccatctggtattacatcaattcataaactaccagaaaagattcactaagaccaggcacagtggctcacrcctataatcccagcactttgggaggccgaggcgggcagatcacttgagatcaggagtttgagactaacctgactaatatggtgaaaccccatatctactaaaaatacaaaaattagccaggcatggtggcacacacctgtaatctcagctacttgggaggctgaggcaggagaatcgcttgaacccgggaggtggatgctgtagtgagccaagaacacactactgcactccagcctgggcaacagagcaagactgtctcaaaaaaaaaaaaaaaaaaaaaaaaaaaaaaaaacaacacaaaaaattcactaaatactccctacaaagaacctttttaaagacaccaaagctaaaatatgaggccacagttcccagaaagaagggaatggaagagcagagagttcagttcactctttggctccacttttcccctcatggcatttgcca

SEQ ID NO: 300550 - DNA, 534 bp, Homo sapiens
aactttggttataacagaccatctggtattacatcaattcataaactaccagaaaagattcactaagaccaggcacagtggctcacacctataatcccagcactttgggaggccgaggcgggcagatcacttgagatcaggagtttgagactaacctgactaatatggtgaaaccccatatctactaaaaatacaaaaattagccaggcatggtggcacacacctgtaatctcagctacttgggaggctgaggcaggagaatcgcttgaacccgggaggtggatgctgtagtgagccaagaacacactactgcactccagcctgggcaacagagcaagactgtctcaaaaaaaaaaaaaaaaaaaaaaaaaaaaaaaaacaacacaaaaaattcactaaatactccctacaaaraacctttttaaagacaccaaagctaaaatatgaggccacagttcccagaaagaagggaatggaagagcagagagttcagttcactctttggctccacttttcccctcatggcatttgcca

SEQ ID NO: 300551 - DNA, 488 bp, Homo sapiens
agctagaaaagtcagaatttcccatatcaagaaaaaatcattttcatgagacgggtaaagaaagaacaagtctaatttacctcaaacagaaaaagtaattttttaagtcatcaactaccttaacttcttttatctaatcctttatgagaattttacaaaacgagataaattgctagatttgttacaacaaattacttcttgataattttctcggacartgggaagaaaaatggtttgaaaggatactaattaagaaaaaaataaactgaggggcacataagataaccatcactacctaaaaatatttttcaatataacttcttttgcaagatggcctgaaacacagaaaccaagatgaaatcaaacttagctaatatcttcaccaaagcagtgataaaacaactcccatcctccaaaaaaaaaaaaaaaaattgtaaaagaaaagtaatcataaatctcctagcaagctcccagattcacaaaataca

SEQ ID NO: 300552 - DNA, 598 bp, Homo sapiens
gctaattttttgtattttttagtagagacggggtttcaccgtgttagccaagatggtctcgatctcctgacctcgtgatccacccacctcggcctcccaaagtgctgggattacaggcgtgagccaccgtgcccggcccttataattctatttttaaaaagcagaagatatcagaaatggggatcccccagtcctgactcaaccccttcaactctcaagtaaggaaactgaagctgggattcttctgtggcttgcagctgaatcctgactggaattggacctagaaccctgggagaatgctgggagaacagaggacatggtgtttgccagggcctccaaggacacagtcatagakagggggctgtgaatatggcaacacagcagcagtaaaagttagcttccaaagaagacaggaaaatctttttactgcagaggtgacatttgagctggtaacaaaacaaccataggtgtttgccaggaggagaaaatgtaagctaaaaaggtaaaaatctagggatcagtacatatgaccacagatcagtacatgtaacacagaggggtgtttctcaaccacaaaagattatattgaggagagagg

SEQ ID NO: 300553 - DNA, 591 bp, Homo sapiens
atcttgttgtttaagttaacaagtcacaggatcaagaaacacttcatctacaccttcatctagatgagatcctagaatttaggtctcacatgactggataagatttttggtcttccttgaggaggggctgtgtgttgtgtgtaatataggagcagatattcatgaccaattcactttccctacttatgagagtattataccatccatgtttgccactctgtaggtagagtatgcttctccagtctcatgttaggcttgtccatgtgatttgctttggtcaatggtatatgaacaatttgatttacaccatattcaagcaggagtctgaatgtgcttgcatggtatggtttgtctcttgctcctgctcttcactataaaaagtgtatgtcccaagtaggaactattccatcagtctagtgccagagaaagaagactgtggarcagagccaagccaagcaagccaaggtgagtcgagcagagctgcggctaactcctagacccatgaacaagaaacgtttgtcaaaagtcactaagatctggagtttattgcttgtattagtctattctcagggaacactctgggggtaaaat

SEQ ID NO: 300554 - DNA, 591 bp, Homo sapiens
atcttgttgtttaagttaacaagtcacaggatcaagaaacacttcatctacaccttcatctagatgagatcctagaatttaggtctcacatgactggataagatttttggtcttccttgaggaggggctgtgtgttgtgtgtaatataggagcagatattcatgaccaattcactttccctacttatgagagtattataccatccatgtttgccactctgtaggtagagtatgcttctccagtctcatgttaggcttgtccatgtgatttgctttggtcaatggtatatgaacaatttgatttacaccatattcaagcaggagtctgaatgtgcttgcatggtatggtttgtctcttgctcctgctcttcactataaaaagtgtatgtcccaagtaggaactattccatcagtctagtgccagagaaagaagactgtggaacagagccaagccaagcaagccaaggtgagtcgagcagagctgcggctaactccyagacccatgaacaagaaacgtttgtcaaaagtcactaagatctggagtttattgcttgtattagtctattctcagggaacactctgggggtaaaat

SEQ ID NO: 300555 - DNA, 602 bp, Homo sapiens
tcagtcacttactgccccagggtgaatccgatgaacttgttcctgctcatctccaagaagtgctcaatgtccttctgtctgagaggatggtggaaagaccaatcccagagaagggaagaaaagcaaactttgagagagaaaaactttccgggctcctatccctccaatcagaggactggagcagtggaaaarggcagcaatcaacagaaggaatttcaaacccaggagttctgactgccagaccaacttaacgagccttgaatacatagactaccccatcttgggcctttggagactgaaaccccgaagcataggggtccctgatgctatcaaacctacctgacctttggggcccagggcaggcccttgggaaaagccacccgctcagcagagaggggtgcctgtgagggtggaggtggcaccagagggtcctgctctagcaggtctagctctccatccaaggttcgttctccatcaccagcagactcctcttcctcctctgtggcgggctcctcagtcttgaagagatccctttcattgtagatgtccaggctgtcctgcttagtgaggagttgctggaggggaaagaagggagggtaggc

SEQ ID NO: 300556 - DNA, 515 bp, Homo sapiens
agcctaggaggctgaggctgyagtgagctgtgttcttgccactgcactccagcctgggtgacagactctttctcaaaaaccaaaaccaaaacaaagacaaaaacaaaaacacacagaaaagtagtagaaattaaacacttctgtggatatcacaatgaacagcttccattcatttatggcttgctctgtggcagtcactttctaaatgctttatatgtatctcctccttgagccctcatagcaaccctatggaataggcaccaccatggcaattcccattgcagccacgagaaaagggaagcacagagagcttaaggaacatgcccaaggtctcaggtccactccttgactgaggggccaggagtcagacccagcagttcacttcgaagcccaggcagttagtcgttgggctaatatgtacatgtgtatgtagatggaggatgtgatgcaacagtgcagattcttgtgttgagggtggtaacatgggttatttttgaattattattattgtgatt

SEQ ID NO: 300557 - DNA, 457 bp, Homo sapiens
gggttaaagtgattctcctgcctcagcctcccgagtagttgggattacaggcacgtgccaccacgcctagctaatttttgtattattagtagagacggggtttcactgtgttagccaggatggtctcgatctcctgacctcatgatctgcccgcctcggcctcccaaagtgctgggattacaggygtaagccactgtacccggcctacatttctatttttataaactttataaaagtcatactatactaggaaaatagaatatgtctgttacttataaatacacacatacatacatacataaaatacattggaagtacatatcaaaatatttttacttgttcagttgtacaatcaaaacacttttgagaccactattttagataacagtgcaaagaaggttatgaccatgacctttaacaaagtgtgaaaagtatacgggcagcctatgtatgccag

SEQ ID NO: 300558 - DNA, 254 bp, Homo sapiens
cccacagccagacatgacggctcacaaatcttaccctggggagatggtttccctcatactggggcagttcagaattgccaggactgtgcattctctcagccagacctgacagctcacaaatctcaccttggagagatggctttcctcctactggggcagttcagaagtgtcaggactgtggactcccacarccagacctgacggctcacgtatctcaccctggagagatgggctcgctcctactggggcagttc

SEQ ID NO: 300559 - DNA, 254 bp, Homo sapiens
cccacagccagacatgacggctcacaaatcttaccctggggagatggtttccctcatactggggcagttcagaattgccaggactgtgcattctctcagccagacctgacagctcacaaatctcaccttggagagatggctttcctcctactggggcagttcagaagtgtcaggactgtggactcccacagccagacctgacggctcacrtatctcaccctggagagatgggctcgctcctactggggcagttc

SEQ ID NO: 300560 - DNA, 620 bp, Homo sapiens
gatggctcacctatctcaccctagagagatggcttccctcctcctggggcagttcagaattgccaggactgtggattcccagaaggctgatttaatggacgtagaaaatgtaagatggtaaaccaacattcagcctcagtaagttacaaggaccccttttccatgatcagattccttgttatcttattactaactgtattttgccttaatcctcattttgttaaccctcttcagattctagagattacctttttctagacagtctttttttctttttgagacagtctcactctgttgcccaggctggagtacagtggtgtgatcttggttcactgcaacctccacctctcagttcaagtgattctcccacttcagcctcccgagtagctgggattacaggcgcccgccaccacgcctggctaattttttgtatttttagtagagatggggtttcaytatgttggccaagctggtctcaaactcctgacctcaagtgatccgcccgcccggccaagacagtctgttcctttcctctcctgtctagtcagctaggatatacaagcctctacctttggaactggtttctcaatggaacttggtctgaaaccacaaagcaaact

SEQ ID NO: 300561 - DNA, 588 bp, Homo sapiens
tggcaaggagcatgaagaacaccagtgataaagttaattggttccactgtttcggaaaacaatttgatatctactaaaagcgaagacaggtattccctataatccatcaattccactcttaagtatatatccaacaaaatgatttgcacacgtgcaccaagagacatctaaaaaatgctcatgatggcattatttgtaatgcccatgatgaaacaaccgaatgcctgtcaacagttgaataaataaattgtggtttatcaccaaagggaacactacacagttatgagaagaaatgaaaccacaggaatatgcaacggcatagatgaattccacaagcataatgctgaacaaaagaagccgaacacaaaagcacacataatatatgattatatttccataaagtgaagaaacagagtaatctatggtgttacaagtggagagggtggttagcrttgaggaaaaagaaaagtaggaaaggacacaagagtcgcttctggggtgctgtcaatattaatatttctagacttgtgaggtaattacacacaattgtgatcaatcagtgtgatctatatattgggaagggaagca

SEQ ID NO: 300562 - DNA, 566 bp, Homo sapiens
tcttctgttttccgacagagtttgtgaaggattggtattttcttcattacaatagtccccctgacctgcagtttcactttctttttttttttttaaatagagacagggtctatgttgtccaggctggtctcaaacttgtggcctcaggtaatcctcccgtttggcctcccgaagtgctgggattacaggtgtgagccactgcaccttgcccagtttcattttcaatggctccagttagtcatggtcaaccacattctgaaaattttaaatggaaagtttcagtaataaacaattcataagtcttaaattgtgtgccattctgaggagcatgatgmaatcttacactgtccctctccattccacttgacttgtgaatcatcccatcaaccagcttatcctcgctgtacaggctaccctctcattagtcactgaacagccatcttagttatcggattgactgcagcagtatcaagatgcttgtgtttgagtaattcttattttacttaataatgaccccaaagcccaagagtagtgatgttggcatactgttataaatattctatttt

SEQ ID NO: 300563 - DNA, 512 bp, Homo sapiens
tgctgatatgccaggttagaccatttattagttggggttctccagagatgaccaatagtatatgtatatagatatataaggggatttattaggagaattggttcatgcgattatggaggctgggaagccccaaaacaggctgtctgcaagctggagaccttgatgtggctcagtccaagtccaaagacctcagagcttgggatgctsatgataaaattctcagtctgaggctgaaggcctgagaacccagggggctactggtgtaagtcctggagtccagaggtctcctaaagttgggatcactcttccttctctgtcctcagaggacaacatcatcagaacatcaggagttcttatatccaaagacagagaaggaagagttatccccgctctaggagggagacagacatgttgccttttctgtgttgttctctttggaccttctgtcaactgaatgctggcccacattgaaggtgtatctcacctagtccactcagactcacaccctaaag

SEQ ID NO: 300564 - DNA, 529 bp, Homo sapiens
ttacctataaaacaagagtgaagctgaatgtttgggttcctttctagcactgcctctctgccttggttgtctgcacttcaatggaagaggacatcagcccagggcctgaggcctcagtggggagaaggggaggttgacctctggtgaggggtcatgtccttggggctcaggcatgctccctcttccctctaaccatgggcatcccatcactgctggccatgctgtgtttggaatctgaggtgaattgggagtctttgggaacttgggagcctgtccccacatctgtggattgctctgacttaatgtcctgtgggaatttagcagttttggatatggtaactaatcttgtttttttttttgttttsttttgtttttgtttttttttttttttgagatggagtctcactcttttgcccaggccgcagtgcagtggcgctatctcggctcactgcaagctcagcctcccgggttcacgccattctcctgcctcagcctccggagtagctgggagtataggcgcctgccaggg

SEQ ID NO: 300565 - DNA, 499 bp, Homo sapiens
tttgcagtgtcatagataccaaagtaggcagctcggtagatgataataccctgcacagacamgttaaagccttggtacaggcccttaatcccatcagtttcgtagatcttaaccaggcagttaccgaggcctcagaattccctttcagctccagctttacccacgtcagctgctagacaggtatgggcaaaatcaagagggtacacaaaacacaaggatgtggccccagcggcaccacctgatgccggattccctgcaaagtagctcccaaactgggtcctcttgtccacaccacccaggaagatctgcttgtgtttatctttgaaggccaagttgagagcctgggtggggaagtatctgaggacattgaccaggttacggtgccagaaggacaggactccctgctccttgagaatatggaccacgcagtctataatgcccttgtattgcatatctgcggtgatctgcttgctggcatgctgtacctccagcagcagct

SEQ ID NO: 300566 - DNA, 636 bp, Homo sapiens
ttctgccctgtggcttgttccatatcaatccttcctcagataaactcaaagcaacaaaaatagcccctggcctaacatgcaaggggctttgtgttaggtgcatgtgtatcaaggagtggtttgcatgcaggcagtgtgcaggtggctattttagtgttagtgaaagatagcctggcaaacattcaggtctgtgtcacctgaggctctgggaggactgggactttctgaagttcccaggagttctctaaactttggtctgttgatctaagagaaatattcttcctgggtggcaaagaggcattggcttctatttctgtatcaggaagaaagagcatgaggctttggagttaaccmcactaggtttgggtcttggctgtgtcattttctatccatttgagacaaggcaagttacctccctctccaggtctcagattccatacacatacacactcattctctctctctctctccttctctcaatgataatatatacatcaaagggctgttttgagcattaccatgagacaagatatgtataggaccagcttgtagtaggtactcggtacatattgggtctcattccttccagagccaccagtagggattgtcccagtgcaggcagtggggagacactcc

SEQ ID NO: 300567 - DNA, 636 bp, Homo sapiens
ttctgccctgtggcttgttccatatcaatccttcctcagataaactcaaagcaacaaaaatagcccctggcctaacatgcaaggggctttgtgttaggtgcatgtgtatcaaggagtggtttgcatgcaggcagtgtgcaggtggctattttagtgttagtgaaagatagcctggcaaacattcaggtctgtgtcacctgaggctctgggaggactgggactttctgaagttcccaggagttctctaaactttggtctgttgatctaagagaaatattcttcctgggtggcaaagaggcattggcttctatttctgtatcaggaagaaagagcatgaggctttggagttaaccccactaggtttgggtcttggctgtgtcattttctatccatttgagacaaggcaagttacctccctctccaggtctcagattccatacacatacacactcattctctctctctctctccttctctcaatgataatatatacatcaaagggctgttttgagcattaccatgagacaagatatgtataggaccagcttgtagtaggtactcggtacatattgggtctcattccttccagagccaccastagggattgtcccagtgcaggcagtggggagacactcc

SEQ ID NO: 300568 - DNA, 617 bp, Homo sapiens
ggttcttcctaagacattgttgggaaaccatggtggactttatggtatctctttaacatccagcatactcttccaccattggagaatagctatgctgtgtgggcagttttctgtagctccagggaagggcctggattgttgaaggcaatgataattatcctatctcctttgcagtgattgtcagaaatggccatgtgactcaatttgaggaagtctgccaaggaattctgggaaaagtttattcactcttaagagagacccacaggaggatatgttcttttcttattcagggctatgttgtatatgttgagaggctggaaactactgtagctatctctttaccagtctgaggataaaacaaagacatggagaaggtcaaagaaatggagttagaaccattctgtctggtcttccagtttagtgggtcaatgcattttcttataatttagctaatttggattgggtgtttttgttctgtttcgttttgctgctgawagcatgctgaccaacacaaaactctcagccaatggatcacaggaataatctctgttcatatcaagtctttcatatccagaatctgtttcctctgttccatttgtcctatgtcattctcattc

SEQ ID NO: 300569 - DNA, 547 bp, Homo sapiens
tccatgtttactccagcttccatcagttgatttctgcggaggctggtttcttccaatatgtgttgcaaaatgttgaggtcattctgtttttgcttttctgggagtgcttttatctgtttgcctaagaaggagtccctcaaatgtgctgctttgtctgatgcctgtttcccaccttartaaactttctctgccttgttgctgtagtctctgtggcaagaagagaccctttctgataggagtcttggtagggaacagaacttgcccgcccccaacccagtcccattgcacaacaccgtgatgcttcctgtgtaacatggtctaccccctctctagcagcactagcacgagggcatgccctgtgaacctgaggctcttagtgcctgggccacacaagcacacaggtcaggcttttcctgccaatcataagggaaggagtgaccaaaataacatgtggggaagttacaatggtttgggaaacctcaaaaaattctaatggcagtgattttacagtctatgctaaatattaatgaattactttcttttaatg

SEQ ID NO: 300570 - DNA, 600 bp, Homo sapiens
tgaacttatagttccatgtggctggggaggcctaacaatcatggcggaacatgaaagccatgtctcacatggtggcagacaagagaagagagcttgtgcagggaaactctccttttaaaatgatcagatctcgtgagactcattcactatccygagaacagtacaggagagacttgcccccataattcaatcacctcccactgggttcctcccatgacatgtgggaattgtggaagttacaattcaagatgagatttgggtggggacacagccaaaccatatcactccagaatatcacgatttcaaacatcatatttggaatttaaacaaaaatgttgactttagatctcaataaaatatagaatgacaaatgttaaaacatcagatctctgttttaaaccttggaactctatggtttcaggagacaacaggtagggataaagtaatatttgtttagtttttaattgaacttgtcttgaatgagaaatatatatgtgactttaacttgtgataggtaactttaacctttgttcttatggtactttgaggtcacaatcatattacagaattgtatagaatttccttctgtaatagaaaccc

SEQ ID NO: 300571 - DNA, 600 bp, Homo sapiens
tgaacttatagttccatgtggctggggaggcctaacaatcatggcggaacatgaaagccatgtctcacatggtggcagacaagagaagagagcttgtgcagggaaactctccttttaaaatgatcagatctcgtgagactcattcactatcctgagaacagtacaggagagacttgcccccataattcaatcacctcccactgggttcctcccatgacatgtgggaattgtggaagttacaattcaagatgagatttgggtggggacacagccaaaccatatcactccagaatatcacgatttcaaacaycatatttggaatttaaacaaaaatgttgactttagatctcaataaaatatagaatgacaaatgttaaaacatcagatctctgttttaaaccttggaactctatggtttcaggagacaacaggtagggataaagtaatatttgtttagtttttaattgaacttgtcttgaatgagaaatatatatgtgactttaacttgtgataggtaactttaacctttgttcttatggtactttgaggtcacaatcatattacagaattgtatagaatttccttctgtaatagaaaccc

SEQ ID NO: 300572 - DNA, 589 bp, Homo sapiens
gtcaacaatattcaggaatagtatatttggtgtgtgtatagaatacagtgttcctccaaaactgtgctaaaatattttaaataaaatcatacagcaaactaaaaacagtaaaaagaagatccctttcttcttaagaatatcttattccttctcactggggatttcttggaagttgttctagtcaagtgttttccttgagctgaaagagggaagaggcataccaaaaacattgggatcaatgtagaaacttgtacatgaatgtttatagcagcattattcagcatagccaagagatggaaacaatccatatgtctgtcaacagatgaaatcaacaacttgtcgtacatccatacaatggaatattattcagccataaaaaggaatgagtaaagtactgatttctcctataasacagatgaaccttgaaatcattatactgtgaaagaagccagacacaaaaggtcatatactgtgaatcctgttatagggaatatccagaacagacaaagttgtagagatagaacacaggttagaggttaccaggggatgggactaaggaagaaggtggagtgactacttaatgggcaca

SEQ ID NO: 300573 - DNA, 563 bp, Homo sapiens
ttgtttgctccccttgtctgttactcaatcaggatcatcctctctccagacaacatctccactccttgcttttacttctaaaatcaatcaccctgcttactgtccacctgtagaactcctgctcagccatcaggattcgggcaaaacgggatttgggccgggattttctgatggctaagcacagtgcagtcactacccaccgtgctaygggagcccccatgcagcaggtgttagtgtggggtgtacattgaccttccctttcagcctcatataataaacagcttctctcctcccatgagggtttggccaaaggtaggattcttagtggggtatgagtctgggatggggagggcacttgatgggcctgtgtgttctctcaatgcccctcctgcccccctccccccaccaaatcccctatgcttcctgcacctggacaggtcccttctctcacagctgtggggctggccacatggtcatgacacctgtgtggtgtgttaaaggggtctgaaagatacacgcaagactaggggttgcaggtgaaggtgctggagcctgctgagtcc

SEQ ID NO: 300574 - DNA, 600 bp, Homo sapiens
aaatttatcacaataaaacggggcttgaatgttgtatatcttttttccatttcatttctaatttgttttcattgcattttacaaaaacattgaactgtgatgaattggaaatgtctacgaagagaaactgatccttcttcacaggagttcctggagcattgtctttggcccagcaaagggtgtgtcctaaaagagcctgcaagagagctcgkgtggggcctgtcataagtcaggggctgctgctgcctgcacttggtaatttttagagacttggagcaaagcagcctaattgtagtttccatggttaccagccaccactgaggagaacgtgagcagatcttaaagggaaaatccgtgcacaggcagaagtcaggaagcagggagggaggggaggaagagacaggtcccagagagggtctgggctacagggtggcctctactcacttagctgcagtcctagtcattgtctctatcccagggcagaggtcctcaggctgcagtaatggtgcgtcaccatagtagcctcccatgaagtgcacctagcaggctgagaaggggccttcggcacagttggtaggatgattaccattcagaggtccc

SEQ ID NO: 300575 - DNA, 522 bp, Homo sapiens
gagctctcaaccagagaccaccttggctctgcatctcatcaataattattgagacccagctttatgcaagcttccgtactaagtgctgaatactgatgtgcgatcttgaaatttcaacctgaaatacaaattactyacaagtgaaaggaaggatgatccatgttaaaaggagagaggggatcataggggagaacacctagagtgtcaattagtacttggagaatcctgttgtctcaaaggaagacatagtggttaagggcaggtctcttcaccacacagagcttggaaaagagaagagagcaattgcttgaatagaataggaatgccctttgttcacctggctggttcctaagtgtgtttcaaaactgcttgcaagtcactgttagacattgcccttctaagatctggttgcacacgacacatcctccatcttccatagcatttgtcccacaccagcagacttccttgcctctcaccctcatctgtcagttcattgagggcaggggccatgtctgattagcc

SEQ ID NO: 300576 - DNA, 561 bp, Homo sapiens
cacctgagttataatgtactaatctgcataatagggggaaataataattatttaattcactagattgttatgaacatgatgtgagataatagctatcacacagcctggaagacattcatgaaagttggctttacttcttttgctcgtggatgaaggtcttgcttatgcatcagagtgcccgactgaaaccagggtcctcttcccccacctggctctcttccccgatggtcagcctgyctgatgccccatctcccctctccaagagtctcctgccttctggctatgctgctgtcatgacaacagctgctcaggacacccaggcctccctaggacactcggtgggatcttaccatatttacttgctgaggtcctggagacggtggagttgttcactgcgttataggctgtcacctgcttggacactaatgccaccacggaaccatctggcacctacagggaaaaagcttctcagggcctaggcacagcagctctgccactccaggaaataaggacaaatcatgatgaacttggcactaaggggaaattggtgccttgctggag

SEQ ID NO: 300577 - DNA, 561 bp, Homo sapiens
cacctgagttataatgtactaatctgcataatagggggaaataataattatttaattcactagattgttatgaacatgatgtgagataatagctatcacacagcctggaagacattcatgaaagttggctttacttcttttgctcgtggatgaaggtcttgcttatgcatcagagtgcccgactgaaaccagggtcctcttcccccacctggctctcttccccgatggtcagcctgtctgatgccccatctcccctctccaagagtctcctgccttctggctatgctgctgtcatgacaacagctgctcaggacacccrggcctccctaggacactcggtgggatcttaccatatttacttgctgaggtcctggagacggtggagttgttcactgcgttataggctgtcacctgcttggacactaatgccaccacggaaccatctggcacctacagggaaaaagcttctcagggcctaggcacagcagctctgccactccaggaaataaggacaaatcatgatgaacttggcactaaggggaaattggtgccttgctggag

SEQ ID NO: 300578 - DNA, 552 bp, Homo sapiens
gtaaatgatatcaacgttgtaatctatccaacacctaattgtttgatgttacaaggatatatttacatccccatattattctcacgggtccaaacacctacaatacatgggcttactgatggatcacacatggaaatgggaggctgtttctcatcaaccaaatccccaccaccatacttggtacaaatcacgtgtaggtggagaagtgcacattcttatctcgaaatgtacacacatgaaaatccatgtgcatgtcagacacacataaaytcatgcagcacacacatgtatgagctcacgcatccacacataccattctcatggacatataccagaaaggaaaaacagcctcttaaattcaaatgcaacgtgtgttccagccaagaagccagacgtttggtttccaggcagcccagatcctgctcaatgcctctcagatgctgatacttctgaaatgtgcaaagaatgctgggctcgttcagagtgtcgttagttgctggattaagtggcctggcagtcactgcttgacccaccagggatttcttcctatgt

SEQ ID NO: 300579 - DNA, 564 bp, Homo sapiens
acccagaccctcgcccacttctgaaaccccctgcccatccatgtttgtctgtctccttcttgtcactccttcttggacacacacacacasaactaataggaatctggcttctttctccaaatatttcacaagcttcaatttttatgaaggtttcattcacctgattagaggttggcaaatctataagacacttaatgtattctttaaaaataaaaagatgccctttaaagattgcaggttcaggacacctgagattctttcgtggccctgaatagggcccctgtgttgggggaagaggcgactgcatagttcagggcctccatttctccttttggaactagtaggaaaagttgaaactgcttcaccaaattatctttttattttttttcctttaaaaagttctgggcttttcctttaaaaagaacaaggcttttcttctcttgctgttctcacagtgggatctttctacatcgacggcaccgtgtgggctcctgggtggactggaggggaacggggtgggtgctgtgcgtactggagtaagtgagggcacaagatccaaggcag

SEQ ID NO: 300580 - DNA, 511 bp, Homo sapiens
gtgaaggagtcagctacttctcatgactctctcctgcaccaggcattaactttcacaaaccactccctattgttttaatttgcatttaattgattactactgctgttaaacatttatttttcgtatgactttyggttcttttttatctcataaattgtacgttcatgctctttgatcattttgtgatctttgccttttatttataaaagctctttatatattaagaaaaagtatttattaactgtaatagggtataaccatactcccagtttatcattcacatttttattttgcttgcaatgatttttgatgcacaagttttaaggttttatgtactcaaatcccctaatctttttctttataatttcctctgttgctgttatacttcgcacaagttccccttcttgaaattgaataaatttccacctgcattttcttctaatcctttcacagtttcattttttttaaacttaactctttaatccatctggaatttattttggtgtgtaat

SEQ ID NO: 300581 - DNA, 489 bp, Homo sapiens
atttcatactaaaaatcaacactagttggtgaagaatttgtcataatagaaaagataagaacagaaaaaacataacaaagccttccaaccatgttatttggtgtagtgctagaacatgctagaatgttccttccttttctatcctccaccctctgctctcttctccttctcagagatttcttcagtgaccagcaatgacttagatgatttcctcgatacccataactcccagcaactcagaaacaaccttcaaattgttgccccacaacatattaaagaaaattttaaataaaggaacacattcaagcactttttaaaaacgttagagtgagctgaaagggtttttgctctaaagaaatttttaaaaaaatacattgcgtcctmtacctcatccatctaaaacacttacctttgtgtgttttattacacgtatattgggggtgagtgactggagtttttgttaggtgcgtgatcaaaagtttgccgact

SEQ ID NO: 300582 - DNA, 238 bp, Homo sapiens
agagaagggagtggctggaggcggaggctgtcaggtgcggggtcccsgcgaagccgtgcccctcccagaacattgcccgcctggacagtccaccccgaccacggctgcggacagcgcccctccctccgggtgcactcaccgctcggactgcgaatagttgcaccggcccagcaagttgagtttgcagagatgcaggttatcgcagggtctctggcagtacttgcgacggcagacccgg

SEQ ID NO: 300583 - DNA, 650 bp, Homo sapiens
ttattattacccacattttcaaatgagagcaataataaatgaaaacaatgaggcttataaaagttaagtgacttgggccgggcgcagtggctcatgcctgtaatcccagcatttttggaggccaaggcgggcggatcacaaagtcaacagatcgagaccatgtttcctctggtcaacgtggtgaaaccctgtytctactaaaagtacaaaaaaattagctgggcgtggtagcgcgagcctgtagtcccagcaactcaggaggctgaggcaggagaaacacttgaacctgggaggcagaggttgcagtgagccaagattgcgccactgcattccagcctggcgacagagcaagactgtctcaaaaaaaaaaaaaaaaagttaagtgacttgaaacttatactaagcagcaagtttgaaaactgggatactcaagtctgaagactactagagttagttttttctttcagtgtcaaaggtgattaacgaactaagccttaaacaactaaggttgattctttaatctgaaaggagatgttaataaatcctcctttcttcccttttctatttctattagtgggttgctaagcttttctggataaaatcattaaattcttgattgttcttcactaactaccacaaacttgttctgc

SEQ ID NO: 300584 - DNA, 486 bp, Homo sapiens
aactattgtgatatcatgcctgtttgctagcacctttctgaaagtgcactaagccacagaggaggaaagcagtcccttggcttccgtctacttggatgcatgtgatgtgtgtggcacacatggcagagctgtgggcatcttgctagctgttgagctttgggatccattctgattgcttctcccaaatgaggcagggggcatctcatttacayggatacaaacattccattgccttcttttattgctcaatactttattcccactgatgatatcaatcacgttgttgtgtttagttgtgtatacttctgttagagttccttgagagtcaggcctgtgcattatttatctttgcagcccaagtacctggcatatgcttagcacacaataaaataataattcaatgggaactgaatatatgaggttagacttcacaagtcacttgccctaccagttactgtatgtttaattattcagtcaacaagtatg

SEQ ID NO: 300585 - DNA, 603 bp, Homo sapiens
aaaaaatgtaaggaaaatagatttagtttatattccaagagttgaatgttgttacaaacaagtctaaaaatttattcataaaatataataagtcatgttgttaagaatttgaagaaatgcagaaaaaacaacagtgttagtgttataaaaagagatacatgtggctctcaacaagtctcaagggacagcaccatatttgaattataaaagtgctgaaatgcaaacatcttaaatggaagtgaccactatgtatcctggaaagctgttggatgactccaaaagtggttctttgacaaagaaaccaatgtggaagataaataggaagagttttattaatactatgagcatatataaaaaagtaatgtttctaaatcaatctattattgcatatccgatttttaaatatgtatgcataattaaatttatacattagctattacaaatagatatttgactgtttaatctatcctcaaaatttatatattgaagctaccccaaaaaacatctttctgtatcttcgcattctgaaayagaagactaacttatagtcaagattgccttacaatgggatatgttaatactcaaattccaaaatttatactc

SEQ ID NO: 300586 - DNA, 576 bp, Homo sapiens
ccagcccgcgccggtctccatcctgggaagaaacccggcacgtaacacctgcggtgtcgctgccgcgtagacacgtggttttgtttttaaacatcgtgagcacccacacctcagcgggtactcagtagagatagtctattttccagtgagttgactggagcaaatgttgttttacagcaaacccacgaaatagcccttgtggttgtggcttttagtaccaggaagtcaggaggagacggttgctaaatgtagttctatctggggactcgagtggggcacaatttttaaaagccaaaagtcaragggtctcaaatgaactctgagttaccatctttggaccgacttttaatataaagctgtaatccttaaatctgtgtcagtagtcccacttactatgtcactttaattggatgaatgcgttaatgaaaagtttgttttcaaacctcactaaactgctacttaagatcacagttaatgtgagtcctgcttaatttggaaagcatttaaaaaatggaaaagtttcttagggaagtaaaaattttgcaactctgcctacaaggtacagtaattggctag

SEQ ID NO: 300587 - DNA, 576 bp, Homo sapiens
ccagcccgcgccggtctccatcctgggaagaaacccggcacgtaacacctgcggtgtcgctgccgcgtagacacgtggttttgtttttaaacatcgtgagcacccacacctcagcgggtactcagtagagatagtctattttccagtgagttgactggagcaaatgttgttttacagcaaacccacgaaatagcccttgtggttgtggcttttagtaccaggaagtcaggaggagacggttgctaaatgtagttctatctggggactcgagtggggcacaatttttaaaagccaaaagtcagagggtctcaaatgaactctgagttaccatctttggacygacttttaatataaagctgtaatccttaaatctgtgtcagtagtcccacttactatgtcactttaattggatgaatgcgttaatgaaaagtttgttttcaaacctcactaaactgctacttaagatcacagttaatgtgagtcctgcttaatttggaaagcatttaaaaaatggaaaagtttcttagggaagtaaaaattttgcaactctgcctacaaggtacagtaattggctag

SEQ ID NO: 300588 - DNA, 576 bp, Homo sapiens
ccagcccgcgccggtctccatcctgggaagaaacccggcacgtaacacctgcggtgtcgctgccgcgtagacacgtggttttgtttttaaacatcgtgagcacccacacctcagcgggtactcagtagagatagtctattttccagtgagttgactggagcaaatgttgttttacagcaaacccacgaaatagcccttgtggttgtggcttttagtaccaggaagtcaggaggagacggttgctaaatgtagttctatctggggactcgagtggggcacaatttttaaaagccaaaagtcagagggtctcaaatgaactctgagttaccatctttggaccgacttttaatataaagctgtaatccttaaatctgtgtcagtagtcccacytactatgtcactttaattggatgaatgcgttaatgaaaagtttgttttcaaacctcactaaactgctacttaagatcacagttaatgtgagtcctgcttaatttggaaagcatttaaaaaatggaaaagtttcttagggaagtaaaaattttgcaactctgcctacaaggtacagtaattggctag

SEQ ID NO: 300589 - DNA, 576 bp, Homo sapiens
ccagcccgcgccggtctccatcctgggaagaaacccggcacgtaacacctgcggtgtcgctgccgcgtagacacgtggttttgtttttaaacatcgtgagcacccacacctcagcgggtactcagtagagatagtctattttccagtgagttgactggagcaaatgttgttttacagcaaacccacgaaatagcccttgtggttgtggcttttagtaccaggaagtcaggaggagacggttgctaaatgtagttctatctggggactcgagtggggcacaatttttaaaagccaaaagtcagagggtctcaaatgaactctgagttaccatctttggaccgacttttaatataaagctgtaatccttaaatctgtgtcagtagtcccacttactatgtcactttaattggatgaatgcgttaatgaaaagtttgttttcaaacctcactaaactgctacttaagatcacagttaatgtgagtcctgcttaatttggaaagcatttaaaaaatggaaaagtttcttagggaagyaaaaattttgcaactctgcctacaaggtacagtaattggctag

SEQ ID NO: 300590 - DNA, 526 bp, Homo sapiens
gcctgtagtcccagctactccggaggctgaggcaggagaatggcatgaacctgggaggtggagcttgcagtaagckgagatcgcgccactgcactccagcctgacccacagagtgagactccgtctcaaaaaaaaaaaaatcgcaaattgcttgtaatcttaccactagaaataaccagaaaaaagtgttaatgtcttttatatatgtatttgttttagacacaaaatttggaacattcatttttatattgttttgattttaacctttctgatgttctaatacgaagttttaaagctacacattttcctccaagaattgctttacctgaatcccactgattttgaagagttcttgttaacattcagtgaaaaatgtattttaatttcccatatgatttcttcttgatccatgggttacatattctttgataacgtgctctttccatttccaccagtttctaacatcacattaaaattttttataacataatttttaattattacccagtattccaaaaatcactca

SEQ ID NO: 300591 - DNA, 526 bp, Homo sapiens
gcctgtagtcccagctactccggaggctgaggcaggagaatggcatgaacctgggaggtggagcttgcagtaagctgagatcgcgccactgcactccagcctgacccacagagtgagactccgtctcaaaaaaaaaaaaatcgcaaattgcttgtaatcttaccactagaaataaccagaaaaaagtgttaatgtcttttatatatgtatttgttttagacacaaaatttggaacattcatttttatattgttttgattttaacctttctgatgttctaatacgaagttttaaagctacacattttcctccaagaattgctttacctgaatcccactgattttgaagrgttcttgttaacattcagtgaaaaatgtattttaatttcccatatgatttcttcttgatccatgggttacatattctttgataacgtgctctttccatttccaccagtttctaacatcacattaaaattttttataacataatttttaattattacccagtattccaaaaatcactca

SEQ ID NO: 300592 - DNA, 526 bp, Homo sapiens
gcctgtagtcccagctactccggaggctgaggcaggagaatggcatgaacctgggaggtggagcttgcagtaagctgagatcgcgccactgcactccagcctgacccacagagtgagactccgtctcaaaaaaaaaaaaatcgcaaattgcttgtaatcttaccactagaaataaccagaaaaaagtgttaatgtcttttatatatgtatttgttttagacacaaaatttggaacattcatttttatattgttttgattttaacctttctgatgttctaatacgaagttttaaagctacacattttcctccaagaattgctttacctgaatcccactgattttgaagagttcttgttaacattcagtgaaaaatgtattttaatttcccrtatgatttcttcttgatccatgggttacatattctttgataacgtgctctttccatttccaccagtttctaacatcacattaaaattttttataacataatttttaattattacccagtattccaaaaatcactca

SEQ ID NO: 300593 - DNA, 526 bp, Homo sapiens
gcctgtagtcccagctactccggaggctgaggcaggagaatggcatgaacctgggaggtggagcttgcagtaagctgagatcgcgccactgcactccagcctgacccacagagtgagactccgtctcaaaaaaaaaaaaatcgcaaattgcttgtaatcttaccactagaaataaccagaaaaaagtgttaatgtcttttatatatgtatttgttttagacacaaaatttggaacattcatttttatattgttttgattttaacctttctgatgttctaatacgaagttttaaagctacacattttcctccaagaattgctttacctgaatcccactgattttgaagagttcttgttaacattcagtgaaaaatgtattttaatttcccatatgatttcttcttgatccatgggttacatattctttgataacgtgctctttccatttccaccagtttctaacatcacattaaaattttttataacatratttttaattattacccagtattccaaaaatcactca

SEQ ID NO: 300594 - DNA, 574 bp, Homo sapiens
attgctcattagaaatggaaacagcttctagcaaggtatamtctttaggactatgaaaaattttttaaccaataaaagcttgtgaggtttttgatatttataagtgcagattggtagatatatttcgagtaatatcacctgtcagagtcattatttcattcagggctctttttttttagcaacgaaaagatttagtgtgtcagaaaattataggtatattcagtcatttgaatttcataagttctgaccatgtggaatatcctaatttttgcttgaattgtgattagtgtgtaatagttctttaatttacctatttacatatgagctgaggaaaaaaaagaacaaagaagccatatatacataatgggttatttattatgtgtaatatgtttcagagagccagtgctcagttgaacaataaatttttctatttttgttggtttttaatttttttctactgttacctctgttgtgttctgtctcattttgtaaagttaattttgttctttctcctagcttcttagttcttttattttttatttatcattttttaatgataaaagcgtttaaggct

SEQ ID NO: 300595 - DNA, 574 bp, Homo sapiens
attgctcattagaaatggaaacagcttctagcaaggtatactctttaggactatgwaaaattttttaaccaataaaagcttgtgaggtttttgatatttataagtgcagattggtagatatatttcgagtaatatcacctgtcagagtcattatttcattcagggctctttttttttagcaacgaaaagatttagtgtgtcagaaaattataggtatattcagtcatttgaatttcataagttctgaccatgtggaatatcctaatttttgcttgaattgtgattagtgtgtaatagttctttaatttacctatttacatatgagctgaggaaaaaaaagaacaaagaagccatatatacataatgggttatttattatgtgtaatatgtttcagagagccagtgctcagttgaacaataaatttttctatttttgttggtttttaatttttttctactgttacctctgttgtgttctgtctcattttgtaaagttaattttgttctttctcctagcttcttagttcttttattttttatttatcattttttaatgataaaagcgtttaaggct

SEQ ID NO: 300596 - DNA, 485 bp, Homo sapiens
atttcataagttctgaccatgtggaatatcctaatttttgcttgaattgtgattagtgtgtaatagttctttaatttacctatttacatatgagctgaggaaaaaaaagaacaaagaagccatatatacataatgggttatttattatgtgtaatatgtttcagagagccagtgctcagttgaacaataaatttttctatttttgttggtttttaatttttttctactgttacctctgttgtgttctgtctcattttgtaaagttaattttgttctttctcctagcttcttagttcttttattttttatttatcattttttaatgataaaagcgtttaaggctgtttacttctcgttaacatgtagtcacttcccatagctttggatacttaccrttttcattgtcattgagtacacattttttatcttttaaaagtcagttctatcgaggaataatcatgttaactgcattttgatattttctt

SEQ ID NO: 300597 - DNA, 485 bp, Homo sapiens
atttcataagttctgaccatgtggaatatcctaatttttgcttgaattgtgattagtgtgtaatagttctttaatttacctatttacatatgagctgaggaaaaaaaagaacaaagaagccatatatacataatgggttatttattatgtgtaatatgtttcagagagccagtgctcagttgaacaataaatttttctatttttgttggtttttaatttttttctactgttacctctgttgtgttctgtctcattttgtaaagttaattttgttctttctcctagcttcttagttcttttattttttatttatcattttttaatgataaaagcgtttaaggctgtttacttctcgttaacatgtagtcacttcccatagctttggatacttaccgttttcattgtcattgagtacacattttttatcttttaaaagtcagttctatcgaggartaatcatgttaactgcattttgatattttctt

SEQ ID NO: 300598 - DNA, 506 bp, Homo sapiens
taccctgttctgaaatgattatcctatgagatccctctttgttcatcatcatcttggaaattgtatttgcctgcytctctcttatgttcagtttcctggttccttgaatttatgtgtcttctttcttgatgttctccattgtttttagttgatataatctcatagttcctactgagaaagaatatgtgtaaggtaaaatttttttgaggcttccattcctgaaaatattttatttctgccctcatttttgattagtactttgacttgatatagaattctaggttgaagttattttccctgagaatttaaaatgtgttgccttgttgccttctggcttctagtgttgctgttgagcacatagatgtcattatggtttttgatcctttgtatgaaaatttcattattacatgccatgggagggaactcttttcattcattgtgcaacatatttggtaggctctttgagtcagctgctttctgtgattttttttttttttgccattttt

SEQ ID NO: 300599 - DNA, 506 bp, Homo sapiens
taccctgttctgaaatgattatcctatgagatccctctttgttcatcatcatcttggaaattgtatttgcctgcttctctcttatgttcagtttcctggttccttgaatttatgtgtcttctttcttgatgttctccattgtttttagttgatataatctcrtagttcctactgagaaagaatatgtgtaaggtaaaatttttttgaggcttccattcctgaaaatattttatttctgccctcatttttgattagtactttgacttgatatagaattctaggttgaagttattttccctgagaatttaaaatgtgttgccttgttgccttctggcttctagtgttgctgttgagcacatagatgtcattatggtttttgatcctttgtatgaaaatttcattattacatgccatgggagggaactcttttcattcattgtgcaacatatttggtaggctctttgagtcagctgctttctgtgattttttttttttttgccattttt

SEQ ID NO: 300600 - DNA, 506 bp, Homo sapiens
taccctgttctgaaatgattatcctatgagatccctctttgttcatcatcatcttggaaattgtatttgcctgcttctctcttatgttcagtttcctggttccttgaatttatgtgtcttctttcttgatgttctccattgtttttagttgatataatctcatagttcctactgagaaagaatatgtgtaaggtaaaatttttttgaggcttccattcctgaaaatattttatttctgccctcatttttgaytagtactttgacttgatatagaattctaggttgaagttattttccctgagaatttaaaatgtgttgccttgttgccttctggcttctagtgttgctgttgagcacatagatgtcattatggtttttgatcctttgtatgaaaatttcattattacatgccatgggagggaactcttttcattcattgtgcaacatatttggtaggctctttgagtcagctgctttctgtgattttttttttttttgccattttt

SEQ ID NO: 300601 - DNA, 601 bp, Homo sapiens
aaacacatctaagtccccgtgactcacaactgtcatagctgtgaagtagtgtcatctttcttcctgaagatttcctgtatcaccccaggagcagaagggatgattgatttttgctctggaaataagtaatgggtcactggggacatgaatagaactatagcttccttaagaagcaatctctcttaagaaattacaaagcaagcggctcccctgctcartggtgtctgtggcattgtactcccagtctttcaggataagtctaaaacagtttggcactcaattccaagctcacctatggaaaaggaggaactctgaaatctgtagaataaataaagtaatgaggtatgcctactgtaaatggagaaaatccagccagtattattgaaaactttcaggctttaaaatttataacatggaaagctatactatactgaagtatctgagtctccccaaaaacaatgacgttagggaggaaatcaaatgagaggaatctaagattgacagttcaactagccaaatcgccaaataatctgcagtcacagagggatagtggactgttattaaataaacccctggtgaattttctttattaaagagcaag

SEQ ID NO: 300602 - DNA, 601 bp, Homo sapiens
aaacacatctaagtccccgtgactcacaactgtcatagctgtgaagtagtgtcatctttcttcctgaagatttcctgtatcaccccaggagcagaagggatgattgatttttgctctggaaataagtaatgggtcactggggacatgaatagaactatagcttccttaagaagcaatctctcttaagaaattacaaagcaagcggctcccctgctcagtggtgtctgtggcattgtactcccagtctttcaggataagtctaaaacagtttggcactcaattccaagctcacctatggaaaaggaggaactcygaaatctgtagaataaataaagtaatgaggtatgcctactgtaaatggagaaaatccagccagtattattgaaaactttcaggctttaaaatttataacatggaaagctatactatactgaagtatctgagtctccccaaaaacaatgacgttagggaggaaatcaaatgagaggaatctaagattgacagttcaactagccaaatcgccaaataatctgcagtcacagagggatagtggactgttattaaataaacccctggtgaattttctttattaaagagcaag

SEQ ID NO: 300603 - DNA, 601 bp, Homo sapiens
aaacacatctaagtccccgtgactcacaactgtcatagctgtgaagtagtgtcatctttcttcctgaagatttcctgtatcaccccaggagcagaagggatgattgatttttgctctggaaataagtaatgggtcactggggacatgaatagaactatagcttccttaagaagcaatctctcttaagaaattacaaagcaagcggctcccctgctcagtggtgtctgtggcattgtactcccagtctttcaggataagtctaaaacagtttggcactcaattccaagctcacctatggaaaaggaggaactctraaatctgtagaataaataaagtaatgaggtatgcctactgtaaatggagaaaatccagccagtattattgaaaactttcaggctttaaaatttataacatggaaagctatactatactgaagtatctgagtctccccaaaaacaatgacgttagggaggaaatcaaatgagaggaatctaagattgacagttcaactagccaaatcgccaaataatctgcagtcacagagggatagtggactgttattaaataaacccctggtgaattttctttattaaagagcaag

SEQ ID NO: 300604 - DNA, 599 bp, Homo sapiens
tgatgaggtagtaggtgaaaggcccaagctcatgaaaacccaatgctggtgcttgttgatttgggaaaaggaaggcaactgaacagtcctcttgatattttaaataggaaaagtctgaatattggttcttcgtaatttttatgcttctgcgattaacagaattagatcagaagaagattaaagtggaagaaaaggtatgtaatcatgtcataacattaccattgtgttattgggttaatatgctcaaaagctcgtgttgcctgctgtggaagcaatataatcaataaataagacacataacaatatgtacattaattcatttagggaatgtttccttgccttaggatctgttcatttaaccctctgcaaaggtgagtatcaacacaaatgcagtgaaaggcctgatgtcttgctgttagtacagtgaagaggttggctgtggggaacagaagcagcactccacttatataggtcgcagctttatggcagactatcartttgaaaaactttcctgtttggaaggtgtatgattctatctgtgttacctgaaaaattcatttaacaataaaatgcattataatgtcactctaccatataat

SEQ ID NO: 300605 - DNA, 525 bp, Homo sapiens
accagccttgtctataactgctcaatggaggtttttctttttaagacaaggagtgaaactacaaagatgatgaaagttgtctaaaagtatatctaatcacaagcagtccctaatcagagtcaaagaagggtgaaataaaagaatcaactgttgctctttattctttcgtgttgctaaagtaagtcaagaaccccccaaaattacattaattccttttgagagatgcagtcgatatcatgttggcgacaagttaaatggaactctgcaatcctttcataatcagagcaaaataaatcaatcctctagagcatacaggaatgttgtaaatggacataytgaaattttaagagcacaatcccagttggatatatcagaaagccactctgcatatcacggtgcagagatcttgggagattttcccatctgatatttccgagcagggagcaggtggaaaaaattatttatagctatagaaaaaaaaatgaaatgacatttttaaaagctaagaataactcacattaaaaa

SEQ ID NO: 300606 - DNA, 525 bp, Homo sapiens
accagccttgtctataactgctcaatggaggtttttctttttaagacaaggagtgaaactacaaagatgatgaaagttgtctaaaagtatatctaatcacaagcagtccctaatcagagtcaaagaagggtgaaataaaagaatcaactgttgctctttattctttcgtgttgctaaagtaagtcaagaaccccccaaaattacattaattccttttgagagatgcagtcgatatcatgttggcgacaagttaaatggaactctgcaatcctttcataatcagagcaaaataaatcaatcctctagagcatacaggaatgttgtaaatggacatactgaaattttaagagcacaatcccagttggatatatcagaaagccactctgcatatcacggtgcagagatcttgggagattttyccatctgatatttccgagcagggagcaggtggaaaaaattatttatagctatagaaaaaaaaatgaaatgacatttttaaaagctaagaataactcacattaaaaa

SEQ ID NO: 300607 - DNA, 577 bp, Homo sapiens
attctactccttcccccaattagattaaaagtaatacatttcctaatcttcttttagtatcatcctagagattaaaatatgttttcttgactcatcaaaatytgataatctgatattattacatttaccctcttcctagacttcaaatgcaaggattctagaacatttcatctccatttatacccttcttgacttattataattgttgtcataaatttagtttcatttttaatttctatattttaattaaacattttttattgaggtaaaatatacacatataatttaccatctttaccatttatagatgtacagttaatggtgttaaatacatttatattttttcccttcattccccatattttaattttatacattttaattccatgtattgttaaagccattgctgttttatatagtcagcaactctttagatttactcatgtattcagatttactcatgtattaccctttgtcttgttcttcatttttttctctatctatgacactctctatctgaaatcattttcattctgccaaaagaaaattctctactgttccctttcatgtaggcttc

SEQ ID NO: 300608 - DNA, 508 bp, Homo sapiens
ctttggccaaggtgaatattaaaaagggaattagtggaaggctacggggtactttatgaaattaatggaaactagagaacctggccttaaaatgaggcgggaacaaaggtaagctaggaaccaagaacacagcygaatcacagtacaggaagagattagcagaacatcattgcctgccttaccacaatggatgtctgtgctcttcctctgaaatctcggttcttctgctgctggtgacttgaatagcctctaactgcccctgtgtctttctatcactccctcaagattcaaggtcccagataaaagcttccaatggtgaacctaggttatatgcctgggccctccatagaggggcagggtctactcccttcaaattctacagcgggagttagggccctgcttcccagttttaggatttctctgaagcttagagatgagtaccataattttaactaaccagcagaaaatagccaattccatccaacaaaacacctcaactcacctcttt

SEQ ID NO: 300609 - DNA, 548 bp, Homo sapiens
ctaagaaagtgtattcagtaagacaggttattaagtcaaagtaattcaacgtgtaatatctcaaatgtaaggaggtcagtggcaaaataaattaagcttcagtccatccagctgaaataagatttaaaggattgctttttggggtagatcaatttaaggcatagcactacctacagaagtagaatattgattgaaaggggcttgtgtggggatgcactggctgctggaattatataccatattccagcgtcaaacacagtgcaatgcatacagggtgctccctgtatrttattgcctgactggctgagtcatccataaaatgttacaaagtgaaaatagaaaaagattactgttttaatatgctgaccttgaaggacatgcccatggaactagcaaaggtgaaaaaagtttaacatttcttgcttagcttactcattcaaatccaagatagaacaggcttatagtgaattacataccctttcgccaaatcatggtgccatggtaaaatttcaatgtgcgttttttttttctcatatgtacctaaattt

SEQ ID NO: 300610 - DNA, 503 bp, Homo sapiens
ttatgtctccctttctccctgcttcacatggtgtctgataggtytcgtccatgtctccacctactgtcagatagcctcttcctctactgctccagatttagctggaagtgctgccatggtcccagattcttccagttgacccaagctcctgggctctggtaactctgcttcctccctctgtccctccagctccagggttgatagtggcttcctgctgttctgtggccactgaactcccccaccatctctgttaaattccctctgcttgcaatgtcatatctagcactgctctgccttctgattgcactctgactaaaacactctgaatgtatgtgcacaatgtatatatgtgcaaaaacacaaatatatgagtattcatctgaatatacatgtatgaaagcacataatgtatgaagatatgtacatgtatgaaaacacacagaagaagatctagaagtttacacatgaaactgttaagagtggagtgtgtgtctgggaaagga

SEQ ID NO: 300611 - DNA, 592 bp, Homo sapiens
gactccatctcaaaaaataaaaataaaaatagtaaaaataaaaaaaaaataaaaaaagaacctacatacacattgatgtcatgtaattcacaggagctgcacaggtgagaacctgtttgttgtgggaagaagcaagagctcctccccacttcccgtgcagggctggggtacgcagctgckgtttaagagcaaggcctgaggtctagcaatgttcttgcccatgtgaggcctggttttgcctcaaagtagaacttctgaaacagaaagtttccttatctccctggcaggacatgcgacagatgtgcggctcgcatgttcagtgtcccactgctcaaacccctagggggagcatgcagacaggtcgtggggagctccggacaactgacatttttctcagtctttagtagagtagcatgcggtgttaaagacgagtcctcggttcatcttccatccatatttccagacataagttctccttgaaaagaaatgctgaaacttgtggttaaaaggtacccatggagctccgacctcacagcagtgcctagggttgagtatttacagctcctgaagccccagtgggcatgtgttacag

SEQ ID NO: 300612 - DNA, 592 bp, Homo sapiens
gactccatctcaaaaaataaaaataaaaatagtaaaaataaaaaaaaaataaaaaaagaacctacatacacattgatgtcatgtaattcacaggagctgcacaggtgagaacctgtttgttgtgggaagaagcaagagctcctccccacttcccgtgcagggctggggtacgcagctgctgtttaagagcaaggcctgaggtctagcaatgttcttgcccatgtgaggcctggttttgcctcaaagtagaacttctgaaacagaaagtttccttatctccctggcaggacatgcgacagatgtgcggctcgcatgttcagtgtcccactgctcaaacccctagggggagcatgcagacaggtcgtggggagctccggacaactgacatttttctcagtctttagtagagtagcatgcggtgttaaagacgagtcctcggttcatcttccatccatatttccagrcataagttctccttgaaaagaaatgctgaaacttgtggttaaaaggtacccatggagctccgacctcacagcagtgcctagggttgagtatttacagctcctgaagccccagtgggcatgtgttacag

SEQ ID NO: 300613 - DNA, 620 bp, Homo sapiens
accctttcctcacttccttcttccacttttggctgagacataaggtggttggtgtacacaagggcctgggatacctcctttactctattttgttttatagtcacttgcatgtgtgtcttattttctcctactagattgcaaactctttgaaggcaagtatatctcactatcctttgtgtcctttataatagtgactgagacaaatattaatgtaaataatggacattaagtatttttgcagttgagcttgaatctgcatgcctttctgcatgcaatggtcttgaattcaaagaatatacttcatcctgtaaaacatatccccagccttccatagtgctgtctctcaagtggcacaactaggargttcatctaaatggtggcatccctatactcccacctggtctacaaagagcaaccacagagctttacaaaaatgcaggtgctcccttttactaatgtacctctcaatgccttagtgaagagagtgtcttatgggccttctcatggaacagtggaaggagaagggtgtgccggtaacacttgatacagtttaacattcctatctccctaagtccttggattgctttctccacatgatgccaggaaagctctggcatctc

SEQ ID NO: 300614 - DNA, 617 bp, Homo sapiens
aaccagattaggtagatttctattaacaaactaatagaaatacagacgtgtctttatgaagactattatagggaaatcacaatctgtatgaactactgtgcctattgtgttcataatttatgggggaatttacaaactagtgtgttcaaaggtgagtcactattctgaaagatctggaaactaaagaattgttgaaggatctaaggctatttagtctgcagaagatataaagagcattttacagctgtctatttgaagggctggcatgtggaataagagtaaacacattttggattgatcattgtaggcccaatgacaaattataggaatgcaaatttcaattcacttataaacaccatggctgtttaacaacctgtcatgttgcagtaaaaactatggtgctccttgtctctggaaagagctatgtcaattggctgatcacccttcagagatgtggyaagactgattcattctggcagtacctagaagactgatctagatgatctctaagatgttcctgaaagccttttcctcctgaatgtgtcttgttacccatgattatctttaagtaataaagttcagtgtagtggaaagtgtgtgcattacagtggggacag

SEQ ID NO: 300615 - DNA, 643 bp, Homo sapiens
ataaataaaatatagacagtacagctccatctgtccccaaagtcagatttgaaaggccgtggttggtaatcaaggagtcttggaatagtttagaaaagaagtataccgtcatgtagagtactgtatatgaaagtgaggctttcrcattctccactgtatacattttttattcttgaataagtagtgtttaattactaaaacttttgtttaataaagagggtcggattttagggtgggaaataacttttggcatcaggtacatttaagcatggatctgttggaaggcaactatgctttctacacttaacacttgttttatgcacctaagttaaggaagacacttgatctatattacgatattaatgaattatgagcatttcagtgttgtagtattaagtttagttaggcttttagacttgcagaagaaccacagaaataggacggttattgcaaaaacaggaggtttagaaaaacaactcttaatcggcattagctgtgtttatcagtactttgtgatacaaatatttttagtaggagggaaaaaaaaccctgaggaatttaagtacttaaactagttagagcccctgtttattcacatcttttgtttgaaagttaagatttacacagggagtaagaatctgtt

SEQ ID NO: 300616 - DNA, 600 bp, Homo sapiens
gtttagacctgtgatggttaatattaggtgtcaacttgattggattaaaggatgcatagatggctggtaaagtattgtttctgggtgtgcctgtgaaggcattgccagaggagattaacatttgattcaatggactgggagaggaagccccaccctcaatgtgggtgggcaccatccacttgtttgccagtgaggctaaaacaaagcaggtggaagaaggtgggatgagctggcttggtgagttctggcgttcatctttctcccatgctggatgcttcttcccattcctcctgcccttggacatcaggctccaggttctttggcctttggactcttggacttacaccagtggtttgctgggagatctagggcctttggccacagactgaaggctgcactgtcggcttccctacacttgaggcttttggactcagactgatccactaccaacttttttcttcctcagcttgcagatggcctatggtgggactttctcttgcgatmatgtgagccgattctcattaataaacttcctttcatatatacatatatcctgttagttctgtccctctggagaaccgtgactaatataagacctaa

SEQ ID NO: 300617 - DNA, 522 bp, Homo sapiens
ccatgtggtagccactagccacatgtggctatttaaacttaaatttaaattaattgaatttaaataaaattaaaagtatttctcgatcacactagccacatttcaagggtttgataagaacttgtggcttgtgcccactttactgacagcacagttgtagaacgctgccattgttgcagaaaggtctattggattccactgccctagggcttctttgccttcccaggcctggaactccggcctggatgtaaacagcatttcctctctggccagtttcccattcttccctgatttttagtctcccctggttcccagtctgaggagtctgagtctgggctgctctcttctcagtgtttcagccccgctgccctgctcacctcttgaccctcataggtgacatcaggctgccaygcatttttccaagctcttctcccagcccatattcctcagcaagctgttcagctgagtactgtcttgttcttccccagccaagcagtctaaatggcagttcttcaaatgaaa

SEQ ID NO: 300618 - DNA, 356 bp, Homo sapiens
aactatagaaaacattgctttgaaagtggatccagtatcaatgttatcctaatctctttgaaaaaaargaaaactatctcttaattacactacaatcaaatcgagtcttcaattcttatatattcattcagaattttaaaatctctctcacgggaggaaatgtaaaaggaaagttttcaagacctttttgtaccttaatatccttttcaatttctaatgtaaaatgtattcgtcctgataacgatgctgtgaaataaagaccaattcaggaatgtaatgaagtttaaaagtagctcctctttttctgcattgagaacaattttgttgattcaaattagaaacttctagttgggggc

SEQ ID NO: 300619 - DNA, 529 bp, Homo sapiens
accatccattggttaatggacgggatattattgcatcgaatctcttggtatcagaaaactgggctggatttgagaggtgaccccatataatgaagaacctgactgcatttttggtgttctaccactgaaaactttcaagctccacttccacggttccctctgccccacatgtgaataagccaatagaaaccccatgcactccttcccttggcactgtaggcggaakttcaagccacacaaaacctgggcccttgtgcaggaatgctcacccaggttccacccctaactgcagtaatcccagggccacttgcttttgctttgtcgaagccatttttggactggctgaggcacctgacctgctctccccaaaagcttcaaaatgtgagtaatacatttctttttctttttttgttttttgttttgttttgttttttcaaacagtttcactctgccaccaggctggatggtgatcatggccaactgcacccttgacctcatgggctcaagcagtcctcccacctcagcctcc

SEQ ID NO: 300620 - DNA, 553 bp, Homo sapiens
atttgtttggatccacgctctcagacaactactttactgtaaattgcactttaaaatttccattgcttttctgacctgtaccaraaaagttaatgatagtttcagaaagcaggatcttaaatctgtaatgctgtttttaatatcctttaccttaattaattaccttaatataattaccttaatagctatgtaatcatcaagctattaaagaaatagaaaagtaaattgatgtgtattctcttgcatttgcatagaaataatatctatttatattctatgtatttaaaacttttctgaaggtaaacttatgttcagaaagcactgatgcatagaatgggctttaagtaaacagttttacaattacataatggcccaggctttgatcagaaaattaaataagagaagagaatacaagttggtgcaaagaagagagaaaatatttttgttttagatgaaaacattttatttaaaaacagaaagacactcttcccataccctcattagaattactttctgaggcattcacaaaccatgtatatacaaacagcagctg

SEQ ID NO: 300621 - DNA, 539 bp, Homo sapiens
agaagtgttacatattgtcttcccagaaagttcattggcactagtaaagtgtggagagctggcaagctctgattggtgagtgacaggcgatgcgtcttggagtcaaaggaggttgtttcagtagctattggataaaactggtttcagrttacaacaggcagtttcagcatgggggcttacagtgaattccattcttggagccatgttttgtgccctgaatgctttctttcctgtcttttgcctctgttttagttggtataacaagaataacccaattcatttgaccagctttcactgtagttagaaattggaggtgaactgaagaacttattagaactgtggccatgaagggcataatataaaattttattttttatttttacttatttatttatttccatctcttgtgcttgaatcaggacaatgtggaaatttagatgggcttaacatctgcaggctcagagtacgagtctcaatatcctacatgtctaaatatttacaagtaatacttaaagctgagaaaaatgaaatataacctg

SEQ ID NO: 300622 - DNA, 539 bp, Homo sapiens
agaagtgttacatattgtcttcccagaaagttcattggcactagtaaagtgtggagagctggcaagctctgattggtgagtgacaggcgatgcgtcttggagtcaaaggaggttgtttcagtagctattggataaaactggtttcagattacaacaggcagtttcagcatgggggcttacagtgaattccattcttggagccatgttttgtgccctgaatgctttctttcctgtcttttgcctctgttttagttggtataacaagaataacccaattcatttgaccagctttcactgtagttagaaattggaggtgaactgaagaacttattagractgtggccatgaagggcataatataaaattttattttttatttttacttatttatttatttccatctcttgtgcttgaatcaggacaatgtggaaatttagatgggcttaacatctgcaggctcagagtacgagtctcaatatcctacatgtctaaatatttacaagtaatacttaaagctgagaaaaatgaaatataacctg

SEQ ID NO: 300623 - DNA, 580 bp, Homo sapiens
aggaagaaaaccatccagtggaatttaatacccaaaacaaattcattcaaaagaattatgtttttccrctagtttatcagtacttgaaaccttgtcagaactatttataaaatatattctcttcttttttgtttatgaatacccagccttatttccaaaatagtttttcattattaaaaaataaaatattatttttatacagtaaaattcactcattttaatacagcatacaaaaaattatgacagattcatataaattcactgccacaatcaagatatagaacagtttcatcactctaaaaaatccagaaaaggtttaagatgccttaccttggcacataaaacagagcacataaattaaaactggaaaataacttagaaaaaatgatagaaaaaaataaagtgaagaaagcaataaggttaagaatgctactgcaaaaccaatagctgtccacaacatatatacatatgccacattttctttattcacttgttgattgatgggcatttgggctggttccatatttttgcaattgggaattgtgctgctataaccattagagcaactcataaaagaaca

SEQ ID NO: 300624 - DNA, 576 bp, Homo sapiens
attatcacaaactttcctaacatcttcccgttctcctaaaaacccatttgtcttttccaaagaaactatggaagcctttctcccctctccctttccccaactaagttaggtatataagcaccacattctaattgcctttgtgtagtgataataagttactcaccactgagcagtctttgcaagtgcattacacttttaaataagctttttctcctgttaatctgtcttttgtcagtttactttgtagacctcttagaataagacctaggtgggtagaagaaaagtttttcctccctggcacagtattttgctacttttaacatatcttttaccaactctaaaaaatgtagttactctttagaatctattccagagtcctgactctagcacttaatagctggatgaactacttcatctctgtaagcctcagcctttcatttctataatgasgataaaaatatttatcttgtcaaattttcaaaagaatttgaaatatcctatatgaaacaccaatgtaccaggtttagaattgccattcagtcagtggtgacctttcttatccttattttatttggt

SEQ ID NO: 300625 - DNA, 554 bp, Homo sapiens
tctctcgcctctgaagagagtattaaagcctaaactgcttggcccctctccaagtctcatacattgtatatggctcctaactccatatgtgcattaaataaatcttgtatgcccttttctccttttgtcatttcatgttcagtgaacattagagggcagaaagaatgctttcccttggcctctacactgccaaatgcatctggtggtttagaacaggctctgaggtctactcaggtgtctagggcttgaactggctcagggctcttctatatgaagcttaatctgcaggctttagattttttttttgccagccagcggagacttgctgccagctacccyttcattctggttatgcttgcctgaaggttaagatatgtaaaagaccgcagtcttgatcagttcttttgggaagcttgcaccccctaaacagtctcagccagagccatgctaggtcaccttagcatgaggtttcacctactaaaccttaaaaattttatttgagttggctattaaagtatcttcccccataacctggataccttaatgaactttcc

SEQ ID NO: 300626 - DNA, 554 bp, Homo sapiens
tctctcgcctctgaagagagtattaaagcctaaactgcttggcccctctccaagtctcatacattgtatatggctcctaactccatatgtgcattaaataaatcttgtatgcccttttctccttttgtcatttcatgttcagtgaacattagagggcagaaagaatgctttcccttggcctctacactgccaaatgcatctggtggtttagaacaggctctgaggtctactcaggtgtctagggcttgaactggctcagggctcttctatatgaagcttaatctgcaggctttagattttttttttgccagccagcggagacttgctgccagctaccccttcattctggttatgcttgcytgaaggttaagatatgtaaaagaccgcagtcttgatcagttcttttgggaagcttgcaccccctaaacagtctcagccagagccatgctaggtcaccttagcatgaggtttcacctactaaaccttaaaaattttatttgagttggctattaaagtatcttcccccataacctggataccttaatgaactttcc

SEQ ID NO: 300627 - DNA, 554 bp, Homo sapiens
tctctcgcctctgaagagagtattaaagcctaaactgcttggcccctctccaagtctcatacattgtatatggctcctaactccatatgtgcattaaataaatcttgtatgcccttttctccttttgtcatttcatgttcagtgaacattagagggcagaaagaatgctttcccttggcctctacactgccaaatgcatctggtggtttagaacaggctctgaggtctactcaggtgtctagggcttgaactggctcagggctcttctatatgaagcttaatctgcaggctttagattttttttttgccagccagcggagacttgctgccagctaccccttcattctggttatgcttgcctgaaggttaagatatgtaaaagaccgcagtcttgatcagttcttttgggaagcttgcaccccctaaacagtctcagccagagccatgctaggtcacyttagcatgaggtttcacctactaaaccttaaaaattttatttgagttggctattaaagtatcttcccccataacctggataccttaatgaactttcc

SEQ ID NO: 300628 - DNA, 554 bp, Homo sapiens
tctctcgcctctgaagagagtattaaagcctaaactgcttggcccctctccaagtctcatacattgtatatggctcctaactccatatgtgcattaaataaatcttgtatgcccttttctccttttgtcatttcatgttcagtgaacattagagggcagaaagaatgctttcccttggcctctacactgccaaatgcatctggtggtttagaacaggctctgaggtctactcaggtgtctagggcttgaactggctcagggctcttctatatgaagcttaatctgcaggctttagattttttttttgccagccagcggagacttgctgccagctaccccttcattctggttatgcttgcctgaaggttaagatatgtaaaagaccgcagtcttgatcagttcttttgggaagcttgcaccccctaaacagtctcagccagagccatgctaggtcaccttagcatgaggtttcacctactaaacyttaaaaattttatttgagttggctattaaagtatcttcccccataacctggataccttaatgaactttcc

SEQ ID NO: 300629 - DNA, 466 bp, Homo sapiens
tctttttttggttagctttaccctataatttcagaattyaacccatgcataagatgcaactgcataaaaaatatttgttgaatactgaaggacagttggagcccttaggaaggacacagagaaaaactcatgtgtagttttacataagactgtaataaattattttacatatatttgagatttttagtatatagccattcacaactcaaatatgtttttatataaaattaaaattgtatcataattaaaccaataggatttaaggaggataaaaatattgaaaactctgttgagaacttttttatttgatcttactatatgtgagatatactaagcttttgactagagcaatagagtattgctgctaaattaaattaaccaatatttgtatagcattctttaggttataaagcattttcacatataatatcataccaatatttgatacttaatcttgggaaggaga

SEQ ID NO: 300630 - DNA, 600 bp, Homo sapiens
actgggaaatatgcctcaaaagcatgtagatcttacttgcgtacagaaatatataatcaatcccattaaattaactacaaaattataacaaacttgttttaataatgaaagttttaaaaataatagtgctttgagaagaagctttttaaaaaagtcctgattaatgagacgtatggcaagaggaattactataatgctgaatgctgattcagaaccttatttttattaagtmgtttatagtgaaggctgtgactatttttctatttatagtggcagctctagttaattaccttgtaatgtattgtgattttaatgcactagtaaactattggaatttacacccctattcagtaataaaatctgtaaattgaagaatgcacataaagccatcacagccataaattatgcagccaaatgctatgtacgaacacattagatttaaagaacagaatctctcaactttgctcattagtatataaattcagtggctactttgcaactgcagagagtacaacattttattcaaaggtattttgtaacttgttactatattttccttttgattactaagagcaggttgaacataattcaaatgaacac

SEQ ID NO: 300631 - DNA, 569 bp, Homo sapiens
ctgtaaaactatgttatgtgatcattatatttaaacttaaagaacttagttgattggaacttattaaaaaaaccttagattgattactcaaaaatttataaaatcttaaaaagtgtaacaagaggcttttgagcattctgaatcagcttatgtaacttgtccaaggtcagtggtggagctaatattttagttgagattaccttcatcaagacatcatacttaaccacaacactggttaaaccatggatagcttatgattggcttcayagccttacactcagttacctatgctgtccctctgcactctgcctactcttttacttggttgtgtcccttatgcctccaaatatttatgctactcattgactataaatgatagttgagcaggtttctttaccacaaaactctaacacttttaaatattagtattgaaaacttcaagaatctgttgtagtgttcacaggattgtttgtctatattttatcccccacctccccagctgtctttcatagaattcatcccttttctcatctccttcctctcattgtaatacctgtgtagtaccagag

SEQ ID NO: 300632 - DNA, 448 bp, Homo sapiens
ttttcatacaggagttatgtgaaaaaattatttgagcctttgtttatggaagagtcaaaagtattgtttgaagttaataktgaaattctaaactatgaatttttatattctattaaagtcacctcttccacttttccccatttcaagtgttctccagaattttaatgagtattagctggtacatgttgttaggtaaacaggtctgatttaatacataaattttctgaatatttaatcttggagtctgtgatatgagagaaagctctattcatctatgacatagagctctatttgtctttcactgacgtctctctcactcattcactcactctttctttgctttagtaagagctaccttgaaatgtcatgatattttttatataataaaggaaaccaaaatggaaatataataggaaccaaatgattcatttattcctacgttaacttg

SEQ ID NO: 300633 - DNA, 448 bp, Homo sapiens
ttttcatacaggagttatgtgaaaaaattatttgagcctttgtttatggaagagtcaaaagtattgtttgaagttaatagtgaaattctaaactatgaatttttatattctattaaagtcacctcttccacttttccccatttcaagtgttctccagaattttaatgagtattagctggtacatgttsttaggtaaacaggtctgatttaatacataaattttctgaatatttaatcttggagtctgtgatatgagagaaagctctattcatctatgacatagagctctatttgtctttcactgacgtctctctcactcattcactcactctttctttgctttagtaagagctaccttgaaatgtcatgatattttttatataataaaggaaaccaaaatggaaatataataggaaccaaatgattcatttattcctacgttaacttg

SEQ ID NO: 300634 - DNA, 548 bp, Homo sapiens
tttgtaagccttgcaatacctttgcaaggaacttcccacattcaggtctttgggggcatatattgatctcaatcagctaactaacatgctgtcaaatcytgctgggccatcctcctgacagatcctctcacagatcacttggattgatgaaacagaagaggagattctgaactaattataaggaaaataagagtccccttgtctcttttctttataagaacgttaattggacacacaagcatttatatatattctgctaaaaacctcctcctctgattcttcatcagtttgcttaaccatatcattataggtgtaaagaacttctttgaacactggaaccatactggagatattaaaaatttttcactcttctctcagctaagttgagctacacttagtttattacgactctggtattgaaagacctcattctaattcccttatagatctgccttctttaaggtctactgactcaagagcttatatgaagaatgcctattggccattatttgagagtaatacatgataaatagcttttactttgagat

SEQ ID NO: 300635 - DNA, 548 bp, Homo sapiens
tttgtaagccttgcaatacctttgcaaggaacttcccacattcaggtctttgggggcatatattgatctcaatcagctaactaacatgctgtcaaatcttgctgggccatcctcctgacagatcctctcacagatcacttggattgatgaaacagaagaggagattctgaactaattataaggaaaataagagtccccttgtctcttttctttataagaacgttaattggacacacaagcatttatatatattctgctaaaaacctcctcctctgattcttcatcagtttgcttaaccatatcattataggtgtaaagaacttctttgaacactggarccatactggagatattaaaaatttttcactcttctctcagctaagttgagctacacttagtttattacgactctggtattgaaagacctcattctaattcccttatagatctgccttctttaaggtctactgactcaagagcttatatgaagaatgcctattggccattatttgagagtaatacatgataaatagcttttactttgagat

SEQ ID NO: 300636 - DNA, 585 bp, Homo sapiens
agaacattatggtttgtacttaatagcccccgttcatcctgtttcccctagaaatactaaggtagcctttctgccagggcagcttcttttccagtaaaatttattcaccctaagaaactcttatctcaggaactctaaaaagccctctgtacctccatcctgactggccacctgcttcagtgacaatttaattaaaacaggtgtcagtggctccatttgtcactctccctatgtaagggagagagatcataaagtcatgagtcgctgccagtgaagtcctctctggtgagtctcagctgagctgcagatatacagcattttcactggcagtttttccaacccttcatttgggattaattactctgcaggagcagtctgcctagcacaacaaaacaatttcattcatcagctgagggtgtgaaattaatgaaagccamaatctcattggaatgaaacacggagctctcatttgtgccatcaacaccagaggagatgggatactttttttctctcccatatatttctactttcagcaataaaatcagattagatttttgtaaatgccaaggattccacttgataaat

SEQ ID NO: 300637 - DNA, 608 bp, Homo sapiens
ccctcccaaaaggccttggtggtgagagcttatgagaactgaaacagacccaaagcctgtgttggaaattaagtagctgcctacccatcctgcataagagtctttgcctctctccttacctcctttctgctggaggtttaaatatgatacacaaccaactatttcagggaacataattcgccttgatgtttctaaagcagattaaaagtggctcttggatcctccaygtaggaatggacagggagttctgtactagacatcattcaggattctttccccacacattgtgatcagcaagatatatgggttcacaaggggccagaatgtctagagatgattttggtccatggattctggtgtccatcttcattgctactccttcagtccatgtgctacactgatgctgcaggcagtgcccaaagcccttcacataagatgcccaactttcgctccttccaactcttgggactacttaccttcattgcctttatgtctagactcttgaaaacattcttctatcaattattcttaggagcaagagaaaacctaagttctagaaatcaaagccccccttttctttgtgagagaaagaagagaaaaatacctta

SEQ ID NO: 300638 - DNA, 608 bp, Homo sapiens
ccctcccaaaaggccttggtggtgagagcttatgagaactgaaacagacccaaagcctgtgttggaaattaagtagctgcctacccatcctgcataagagtctttgcctctctccttacctcctttctgctggaggtttaaatatgatacacaaccaactatttcagggaacataattcgccttgatgtttctaaagcagattaaaagtggctcttggatcctccatgtaggaatggacagggagttctgtactagacatcattcrggattctttccccacacattgtgatcagcaagatatatgggttcacaaggggccagaatgtctagagatgattttggtccatggattctggtgtccatcttcattgctactccttcagtccatgtgctacactgatgctgcaggcagtgcccaaagcccttcacataagatgcccaactttcgctccttccaactcttgggactacttaccttcattgcctttatgtctagactcttgaaaacattcttctatcaattattcttaggagcaagagaaaacctaagttctagaaatcaaagccccccttttctttgtgagagaaagaagagaaaaatacctta

SEQ ID NO: 300639 - DNA, 608 bp, Homo sapiens
ccctcccaaaaggccttggtggtgagagcttatgagaactgaaacagacccaaagcctgtgttggaaattaagtagctgcctacccatcctgcataagagtctttgcctctctccttacctcctttctgctggaggtttaaatatgatacacaaccaactatttcagggaacataattcgccttgatgtttctaaagcagattaaaagtggctcttggatcctccatgtaggaatggacagggagttctgtactagacatcattcaggattctttccccacacattgtgatcagcaagatatatgggttcacaaggggccagaatgtctagagatgattttggtccatggattctggtgtccatcttcattgctactccttcagtccatgtgctacactgatgctgcaggcagtgcccaaagcccttcacataagatgcccaactttcgctccttccaactcttgggactacttaccttcattgcctttatgtctagactcttgaaaacattcttctatcaattattcttaggagcaagagaaaacctaagttctagaaatcaaagccccccttttctttgtgagasaaagaagagaaaaatacctta

SEQ ID NO: 300640 - DNA, 567 bp, Homo sapiens
cctgccacacaaacctgttgtcttgcggccaattcctctcttggagatcctgtcttggctttggcccctacctaggcctttgccttggattccttratattaacttccgtgtctatttggccaaatgtttgccagcctggctctgctgcagttggctctatacctgtgaactcagccagccacccacatgccttgtgtctgagtattccttggtaacacctgtcatcctgaaagccttgcttgcgccttctgggtagagacagaatcaatctcttctttagtaattgcctggattgatttttaatacctttccatgccaatgcaaggaattatttgtatctctatggaatgccttctgctatgagccacacggtggactgctagacatggctgaaattgtgcagacatttattacatcatttaagacattcaaaagaggctgttgctgagtttttttcgtggctttatatatgataaaggacccagacgtttcccgttgttctgtctggtcattcttggcttgttggttgatgtcctctcatggattcaaaatggatgccatagctt

SEQ ID NO: 300641 - DNA, 574 bp, Homo sapiens
gttcctggatccatgaattctagccattggcaatgtagcaccacataataaccactggtttaggtataagtggcatcctgaagagtgatgctgccttcctacaggggggtcatctcctgaactgatgcatcagccwcaccttcgagatgctactctaaagctctagcaggtggcaggtctgcatggcatgatgcctggcagggccagtgttccttcctgtttgtattgctcacttgagctctctgaacctgcttgagcctgagcttagataagccacctttattttacactgaattgctgctatacctgcctgaccttgtgagtatgacggtatacatgttatggtactgacaggtagttgtaacggtctggtagggtagatgctgagtttctaccagggccgaggtcatgccagaagctgcttttaaatactgtgtagctatctcctgcatcttgcctgggcttgatccagaaccctaggagttggtgctgtgacttttcggttgaagctggccagagactccagatggtgaccttctttaccacagataactttagtgacatctgatttgca

SEQ ID NO: 300642 - DNA, 609 bp, Homo sapiens
gtattttttattttcatatcctgagtgcctagcatagtacttggctacatcataaatgctccataaatacctgtggactaaatgaatgaatacattctgatatgcaatggatggctaagctggtatattacaaaaaaggaaaatccaatctaattttaggccattccaaagcaattgaagcatgaatayattttgaaagaagtttactaggtttccaaatatgcctctaatacatataatcaaaaaagcaatagcaacaaaagtgtataaaatcaaacaataaatcagtactaatgaacatacaacttctgctgtcaagaattcagtagagataagacacacatgtatcaaacgatgaataagaataaaagggggaaatacactgcaatatgaaatattgcaagatagtatgggtgaacaggaaaataagtagcagaaaatatatattctctgatatcagagaattctgagattttctggtgatagaagggcaactaggtttccaagcagcagataggactttaattaaacagtgtgtgtagtgatttacagcagtgactatggggaaagaaaaatccctaggctcaaacttctagatcatgtacaccc

SEQ ID NO: 300643 - DNA, 537 bp, Homo sapiens
taatcaggtggaattcatgcttcattttttatattgacacattgtgatttgctttcaatacatttggaaatgttcaaagaagtatgtgaacttgaaccctttatggaagtaaaacaaccatgggaggaagtcaatgctcattgcatgtaaactagcacagctcatgtgtacaggaagtttcttacttcatatttaaatgatagccmtgaacaattttcatatgccaggtttggagttctgttcattagtcaatagtttagtttcagcagtgacaagaccattatatattcatgtatgtgcagagattgcaacattttctatactttgcccttattatcttataaaaagtattgggacattgggaaactaaagtgctgatcctagtgatatgaaatataaatctcatcactttagtgaggaaaaattttaaatcattagtgttatggtttggctctatgtccccacctaaattgcacctcgaattgtaataatctccatgtgtcaagggtgggacacatgtagataattgaatcatgg

SEQ ID NO: 300644 - DNA, 607 bp, Homo sapiens
tcaagccttctgcagaaatttgcataagtaaccaaaagcctgaatcttaatcaccaagccaatggggaaaatatcaccaggtcatgtcagagaccttcatggcagcctgtcccatcacaggtgcagaaacctaggagggaaaaatggttttgtgggctgagcccagggcccccgcttctctatacagcctcaggacattgtgccctgcatcccagctgcttcagctccagtgaggctaaaaggggtcaatgtatagctcacaycattgcttcagaggatgaaagccccaagccttggtggcttacatgttgtgttgggcctgcaggtgcacagacatcaagaattgaggtttgggaatctccacctagatttcagaggatgtatgaaaatgactggatttccaggcagaagtttgctacaggtgcagagccctcaaggagaacctctgctagggcagtgtggaagggaaatgtggggtgggagcccccacagaagtccccacttgggcactgcctagtggagctgtgagaagacagccaccatcctccaatccctagagtgatagatccactgacatcttacaccctgcacctggaaaagtggaaac

SEQ ID NO: 300645 - DNA, 599 bp, Homo sapiens
cccgcctcttttactgctgcccagggagtgcccactcaacactagactgagactacaggtttgtttctctgaacgtagcaaattgtattagttcattctcatgctgctatgaagaaatccccaagactgagtaatttataaagaaagaggtttaattgactcacagttccacatggctggggaacttacaaggcctcaggaaacttacaatcatggyggaagacacctctttagagggtgacaggagagaaaatgagagtcaagcaaagggagaagccccttataaaaccatcagatcacattagaactcactcactatcatgagaacagcatgggggaaactgcccccatgattcaattatctccacctggtcccagttttgacacatggagattattatatatgctgccaaagcaagcacaacacatggggattattacaattcaaggtgggagttgggtggggacaaagacccaagccatatcattacaaccctaaaccctcccaaatctcatgtcctcacatttaaaaacacaatcctgcccttccaacagtcccctaaagtcttaactcaaaagtccaagtccaaagtcccatc

SEQ ID NO: 300646 - DNA, 632 bp, Homo sapiens
aaagcaagatgtgtaatgtatttgcatttcaccttggcctaaatccctcccaagtacaaatattagggtttttcctttcatatcatcagcgttcctttgggagttagggagtccctttcctattttgagggctttatgactttcctggatcattgcaaaaaggaatgtgtgcacccaacacagttcagattaggtcgagcaaaatcttagttacagatgaacattacatgggtaacatggataccatggttaagtgactgttttaatcagcgaacaccctcagcagatgacagcaagaacagctttacatagctttttaacaaaagtgacatgaagatattctcttaaatgtagtggtttaatagcttcacaaatgcttattgagcatctgccacatgctagggatttttctagacttaagggaccacagtgracaagataaagttctgctgtcattgtttacaaggagacaaaaagtgagtgaagtacgatgtagtaagttctaaaacatagtaaaattgggtgaggtgatagagagtgactgggaaggtactttatcttgggtggttaaagatgccttgttgtgaggatgacatctaagctgataccagaaaaatacaagaagattggag

SEQ ID NO: 300647 - DNA, 568 bp, Homo sapiens
agtaaaatatgaagcaagctgagaatgaggaaagggaaaatgtgctggaggttagaaaagaggagaggcatagaataaccattttagaaagtgagagagtaaatatactagaagaatatcgtaggattatcaggcagtattgagtatccattggaagtctgtagtagtaggctcacccaatatggcaagcatcaccattagacccagagaagagcagtagcttgagaccagtcctttagagagcactgttctggccctttctgatatgacctctaatragacaaagaatctatgagcttgaggggacatggccaccaggagctcttatcctctcctcctctatctagattatgttctgtgtacttgggatcctggggtccaaatgaccctgatcctatttccagggtccatgttggatacttttctgagtccttcctcctttgggtgggcttccctgcaggtgtctgcactttgaggtcctcgcttgcagggatgtgatggaacttgcacatgtaggctgggctgtccatgtatgtgtggaaggcccctcacagtgtcatgtgcaagt

SEQ ID NO: 300648 - DNA, 538 bp, Homo sapiens
aacaatgaatatttatacaaaaatataattagaaattgtccaagagccataaattgaaaggaaagaatgccactggggagaatcatggagctgtagaggagaggctgaatgtgaagtgatgtttctacagtgtacgaaagttgagtagggattagacagagtgggaggaagagaattctagggcaagatcctgaggaagcaaaggggctggtgtgttgaggaagagaaaaaaggaccgtttgcttcaggaagaccgagtggtgacagagtgatgtgagaggcaaggttcgagaggaggacaagggcttaggaatgattagaagctgggctattattctaggtgcagtagagaaaccaccaaagggtgtcatgctggtggcagggttacaatgggatcamattgacaccttacaacgattactccggctgttgtgcagagaagaggatgagaaggtaggaggcaagagtgaaggaggtgagagcccacttaggacaccactgacagaataaagccagagagggtcatgtgtgacagaat

SEQ ID NO: 300649 - DNA, 570 bp, Homo sapiens
agtggtgacagagtgatgtgagaggcaaggttcgagaggaggacaagggcttaggaatgattagaagctgggctattattctaggtgcagtagagaaaccaccaaagggtgtcatgctggtggcagggttacaatgggatcacattgacaccttacaacgattactccggctgttgtgcagagaagaggatgagaaggtaggaggcaagagtgaaggaggtgagagcccacttaggacaccactgacagaataaagccagagagggtcatgtgtgacagaataaagccagagagggtcagagtactgacaatggagaccgagaaaacttgacaaattcacaatatatgttagggcagagtctttcaaccttggcccttgtattagttcgttttcatgttgctaataaagacatattccactagacatattccacagtccattacagagactggatagtttacaaagaaaaagaggtttaatggactcagttccacatggctagggaggcgttacaatcatggcagmaggcaaaagacacatcttacatcgcagcaggcaaaagacagaat

SEQ ID NO: 300650 - DNA, 541 bp, Homo sapiens
ttctcccttcattatagcatcttgctgtctattgctttttctactttaggtgagctagggaattgcttgtcaactttagtatcacaatcagttgtgcaatttgtggcaggcaatttattaccaataactgcaatgatgttggtgagtggtttactttttaatataaaatagagtgaattcaaggtcttctccataatcacttcttgctccctcaccagcatcttgaaacttccacctgaataaaagggaatagggtgaaagtaccaccccggaagctatgcatcaccttcagtgctacccatgaaatgttgcttggccagtgagcagtatctatcatgtgtgtctctgaagcaaaaaaaaagaggcatgttgaagcatccttggatattttttgaggatttggtttttgtgggaatactgtgtgtgcttctccttacccagtgacagatggaggcatagaagcatggggcaaggctaggaagaaaaggaattaaattgwtaacttggatgtggcccaggacacattttaaagccaaattac

SEQ ID NO: 300651 - DNA, 428 bp, Homo sapiens
gacaggtaaagtcatagtattgactttttatcttacagtgtttcttagataatttggttcctttttttagttttcaggatgatgacacacaaacaaatgatcattttcacctcaagtggctctcttttacaagaacaaagattctcatgtcaaagtgaataaagagggaggcagggacccaagagagagtggagaaatgggagctcgctctaccgtacagtttatctagatgtgtttgacacttcctttttaatgtttaccaaaaaaaaaaaaaaaaaaaaaaaaaaagaggaagaagaaaagaaagaataagagaaaaaagaaaaaagaatgtgattcaaagtgaatgtgaacaaacgatcgcrtggcttgaatgctttagcacagaagtacttgggtcaccactgtcttttcaaactcgatcttct

SEQ ID NO: 300652 - DNA, 594 bp, Homo sapiens
atagagagatttgcttattgggcctcgaatggactactgaggttgtaagccaagaatgtaagcacataaggtacctaataattgtgggtcaacagcctctcttgggtttattaagaaacaaacaaacaagctcagttatcacatatcctactgctattacccagcttacatgagcagaaggtaagggggacagaggaccattgagtaggcagttgttagcctgggaaggcagggctatctcttatccactcctccctcccttatggaggggtgaataagaagactcctctgctgagcccaagccaggagaagtccaagagaatcattcatcaagattgagaggtatctgtgagaaagcagactaatgtcaggttgggggttgagtgttcatttatgcaattattgtgcagatctgatgtcagtgactattttgaccaaggaaaacagaagtggagagagctggcaaggtgayggaagggcacagtgaagccacttactttcttactatttagcactgtgaagccagaggaggataccgtaggtgaagtgagtaccacagaggcatcttgctggcaccatatgaaagaagattgg

SEQ ID NO: 300653 - DNA, 594 bp, Homo sapiens
atagagagatttgcttattgggcctcgaatggactactgaggttgtaagccaagaatgtaagcacataaggtacctaataattgtgggtcaacagcctctcttgggtttattaagaaacaaacaaacaagctcagttatcacatatcctactgctattacccagcttacatgagcagaaggtaagggggacagaggaccattgagtaggcagttgttagcctgggaaggcagggctatctcttatccactcctccctcccttatggaggggtgaataagaagactcctctgctgagcccaagccaggagaagtccaagagaatcattcatcaagattgagaggtatctgtgagaaagcagactaatgtcaggttgggggttgagtgttcatttatgcaattattgtgcagatctgatgtcagtgactattttgaccaaggaaaacagaagtggagagagctggcaaggtgatrgaagggcacagtgaagccacttactttcttactatttagcactgtgaagccagaggaggataccgtaggtgaagtgagtaccacagaggcatcttgctggcaccatatgaaagaagattgg

SEQ ID NO: 300654 - DNA, 554 bp, Homo sapiens
atgttttgtgcagcctgacacaatttacaagctctttctttatgaaaagaatacaaaattgaggacacaggatcacgtataaaagcactatttatttcgaatgagagaagaaatcacaacaaattataaattttaaagagctgattaaaaactacaacattattaaaatccagaaaaataatataataaataatctttcactattagwcatacctctatcatactttttttctacattttttggctgcatacttcatataacaattttgaaacatttttcaaacttggagattactggaataattaggtcattcatctagcatagttgattgttttactgtatttaaggttatagtacgtgctgtttggtctagaaccgcaaaactgcattaaggtaagagatgtcagatactctaaggtgccatctgatgcattagaatgtataaaataagcaagctcaccagtttgtcatactgctatggatatgtctcctataaatacaagaatcctggtaagttctatttcatgtgataaccatcaaaaaaaaaagacgg

SEQ ID NO: 300655 - DNA, 554 bp, Homo sapiens
atgttttgtgcagcctgacacaatttacaagctctttctttatgaaaagaatacaaaattgaggacacaggatcacgtataaaagcactatttatttcgaatgagagaagaaatcacaacaaattataaattttaaagagctgattaaaaactacaacattattaaaatccagaaaaataatataataaataatctttcactattagacatacctctatcatactttttttctacattttttggctgcatacttcatataacaattttgaaacatttttcaaacttggagattactggaataattaggtcattcatctagcatagttgattgttttactgtatttaaggttatagtacgtgctgtttggtctagaaccgcaaaactgcattaaggtaagagatgtcagatactctaaggtgccatctgatgcattagaatgtataaaataagcaagctcaccagtttgtcatactgctatggatwtgtctcctataaatacaagaatcctggtaagttctatttcatgtgataaccatcaaaaaaaaaagacgg

SEQ ID NO: 300656 - DNA, 611 bp, Homo sapiens
tccagcagcaaaaggccatgaaggggtatctagcatggaggttatgactgataacaaaagacagcaaggggaatatatttcccatatttacaagccatttacaaggaggcctcaggatctcactgataccaccattactgctccctcagaactgggtaacaggggccaatacctttaacctactctctagaggacttcattcttgccctamtgggggacatggggacatacatatctgaaaccttcatcctcttctaaatcatgttctaagtacccagcactgcagaactatctctccagatgggcccaagcctgcttccagagcctcatgggcttcttcgtgagcccattatcttgcaaagcacaaacttcagattcaaagagtggccaaggggtggcaatttgcagctgatcgcaggaggtaagaagcttgaaaatgtcaactaggctgaccacacacaggtgtaggaggtcacggttagtgtgagacagacctagggctagagagagaaggacagaaggccttgggccacagacagaccaggaggcaggggcagtgacagtgtatcccatgccaccatgctaacatacaaaattccaagaagttcaag

SEQ ID NO: 300657 - DNA, 441 bp, Homo sapiens
ggacaggaggtggagggcaaaagaaatgaacatcacagtctctgcctacttctcagtgttgccttagagaagtctagaccctgtgaattctggacaacctgttactggtttggaccctttggctttatggccataactttacattgattgttctccaccagtttcgcccgtctccttgcaacctgactcccagcttttgtacccactsttgcctgctcctggtttctgcctaaccccaccttccaccagcttcccacaccactgcctgaccctacatggagggtaggatgatgctttttttaaagaaaggtcaaaagcaaactatgggttattgtgaagcagaaagatatgtggagataacagtattactaagaattgcttgtgtactaatgaataggcaatgtataacattttgctcttctatgctgtaatgtcagcagt

SEQ ID NO: 300658 - DNA, 441 bp, Homo sapiens
ggacaggaggtggagggcaaaagaaatgaacatcacagtctctgcctacttctcagtgttgccttagagaagtctagaccctgtgaattctggacaacctgttactggtttggaccctttggctttatggccataactttacattgattgttctccaccagtttcgcccgtctccttgcaacctgactcccagcttttgtacccactcttgcctgctcctggtttctgcctaaccccaccttccaccagcttcccacaccactgcctgaccctacatggagggtaggatgatgcttttttwaaagaaaggtcaaaagcaaactatgggttattgtgaagcagaaagatatgtggagataacagtattactaagaattgcttgtgtactaatgaataggcaatgtataacattttgctcttctatgctgtaatgtcagcagt

SEQ ID NO: 300659 - DNA, 515 bp, Homo sapiens
taagactttttctgcaggcagcaaagataattggcatatattaaaaaataattcctagtatgtcatctgaataaatatagaacagtaaagccaagtctcaaatattttagtaggtagtctactttatagactttccctaatttgatttagaccgttaattaaggccaaaggtattatactattttgtttaaatataaggagactcaataaaatgtcagccaatgaagtgtccctactgtgatgggatttcactaaggataaacacccaggattaagatgagttagtgaagggggttttcaatcaggcatcagatttggtccaggaaacagagtcgagataaaagcatcatcagtgatgggtctatttcatttgttcattcartgaatgtttttgtgtagttactatgagtctagcattgtgctaagttcagaggacacagtggtggccaagacagacttagcagaacttactctctagaaagcagtcttcagtttgatgtatcatagctctgaga

SEQ ID NO: 300660 - DNA, 610 bp, Homo sapiens
tcttgaactcccagtgttgatagcatggctgagcatgtacacacaggcatcacacttagtagtggcaaagaagccttggtggaaaaccagagatgagttcagaaaggtgctgtcagactactcttggaagcatgggtttctaaagcaatggctggagtaaagaggtgagatgagagaatagggttagggacacaaaatatttcccatactgagagcttttgcagtaatctgcaatratgacttgaacacgagtggtatcagtggagtttggcgacaaactgtcaggttagaatagattttttaatatagggccaaaaagtcaaggtgactgacttgacaaaggatgtttaagaaaaagagagagagagagattttttggataatatcaagcctaagccactagaaaaacatagtttctgctgagtggagaaaactgcaaaagaatgaggtttggaagaaatgttgagatctttggtttttgaatatgttaactttgatcttcatattagacagacaaatggagatcttgatacatgattctagagtcagagttcagtggtaatattcgagctggagatataaatggtgggagtcctagcacatgcatagt

SEQ ID NO: 300661 - DNA, 532 bp, Homo sapiens
ttccaatcgcttttctccttcctgcaacacaggcatgtggacacaggaaggggaggaggatgaggaaaaggaaggtgggcagcatgttccaggagtagggcacagaccctcgtctctcctagttcttccagccctaagtcaagtcagcaatagagaaaagaaaagatygaatggtatcagagaatgaatgttttagaggtagaacattctggtatcattatggaatttaagatgttgacaagatttttttaagagaaattcgataaaacatatttaaatatggtaatctgaaagaaataaaaccatccattttttaaatctcaccaaattcacactaaataagctgtttagagagggactgagtacatatactcaggtatatctatatatacatagtacacggtgtaccccatactctgcccatgaattctaactagagaattattcaatgtctgccatcatagtatttcctgcagttggatatttagttaaccagaagcatgatacagttctgaatttccaaatttagaag

SEQ ID NO: 300662 - DNA, 532 bp, Homo sapiens
ttccaatcgcttttctccttcctgcaacacaggcatgtggacacaggaaggggaggaggatgaggaaaaggaaggtgggcagcatgttccaggagtagggcacagaccctcgtctctcctagttcttccagccctaagtcaagtcagcaatagagaaaagaaaagatcgaatggtatcagagaatgaatgttttagaggtagaacattctggtatcattatggaatttaagatgttgacaagatttttttaagagaaattcgataaaacatatttaaatatggtaatctgaaagaaataaaaccatccattttttaaatctcaccaaattcacactaaataagctgtttagagagggactgagtacatatactcaggtatatctatatatacatagtacacggtgtaccccatactctgcccatgaattctaactagagaattattcaatgtctsccatcatagtatttcctgcagttggatatttagttaaccagaagcatgatacagttctgaatttccaaatttagaag

SEQ ID NO: 300663 - DNA, 505 bp, Homo sapiens
caaattttggaaggcatataaatctgcaaaatatagctaggctgtcagggaaaaaaaaacactggcaacatacacagaaaatccattttgcaatcaacctgggtcttatcaaggttctgtttgctacacaaacattgatgaagtagaaatctaagaagtgattgaggttatttactaagtaatcatccaatgttctgtggttgaatctgtggaattaggtagagtcaacagaaaaggaactcaacaacccaacacacatccctgttttatctacagatgatgaaaaagsaaaatactacttttacttacttaatgtaccaatcaatccaacacaaaataaatagttgagcaactggattctgtttgtctttagaacttttttaagagccaagaggcaaaggcatgaaaaatctatttattcagtcttgcccatagagatgaaaagatgacacttgagattcacggaaagcagacttgcaagggtttagtgagctgacagagtgga

SEQ ID NO: 300664 - DNA, 650 bp, Homo sapiens
ggacattaacaccaaccccacagaaatgtataaaaccatcagagactagtatggatacctctatgcatataaactagaaaatatagaaatgaatacattcttggaatcaccatctccaaaatgaatacactcaggctacattcccaccaggscatgaggatctctaaacccccacattcctgtcaatgctgccattatccaactggctggaggtaacaattataggagagatgtctgatctattttagatcttctgattaccaattattttgagtagatactgtgatacatgattgttacctttttcaatttttcttctctaacatgtgttttcatatccttggtacattttccaaatttcagttaaaatggcactcccaactcaactttctcttagctaaattccaaaactgtccatgcccactctaatactatgagacaaaagggaagtgcgatgaaggggaactcagagtggcaagagctactgtcttaacttaatgaagcaaaattatcttactcttgaaaattttacaaaaacacataacaatgtgaatatcttaggagaattcccacccagagtaagtaaataatgaagcctaagttttgttacctccactgttaattcatctctggtagcaggaatacatagt

SEQ ID NO: 300665 - DNA, 594 bp, Homo sapiens
ttaataataatatacctctctttgatatctgtgctgtaatttttctagacgttgctatgcatcagttgtggtttctgcaaaagcaaagcttaatgtttattccttttccataggtcagctcaccactctacaacattacagtcatgcacatctaagtcraaatgattcatgcaagctgttaagtgctacttctaatgcctaccaaaaaatgcagtgttgatgtagatactatcttattgaataacaggttttttcccagtgcttttatgactccctcaatatgctgtgaagtggcgtaacttcataagccatttccctattgaggaacataaacacatcctaatgaaaaagaggaaatacttttacaataagattgaaacattcatgcaattttcttttgagccaatgaatttttttttctaacatagaatttagggtgtcacatacctataactaatttaaatatggtgagtttggtaaatattttccagaggctttcacactggggctctagcttttctctttggcctcatcatatgaatctcttacattataatttgcatcttggcaaagtttccagaacagaccatgctg

SEQ ID NO: 300666 - DNA, 435 bp, Homo sapiens
cttatttttagttttattccactatgatctgagatacttattatgattttgatttttaaaaattttttgagacttgttctgtgytcacatacatagtctgtcctggagaatgttctatgtactgatgagaaaaatgtgtattctgcagcagttggataaaatgttttgtaaatgcctataggtctattttgtttaatgtgcagtttaaatgtaatgtttctttgctaattttctctctacatgagctgtttaatgctgagtagggtgttgaaattcccaactactattgtatcagagtctatctttccctttataactaataatatcaactttatatatcttggtgctccaatgttgggtggatgtgtttgtaactgttatattctcttagtgaattgatctctttatcattatataatgatcttctttgtttct

SEQ ID NO: 300667 - DNA, 588 bp, Homo sapiens
aaccactatggaaaacaatatggagatttctcaaaaaactaaaaatagaaataccatatgatccagcactgctgggtatttatccaaaggagaggaaatcagaatatcaaagggatgcctgcacccccatgtttatgacagcactaatcacaatagcaaagatatgaaatcaacctaggtgttataaacagataataaatggataaagaaaatgtggtatatagacacaatggatactatttggccataaaaagaataaaatcatgtcatttgcagcaacatggttggaactcggggtcattatgttaagtaaaataagccaagcacacaaagacaaatatcaaatgttctcattcacattaagaactaaaaaagataatctcatggaggtatagagtagaatgatagataccagaggctagraagggtgggtgggtggaagggggagaggaaaagacattggttaacagattcaaagatatagttagataaaaggagtaagttctaacgtttgatagactagggtgattatagttaacaacaatgttatgtatattttgaaagagctagaagagaggactttaaatt

SEQ ID NO: 300668 - DNA, 640 bp, Homo sapiens
tcaagtcaatttctttctctatagtgaaaacgtggttgtagaaagtgcaaatatccttaagaaatttcacagctactgagataaaatggcaatactctcaagggctgccctgctgataagttttcttaatcatgtttaaattgatgaaaaagtagaatgttaagagaaacacacaaaactaactggaaaatacatgatagagaaatccttaccctaaaacaaccttcttgttttattgctgtggctaaatttcttttcaaatcactgagagtttaatgtatattttcccaataaatgccacaaatttaaaattagtagacactgtgcctttaaagtatcacaaattatatttcataattgtgttgtttatcttttcttgaaagagcatgatgctcaaatggcgccctgggacattctaattctattatcctatcatcattgccaaggtagtcgtggacttsattctgacgtgtgagatgaaggttaaaactggcgagcagagggaaaatagggaccgggaagccagagaaaacctgtgctcatttagagatcgagagatgtcttcccttttttggtggaattgcaattttgagtctacaaataaatgagaaagtttttttgagagcatgcaaaagagacc

SEQ ID NO: 300669 - DNA, 254 bp, Homo sapiens
gggggcagtggcagcacaaagagagattccttggttcctggtctcattcctattactggttccagtcccattctagtaaaaggcagtttcccagcctacttttatctctagacatcttgagagacttgggatttaatgaaccttcactgaaaactratgctcagcttcgagcaggcttctgtttcacatccagaccacagcattatccttgcagttcttcttatccagactctcatttgactattctgttaatt

SEQ ID NO: 300670 - DNA, 616 bp, Homo sapiens
gccaggcagaagcatctggcaagattaaaaaggggatttaaaattatttagattaaagttctttttgaataatcttaatgcgttttattacttggaagtctagtgttccttcagatgttaacatatgccttctcaaaagttgtacaatgaccatacraagtgagataataggtttctttactctgggatgttccagtcttttacactaaataacactgctttttaaaaggggggaatgtaatatttcattaaagaactcccatcctacttttttgtttttgtgaaagaacacttgttggcatttgtcactttatgtaatttaatttgggaaatgctctactaaatatttaccagctatgctctggagacttgtagtcctggcttatgttaatttgggcaacaaggaggaacaggtgagaattatccctctttggagtgactttgtttctttgtcaaataatataaatattagaaaatgagatggtcaatttttattgaaactgatgttcaataaaaattactgtagaccaaaatttgctgacatctgagaccacataccaagttgaaaattagtgtttaagaagaaaacaacatccatttatccaattttaattaa

SEQ ID NO: 300671 - DNA, 616 bp, Homo sapiens
gccaggcagaagcatctggcaagattaaaaaggggatttaaaattatttagattaaagttctttttgaataatcttaatgcgttttattacttggaagtctagtgttccttcagatgttaacatatgccttctcaaaagttgtacaatgaccatacgaagtgagataataggtttctttactctgggatgttccagtcttttacactaaataacactgctttttaaaaggggggaatgtaatatttcattaaagaactcccatcctacttttttgtttttgtgaaagaacacttgttggcatttgtcactttatgtaayttaatttgggaaatgctctactaaatatttaccagctatgctctggagacttgtagtcctggcttatgttaatttgggcaacaaggaggaacaggtgagaattatccctctttggagtgactttgtttctttgtcaaataatataaatattagaaaatgagatggtcaatttttattgaaactgatgttcaataaaaattactgtagaccaaaatttgctgacatctgagaccacataccaagttgaaaattagtgtttaagaagaaaacaacatccatttatccaattttaattaa

SEQ ID NO: 300672 - DNA, 604 bp, Homo sapiens
agtgtggactcataggtatttattttataatttgattatataatctaataccactttattttgttgctcaaattgttccagctttggtcattgaaattggctcttgagtcccattgacatactcatattgaggtcttttttatttttatttttattttttgagtactttctggcaatgtaagatgatccaggctcaccttgtgttttttttctgccccagtgctataattagctgtttcttcaaggagctctggttcgttttattggaaaatggtattagcaatatctgggagccaagagasctaagtgtgttcactgctccagggatgtcattgtttctaggacctctcagctgacagaccaaggaaatatatgtgggtatgctatcctgtgtatttccacatctataaatatttccatatgcaaccatttgtatctgaatcaagctaaacacgagttcatactggtgcccatgactctaatccattaccacatggatgattctagtctccttcccttgcttatttctaaattcccactctcaacaataagaaacttggctcccatcacccatcatctatttacttaatatttcaattctcat

SEQ ID NO: 300673 - DNA, 637 bp, Homo sapiens
tgaagcatttatcatttctttgagttataaacatttcaattgaattctctaagttattgtaaaatgtacaacaaattattgctgactgcagtcaccctgttgtgctatcaaaaattagatctgattcrttgcatctaactatatttttgtactcactgaccatccaaatttcccccacccacccactactctttccagccactggtaaccattattctactctctatctccatgagtacaattgttttaatatttagccccaataaatgagttacaatatgtgaagcttgtctttctgtgtcagcttattttagttaacaaaatgtcttccagttccattcatgttgtaagtgacaggatctcattcttttttatggctgattagtgactagtactccattgtgtgcatgtgcaacattttctttatccattctctgttgatgaacacagtaggttgcctccagatctttgctattgtgaatagtgctacaacgaacatgggagtgcaaatacctctttgatatacagatttgctttcttttgtttatatacctagcactgagattgctgcatccatatggtagttccataacagttttagtcttttaaggaacctctacactgttctctatagtgg

SEQ ID NO: 300674 - DNA, 546 bp, Homo sapiens
tatattcctgtgtgtataattcttatacatacagaaatataaatggattaatttggacaagttattcaaactctctctgcctcaatttcttcctctgggaaagaggaattgtaaccataaatctacctcactgarttgttgtgagaactaaaatgactagctgtaagtgaggtccctagataagagcctggcatacagtatgccctaagcaaatgttaacacttgttattatctttggtagtttcaattaccattacttgctattttagactaatgcatagttaaaaccagaaggtactggaaaaactctctaggtcaggaattgtaagtaacctgaaggctaagtttgactttcagaggtttgtttataaccatgttttaaaattatttttaatttgaatgcctattgaggaggaatgaaaattcagttcctcatagttcccactattccctgttgaattacataattatttggcttccgacatctgcttcccacatttgtttttcagctcctgaaaaacctttcaatttgattcccctgattta

SEQ ID NO: 300675 - DNA, 614 bp, Homo sapiens
ttaatccacccctcttatttaacggagaggcaaatgagttccagaaggataacataaaggctccagagttgtgaccaaactagaaataagatctgggacttctgattcctagaacaatattatccctataacaccatggtgtgggccttagttggcattgtgtagatcaagcttctctttaaaggtaataaactgaagggcctaacattgatcagtcatcttatgatacgtatcaatgagtgtgtaaattctagaagacaaaattatccccactattgaaaatcaaaacaaacaaacagagttaaggtatgtggcaatatccattttccctctttwaaaaaaataatatagaaaggtcaatttaggaaactatcaagaaacatttttccttattaatttgatatatatgcaaaactaacacagcaacttgagcacataatttcaaaacatgtttgtgagagtttcaattcacagcttgttcttgtcctgtctttaaaagagagagtaaagctaaaattatctgtgtgggactagagcatcgtaattggaaactattctgatagtaggcatggtaacaacaatgaaattatttctacaaaatgcaagaggaagaa

SEQ ID NO: 300676 - DNA, 567 bp, Homo sapiens
acaacaatgaaattatttctacaaaatgcaagaggaagaaatgtgatataattaattttgaatactccagatatggtaaactggatgcattgtgaaacatatataccgagaaaaggtgggggagttgaagtttatttaaaaatcagatgagtatttttaaagaaaaattgtatttttaaataagatttcactctatcttccctcacaaaatcaaggaaataaggcacagtagttacctgaacctgactcactgttagctcagtgggaggttttaattagaagctctttcagtgaaaatgagaaaaagaaagtgacagtctcatcccttgacagtcataagaataggcaaactttctgtagaatgtttggttactctctatggggcacaaataaaatatgcagtttraaaattcagtcttatggtgaaaacactgcaagccttcaggtttctgtgatttgcaatctgcagtgtgtctaataatcatgagggcttcttactccagcaacagggttactataacaaaattagtgggaccagggtctgggacctgcatcacaggagagctg

SEQ ID NO: 300677 - DNA, 474 bp, Homo sapiens
cacaattttatggatcgctagaagtacttgctaacgaataagatccctgggcccagttctagagcttctgaatcagaatttccagggcagagtcctggacacttagttttaataagcacctcstgtgggtcttaggttaaggtaacaggcagggagcatctagagcacggaaaacaactaaaccaaagttatgaaaatgagaacaacaacaacagcaatgacagatttatggagaagagcatgagcatcactaaagtagaggtacatatttatcacttattcattcaagaaatattttttcatcacctgctatgtgccagatattgccctaggtcagtggctctcaagtgggtaaatttgccttttagaagacatttatcaatatatagagacatttttggtttttacatcttgggggttgccactgctatctaatgggtagatgccatgtatacctctaaacactctacaatg

SEQ ID NO: 300678 - DNA, 588 bp, Homo sapiens
aaatttatttatggactcatgtaaataaatcatggatatggcacgaaaggagatggacagtgaaagtggaaacactgccaagaccccttttcttttttcctttctgcttcttctttccttcttttcttccttacctttgggagtggtaacaccatgtctggcatcttctatacttatattctcacagctttgaaaatagagagaaagatgctttctccctcccagttctggctgaagaagtggctgtggcatagaggtttggattgtaaattgagctctacagagggtggttattttcttgcagactttttaggtaactttacagtragtgctaccaggtggagggtagatgatgtgaagggcacaggcttggctttcttcagccatggttaacatctgcacaagcatttaaccacgtagtaaaggataacgatgctctctgtcttattttagaggtggttagcttattttattcctcctttctcttctcacaaatacatgtttttgagcatcactttactgtcttactctccagtgttttaaaataattaacttaaactaccgcattatttccttttaattgtaaac

SEQ ID NO: 300679 - DNA, 410 bp, Homo sapiens
gtacatttcaatataaccttatatatcgtaacaggttccttaggtgcttgccaaagtgatagaaaatacactgagcacagcatgaggaggaactttctctatgcatgggtgatttggatataatatttatcaatgctgattacctggattgctttggctgatctggctagcctggagggtttttccattcttcccttactgttgcatatgttttctttctgaaaccttttctctgtcaaagagaacaacattttctactagcagaagggggaaagcaacaaagcaaaagttctccttttcaaaaaagctaaaaaatcgcatttttrttaccaagctattctttagcttggtaaagacagatgtaagttggacattcatcttatgcaatgtagatgaaatctaactgatga

SEQ ID NO: 300680 - DNA, 541 bp, Homo sapiens
actcttatctcaggaactctaaaaagccctctgtacctccatcctgactggccacctgcttcagtgacaatttaattaaaacaggtgtcagtggctccatttgtcactctccctatgtaagggagagagatcataaagtcatgagtcgctgccagygaagtcctctctggtgagtctcagctgagctgcagatatacagcattttcactggcagtttttccaacccttcatttgggattaattactctgcaggagcagtctgcctagcacaacaaaacaatttcattcatcagctgagggtgtgaaattaatgaaagccacaatctcattggaatgaaacacggagctctcatttgtgccatcaacaccagaggagatgggatactttttttctctcccatatatttctactttcagcaataaaatcagattagatttttgtaaatgccaaggattccacttgataaatagatagacagagaaatagatagatagataccaaatgtattgggaaaccatcagcagcctctggagacaatga

SEQ ID NO: 300681 - DNA, 642 bp, Homo sapiens
atcattatcttcctggcggtctatgttagttatttcaggtcaatctttttctaacccattcacacttcctcctaacattgtatgagtcatgaactcttaaaatagactacttctccaagactatggattccacttggacatttataatatttgtttcctttatactaaaaatttatctgtttaacatatactggaaacaaagataaatgaaaaacgactgaaggctagcttcaaatcaattcaaccactgattgtgttaaaagttacctaattctaccttaagtcttcaaattgttaagacaaatcctccctggtgtaaaataacataaccctaatactcaatttatctgtataaaaattatacacagaatgttaaaaatattactggggaaagttaaaaaaaaaaagccatctagcagaaggaatctcagtaaccaaaccagtggcctttgttaggaagggaaagggctcaactcagtaatggactgatacagatggctcctgggaygaatgtgggtgggtggtttctgccagcatgaatgcttagagaaatgtccttttcagccaggtgcagtggctcacgcctttagtcccatcactttgggaggcccacgcaggtggatcacttgaggtcaggagttc

SEQ ID NO: 300682 - DNA, 518 bp, Homo sapiens
ctccctggtgtaaaataacataaccctaatactcaatttatctgtataaaaattatacacagaatgttaaaaatattactggggaaagttaaaaaaaaaaagccatctagcagaaggaatctcagtaaccaaaccagtggcctttgttaggaagggaaagggctcaactcagtaatggactgatacagatggctcctgggatgaatgtgggtgggtggtttctgccagcatgaatgcttagagaaatgtccttttcagccaggtgcagtggctcacrcctttagtcccatcactttgggaggcccacgcaggtggatcacttgaggtcaggagttcgagaccagtctagccaacacagtgaaaccccatctctacaaaaatacaaaaatcagccagtcatggtgtcaggcgcctgtaatcccagctacttgggaggctgagacaggagaattgcttgaacccggaaggcggaggttgcagtgagccgagatttcaccactgcactccggcctgggtga

SEQ ID NO: 300683 - DNA, 569 bp, Homo sapiens
tcactgtgtacactgtatttatttatttaatttatccccagtattttatttactcagtcaatgattcaggcatcaggccaatagggaggcatccctgggtaggcaatggttataaataaggcaagtgggtagatataatatccaatggtggggagatgtactagccttgatgaaagcygctgggggtgctctcaattagatatgctgaggttttatcagagtgaagagtgggagctaccttagctcccctgccatgccaggaaggaaagctatccacttcacagcctcactcctatcccagtattctggttattcatatcagacaggtacctcttttcatccttagaaatgttgattttccaagtagggagaaactgtgattctgccttttgttcagatctgaatctggggagtgctcctcctgtggggcttccatcacactgaaatgctccagaaaggctgtctaaaggtgtatccacgctgtgtttttggagagaatccccagctgtctcttcaatggtgtactgcaggggaaaaaggaccccctctttaaggcccttcacaatcac

SEQ ID NO: 300684 - DNA, 348 bp, Homo sapiens
aggggttttagtctttaatctttagagtggtcttgagaaagctcataaggtctttgataagttaatggaaaataatgctaagattcaatactgataaaataaagtgtctttcttcacagagagaagtcaagactattaggttttataggctatatgttctatctctatagtatctatctatctatctatctatctatctatctatctatcgatctatctatctacctacctacctacctatatgtatatcaaccagrgtagcttctcgagaaggctagctgaaataataacactttcaacaactgaaatatttttttaaaaacttctccccgaagtgttattagtcaa

SEQ ID NO: 300685 - DNA, 549 bp, Homo sapiens
gatgaaactgaccagaaaaatctggacttcctcaattgagctcagctcttacatttcctttcttgtgaactgcatgtgcccaacagcaggaattcttctttcctcatgtagtaagtcctaccctagtacgcttccccactattgggaggaaaagcctgcactagcccagcactgcctatgactggctgggaagwtaagttgacttccagacttcagatagagaactcaattggagcttttatttagtctttttcagtattttaggtaatatttttatcagccttattttataataataaaaagttatataagtatcatttacctaaaataaacaatcactaaagtatatgtgtgtgttttgaccaatgtgtatagttgtttaactaacacaattaccatatataacatttgcattaacccaaaaagttctctcatagccctgtataatcaatagatttcctgtaatccttgctcctatcagtgactgatcttattttttccctctttttttgacattttcagaatttcacataaatggaatcacacaat

SEQ ID NO: 300686 - DNA, 607 bp, Homo sapiens
tattatatatgtacaatggaatgctatttgaccatataaaagaagaaaattctgccatttacaacaacatggatgaacctggagaacattatgttaaatgaaataagccacacacagaaggacaaataatgcattatctcactcagatgtgaaattttaaaaagttgatctcccacaaagctagagaatagaatggtggttactgtgggctgggatcatgggagtggagacattgaggaaatgttggccacaggatacaaaatttcagttagataggaaaagtaagttcaagagatatattgtacaacagggtgactatagttcataacaatatattgtattcttttatcccaggccctaaagtgtcatttcactgttctctctttargcttagtccaggccttgaaattatattgtgttcttgaaaaatgtggagacagtggatgttaagtattctcacaacaaaattgataactgtgaagtaactcatgttaattagctagatgtagtcattacacaatgcatatatattttaaaacatcatgttgtacatgataaatacatataatttcatctgccaattaaaactttttttaattcccttggc

SEQ ID NO: 300687 - DNA, 644 bp, Homo sapiens
aatctgatattgaatatatgtagataacatcaaatatggaaagcaaagccatgtactcagccagaggtagctgcaaagacaaaagtataattgtatggattcaaatggcatattctgaggaaatgtggagcactggactacttgaagaaaatgaactgttttgagaagtaatgaaaattgattatgttacacacagcttttaatatgccatactgctttaaatactttacctgtgttagctcatttaattctagtaataaccttttgagatagacaatattattattcccagttggtaaatcagaatattagatcctagaagttcttgataaacttacacagctatcaaacaaaagagattgaattcaaccaggtatyctgactccataactcatgctcataaagtaggttaaagctagtttatgcattttcataaatgcagaatctctgtaattttctctgactttgctgcttataattatggggccatagagaaatcacagccatcagttttatattcttcaaaataagaagtttaagataaataatcttaaacttttcctaaacttgaaaactctatggttccaatattttaaaaatagattttagcctacacgaagccagcaattacagaagttttttgg

SEQ ID NO: 300688 - DNA, 529 bp, Homo sapiens
tattatgccatcttttagaatttatcatagatatataatgttttggaatactttatgatttcttttttattttctgttgcccaggctggaatgcagtggcgtgatgtcagctcactacaacctctgcctcctgggttcaagtgattctcctgcctcagcttcccgagtagctgggactataggcacccaccaccatgcccagctaatttttatatttttaatagagatggggtttcgtcatgttggccaggctggtcttgaatgcctgacctcgtgrtctgccctccttggcctccgaaagtgctgggattacaggcatgaaccaccacgcccggccactttatgatttcttaatttacttctttaacagatatttgttgacattttgtctcctgacagatactaaataacaaagatgaaaagcataacaatcatccatgatagtagaaaagctttctttgaacatacgtgcaatctgagacagaaagagtgctgagattaaaatgttaagccttaaactatactacaa

SEQ ID NO: 300689 - DNA, 426 bp, Homo sapiens
catgacatccagaaatctctgttacatcagtgtcctacccacagtgaaaaaatatagataatgattcattccccactgattattttctaccagaatttttctggtggattttaaaaagaaccacaaaaatataaatctttaaaaattcacttttattgtaccatataatggtgcttttttgttaaggaatcaatgtgtacaatctgaaaccgggtgactggggaggttgggactttatttctgcaactggagaaattttccataatagaakaaaatgcaccaactttttttgctgcaggttttcctttgagatcaataaaataataaaccacaaaaatacagccattaaagtattgggttttccatgagaatatagcatgtttatagtctggccttcaagtcccttgtcttcaatcaggcatatcc

SEQ ID NO: 300690 - DNA, 554 bp, Homo sapiens
attcatggacatattgatgtttaagaaaactgtcattatggaatggaaagatatcaacttcaagagcttagttatctatgaaaaaggagaagagcttcaactttataagatttttatttactcaaaaattctgagtgggaagcaaatggtgaaaatgttcatatttgtatgatttcttcacggtaattatattcttctgtcatttttataattttgaaatacttcataattattcgatttatttaaaaaaagcagcagcacaatggagattggaagggaataaaaatctgtaccttcttgaaagtrtttctaggttcagtcctaaagatgcttggggaacatgtcaaaccaaacattgttattaaaacaatatagtctctgcagtctgaactatagaaggcttcacaacacagaggttaatcctaattttaaatcattgtgccatatatcttcattaaattaaataatctcttctttctgcaaaagttttgtgatgctgtggtaaaataggaatcagtttatttttattatcacttcgaggataaatgttttgc

SEQ ID NO: 300691 - DNA, 568 bp, Homo sapiens
caccaattcttctcacaacaactctttttttttttttttaaagaattgggtcccttaacttaacacctaccttcgtaagacagacaacattctatgtttccaaagtgcattagtgtccccacatgtactctgatgtttctggttcatttattgatttaraaaaaaggtagccccgtggaaaggcacaaatcgaaagcagtttaaacattttacattgcttttcattttaaaattcaagaggtgcttcaaaagtttatctcttaagtacgtcgctttttaacaaggaaaggttagcaactgtaaaaatattgtcaagaaatgtggaaacaactttatctccttgttatgagtattgtgagttagaatattgtcatggaatatgttcctagagaatgaagaagtttctacattttaaaaaaccctgttaattatatagtttgaatatatcaatctagaagcagtgcttcagttcaaaagaagttgtctgtggcaaaacttggaaataattaatcttgaatctcattactgcatcgtctttacttcagagacctcttcattctccattcct

SEQ ID NO: 300692 - DNA, 597 bp, Homo sapiens
tttgtacaattgagatattaaatgttattaagtatcactaacattgtcaaattgtagaagttaaaaactgatggtaagcagtgacataaaatattgttggtccaaaattatataagatccaccatagaaatgaaaaggacgattataagctagtgactaatatcataaaatcattttgtacaaggtatgaaattatttaaaacatcacttccattttattgggtaaaggaaatcataatgctgaagtttatgggtgcatttgaatttgaattattgctactctatataactgttcctgccatttctgcctaaaaacatctaatgtggtaatcttcatgtacaaaaatttatgtcaaaatcatagaaaatagtgcaaggagagtccgttttgacagtctggtattgttcagtagtctatgcactttctcagcagtcaaytgcttctctaaatacttttaaatttatctttaatatgtaccgccataacatggggacactattattattttttaattagtgaagcataatttttatattgagaactacacatatctaaatacagctcaacaaatcttcaaaaactggtgaactgagcac

SEQ ID NO: 300693 - DNA, 597 bp, Homo sapiens
tattccttttgtacatatcagccacatcagtttaagaggtggttctctagggcatgccagttgttttcatttgctgacacatttgtaaatctttaatttttaatcatgtgagtttctttccttgtgtgagactacaggagttgtcttaacatgttctgtaaaaaatgagttatccttaaaaacatttttcctctttgttttagtawagtaaattcgtggcaaaattcagatcattaaatgagaatggtgtgtttggcttcaagtattttaactggtggacttctccatgtacatgaaactggaaatgtcctctccccatctgagcagtgttggagacccccccaaccatagcctctgtcactaggattgtgatcatcatgctaaaggaattatatgattgcactttaaagttagtgtaaaacatgggcctgataatactccctagaataatttgtttctgtttctagattttctaatgtattgttggtagaattggttacaagagtataatattaaatataagagtcatctagaaaggaaataaatatgtagaaacaaaagcatgcaatcctcatttttttaaaaaaagaatatttt

SEQ ID NO: 300694 - DNA, 597 bp, Homo sapiens
tattccttttgtacatatcagccacatcagtttaagaggtggttctctagggcatgccagttgttttcatttgctgacacatttgtaaatctttaatttttaatcatgtgagtttctttccttgtgtgagactacaggagttgtcttaacatgttctgtaaaaaatgagttatccttaaaaacatttttcctctttgttttagtaaagtaaattcgtggcaaaattcagatcattaaatgagaatggtgtgtttggcttcaagtattttaactggtggacttctccatgtacatgaaactggaaatgtcctctccccatctgagcagtgttggagaccccccmaaccatagcctctgtcactaggattgtgatcatcatgctaaaggaattatatgattgcactttaaagttagtgtaaaacatgggcctgataatactccctagaataatttgtttctgtttctagattttctaatgtattgttggtagaattggttacaagagtataatattaaatataagagtcatctagaaaggaaataaatatgtagaaacaaaagcatgcaatcctcatttttttaaaaaaagaatatttt

SEQ ID NO: 300695 - DNA, 563 bp, Homo sapiens
gtaatttataaagaaaagaggtttaattgactcacagttccacgtggctggggaggcccaacaatcatggcagaaggcaaaggaagagcaaagttacatcttacatggcagcaggcaagagagcatgtgtaggggaactcccctttataaaaccgtcagatctggtgagacttattcactagcaggagaacagtatgggggaaactgatcccatgattcaattatctccacttggccccgccrttgacacatgagaattactacaattcaaggtgagatttgagtggggacacagccaattatgtcctaaataggacataggatagaaagtccttgaagaagtttgtgttggctcgtgttgtgatctgatttatgttttcaaatgcctcctgtggctcctctgaggtgatgccccttttgatgacactacacatgccttagcttgttcagacctatgttttttcaccttattatttatttcttttcttaccctcatttcccttaaaatgcagagatgtatgaatataaccataaattgaaaatgattctttgattttatgtgg

SEQ ID NO: 300696 - DNA, 563 bp, Homo sapiens
gtaatttataaagaaaagaggtttaattgactcacagttccacgtggctggggaggcccaacaatcatggcagaaggcaaaggaagagcaaagttacatcttacatggcagcaggcaagagagcatgtgtaggggaactcccctttataaaaccgtcagatctggtgagacttattcactagcaggagaacagtatgggggaaactgatcccatgattcaattatctccacttggccccgccattgacacatgagaattactacaattcaaggtgagatttgagtggggacacagccaattatgtcctaaataggacataggatagaaagtccttgaagaagtttgtgttggctcgtgttgtgatctgatttatgttttcaaatgcctcctgtggctcctctgaggtgatgccccttttgatgacactacacatgccttagcttgttcagacctatgttttttcaccttattatttatttcttttcttaccctcatttcccttaaaatgcagagaygtatgaatataaccataaattgaaaatgattctttgattttatgtgg

SEQ ID NO: 300697 - DNA, 615 bp, Homo sapiens
ttcatgttttaccctgtatccttgaaaggtggattttatatcctcttttgcaatataaaatatcttcatttgtttaatgtgttcttatctctttgaatcatataagctctgattcaattaggtagatggtgactcctgggtttccttcagatttatggagacctatttatcatttttaaaacaaatcagataaggaaaagtctgctcaatgaaacacagtaatttatcattttctggagagggaaatttgtttgctattttgttactgctgtgaatccaaattatcttacaggtgttttaaagatctgtctagatctgataagtcctttctatttggagtaaattggttctatcctccyagagagaataactgcaccatatgctgtgactcctcagagagatcagtcaaccctgggcatatgaacatgaaatacaatgggctgttgaactgagaggaagtaggagtgtcttcagaagcagacagttttctaataagcagctgattattggttattatttttgacctttgggctaatcataaaggaggctattagcaggtaatggattaaataaggtgactcatattcatttaatttctttaatatgaaggaggaa

SEQ ID NO: 300698 - DNA, 408 bp, Homo sapiens
ttcattaatcggtaaaccttcattgtctgggttaataggacatagcctacctggctggattctgactaacttctctgtgttctacarctgtgggaagagatcgttaacagaaagggtgccagctgggaaagattattataaaaggagacactaaaacattgctgcagacttcctctctacaaagctcaaactcatgtaggtgtgtccccgcttccaggggcaaaccagttccactattcttaacattttaccccctagaaaaaaacgcgatatttactgagccaatttcaagaaggtgatctagccatcctatctagggtccatcattctctcttagggccccaacttgagaacaactattggtgaattaaatacttaaaggatgagagattgttctcatctgcttgg

SEQ ID NO: 300699 - DNA, 642 bp, Homo sapiens
aactagatgatattataatcagttttttaagaatttatcaagatatcatcaaagcaatatatttcctctcctcttatgtgaatattaatagatatttaatatggtgtaaacattgtatagttatgtagttttccagacagcaacaatagttagaattgcaaaatttgcttgcacaggcaacttgtatgatgaggtaagacaacttgtatgatgtctaaatatattactttactgattgggtagcgtgttcttcaactgatggagaraatattagttttataacctgatagcaacttaggtcaaaaaattgagagtttttaaaccactgaaatggtctctgactttatcgatatccctttaacctttgctgggaaagctatacgattcctcacaatctagagagtttccattagagtcagcctttgccttgagacttctcctggaaagtatctgactttctctcctattaattctaaatgaactttgctgatgagagagattataaagatgaccactatttgtcatggtaatcaaaaatttcatctcggtccgcaaattcctgaatcaaatatcagctgtttacaatagccatccactggtcaagtaattactatactaattctagttactttatgtgtcaaa

SEQ ID NO: 300700 - DNA, 642 bp, Homo sapiens
aactagatgatattataatcagttttttaagaatttatcaagatatcatcaaagcaatatatttcctctcctcttatgtgaatattaatagatatttaatatggtgtaaacattgtatagttatgtagttttccagacagcaacaatagttagaattgcaaaatttgcttgcacaggcaacttgtatgatgaggtaagacaacttgtatgatgtctaaatatattactttactgattgggtagcgtgttcttcaactgatggagaaaatattagttttataacctgatagcaacttaggtcaaaaaattgagagtttttaaaccactgaaatggtctctgactttatcratatccctttaacctttgctgggaaagctatacgattcctcacaatctagagagtttccattagagtcagcctttgccttgagacttctcctggaaagtatctgactttctctcctattaattctaaatgaactttgctgatgagagagattataaagatgaccactatttgtcatggtaatcaaaaatttcatctcggtccgcaaattcctgaatcaaatatcagctgtttacaatagccatccactggtcaagtaattactatactaattctagttactttatgtgtcaaa

SEQ ID NO: 300701 - DNA, 590 bp, Homo sapiens
attttattaaatgtctatcatattaaagatccatccacttttataatggtactttttacttatctgaaaaattcacatgtactaaatagtttattcccacatgatgtttgaaaaatgacttttgcccytatattatgcatattgtaaatatagttataatatgggtttcaatataattatgtaatacataaaataatttataactgtaatacatgtaaaaggcttgttatgacatttattccaagttttatattcagtgagaaacattaatatgtcccctcaaacttcatatgttgaagccctagctgtcactgtgtctatactttgatatagagcctttaaagatgtaattctcattaaatgaagtcatgaagatggcaactgatatcataggattagaagaagacaccagagagctccttctccctctgtgtcatgtgagcacacaccaagaaggcagacatctgtaagccaggaagggccctcatcagaacttgacccttctggcacttggatcttggacttgcagcctccaaaactgtaagaaaataaatttttatagtttgaaccactcagtctatggtatttta

SEQ ID NO: 300702 - DNA, 590 bp, Homo sapiens
attttattaaatgtctatcatattaaagatccatccacttttataatggtactttttacttatctgaaaaattcacatgtactaaatagtttattcccacatgatgtttgaaaaatgacttttgcccttatattaygcatattgtaaatatagttataatatgggtttcaatataattatgtaatacataaaataatttataactgtaatacatgtaaaaggcttgttatgacatttattccaagttttatattcagtgagaaacattaatatgtcccctcaaacttcatatgttgaagccctagctgtcactgtgtctatactttgatatagagcctttaaagatgtaattctcattaaatgaagtcatgaagatggcaactgatatcataggattagaagaagacaccagagagctccttctccctctgtgtcatgtgagcacacaccaagaaggcagacatctgtaagccaggaagggccctcatcagaacttgacccttctggcacttggatcttggacttgcagcctccaaaactgtaagaaaataaatttttatagtttgaaccactcagtctatggtatttta

SEQ ID NO: 300703 - DNA, 473 bp, Homo sapiens
tgctttctttaaaatggtgaatatgagctcattgctatctaaatgtcagtcactctggcacctcacaaatttatacctggcatctccttggtgaatgggtgggttggcaaaaagaggaaggcaccaggattaagttaaactccccccaggagactctgctatatatatgaaaaggaggccaagtgttacctgttactgggattttccagccgtcatcaggctagaattgtgggaaaaatgagaaatgaaaagaagcagagctgctgcataaaatgcrgccagggttgtgatattaggagacatctgagagggacacagtggatcacggcttccagcctattccaaaatcaataaaagagaaagcatttagaatagggacttacagatttaaaaagaaaaaaggaagccagtagaggttggaggagtaaaggatgatgcgaaacagcactgagaaaggagatgaaggaaggtga

SEQ ID NO: 300704 - DNA, 527 bp, Homo sapiens
tttgaaaagggtactgcatttgggacactcccaaattctgaagtttctggctttacacgaatgtctgtggtcacacttagtttcaggaaaagttaacacaactgaaatgtaggttataaagtctgtattttagcagaagttttgaaagacttctgctaaaggagacttcatacaggaatacctaaagaatcttcttcagtatttttttcttttccatcaacaagcaaggatggccgattatctccaatcctgggctgtggcattagatatggctcctcagaagcttaggacctcagcacctttctttttgtctaaatccctggaagcttttaataattttrtcttgtcctagcattgctcaggcaactaactccagctgagcagaagaagaagaacatttaagcataacctctgtaaggaagtttatagtagaccacccagagctcggagcagcctgccccctacctttttcctgagaaatataggaagatttataggactagacattcagcttataaataggaaat

SEQ ID NO: 300705 - DNA, 619 bp, Homo sapiens
aataaactggtggatcacataaagtgttgatgtgggatgtcaaaagtgcctattgtttattttagctgtatatgaaagatagggaaaagagccatatgagagaaatagaactgttaaaactttgaggggaatttaaaggatatgtagaggattcaggacagtcagttttttttttttttaagaaaggtatttctcatcctagtctcttccaacaaaatattatcaaagtaagaaatggtttcaaggcactgatctaatctatggcctctgaggccttaacaatggtacttacagctacaaggtactggccagttcagctgtgtgcttttcctggcttacagatggccctcttttggctatgtcctcacatggtggagatggaggagacacagagaatgagatctctctcatgtctcttcttataaaggcgctagtggcatgatgagggattcaccctcatgacctaattgtctaacaaaggcccatttccaaatacatatcactttrggggttagggcttcaacatcctaatttcacaggggacacaattcagtccatagtacactggcaatatgtgttcaatggatttcagaattgctatgaaccagtgactgcagtg

SEQ ID NO: 300706 - DNA, 619 bp, Homo sapiens
aataaactggtggatcacataaagtgttgatgtgggatgtcaaaagtgcctattgtttattttagctgtatatgaaagatagggaaaagagccatatgagagaaatagaactgttaaaactttgaggggaatttaaaggatatgtagaggattcaggacagtcagttttttttttttttaagaaaggtatttctcatcctagtctcttccaacaaaatattatcaaagtaagaaatggtttcaaggcactgatctaatctatggcctctgaggccttaacaatggtacttacagctacaaggtactggccagttcagctgtgtgcttttcctggcttacagatggccctcttttggctatgtcctcacatggtggagatggaggagacacagagaatgagatctctctcatgtctcttcttataaaggcgctagtggcatgatgagggattcaccctcatgacctaattgtctaacaaaggcccatttccaaatacatatcactttgggggttagggcttcaacatcctaatttcacaggggacacaattcagtccatagtacactrgcaatatgtgttcaatggatttcagaattgctatgaaccagtgactgcagtg

SEQ ID NO: 300707 - DNA, 598 bp, Homo sapiens
atctactactggatgtgggtatgtgagtaagcacaaaagtcaaagttcagctagattgtctgcagtactataaatagagggagatatgaacagaataagataaaacctccctgragctacacagataaattaggagctggtaaaagtcttatgaaggaatcatgtaaactgcagaatatgagagaggataggaactcggaaatttgttaatatgaaaaaggcaggacagatagaaacaaaatccagatgttggtcaatatggggaaaatattgagggaaagatttagggcaatgaaagaaggtaatagatacgcagagagaaagatagcaagagagattgattatagggactttttcatttcttcaaaaaaaacaaaaatgggatacatgtgcagaaggtgcaggtttgttacatagtttgctgcacctattgacccatcctctaagttccctcccctcaacccccacccaccaacaggccctagcatgtgttgttcctctctctgtgcccatgtgttctcaatcttcaactcccacttatgagtgagaacatgcagtgtttggttttctgtttggtgttcctgtgttagtttgctga

SEQ ID NO: 300708 - DNA, 598 bp, Homo sapiens
atctactactggatgtgggtatgtgagtaagcacaaaagtcaaagttcagctagattgtctgcagtactataaatagagggagatatgaacagaataagataaaacctccctgaagctacacagataaattaggagctggtaaaastcttatgaaggaatcatgtaaactgcagaatatgagagaggataggaactcggaaatttgttaatatgaaaaaggcaggacagatagaaacaaaatccagatgttggtcaatatggggaaaatattgagggaaagatttagggcaatgaaagaaggtaatagatacgcagagagaaagatagcaagagagattgattatagggactttttcatttcttcaaaaaaaacaaaaatgggatacatgtgcagaaggtgcaggtttgttacatagtttgctgcacctattgacccatcctctaagttccctcccctcaacccccacccaccaacaggccctagcatgtgttgttcctctctctgtgcccatgtgttctcaatcttcaactcccacttatgagtgagaacatgcagtgtttggttttctgtttggtgttcctgtgttagtttgctga

SEQ ID NO: 300709 - DNA, 598 bp, Homo sapiens
atctactactggatgtgggtatgtgagtaagcacaaaagtcaaagttcagctagattgtctgcagtactataaatagagggagatatgaacagaataagataaaacctccctgaagctacacagataaattaggagctggtaaaagtcttatgaaggaatcatgtaaactgcagaatatgagagaggataggaactcggaaatttgttaatatgaaaaaggcaggacagatagaaacaaaatccagatgttggtcaatatggggaaaatattgagggaaagatttagggcaatgaaagaaggtaatagatacrcagagagaaagatagcaagagagattgattatagggactttttcatttcttcaaaaaaaacaaaaatgggatacatgtgcagaaggtgcaggtttgttacatagtttgctgcacctattgacccatcctctaagttccctcccctcaacccccacccaccaacaggccctagcatgtgttgttcctctctctgtgcccatgtgttctcaatcttcaactcccacttatgagtgagaacatgcagtgtttggttttctgtttggtgttcctgtgttagtttgctga

SEQ ID NO: 300710 - DNA, 618 bp, Homo sapiens
tacaaataaaaaaaaattcttataaaaataagatttggccctgggtttagaagaaactaaaataaacaaaatgacattcagagtgggtccaccaaaaaataatatgttagtgtcatcttgaaaactttggctttccaaattctacaaattgcacaygcacacacacacacacacacacacacacacacacacacacacacacatatataaccctaacttttaaacagataattaaaagagggaaaaattgacactaaaataaaatgtcactcatatagtatagaaaattgcaaagcaaatcacaaaaatttattttaaaaaatactggactcctagtacaattaagtgtcccctgaggttcaggacaattggacctaggataaaaatgacttacaacagagttgttttagtacctttaacagtctacttaagcatggaaggaggtgacatgctcttacacactgtttcccacctttcgctaaacccatgaaacaaagttttaaaaaacttttagaaaaaaatgctacccactagactggcaaagtagtaagaatgcttaccaaagttcagagcagtaagaaagggaaaaggatttaacaaaatgtatcaggagcccaa

SEQ ID NO: 300711 - DNA, 618 bp, Homo sapiens
tacaaataaaaaaaaattcttataaaaataagatttggccctgggtttagaagaaactaaaataaacaaaatgacattcagagtgggtccaccaaaaaataatatgttagtgtcatcttgaaaactttggctttccaaattctacaaattgcacatrcacacacacacacacacacacacacacacacacacacacacacacatatataaccctaacttttaaacagataattaaaagagggaaaaattgacactaaaataaaatgtcactcatatagtatagaaaattgcaaagcaaatcacaaaaatttattttaaaaaatactggactcctagtacaattaagtgtcccctgaggttcaggacaattggacctaggataaaaatgacttacaacagagttgttttagtacctttaacagtctacttaagcatggaaggaggtgacatgctcttacacactgtttcccacctttcgctaaacccatgaaacaaagttttaaaaaacttttagaaaaaaatgctacccactagactggcaaagtagtaagaatgcttaccaaagttcagagcagtaagaaagggaaaaggatttaacaaaatgtatcaggagcccaa

SEQ ID NO: 300712 - DNA, 533 bp, Homo sapiens
ctgacctaatttgagcatttctggggcaaccttcttcttacttcttctcccattcttgggctctgttaggatgccgacttgtagaggttggcattgaccttaatgctcaaggccttgggaagctcttgatctgtaaataacatcatctgtttcctgcctctgcaagaggagattttctgctgaatagactgtgccttggtttcaaggctctcttatctcttggacawgtgtctgctgctgctctcctggtaatttttctaactgtgacctggaattgaactctggttttcatcttttctcttcttcctcttactcagccacagcctcctggtttacatcatcagggatttttccatctccattactctggcccttctggttcaagcttttagccttaaaaaccaatagcatcctgacttgtgactcagctcaaccccatcacctgctttcaaattctcctccatattaactcccacctacagactttctcatgctctctctcactacacaaaacccatttccttccttatatt

SEQ ID NO: 300713 - DNA, 533 bp, Homo sapiens
ctgacctaatttgagcatttctggggcaaccttcttcttacttcttctcccattcttgggctctgttaggatgccgacttgtagaggttggcattgaccttaatgctcaaggccttgggaagctcttgatctgtaaataacatcatctgtttcctgcctctgcaagaggagattttctgctgaatagactgtgccttggtttcaaggctctcttatctcttggacaagtgtctgctgctgctctcctggtaatttttctaactgtgacytggaattgaactctggttttcatcttttctcttcttcctcttactcagccacagcctcctggtttacatcatcagggatttttccatctccattactctggcccttctggttcaagcttttagccttaaaaaccaatagcatcctgacttgtgactcagctcaaccccatcacctgctttcaaattctcctccatattaactcccacctacagactttctcatgctctctctcactacacaaaacccatttccttccttatatt

SEQ ID NO: 300714 - DNA, 533 bp, Homo sapiens
ctgacctaatttgagcatttctggggcaaccttcttcttacttcttctcccattcttgggctctgttaggatgccgacttgtagaggttggcattgaccttaatgctcaaggccttgggaagctcttgatctgtaaataacatcatctgtttcctgcctctgcaagaggagattttctgctgaatagactgtgccttggtttcaaggctctcttatctcttggacaagtgtctgctgctgctctcctggtaatttttctaactgtgacctggaattgaactctggttttcatcttttctcttcttcctcttactcagccacagcctcctggtttasatcatcagggatttttccatctccattactctggcccttctggttcaagcttttagccttaaaaaccaatagcatcctgacttgtgactcagctcaaccccatcacctgctttcaaattctcctccatattaactcccacctacagactttctcatgctctctctcactacacaaaacccatttccttccttatatt

SEQ ID NO: 300715 - DNA, 533 bp, Homo sapiens
ctgacctaatttgagcatttctggggcaaccttcttcttacttcttctcccattcttgggctctgttaggatgccgacttgtagaggttggcattgaccttaatgctcaaggccttgggaagctcttgatctgtaaataacatcatctgtttcctgcctctgcaagaggagattttctgctgaatagactgtgccttggtttcaaggctctcttatctcttggacaagtgtctgctgctgctctcctggtaatttttctaactgtgacctggaattgaactctggttttcatcttttctcttcttcctcttactcagccacagcctcctggtttacatcatcagggatttttccatctccattactctggcccttctggttcaagmttttagccttaaaaaccaatagcatcctgacttgtgactcagctcaaccccatcacctgctttcaaattctcctccatattaactcccacctacagactttctcatgctctctctcactacacaaaacccatttccttccttatatt

SEQ ID NO: 300716 - DNA, 561 bp, Homo sapiens
actgacctaatttgagcatttctggggcaaccttcttcttacttcttctcccattcttgggctctgttaggatgccgacttgtagaggttggcattgaccttaatgctcaaggccttgggaagctcttgatctgtaaataacatcatctgtttcctgcctctgcaagaggagattttctgctgaatagactgtgccttggtttcaaggctctcttatctcttggacaagtgtctgctgctgctctcctggtaatttttctaactgtgacctggaattgaactctggttttcatcttttctcttcttcctcttactcagccacagcctcctggtttacatcatcagggatttttccatctccattactctggcccttctggttcaagcttttagccttaaaaaccaatagcatcctgacttgtgactcagctcaaccccatcacctgctttcaaattctcctccatattaactcccacctacagactttctcatgctctctctcacyacacaaaacccatttccttccttatattttctgttccaatctttggttttctctt

SEQ ID NO: 300717 - DNA, 573 bp, Homo sapiens
attgtataaataaagatgctatttccaatgagataaaccacttatatcaataaggaagcaaattgcactcaaattaatgaagaaaagaaatcaatcwcctggcctttttagtagtctgcagactatattggtttcatttgaaatatatgtttttgggctagggctttctctggaaggctagagctttgaggagttaccaatatggtagttgaagtcatggggttagatgatatttccaagagatactcattgtttggcattaaaagaaaagtcagtgtttcgttggtaggagataaatttaaaacaggtaggatcttttgtaatctcccaaagtcacattactttatcctaactgaggtcaactcttgaagttgaaatgtctgtctctatgtgcaggcctctgcacacacacaagtgcacacatacttatgcaagtgtacatgtgtgcacaaatacacacacacattacatcaatcatttgaattacttatacacataaaaaagtatggcatatttatataagactgttgagcagagaggcaaagtcaagccctcataaatatgggtagagaa

SEQ ID NO: 300718 - DNA, 556 bp, Homo sapiens
tggtgatggcaagggaatgctgagaagcgcaacatttttcaatgactaccaaaggaagctagtaaatcatacataatcgtgacatatgaagacatatcagtaatattatctataaatgtggaggaaatagggtgaaaaagttgaagagttgaaaatggttgctctggggcctaaggctggagcattgggtagagtgggtaggagaagggaccactgctttctaacagggcacttytatctctatctgatttcttaaactctgtacatgtataaaaacaaaaacgtttttaataattaaaaagaagagaagtgggtggcttaggttgctggagtagtggggatattagcctggaagaaatttttgatcccataccttttattcattagctttatatactcagaatttcaggatcttctgtgtcagtaagtaggtgatacatactcaagcctgaattggttcatcactaaagtaatcatagcagtttgcagcaaagagaagacagcacaaaaattcaagccacaaaaggttgcactgtgactcttctgtaaacctcaa

SEQ ID NO: 300719 - DNA, 570 bp, Homo sapiens
aaaatctgagccttactcaaagtaaatcatgtaactcacatatctatgacccagggacccaagctgatacagagcacatagctaagtatgctaatctcttttcttatttggctagtcagagatttctttaattctatcaaaaataccacgtcataaagtttcctttgaatggaggctgtggaagagtggaaccaggtttcaccattagcaatcataaaggtacaacaacaaaaacttggcaaaatgataagtacaataattctaaccaaggccactgctagtgttgaagggatgaaatagaacggatacctccactgggaaagatacattggagaaacgatgcccttcctccagataaaggcattggcatttgagggcaggtgacctggggggtggctcgggctgcagaatcccaccctcacctawcccctgactctgcttttggactcaactacacaatcatagcacaagctctgctttttacacacagcccagacccttattgtgccagactcctattaacttcagtagggatggcaccaggttcaagagtccaaaaaagagactcag

SEQ ID NO: 300720 - DNA, 545 bp, Homo sapiens
ttgtaacagacatgtattgcacaactacaacatgcaagtcatggttatagcttctgagttagattcaaatatgaataagccataattcctaccctcaagaagctcagagtttaccaatttaggtaatagatcttactgtccaataggttcctgtgtctttcattcaacagatcaggaataaaaagatatttaagggacagaaataaattttctggcccaaagtcacatacatgtaaagaaaaagaacaaagaagcrcaggccccttcaaagctttagaggtttcccacaaaacccacattgcttgacctagcagcaacaatgactaatggaggtagttagtaaaacactagacatcctgtcagatcttccctttgggtaaacttcacaacaaactttagaacaaggcatgctatttgttcaagagatcactggtgctttcctggaagacaccaacgagctgggctgaaatgttcatttcctcctactggactgtccggaagcagatcacttgtccttcccacgcactgtttagctgaaaaacagc

SEQ ID NO: 300721 - DNA, 594 bp, Homo sapiens
tatgacatacttctgttatttccaatcaagacagtgtcagtatttggccaagctatatttacaatagcatattttattctgtaatgcaagtattttactatgtaatctactaacagtcacagtgagtgacagccttatctttatcccctcaactgccagactgacataaaatctgggatcagtgaccaagcagaacacctgtttcctggtgccctkaacagcttcagaaaagatcatattctttctagcaactacctttcccaagaaccgtgcccctttttcaaaaaataaatctagagttatagattttcgcagacaaaacaaatttcttttagattttatctaggctgctcacaccaaccactattctactcactcccatgtataaactggataccttttataatttccctgtataaggcagccatgtatgcaacctctgcttcatctctttcagttgactcccacccctttacaaggaagtctgtctcatatatgcacagtatgcattattagaacatccttcctcatactgaattaaatctagccactggcttagttctgacttgcagggcccagagtaatatggctgca

SEQ ID NO: 300722 - DNA, 318 bp, Homo sapiens
gaccttttgaattatgatccacaggacatgaccccaaactcaaagaatgtcatgacctggtctatggcctggaattcctctatgcaggatttgatattttaacctctttaaagactatgtggtcttggatagatatttctagaaatgatgtcatgctgttggatcagagcaagtgtgtggacacataaaatccccaaatccattttgtggaaggkgctattaagccgggttttctagcttcttggtaaacttgggccagtgctctattttctcagaagatcaagagatatgctggattcacacatgattttcttttgg

SEQ ID NO: 300723 - DNA, 651 bp, Homo sapiens
cccatcagaatgatacactttttgcaaataatgaaactatgtcaacatatgcaaccatatgtcgatataaaccatattgagtatatggttttaatactcaaaaaccatagttcacattagggttcaatattggtggtgtccattttatgggtttagacaagcatgtaatgacatgtatctatcattatagtacattcagtgtagtttcaatgccctaaaaatcctctgtgctctgccaattcatcccaccctgcctgctaaccccagtaaccactctggcaatgtttttattgtctatatataggttttgacttttccacaaagccatatggctggaatcakacagtatgttgccttttaagattggcttcttttacttagcaatgtgcatttcagtttttcccagtactgttcatggcttggtaactcatttcttgttagcactgaacaatgatatatttatcattgcctaggtataccagtttatccatttgcctactgaaggacttaccaaaccttgattccaagctttggcaattatgtataaagctgctacaaatatctgtatgtagatcttcgtgtggacttaagtcttcaatttgaaaaatactaaggaggccaattgttggatcatatgataagagtatgttt

SEQ ID NO: 300724 - DNA, 582 bp, Homo sapiens
gaaaccaggtagagccaatcctcgaactttgttcttctctttcagtattgtgttgtccatctgggtcttttgtctctccgtataaactttagaataagactggcaatggccaggcaaggtggctcatgcctgtaatcccagcactttgggaggccaaggcaggtggatcacctgaggtcaggagttcaagaccagcctggctaacatggtgaaaccctgtctctactaaaaatacagaaattagcctggagtggcagcaggtgcctgtaatcccagctactcaggaggctgaagcaggagaatcacttgaacccgggaggcagagctacagtgagccaagatcatgccactgcactccagcctgggtgatagagtgagactctgtctcaaagaggaaaaaaaaaaaaagagtaagattggcaatatccacaaggtaatttggtggtatttttattgggattaaattgaatctacagatcaagctgggaagaactgmcatcttaacaacattagattcttctactcatgaatatgaaatatctctccattttttatttaggtttccttgacgtcatgcatcag

SEQ ID NO: 300725 - DNA, 563 bp, Homo sapiens
caattttgcagaatatccctttaatgtagttcaagtttcaaacatggagaaagtaaagaaaaacatatttgctattagaaagatatgagcaaaataaagacaactattttgaatgtaccataataagggttctgtacttgaactaaaaatacactaaagtgggaagtcttagccgctggtcagctgctcaggtgttgattataaacactgtagtgtatttgggaatggtgttgctgaattcacagtacrggcataggtagcaatactaagatggtaaggcaaatgttagtgtctagcattttattacataaaagcaggctcaaattagcagcagttataaaattaccattattcattttaagatagtcctttgccttcatgtgtatcttgcctttttttatacattggtcaaaaggaaatagtaagttctcaacctgaatgagacaaacattagtatttactttaactattgtatcattccgaaattgacccaattttttaaagatgtttattgtagagttctattgtttgttttttgtttgcatatccatttttactatata

SEQ ID NO: 300726 - DNA, 523 bp, Homo sapiens
atgcatgggcgattgttgagtagagacttctggctgtgccatgatcttgactggccaatgccaggagttcaggatgacasctttctgcctctagtcagccctcgacttcccccaggaatattgtgaaagtggaagctggttccaggcagaccaatgctcccaacccacaagggttgggagttgttagccttttcccagaaagcctcacatctgagtcttaagtccagcagccacgctaatcgtttttaaccagctgacaggtacctggtattttcctctgattctaaggaaggataggatagaacagcaagcaaaagtggtccaatattactcaccgctttggagaatccccgtataggccaccaaatcttactggtgggtctttgttcttagagctcccaagatggtggcaagccactcccaagatggcagcaagccttttgttccctgacctggggttcttggcctcacgaattccaaggaattgaaccttgagccatgcagtgagtgttatagctctatt

SEQ ID NO: 300727 - DNA, 502 bp, Homo sapiens
caaatgagctgaaaacatatccacacaaaactttgcacaatattattcataaacaccaaacttgaagaaggaaaccaagatgtccttcagtagaggaacagataaactgtgattcatccatacaatggaatgttatttagcaataaaaagaaatgagctaaccagccattaaaaggcatggaggaaacttaaatgcatattactaagtgaaagaagccaatctgaaaatgattcatactatatgattccaagtatatgacatcctggaaaaggcaaagctatggagacagcaaaaagatcagtagttgccaaggggtggaggtcagggaagagggatgagtaggtggaagacagagcatttttagggcagtgargccaccctgtaatggtgaacttatatcatttgtcaaaacccatagaacttacaacacaacaagtgaagtctactgaaaactatggactgtgggtgaccatgatgggtcaatgtaggttcataattgta

SEQ ID NO: 300728 - DNA, 582 bp, Homo sapiens
ttaatttcaaggactctcaaaaattaaatacagattctgctcactagctcttacaggaagcatttctcttccatttgccccaattagactgttgcctcaagtgtggagacrgaaaggagatgcttaatactcaaagagactttaagatctcctagttccttagttccattcttagttgaaattcttagctccattctgttgaaaaataactactacctcctcaactctccaaacacttctaactctcaactagagtattttgcaaaagcatattctggccataagtgctcctcaaattcacagaaaacatttcaaattcctatgaaatggtcctctcaaggacaaaaaaaaaaaaacagaaaaaacacaaagcacctttgaatttttacaacagacatgaggacttaacaatagatatgaggcagtttaagaaaaaaaatcccagagctgagaaaaactatcctcaaatacctataatttggtagttggccagattaaatcgccacaagacccagaatttcttggcattgggaacctactccaacaagagtcaaataaccgaaagaatcaaaagagtaacac

SEQ ID NO: 300729 - DNA, 594 bp, Homo sapiens
catcccaccacctccctggagccagggtgagattgagacaggtagcccctccagtagcccttcaaacaatattttttatacccttcttcaacatttatttggaggaaagactgattgctgcctaggggatgttctgtgckggaaacctgcgagggcaaaagaaaagacacacacaccaaatacctttaagggtaaacaacctttatcccatgtaaatggcaatgcaaatataataaaaaaaatgatataataagaaaattgcaatgggaaggggagaagggaaaaaatatatatattttccactcaccagactatggagaattcatcaccagactggaaagtaacagcctgggctccagagtcagccactcatccgtgcacagacaagaagaggtctcatgaagcttcagcacagtctgggaccctatctctttttgtaaccagttgtttggcacgaggccgtgtcatgagggctcaaggaacacagaaaggtcaacttgtttttgcgattgtctgttgtttttcaataacttacatacaggaacagatttctccaaaactgtgctggatgaatgccccaaggggctcatgcaa

SEQ ID NO: 300730 - DNA, 597 bp, Homo sapiens
aatgcagaacttattaagcgaggaaaacttgctaaggatccaggtatgggtgcagtactgttccatctacctaagatgggagaaggcacaatgcagaagatgccctgctgatgtgagctgtgaaacagtccagccaaaagcctggcctgtggtcagcagaggtaaatctaccaggagaatgctcatgaggtcactggtgagaattaccttggcagmaagtagctctcttgtcctgctcttcaatctgacaagtcactgttttatagcactgtcttagtcaattgggctgctgtaacagaataccatagcctgggtggcttaaaccagggatccccaacccctggatcactgattggtaccagtccgtggtctgttagaaactgcgctgccacagaaggaggtgagtggtaggcaagcaagtgaagcttcttttgtatttatagctgctccccattgctggcattactgcctaagctttgcctcctgtcggagcagtggcagcattagattctcataggagcacaaaccctgtcgtgaactgtgcatgtgagggatctaggttgtgtgctccttgtgagaatctaatgcctgatgacc

SEQ ID NO: 300731 - DNA, 574 bp, Homo sapiens
catgtgaatatggtttatatcagttatgaaaaatgtgctaactttgtaaataggactcattgctaagaaaatgtaaatctgtttgagttaaacatcaatcaaagaacaagtggaagtgattttttcaaaaacaacacttagtacatttatagacagaatttcaagatttgtaattygaatttaaaggcttatgcaaaatcagattttataattataattttaataaacattgattaaaaacccagatacctggaaatagtctttctcacacacattagacatttaaaatattcacagtgatggttgtgtgtgtgtgtgtgaaacttgtatcagtaattagatcagaaagaatgatgcactccaaagaaatctaagagatggagaagagatggcccaaaaaggactggagacacaaatttgagaagcttaaaaaaaaaacacaacgggttatagtattgaaagcaaaatttcccataatttagcaaaccagtacctcaagaaagtttgattttaacatgtagaccattttttagaagtctattttatttatttttaatttttaatttttttttga

SEQ ID NO: 300732 - DNA, 574 bp, Homo sapiens
catgtgaatatggtttatatcagttatgaaaaatgtgctaactttgtaaataggactcattgctaagaaaatgtaaatctgtttgagttaaacatcaatcaaagaacaagtggaagtgattttttcaaaaacaacacttagtacatttatagacagaatttcaagatttgtaattcgaatttaaaggcttatgcaaaatcagattttataattataattttaataaacattgattaaaaacccagatacctggaaatagtctttctcacacacattagacatttaaaatattcacagtgatggttgtgtgtgtgtgtgtgaaacttgtatcagtaattagatcagaaagaatgatgcactccaaagaaatctaagagatggagaagagatggcccaaaaaggactggagacacaaatttgagaagcttaaaaaaaaaacacarcgggttatagtattgaaagcaaaatttcccataatttagcaaaccagtacctcaagaaagtttgattttaacatgtagaccattttttagaagtctattttatttatttttaatttttaatttttttttga

SEQ ID NO: 300733 - DNA, 602 bp, Homo sapiens
atatatgagttatagaggttctttgtagatcttggataccagtcctttttcagataaatgtttttyaaatattttatcccagtgtgtgtcttgcctattcattttcctaatgatatgaggagcagatgttttaatttagataaagttaaataaataaactttaattaattactttttaaattttaatttagataaagttaatttagataagttattttttattttatagctattgctttctgtgttctgtctaagaaacagaaagttttaaatgcccaaaggacatgaagatattctcctatattttagctttaacatttaggtatatgatccatcctgaattagtggatttccagttattcctgcaccatttgtcaataagactttcctttctccattggatctattgggtgcctttacaaatattaaatgattacatgagtatgggtctttttctgggctgtttgttccattgatcaatttgtgaatcctcatatcagtaccacattgtcttgattactttagctttattataagtcattaagtcaggcagtatatctcctcagactttgtctttttaaatattatttttgatattgtaa

SEQ ID NO: 300734 - DNA, 602 bp, Homo sapiens
atatatgagttatagaggttctttgtagatcttggataccagtcctttttcagataaatgtttttcaaatattttatcccagtgtgtgtcttgcctattcattttcctaatgatatgaggagcagatgttttaatttagataaagttaaataaataaactttaattaattactttttaaattttaatttagataaagttaatttagataagttattttttattttatagctattgctttctgtgttctgtctaagaaacagraagttttaaatgcccaaaggacatgaagatattctcctatattttagctttaacatttaggtatatgatccatcctgaattagtggatttccagttattcctgcaccatttgtcaataagactttcctttctccattggatctattgggtgcctttacaaatattaaatgattacatgagtatgggtctttttctgggctgtttgttccattgatcaatttgtgaatcctcatatcagtaccacattgtcttgattactttagctttattataagtcattaagtcaggcagtatatctcctcagactttgtctttttaaatattatttttgatattgtaa

SEQ ID NO: 300735 - DNA, 602 bp, Homo sapiens
atatatgagttatagaggttctttgtagatcttggataccagtcctttttcagataaatgtttttcaaatattttatcccagtgtgtgtcttgcctattcattttcctaatgatatgaggagcagatgttttaatttagataaagttaaataaataaactttaattaattactttttaaattttaatttagataaagttaatttagataagttattttttattttatagctattgctttctgtgttctgtctaagaaacagaaagttttaaatgcccaaaggacatgaagatattctcctatattttagctttaacatttaggtatatgatccatcctgaattagtggatttccagttattcctgcaccatttgtcaataagactttcctttctccattggatctattgggtgcctttacaaatattaaatgattacatgagtatgggtctttttctgggctgtttgttccattgatcaatttgtsaatcctcatatcagtaccacattgtcttgattactttagctttattataagtcattaagtcaggcagtatatctcctcagactttgtctttttaaatattatttttgatattgtaa

SEQ ID NO: 300736 - DNA, 602 bp, Homo sapiens
atatatgagttatagaggttctttgtagatcttggataccagtcctttttcagataaatgtttttcaaatattttatcccagtgtgtgtcttgcctattcattttcctaatgatatgaggagcagatgttttaatttagataaagttaaataaataaactttaattaattactttttaaattttaatttagataaagttaatttagataagttattttttattttatagctattgctttctgtgttctgtctaagaaacagaaagttttaaatgcccaaaggacatgaagatattctcctatattttagctttaacatttaggtatatgatccatcctgaattagtggatttccagttattcctgcaccatttgtcaataagactttcctttctccattggatctattgggtgcctttacaaatattaaatgattacatgagtatgggtctttttctgggctgtttgttccattgatcaatttgtgartcctcatatcagtaccacattgtcttgattactttagctttattataagtcattaagtcaggcagtatatctcctcagactttgtctttttaaatattatttttgatattgtaa

SEQ ID NO: 300737 - DNA, 582 bp, Homo sapiens
cttgcagaccccttgtctgtgtcccctgcccgctgggctgaggaatatttggagcaatcagaggagaagctgtggctgggagaacctgagggaacagccaccgatcgctggtgagttcagatacctctttccgaatcccgtgaaaggagtatggacagttttcccagcctcctccatccacgttctcgaaccaacttactttattcttttttttttttttttttatcattcttgggtgtttctygcagagggggatttggcagggtcataggacaatagtggagggaaggtcagcacataagcaagtgaacaaaggtctctggttttcctaggcagaggaccctgcggccttccgcagtgtttgtgtccctgggtacttgagattagggagtggtgatgactcttaaagagcatgctgccttcaagcatctgtttaacaaagcacatcttgcaccgcccttaatccatttaaccctgagtgaacacagcacatgtttcagagagcacagggttgggggtaaggtcatagatcaacaggatcccaaggcagaagaatttttcttagtacagaacaaaatgaaa

SEQ ID NO: 300738 - DNA, 576 bp, Homo sapiens
gttctggccaataaagtgtgaatggatgtcatgtgtgtcacttccatgtggaggcagtgaaaagtccaagtaagatgctccagtctctctcttccgctgccctagcaactacatgttccagatggtgcatctacaagatggtggagcccaggtcaacctgggtccctgagttactatgtggagccaagtcctccaccaaccacagcaggtttgtaacatggtgataaataaatggtgtgtgtgtgagctgtggagatttgggggttaacttgttccagcagcataasctagcccattctgatgaatataatatagaaagaatacttgaaaagaagatggaatcttttgcattaaggtgcttctcagtagtttcctggatccaggcttccttcttcatattcattccaagcagctctcttagatctcgccttgcttcttctattggactttgttggcttccagtcacaatttatttctgatttactggcatctagatttaaaactctttttgaaagcagctggacctacgtgcattcatctcctttttctttttatgtctgtctctactgacagtca

SEQ ID NO: 300739 - DNA, 576 bp, Homo sapiens
gttctggccaataaagtgtgaatggatgtcatgtgtgtcacttccatgtggaggcagtgaaaagtccaagtaagatgctccagtctctctcttccgctgccctagcaactacatgttccagatggtgcatctacaagatggtggagcccaggtcaacctgggtccctgagttactatgtggagccaagtcctccaccaaccacagcaggtttgtaacatggtgataaataaatggtgtgtgtgtgagctgtggagatttgggggttaacttgttccagcagcataagctagcccattctgatgaatataatayagaaagaatacttgaaaagaagatggaatcttttgcattaaggtgcttctcagtagtttcctggatccaggcttccttcttcatattcattccaagcagctctcttagatctcgccttgcttcttctattggactttgttggcttccagtcacaatttatttctgatttactggcatctagatttaaaactctttttgaaagcagctggacctacgtgcattcatctcctttttctttttatgtctgtctctactgacagtca

SEQ ID NO: 300740 - DNA, 558 bp, Homo sapiens
gtggagaattgtttaaaattatcattgctgaaaatagaagaaagagcaaattgtaaaaataaaggagaaatgggtaatgataagagcacatttgaggytggagaacattagtcttcatttttttaagtcactatttagttgtgtgatattctccaatatcactcaaaaatatagacgaaaagcatggtaaaagtggacagttagattgaagcaggattaacattttgccaagaaggtgcaataaaagggcagtgggtaagggatctagggatattggcattaagatgaaagactaagaaactaagtggatcagaaaaggagaattcaagaaaaggcagatcagtggtgagaagacaaggcactgaagatgtcaatggggatggcaggactgaaggtagttgtcttagtctgctcaggctgctataataaaatatctagaggctggaagtctaaaatcagagtgcgagcaaggtcaggtcctggtgagggccctcttctgagttatagactgccaacttctcatggtgttctcacctgacagggagagagagagatcaa

SEQ ID NO: 300741 - DNA, 558 bp, Homo sapiens
gtggagaattgtttaaaattatcattgctgaaaatagaagaaagagcaaattgtaaaaataaaggagaaatgggtaatgataagagcacatttgaggctggagaacattagtcttcatttttttaagtcactatttagttgtgtgatattctccaatatcactcaaaaatatagacgaaaagcatggtaaaagtggacagttagattgaagcaggattaacattttgccaagaaggtgcaataaaagggcagtgggtaagggatctagggatattggcattaagatgaaagactaagaaactaagtggatcagaaaaggagaattcaagaaaakgcagatcagtggtgagaagacaaggcactgaagatgtcaatggggatggcaggactgaaggtagttgtcttagtctgctcaggctgctataataaaatatctagaggctggaagtctaaaatcagagtgcgagcaaggtcaggtcctggtgagggccctcttctgagttatagactgccaacttctcatggtgttctcacctgacagggagagagagagatcaa

SEQ ID NO: 300742 - DNA, 561 bp, Homo sapiens
cacaactagaatttgccagtcttacatataagaaaaaatagaccacttcactccaacacaagccatagaaaccacaaagaagcattattagtgtttaggtcgttttgaggactttgacagtaccatgatagacacctcagaaactagatgaatgacatatgctaatcaaagtggcttgatggctgaaatgtaacccagtcaatctcaaattatgtcctttaacaaactcagctgrcactttcctttcaatacaaataagccaaacaatggaaaaacgaatgagcaggttttcccctatgttggtaggaaaggacaatggtggggtatggagttattataactgctgctagaccacatacacagaggaaattacaagtgaagcaataagttcaacagatgccctttccaaaaaatttttcatgaggaataattactctaaaggatgagaaatcccctacgttttcaaagcctcttccctcaaaaatgctcagtgttctccacacgctatttaaccatccatcgtgagacaatttgcagttacctccacacttcccatgtgaa

SEQ ID NO: 300743 - DNA, 561 bp, Homo sapiens
cacaactagaatttgccagtcttacatataagaaaaaatagaccacttcactccaacacaagccatagaaaccacaaagaagcattattagtgtttaggtcgttttgaggactttgacagtaccatgatagacacctcagaaactagatgaatgacatatgctaatcaaagtggcttgatggctgaaatgtaacccagtcaatctcaaattatgtcctttaacaaactcagctgacactttcctttcaatacaaataagccaaacaatggaaaaacgaatgagcaggttttcccctatgttggtaggaaaggacaatggtggrgtatggagttattataactgctgctagaccacatacacagaggaaattacaagtgaagcaataagttcaacagatgccctttccaaaaaatttttcatgaggaataattactctaaaggatgagaaatcccctacgttttcaaagcctcttccctcaaaaatgctcagtgttctccacacgctatttaaccatccatcgtgagacaatttgcagttacctccacacttcccatgtgaa

SEQ ID NO: 300744 - DNA, 561 bp, Homo sapiens
cacaactagaatttgccagtcttacatataagaaaaaatagaccacttcactccaacacaagccatagaaaccacaaagaagcattattagtgtttaggtcgttttgaggactttgacagtaccatgatagacacctcagaaactagatgaatgacatatgctaatcaaagtggcttgatggctgaaatgtaacccagtcaatctcaaattatgtcctttaacaaactcagctgacactttcctttcaatacaaataagccaaacaatggaaaaacgaatgagcaggttttcccctatgttggtaggaaaggacaatggtggggtatggagttattataactgctgctagaccacatacacagaggaaattacaagtgaagcaataagttcaacagatgccctttccaaaaaawttttcatgaggaataattactctaaaggatgagaaatcccctacgttttcaaagcctcttccctcaaaaatgctcagtgttctccacacgctatttaaccatccatcgtgagacaatttgcagttacctccacacttcccatgtgaa

SEQ ID NO: 300745 - DNA, 625 bp, Homo sapiens
cttgagtatcaaaataaataatgatggtaaaggattataaccaattgagtaaaataagaatcaatgagttcttacaaacaggaaggaaggaagggagggaaggagagagagagggaaggacagaggaagggagcgagggaaggacctcaataccacatctggctttgtagggttccacatcatgcccagatttggtaatgccaactcttaagtatagaagaaatgacagaattagaaaatcagagtaatagctgaaaaaatcatcaatggatgctaaaagagtgaataaaagttagawgaggaaaaggatattaacatagtctcaaaatatctccattcataatctatattaattacttattaaaatgcaaaatacttattaattttacaatggagaaacttggcagaaaccatctttgccaagtaaaaaaaggaacatcatcaataatgggacaaattaacatcttgtgactcctgaaataatgcattgagaagaacggagcaaaagttctgtggtatacctgccaaaaatgtgcaacctgaatctaactgtgagaaaataccaaacaaacccaaactgaggtatattttacaaaacaacaggcccgtaatcgtcaaagacaag

SEQ ID NO: 300746 - DNA, 625 bp, Homo sapiens
cttgagtatcaaaataaataatgatggtaaaggattataaccaattgagtaaaataagaatcaatgagttcttacaaacaggaaggaaggaagggagggaaggagagagagagggaaggacagaggaagggagcgagggaaggacctcaataccacatctggctttgtagggttccacatcatgcccagatttggtaatgccaactcttaagtatagaagaaatgacagaattagaaaatcagagtaatagctgaaaaaatcatcaatggatgctaaaagagtgaataaaagttagatgaggaaaaggatattaacatagtctcaaaatatctccattcataatctatattaattacttattaaaatgcaaaatacttattaattttacaatggagaaacttggcagaaaccatctttgccaagtaaaaaaaggaacatcatcaataatgggacaaattaacatcttgtgactcctgaaataatgcattgagaagaacggagcaaaagttctgtggtatacctgccaaaaatgtgcaacctgaatctaactgtgagaaaataccaaacaaacccaaactgaggtatattttacaaaayaacaggcccgtaatcgtcaaagacaag

SEQ ID NO: 300747 - DNA, 594 bp, Homo sapiens
ctttgagcactccagaagaaagacatgctccaaatacaaggcattaagaaatctgaaggctctacttcatgattatcatacaaattatcaggaggattttaccaagagagtagttactttatgctaaatccagccaaataatggagggaaaatgcactgaagagacagaaactaacatgatgtcctaaaggtgtgtataaaataacacttcaaccaggtgggattaaaggttaatcaacatgtaaactatttgtagcaggtattttacagtgccaatgtgcttgatttttaattacagcattcccttttgatcatggacatagagtttagtgcagaggacaaaaaattgatggcaaaacgttcaacgtcattastcagcagagaaacgcaaattaaaccacaatgaggaagcaacacacccagttcaatggataaaataaaaaaagattgacattaccaaaggttggtgaagatgtgaagcaaccagaacacaaataagttgctagtgagaggatgaagtagaacagctactttggaaatcagtgttgtgtttcttataaagctaaacataacctacacaatgaccctgcaatt

SEQ ID NO: 300748 - DNA, 594 bp, Homo sapiens
ctttgagcactccagaagaaagacatgctccaaatacaaggcattaagaaatctgaaggctctacttcatgattatcatacaaattatcaggaggattttaccaagagagtagttactttatgctaaatccagccaaataatggagggaaaatgcactgaagagacagaaactaacatgatgtcctaaaggtgtgtataaaataacacttcaaccaggtgggattaaaggttaatcaacatgtaaactatttgtagcaggtattttacagtgccaatgtgcttgatttttaattacagcattcccttttgatcatggacatagagtttagtgcagaggacaaaaaattgatggcaaaacgttcaacgtcattactcagcagagaaacgcaaattaaaccacaatgaggaagcaacacacccagttcaatggataaaataaaaaaagattgacattaccaaaggttgrtgaagatgtgaagcaaccagaacacaaataagttgctagtgagaggatgaagtagaacagctactttggaaatcagtgttgtgtttcttataaagctaaacataacctacacaatgaccctgcaatt

SEQ ID NO: 300749 - DNA, 612 bp, Homo sapiens
aatctatcagcccttataaacctataatggtttatatcactttgtgatgaagaagaaataaaatatagaccatggattagctcctgataaatatctgtgtttatcaggacctagtagtccagaaggaataaaaagytctgtccaatctggaaacaaagaacacaggttgcttgcaagaaaagatatcaatattgatgacataagttttccacgttttgttttccactttcttttgtactacagctctactggagtcagtccctgggctgcccatttctaggttttacccgtctactttagtttcctactttcttccttcccaaaaaactcacagctatgtcaactcatctgcatttgcactctacacagctaactcaaataacctttgttcccacatacataaaaaggactcaaacttcagttcccccaggaattaaggcaagatataagaaataggtaaatagcctcaattccattcctcctgtaacacaaatacagatacacatacatatatacatacatatgtgtatatatacatatacacatttagtcccacatttagtgggacttaatatccatcattctcccatgtactgcagtgctgaccaatgg

SEQ ID NO: 300750 - DNA, 612 bp, Homo sapiens
aatctatcagcccttataaacctataatggtttatatcactttgtgatgaagaagaaataaaatatagaccatggattagctcctgataaatatctgtgtttatcaggacctagtagtccagaaggaataaaaagctctgtccaatctggaaacaaagaacacaggttgcttgcaagaaaagatatcaatattgatgacataagttttccacgttttgttttccactttcttttgtactacagctctactggagtcagtccctgggctgcccatttctaggttttacccgtctactttagtttcctactttcttccttcccaaaaaactcacagctatgtcaactcatctgcatttgcactctacacagctaactcaaataacctttgttcccacatacataaaaaggactcaaacttcagttcccccaggaattaaggcaagatataagaaataggtaaatagcctcaattccattcctcctgtaacacaaatacagatacacatacatatatacatacatatgtgtatatatacatatacacatttagtcccacatttagtgggacttamtatccatcattctcccatgtactgcagtgctgaccaatgg

SEQ ID NO: 300751 - DNA, 556 bp, Homo sapiens
gttaacttttcaagtgactgtgactcttttccccaaccagatgtaagttccgtaaggaagggcactatagctcatcattggtgtaatttcctcggtgccctgatcatgagaattccataaatacatgttagcgattgtgataagatgaagagrcaggaccttattcactcacacagttatgcagacgaattcctctcattaacatgctaacattttgctccccattttgtgacttaccgtggtatcaatgtcaaagaaaacaaggcaagcattataagttaacgtccataagactaatgtgtccttgtccattctctgcaaataatcatattcctaaacttcaacacttctaaggtcttcattctcatccctaccccacttatagtctgtggatgggtgacctagctttttctttcacataaaaagtaaaatgtactgaatgaacattcctcagatttttcgtctcctgtccctcacctacacacccatttatatccccatctacatttcttcttccccatcctgtcttcattcttgcttagcattaggcacatca

SEQ ID NO: 300752 - DNA, 616 bp, Homo sapiens
agacacagaattagtgatatggtttggctctgtgtttccacccaaatctcatattgtagctcccgtaattcccatgtgttgtggaagggacctggtgggagatgattgaatcatggagcaggtctttcccatgctgttctcatgatagtgaatgggtctcataagatctgatggttttataaacgggagtttctttgcacaagctctctctctgcctgccaccatccacgtaagatgtgacttgctcctccttatcttctgccatgattgtgagacctccccagccatgtggaactgtaagtccaattaaacctctttctttcgtaaattgcccagtctcaggtatgtctttatcagcagtgtgaaaatggactaatactattagaaattatwaaaaaaaaacacacacacacaccaaaaaaaggctaaaaaaatgaacagcacttctgtgagttgtgggacaccttgaactggcttaatatacgtgtaattggtgtctacaaaagagaaagggcagataaaacatttaaaggtatcatggtcaatttttttccaaatttgataaaaactataaacccacaaatcctagaatctcaatgaatcccaagtacaataa

SEQ ID NO: 300753 - DNA, 621 bp, Homo sapiens
caatgtgaagtatccatacaaagaagttttattcaataatacaaaaaatgaactactgatatatgtaccaacaggaasgaatatcaagataattatgatcataataatggaagtcctagccagagcaatcaggcaagagaaataaataaaaagcattcaaattggaaaagaagaggtcaaattatctctgttcactaataacatgatcttatacctagaaaaattttaagagtcctccaaaagacttttagacctgataaatcaccttagtaaattattgggatataaaattaacatacacaaatcagttgcatttctacacaacaacactcaagctaagaaccaaatcaagaactcaaatccatttacaatagctgcaaaaataataaaatagctagtaatacatttaacctaggaatacatttaaccaaggaggggaaagagctctataagaagaactacaaaacacagatgaaggaaattgtagatgacacaaacaaatggaaaaatatcccatgctcatggattggaagaatcaatatttttaaaaatcatcatactacccaaagcaatctagagattcaatacaattcttatcaaattaccaaagtcattttcaca

SEQ ID NO: 300754 - DNA, 487 bp, Homo sapiens
caataactggaaacaatctaaatgtccatcagcaaataaatgaatgggcaaacaatgtgaagtatccatacaaagaagttttattcaataatacaaaaaatgaactactgatatatgtaccaacaggaaggaatatcaagataattatgatcataataatggaagtcctagccagagcaatcaggcaagakaaataaataaaaagcattcaaattggaaaagaagaggtcaaattatctctgttcactaataacatgatcttatacctagaaaaattttaagagtcctccaaaagacttttagacctgataaatcaccttagtaaattattgggatataaaattaacatacacaaatcagttgcatttctacacaacaacactcaagctaagaaccaaatcaagaactcaaatccatttacaatagctgcaaaaataataaaatagctagtaatacatttaacctaggaatacatttaaccaaggag

SEQ ID NO: 300755 - DNA, 621 bp, Homo sapiens
caatgtgaagtatccatacaaagaagttttattcaataatacaaaaaatgaactactgatatatgtaccaacaggaaggaatatcaagataattatgatcataataatggaagtcctagccagagcaatcaggcaagagaaataaataaaaagcattcaaattggaaaagaagaggtcaaattatctctgttcactaataacatgatcttatacctagaaaaattttaagagtcctccaaaagacttttagacctgataaatcaccttagtaaattattgggatataaaattaacatacacaaatcagttgcatttctacacaacaacactcaagctaagaacmaaatcaagaactcaaatccatttacaatagctgcaaaaataataaaatagctagtaatacatttaacctaggaatacatttaaccaaggaggggaaagagctctataagaagaactacaaaacacagatgaaggaaattgtagatgacacaaacaaatggaaaaatatcccatgctcatggattggaagaatcaatatttttaaaaatcatcatactacccaaagcaatctagagattcaatacaattcttatcaaattaccaaagtcattttcaca

SEQ ID NO: 300756 - DNA, 621 bp, Homo sapiens
caatgtgaagtatccatacaaagaagttttattcaataatacaaaaaatgaactactgatatatgtaccaacaggaaggaatatcaagataattatgatcataataatggaagtcctagccagagcaatcaggcaagagaaataaataaaaagcattcaaattggaaaagaagaggtcaaattatctctgttcactaataacatgatcttatacctagaaaaattttaagagtcctccaaaagacttttagacctgataaatcaccttagtaaattattgggatataaaattaacatacacaaatcagttgcatttctacacaacaacactcaagctaagaaccaaatcaagaactcaaatccatttacaatagctgcaaaaataataaaatagctagtaatacatttaacctaggaatacatttaaccaaggargggaaagagctctataagaagaactacaaaacacagatgaaggaaattgtagatgacacaaacaaatggaaaaatatcccatgctcatggattggaagaatcaatatttttaaaaatcatcatactacccaaagcaatctagagattcaatacaattcttatcaaattaccaaagtcattttcaca

SEQ ID NO: 300757 - DNA, 467 bp, Homo sapiens
aaaataagtgtctgacatgataagcccttaagatttagggatttcctgctacagcagctagcattaacttaactaatacaygagttgataatgtaagacttttagctgaaattccttaaaatccagagagacaaaagagtttgccgttccactcatatcaagtctcaatctctaattctcctctctgttctaagctctgaataactttggacacatagtagatgctcaaagcacatttacccattcattattttaacaaacagtttctgagcaacacctatgtgccaggtattgggtactatggattcagcagtgaataaaatagatgaagtccctaccctcataaaacttacatttaaaaggaagactccataaaataaatgaatgaatgaagggatgaatgtatcaggaggaaagtagacaataccaggtaactgtaaggaattttacttcccaaaaattgtcat

SEQ ID NO: 300758 - DNA, 467 bp, Homo sapiens
aaaataagtgtctgacatgataagcccttaagatttagggatttcctgctacagcagctagcattaacttaactaatacacgagttgakaatgtaagacttttagctgaaattccttaaaatccagagagacaaaagagtttgccgttccactcatatcaagtctcaatctctaattctcctctctgttctaagctctgaataactttggacacatagtagatgctcaaagcacatttacccattcattattttaacaaacagtttctgagcaacacctatgtgccaggtattgggtactatggattcagcagtgaataaaatagatgaagtccctaccctcataaaacttacatttaaaaggaagactccataaaataaatgaatgaatgaagggatgaatgtatcaggaggaaagtagacaataccaggtaactgtaaggaattttacttcccaaaaattgtcat

SEQ ID NO: 300759 - DNA, 600 bp, Homo sapiens
ggttatatttcatttctattatcaccatattgccactataaccatttgtttttagaactacagtctcctcagtttattataaatgagcttgaatttgacaactgcattagaattacatgtatttttgttttatttataggatctgcctgatgacaaaataatcttctcttcaaggcataggatcttacttaagcgaataaacacttgtccctcccaacacaagtacaaagaaaactagttatcttaataatcactgggtttctgcaagagatacccacatatatgcrtatatttaggtggtggttgtgccattcatgcctcataaatcaatctggcaggtctttatgttaacttgtgctttcatgcttgaatctcctttgtttttcaatgtcttcattgcaccgaaatcctgagatcaggtgtactttccagaagtgttttcatcaaagagacataaacagactgacctgtgttcttcttggcctgtcatgtgatttctttgcttagtcttctacctaaagtcattttgccttttttttctgcaccccttatgttacatgctcatctgaatttgttgctggttatcaccccagtacactt

SEQ ID NO: 300760 - DNA, 524 bp, Homo sapiens
ccaccaaaacagcttcctgttttggacacattatttcccagtgtcccctgccatgatactctctgtcagtctgctgttggaagcagtggttcagagacatcactgcttatttcctatccaatattgtgacagctcaatatmtactttgtaatccacctttcacagcctcaaatactttccctgttccttcggatgttaccactggcctatgtcagtatattccttttccatcctttgagattccccagtactgtggtcctggaacagagaataagccttagaaaagcctaaattccaatctgtggcacatcaccctgtaaatctctgatgtgaataattcagtgaatctgcagtggttcctatcctttcattcacactgagattatctttcattcatcgtttgggtgttgcaaaaatttgaaatactccaaatgctttattctgaaatgagtgagaatatttgtgatctgaactagagaagctgtaacttcagccattcaacacaatttttaagcaaagtttat

SEQ ID NO: 300761 - DNA, 608 bp, Homo sapiens
atgggtaatgaaaaggagaggggggaatatccccatttgtgctaaaggcctctggctagatccagattaagaaactggtgatacaactttggagtttgtactgaattttttaaataccgatttttattcaaaaatacagcaatcacaatttatgttatcgctgtaagrattttaaaaataaaaagaatcataatatgactgtgtaaaggaaataatatgttgtctgcaaaatacagaaagtggaataaaaaataagacacggggatctctacaaaaattgtctgaagttgtcttcatgcccctaatctgaatttatgtgtctaaaacgaaactcatcactttcttaaatctgcttaccttctgaatttctcatctcagccaaattcatcaccatctacacagtcatccaagctaaaattctcaaaatgttaccaagctcctccttgttcctttaatcctcttaacataagtaatgggtgaagtccttttccttctcccacattaacacctttctttatctttcccctcttgactcccatgctgcttcagttcacaggcccttgctcttctttccttgagttattttggtttcctcttgtaatagatgc

SEQ ID NO: 300762 - DNA, 278 bp, Homo sapiens
tggggaccaaatttcaacatgaagtttggagaggacagacatccaaaccatagcaaataaatatttattgttgttttaagtctccatgttttggagtgatttcttatgcagcaatagatacagggtctgtcctacatttttccatagtatcctacatttccctcyattaaaacctatttccctttgtctgtttacttctctgtctcttccactagcctgagatcatcttaagagcagaaacatagcaattcatctttcaattcatagagcttcagtgg

SEQ ID NO: 300763 - DNA, 636 bp, Homo sapiens
taggcaaactccttaagatctcttatctcttatttttagtgagggcaaaacaaaccaaaaacaaagcacccaagagttcacactatgtgattagataatgttctaatactggcaaagctaagcatggtgataaaagtagaaaagtggttgcagcggggacagcaggtgagctgagtggaggcgactataaagggacacaaagatatttctaggaggatggaaatgatctgtgtcttgaagggagtagtggttacaggtgtttgcaaactgccaaactcatcacactgtctatctaacacctgaattttactgaatgcaaatctgcctcaatgaaattgatttaagaaaaaattttttatrccaccacagaagtagaatacagaatttagtcagaaatttgtaaattacttttggggagattagtttgtgcaagttacatataaaattgggacaagaatataaaaaatatttcaaaatatttcaagttcatcaaagaatacttcaattctattatataccttcttaacagagtaggaagtataaactataggccaggaagtatgctacatgctttcatatattatgcctcacaaagattgtgtctttcattcatgataaaatctagtgtgtgccttg

SEQ ID NO: 300764 - DNA, 525 bp, Homo sapiens
ttttcaaaggaagagggattaagctgcaaggaggtaaaaccacaggcaccataggtatcccatccatccaggactracgtttttatctgatcccctcctctaaaagccccaccatatttgaatttaacatcaaacacccattatgtatttcagctatggttttctggagacaaagctctggtctttggggtgtggcctgtggtgattttaacgtaggggtttcaggctatgaggagatattttggagggagagattagatggagcccagccttctcactcaatggttagtacatcctaaggagcaccttctgactggtcccatagatccccaaggaagctgtgccctgttgttggcatttcatgactctgaacatcacccctagctcacagaccaggggccagatgaaaaccagcagagtgaaagtcccaggagaatctgtccctcgtttctttttctgctttgctttcctggcatgtgggaagccgaggacaatgtcagagcaaggtgggacaacagggaatca

SEQ ID NO: 300765 - DNA, 421 bp, Homo sapiens
gagtgaaagtcccaggagaatcygtccctcgtttctttttctgctttgctttcctggcatgtgggaagccgaggacaatgtcagagcaaggtgggacaacagggaatcagtgggcagttggaagagagctcagcccagagcaggcgatatacccctgctacaatgttgtggtctccctgacattttctgggcccggagaaccttttccagtgtcctggtttttgataactgttcaaaagtcttatttataacctccttgggcgtgagcagtcatctatacccacagtcagtaaccatggctgctgacagggagaaaagattgctgattttattctctttgttactgaaaaggcaacactggaaaattcgtccagggtggaggccagcagtggtggggttggggcgtggtgtgtcgtgatgg

SEQ ID NO: 300766 - DNA, 590 bp, Homo sapiens
cctaaccccatatttctcctaggaggaatgtttagtattcagaaattcagtgtttgctgtrattttatagcacataactgccatgaataaagagaatcacttgtgtttacctttgcaaaatgtaatatcctgtttacatagtactctcttctttccctgctgtggcagggattatggctatttacaaatggttggttccttcttcttccaggcacaaagggggaatgtactttctcagtccgtttaaagttaggcatgtccatgagacttgctttcaccaatgaaacctgaacagaagtcacatgtatcatatccaggaaaaaagcttttcactgccagtgttcagctccaaccatccttttctctgctgccatcctcatggaggcatatctccatatggagcccccatcacctgggtctctgcctacctataggaggatacagtgtgagacagaaataaaatcatggtatagataagggtttaagatacagaatatatacggttcaacaagaagacaactcagttaaaagatgactgaaggacttcaatcaacatctctccaaagacaatatacggtcggctgataagc

SEQ ID NO: 300767 - DNA, 588 bp, Homo sapiens
gacaggaggcaagaggcaagtagcccagggccaagacccaagagaatgcattgtcagtctgcacctacgtgaaacagaaggctgggttgacctcaggggcatagcagcaggtgcagtaagaggtagggccaagatgatgtgaagtggtatacaagaggggtgcagtgtagcaagaaataatcctgcaattctaagcaagtgtgagactactgcatggatccagcatcttcccagggacatccaaagggctgcccatgaagctccagaccagtgtatagacatgtctacactcaggggaaaaaacaggggtttgatggggagaagaggcaatactgctcataaaagggtagtttttacttgtttcatttataacttcaactcctgcaaaccacagcaaattaaacaaaaataaattttattcttttcattatccacttatcycagaagggattcctttcccagaatttctgcttagtttctaaaattagaagcactcatttgcttgaggtggttgcaaatttagctcaatggttctcaaagtgtggtcccaaactaacagcatcatcacctgggaacttctaagaatct

SEQ ID NO: 300768 - DNA, 379 bp, Homo sapiens
ttgggactgtcaggatgcggaaggatgcctgccagaactgcttttttgggtctgagcctcattgatgctgagtgcttgtctctcacaattgttggctaacaccttttgttgcttctcatgccactcctagagcaatcagaagactctgtcgtgagccaggaagaggtactgtataaacggaattctataatctgtaaaatataacaaagtgaatggcctgagactaataattcagaagctataacttgcccaattatcagtggtgatttatttcctaggtcttctcaatgaaaatgctacacacraatgagttgccagatcatttcatttgttatagattctgattgctggggccagcatcttccctgtgatccttgat

SEQ ID NO: 300769 - DNA, 503 bp, Homo sapiens
aggcgcagtggctcacacctgtaatcccagaactttagggggcagaggcaggtggattgcttgaggctgggagttccagaccggcctaggcaacatagcgagacctcgtctttacaaaaactacccaaaaaagccgggtgtggtggtgacccccgtaatcccagttactagggagctgaggtggaaraatcacttgatcccaggaggtcgaggctgcagtgagctgagatcgctccactgcactccagcctgggcgacagagcaaaacgctatctccaaaaaagtattaattaattagttaaaataaaaacagtactaagtagtacagatgagtgataggaagtccaatacggttctgattcgtcccatgataaaaccacacctcttgtttaaatgtttactggttaattctttcccaatgttcactttcttgttcctatgctttgctccatcagcgggtggttgagacagtgctgtttcaatatgtgcagggtagtttcttc

SEQ ID NO: 300770 - DNA, 589 bp, Homo sapiens
tacaagatgcaatttcttaatggtttaggattctatcatccaatttgaaaaccatgcttttgtaaattctctttcttgcttgctgattgaggagctcctaatgttaacaagtttaatttattacatactgaagaatatccaaagtgttcttatgtatttagtgcagaacttgtgtttttcaacaaatgcatcaaccaccatttgttgagggcccaccttatgcactggccagtgaggagacatcagtgaagagtgttgtagacagctgtgagctttcaaggagctcatagtgtcataagggaggcagacaagtaaacaggaaattacgacacacgtggaaacaccatgatggagaaagcttaagatgctatggaagtatagaggaagcttgccagatgcagccttgctatggggatggctgagaaagcttgaggaggaacagatacaggctgaaggggctggatggagtagaggtgagggaagggaactcttaagacatgaaacatgccacacragactatatcagtggctataaattacacaagttctgattagaagataaataactaaaactgtaaaaatggaatgg

SEQ ID NO: 300771 - DNA, 576 bp, Homo sapiens
tgaggcccccatcccgaggaactaggcccttgctgctgcatctgagcmtgtgtgcttgccaaagcttggagaagcagctggtggcagacagaccagagggactggacttcctgtgtacctctaacagggagtggggatagccgcagctgctctggatgctgtgctgattagagctcaccaaaggacccagggatgccatcatgagctctctgcactcttggcatttgagaaagggagtgagaagaaggaggaggaagaaggagggtgggagagggcaggagagacagagcagcctcctagttatttcttggaatgcatctgggcagtgaccctcagcgaagagagaggcaggctttcagacctaatgcaataaaagaagagtggtcagtaggcccagttctcagcactccatgcatgttaactccattaccaagtactatgattatccccattgtactgatggggagaccaaaacaaagagaaatgaagcaatttgcctagggtcacacagctggaatgcagcagagtcaagatttgaacccaagcagatggccgtcagcatctttacaaccagct

SEQ ID NO: 300772 - DNA, 586 bp, Homo sapiens
tggttcactggccattgcagtttgcaaactcctgttctaaacagctccattttcttcatgtctctgccccagcacataaataataaataatataggaaagaccctactgaaagggagctaaatcatcagtatgagttgtaaatgtctggagggcattcacagtcttgaggcatgctttctttccttggggaattttaggccttactaaaccttcttcctgcatactgaataccaggtatgaggtcagggctagcaaacaggagcacagtttctgccctcttggagctgctgatctgtcaagaagacagagatgaaacaacaactacacagatgcaccatagtcatgatgaaccttaaaaaggaaagatayatttttcctcatctaatcatcactacagctttagtactcacttcctgtcattatgcccatcttactgatgcatctcaagaggtttacaaatttccccaagtcacccagccagaaagtagctctccagttctgttcgtagttagaggggaaaggagtgcttctcaagttggagtgtgacctgtgacagtacagttccatcttggggacagtatcagc

SEQ ID NO: 300773 - DNA, 546 bp, Homo sapiens
aaagccccaatggcagaagaaacacaaagaaacaagttgatgctttctatccagtaacaaaaagtgactctagaaaaagcaaatgttattctaacatttcagacacaatccgctaaatatttattataaataggagtccagtagacaaagggttgcaaaggaaacmctcggaaggcaggtaatgctactaccatagagttttaagagaaaataaaacaaatttacaatctagagtgttatctctttttaccaggatgaaaaaataaaccttaccacctgaaaatatgcagcataagatgaagttttcctgacctaagaaagaaatcaaagaatgatggatgtacaagaaagtcaatagtgaattcctctgacctagaaagaggaataactaactatattcctttaatttccaaattagtctcagataaatagcctagaaaggaaattgactcatttatttgaaaaatctattctctacatctcatctatcaattgtttcaatgttgtttctcagttcttcagaatgataattcagggggagttttg

SEQ ID NO: 300774 - DNA, 653 bp, Homo sapiens
accgctgtcagtagagtaagttcacaagaaggaagggggtgccagatttggaaagtcattttataaccattggaggtagagtgcttcacacaagaatcaaaaagtgtgctaaatttagggggtaaaatttgatgggrgagagcattgttttaaagtgtttccctacacattgcttattagttgcaagggaagaattagtaactaaacaaaggtaaaatcagacaacaccttgaccttaagttcaaacttaacatccctggtgagatgcaactgcaccctgcatgcctccagttgagatgtactgagaagggcacactatcccttatgtagtattccagtcaagaatgtatttcccgaatgcattcaggaggaaacattagacagatgccaaaaggagggacatttgttatgaaaaaagggactgtagtcttaagaccagacaagactgagagaatgttctagatgaaagggtacgagggaaacatggcaattacatataatacctgatcctggactggaacctgctctttagggaaactaaatgctataaagtaggggttcccagacctcaggctacagactggttaggagcagggccacacagaaggaggtgagtggtcagtaagggaagcttcatctgcatgtacagccac

SEQ ID NO: 300775 - DNA, 653 bp, Homo sapiens
accgctgtcagtagagtaagttcacaagaaggaagggggtgccagatttggaaagtcattttataaccattggaggtagagtgcttcacacaagaatcaaaaagtgtgctaaatttagggggtaaaatttgatgggagagagcattgttttaaagtgtttccctacacattgcttattagttgcaagggaagaattagtaactaaacaaaggtaaaatcagacaacaccttgaccttaagttcaaacttaacatccctggtgagatgcaactgcaccctgcatgcctccagttgagatgtactsagaagggcacactatcccttatgtagtattccagtcaagaatgtatttcccgaatgcattcaggaggaaacattagacagatgccaaaaggagggacatttgttatgaaaaaagggactgtagtcttaagaccagacaagactgagagaatgttctagatgaaagggtacgagggaaacatggcaattacatataatacctgatcctggactggaacctgctctttagggaaactaaatgctataaagtaggggttcccagacctcaggctacagactggttaggagcagggccacacagaaggaggtgagtggtcagtaagggaagcttcatctgcatgtacagccac

SEQ ID NO: 300776 - DNA, 653 bp, Homo sapiens
accgctgtcagtagagtaagttcacaagaaggaagggggtgccagatttggaaagtcattttataaccattggaggtagagtgcttcacacaagaatcaaaaagtgtgctaaatttagggggtaaaatttgatgggagagagcattgttttaaagtgtttccctacacattgcttattagttgcaagggaagaattagtaactaaacaaaggtaaaatcagacaacaccttgaccttaagttcaaacttaacatccctggtgagatgcaactgcaccctgcatgcctccagttgagatgtactgagaagggcacactatcccttatgtagtattccagtcaagaatgtattwcccgaatgcattcaggaggaaacattagacagatgccaaaaggagggacatttgttatgaaaaaagggactgtagtcttaagaccagacaagactgagagaatgttctagatgaaagggtacgagggaaacatggcaattacatataatacctgatcctggactggaacctgctctttagggaaactaaatgctataaagtaggggttcccagacctcaggctacagactggttaggagcagggccacacagaaggaggtgagtggtcagtaagggaagcttcatctgcatgtacagccac

SEQ ID NO: 300777 - DNA, 412 bp, Homo sapiens
agttttagtgaaagctgcacacacaggcatatttcccattgccatctgatgacatcagtgtatttctggagccaagataaatacagcattgttcatgtgactagcttcccaagaagagtgaggtggactgctctgaagcctcctcctgccctgcccccttcttccctcccttcccaactcatstctcaaactgcattgaaaacaccgaggtgagtgacagtgaaggctaactaggagatgcagcttagggggaatttaatccaattcagttggagagacatgcatctccctgtaccatgaaattccattttgatctcagcatgtgctgatggagtaatgaaataaagacaacactctgcaaatggctggtgagtctaatgatggtttttatgggggttttagaagggctatt

SEQ ID NO: 300778 - DNA, 607 bp, Homo sapiens
tacagggttattgaggcaagtccatgaggttcctatgaagcagcctttaagaacgagaaccctgccaaggcgggtggatcacgaggtcaggagtttgagactagcctggccaaggtggtgaaaccccttctctaccaaaaacacacacacacaaaaaaaaaaatttaaccaggcatggtggcaggcgcctgtaatcccaactactcaggaggctgaggcaggagaattacttaaacctgcgaggcagaggttgcagtgagtcaagatcatgccactgaactctagcttgggtgacasagcaagactctgcctgaaaaaaaaaaaaaaaacgaagaaaaaaagaacaagaaccatggacttcccagtgtacctcctagggcccaagtcagatggagaccccttggctagtcagcagcagcctgatcttatatcacaagatgtggtttgcaagttatttattcataaggaggagtgagagagggtgcacagacaggatgttgtcaatgtagatcccactgtcatctcggattacgggtgaattccctacctgcagcaccccaagcgaagtaacacattctaaacagaatttccaaatatcctatgtctc

SEQ ID NO: 300779 - DNA, 511 bp, Homo sapiens
ttttggctttcaggctttgagaatattttgattgcccatatgctctctgagaatggctcttttggctataaaagaaaagattctgtttgatgaattaagtgaatacatatttatacaaaatgtwtattcttaactctctgccagtgatttggtacgataaaacatactcttttctgaaaactataaaggacttgaagttctaccaatgttcccttaaggagatttcaacttcttatggaacctcgtttgaatgctaatgatgtgcagatatatatgtttcatagtctctctcagagttcaaaaccacccagggtgcgtagtaggaaatactaaggccagacttcctgcaaactctcagatctttttgttttgttgatgttctcaaatcattctttcaaaagtttctgctgtcagatcttagtgtatgttagagcttgaaaaaatatctattgcaagggataaaatgaaaataaaccttttcaagtcaatctccattatttattttaaaaat

SEQ ID NO: 300780 - DNA, 511 bp, Homo sapiens
ttttggctttcaggctttgagaatattttgattgcccatatgctctctgagaatggctcttttggctataaaagaaaagattctgtttgatgaattaagtgaatacatatttatacaaaatgtatwttcttaactctctgccagtgatttggtacgataaaacatactcttttctgaaaactataaaggacttgaagttctaccaatgttcccttaaggagatttcaacttcttatggaacctcgtttgaatgctaatgatgtgcagatatatatgtttcatagtctctctcagagttcaaaaccacccagggtgcgtagtaggaaatactaaggccagacttcctgcaaactctcagatctttttgttttgttgatgttctcaaatcattctttcaaaagtttctgctgtcagatcttagtgtatgttagagcttgaaaaaatatctattgcaagggataaaatgaaaataaaccttttcaagtcaatctccattatttattttaaaaat

SEQ ID NO: 300781 - DNA, 511 bp, Homo sapiens
ttttggctttcaggctttgagaatattttgattgcccatatgctctctgagaatggctcttttggctataaaagaaaagattctgtttgatgaattaagtgaatacatatttatacaaaatgtatattcttaactctctgccagtgatttggtacgataaaacatactcttttctgaaaactataaaggacttgaagttctaccaatgttcccttaaggagatttcaacttcttatggaacctcgtttgaatgctaatgatgtgcagatatatatgtttcatagtctctctcagagttcaaaaccacccagggtgcgtagtaggaaatastaaggccagacttcctgcaaactctcagatctttttgttttgttgatgttctcaaatcattctttcaaaagtttctgctgtcagatcttagtgtatgttagagcttgaaaaaatatctattgcaagggataaaatgaaaataaaccttttcaagtcaatctccattatttattttaaaaat

SEQ ID NO: 300782 - DNA, 277 bp, Homo sapiens
agcctaagtgttcatcaacagatggatggataaagaaaatgtgatacgcatacatagtgtagatgttatatatacatattwttattatattattattattatttagtgattaaaaaagaataaagtcctgtcatttgcagcaacatagattgaactggaggtcatcctccagttgacctccagttcaatctttctatgcctggctatttcatgtgaaatgaaataagtgaaataagccaggcacagaaagacaaacactgtgtgatctcacttatat

SEQ ID NO: 300783 - DNA, 569 bp, Homo sapiens
ccataaaatagtcacaaaatttactttggcatcaacatttccttgatttttttattattattttcttacaagatggagtcttgttctgtcacccaggctggagtgcagtggtgagatctcggttcactgcaacctccacyttccaggttcaagcagttctcctgcctcagcctcccaagtagctgggattagaagtgtgtgctaccatgcctggctaatttttgtatctttagtagagatggggtttcaccatgttggccaggctggtctcaaactcctgacctcaagtgatccacccactttggcctcccaaagtgttggaattacaggtgtaagccaccacacccagcccatttccttgatttaaaacatagatgtgaaagattagatctctccataaaaaagcagtatttttcaaatattgtcagtgacagggaaaaattaaaagtcctcaaaaatagcaatgcacctcagataaaagcccttcaaggataatgacaaccaaattaccaaatttaggatataccataaaaaaataacaatagttgatggtaataatgattgaggcg

SEQ ID NO: 300784 - DNA, 621 bp, Homo sapiens
tgctttctacacatcacactctttgtccctcaatatcaattcctctgaggagtacactttgatttagcccctttttaaagccataaacacttcccagatttcgctctatgtttcagactgtgcaatatagaaacttaaggaacccytctgggaattattagaatggaagaggggaaaagctgatcccacaagtcagtactgactttgtgggaaagagttgcagagggccaagctgggaatagccataagttaataattgtgtccctgtataatggtatgcaagtgaaagccccaaacagaaagcgcagtattagatgttacccttctaggctcacttgatcctagtgaatccctgagaaatgcaatgtgttgactccaagaactgcctgtggagccaatggaacatgtgatttccatctctaggtcccatggaaatatcagtggagtcacagaatgctcaaacctgaaatcactgtcattagagtgctcagcttgatgatgttgggatagccattgttgacattcatacaaaggtcttccaccttctaaaacaaagcctgatgcacaggaatttatagaagttagcagtcctggagttcacaggaaagcttccctgtggtt

SEQ ID NO: 300785 - DNA, 580 bp, Homo sapiens
atgaatcaaagccccagagatggatgtggtcctattcaaccacactgaataggaaatcatattctatgtgttttggggtttgggctctggtcctatttaaattgcacagatgttgtaggtttctaaattaacagtggaggtgttcatcaggctgcatatattgaacaaagacatggctagatctagacaccacactgtacagaaaacatttttggtattattttctctttttcgagaagtcctttcctgtttctaaattcatcagcacctgtagagtccaggccaagtgagattacaatgatttccatgccatattaaaattatctagttgcttcaggtgtgtttatttcactccccaactacttgtatatcccttgagtggagaagcataataatgataatagagtagttcttgtgtatgccatgcacaaggggcagtaccttgcaaatcataattctcatatcaatcttatgatcaactcaattttatagacatggaagstaacattcatataattgtccccacctctaattagtggagaaccaaggatctaaactcaggctacctgacttccaagcc

SEQ ID NO: 300786 - DNA, 621 bp, Homo sapiens
tgctttctacacatcacactctttgtccctcaatatcaattcctctgaggagtacactttgatttagcccctttttaaagccataaacacttcccagatttcgctctatgtttcagactgtgcaatatagaaacttaaggaacccctctgggaattattagaatggaagaggggaaaagctgatcccacaagtcagtactgactttgtgggaaagagttgcagagggccaagctgggaatagccataagttaataattgtgtccctgtataatggtatgcaagtgaaagccccaaacagaaagcgcagtattagatgttacccttctaggctcacttgatcctagtgaatccctgagaaatgcaatgtgttgactccaagaactgcctgtggagccaatggaacatgtgatttccatctctaggtcccatggaaatatcagtggagtcacagaatgctcaaacctgaaatcactgtcattagagtgctcagcttgatgatgttgggatagccattgytgacattcatacaaaggtcttccaccttctaaaacaaagcctgatgcacaggaatttatagaagttagcagtcctggagttcacaggaaagcttccctgtggtt

SEQ ID NO: 300787 - DNA, 576 bp, Homo sapiens
gagctggagttactaagcgtataggaattagacctgaagctgctggaaaccttgcaaagagcctgctgaagcgtgaacctaacagagaaaaacaaaaggagattgagggagatagagttaagtccctggatcctgctgygtctctggagttgtgggttccatatgtcaataaattctccttttttgtattgggttgtttgaattcagtttctgaaaattttaattgaagtaaactcaatttatacatgaatttgaagaattaaactataatgtgcataagatacttagtacctggtatataataagtcaataaatgaagccacacattgtgtcgtgtgcacatgtgtgtttatgtatgtttctttctttagcacttgaaaattgctcaaagagttgagatacaaaaaatacccaaggtagtaagctatggctctgtccacagctacttgtaatcccaggacacttttaattctgtgtttaagaaacggatcacttttttggacttctcatgaatttctttggacaatactaccaccatcatttgcaacatcaaaattggaaaagagaaagaatgaa

SEQ ID NO: 300788 - DNA, 576 bp, Homo sapiens
gagctggagttactaagcgtataggaattagacctgaagctgctggaaaccttgcaaagagcctgctgaagcgtgaacctaacagagaaaaacaaaaggagattgagggagatagagttaagtccctggatcctgctgcgtctctggagttgtgggttccatatgtcaataaattctccttttttgtattgggttgtttgaattcagtttctgaaaattttaattgaagtaaactcaatttatacatgaatttgaagaattaaactataatgtgcataagatacttagtacctggtatataataartcaataaatgaagccacacattgtgtcgtgtgcacatgtgtgtttatgtatgtttctttctttagcacttgaaaattgctcaaagagttgagatacaaaaaatacccaaggtagtaagctatggctctgtccacagctacttgtaatcccaggacacttttaattctgtgtttaagaaacggatcacttttttggacttctcatgaatttctttggacaatactaccaccatcatttgcaacatcaaaattggaaaagagaaagaatgaa

SEQ ID NO: 300789 - DNA, 576 bp, Homo sapiens
gagctggagttactaagcgtataggaattagacctgaagctgctggaaaccttgcaaagagcctgctgaagcgtgaacctaacagagaaaaacaaaaggagattgagggagatagagttaagtccctggatcctgctgcgtctctggagttgtgggttccatatgtcaataaattctccttttttgtattgggttgtttgaattcagtttctgaaaattttaattgaagtaaactcaatttatacatgaatttgaagaattaaactataatgtgcataagatacttagtacctggtatataataagtcartaaatgaagccacacattgtgtcgtgtgcacatgtgtgtttatgtatgtttctttctttagcacttgaaaattgctcaaagagttgagatacaaaaaatacccaaggtagtaagctatggctctgtccacagctacttgtaatcccaggacacttttaattctgtgtttaagaaacggatcacttttttggacttctcatgaatttctttggacaatactaccaccatcatttgcaacatcaaaattggaaaagagaaagaatgaa

SEQ ID NO: 300790 - DNA, 571 bp, Homo sapiens
tggattgatggatggatacatatatggatggatgagtggacgaatgaacagatggatggataggtggatggatggatgaatggatgaaatataatgtagtatcataactgcactaatagaggtaatcatggggtgctgcrggaacatagagaagaaggaatcaaatctatttaaaataggtggtgtttgagctgagatttgaagtaggggtagaagttcaccaggcagtggctaccatccatataagactgactccaattgtactctcaccattactctgctccagcaaaacagctctgagttttcttctgtcatccagagagccagagactgtagagtaaagagcaaagatcccaacctgctcagtctccattcactcttctccctggggcattcccaagcctttctctggcattaattttcttccttgtctctaatatgggcaggccagcccccagcaatgacatgtattgcctacaaacctggtatctgcatttcttaggctagggatcattaacgtttttaagagcagtgtattacacttcaggtcttcataaataatcattacaag

SEQ ID NO: 300791 - DNA, 561 bp, Homo sapiens
caaaagcggatatttatacaggccacccctccgagaagagtgatgttttcttcctaagaaagtaaactgctagtggttacttaattctagtggygtattaattagagaaccgtctatactgctgtgacaaggagtattaaacagttgctcgagcaggtcaaagttttatttctttcttggggtataagtcagagcaggtgggtgatccaggtatcattctgagaagggatttctcctgtttttttgacctctcattcctctcatgctgttcaccagcatgattgaagctgagtcaccagcatcatttttgtatttcagctcatgggaagggagaaagaagaaatggaggcaggcagttttctcctggagatgagacctagaagttgctcgcttaatttctattcacaacctgatcggccagaacttagttacatggcaatacctagttgccagggagctggggaatgtggttgttagttgggtgtctatacacacccccttccaaaactcggggataatgggaaaccattagcagtctctgccatagtgttttgttcctaa

SEQ ID NO: 300792 - DNA, 559 bp, Homo sapiens
gagtgtggcactgacaagaataatcatacttggcattagcagaatattttatacttttcaaagcttttgcatatggtacctcatgtgggattaagtatttgccatggacactccatgcatggataatcaaagttagaattttatgctagttattagatttgacttcagcttgctttctggggacctacaaatcagttgatcgagtgtaagttgtattcatckttaccagttttcagggaacttaggtcacccaacattgaaagtttggtttgcatgtcttagagaaaagctgtatttccagggatttgccttgtaagtgtagaaagaggagtggtggtgacagagaagacgctaggaatatgatgtaaaatttaagctcttgccagtatcctgacaggtacttccaggagataggattgcctccccagtacccccagagctcagagtgagccagaaggatacactggccatgggtcaccccagaggatgggttgacacagcccccactgtctgccccttctttatgtgaggcaatgtatacaaggctattggtatagta

SEQ ID NO: 300793 - DNA, 597 bp, Homo sapiens
ctaggaatgttcttggctgggctcacycttctaagatatcaaactgtaaatacagactttaaagagattttaaagtagagtagacatctgtttgtgtgggtgggagagggtgttttgctttgttgttgattgtttattctgcctgtttagcataccttccttttttcttgtaaacaccccaggatacttctgagaattacccatcaccaccacttcatcatacacagacccttaatttatttaggtgaggttgacccaatcctctcagctccatggttgaacatatgactcaagaatgaccaactggactattcgaacaaccaattgggtaatcaaactcagtgattatttcacaagtgagcccttgactcaaaccaagacaatctgagtccattgcaagattttgctggtactcttgaaaaagaggcattatcatttcactgagttagctaaagaagtaaggtgtaagtttgggactgctgcttggagcaatttaaccaaatttaaacaaaaagagagcagccgaaggagatgaagaggaatcaattccagatgtcatattttgagtctctggatccagccatgcctaaagctaaa

SEQ ID NO: 300794 - DNA, 597 bp, Homo sapiens
ctaggaatgttcttggctgggctcacccttctaagatatcaaactgtaaatacagactttaaagagattttaaagtagagtagacatctgtttgtgtgggtgggagagggtgttttgctttgttgttgattgtttattctgcctgtttagcataccttccttttttcttgtaaacaccccaggatacttctgagaattacccatcaccaccacttcatcatacacagacccttaatttatttaggtgaggttgacccaatcctctcagctccatggttgaacatatgactcaagaatgaccaactggactattcgaacaaccaattgggtaatcaaactcagtgattatttcacaagtgagcccttgactcaaaccaagacaatctgagtccaytgcaagattttgctggtactcttgaaaaagaggcattatcatttcactgagttagctaaagaagtaaggtgtaagtttgggactgctgcttggagcaatttaaccaaatttaaacaaaaagagagcagccgaaggagatgaagaggaatcaattccagatgtcatattttgagtctctggatccagccatgcctaaagctaaa

SEQ ID NO: 300795 - DNA, 562 bp, Homo sapiens
catttggagactttgtggaaatggcgattcacaccagcatgtacatttgtataagcctttggagacatccacatctatcttcacagataagcacatatagtctctcatttatctgtagagaaatatacattaatgaagaacttagaattatatgttgcctttcctttgaaatcttcaagactagtcctatggttttcttccacattaaaaaagccttaataagatgtttttcagctatgatgttcttacattactcatgaatttaattgttagaggaatgccatagatcaaatggtagttaatatccatagtaaagaagaactgtttattcccagattttgaaggatgaatcagttgagagtttaaataggatactgtgttctgataaaaattagtagtatatgaaaatatgtcttaactggagactactctaaatgcaggatgtctgcaatttctatttatgaagaatacactrttatttacaaataggctttaatgtctctaaagaaaatgtaatagcctagataaaataaacagatgacttaagttgacaggagaaatc

SEQ ID NO: 300796 - DNA, 597 bp, Homo sapiens
ctttcctgcctctcactccatttctgcactatcttcctctgtgagacaccttggaactaagaacacaataatccactaatagccgtttagataccctgtcttttacataaattttcttgattaattctctcaacaatctcactargaagttattgccccaattttttttttcttccagatttggaaagtaaggcttttagagattacgattgcctgggatgtttttcaaaatattctcatcataaccttgatgtcagtcctcagacccaggacaggactcgtactaggtgtgccaattatcaagatattgtctctcagctccaaacttatcttctatgctttgcgtaaggtgatatagtcagatcccttcactcctacttctcatcagggctttgaggtcaagcagagagtgcccaccacccctccatacacattcccctctcctgtcgcctctgatgattgagcctgcccagttgagggaaagcttgcaagccctctcaacccgtctggttctctctgtccatattgccagcctttccccatattcttggtaaaggtcagaatgatgctagaacagatagggatagccctctgggc

SEQ ID NO: 300797 - DNA, 467 bp, Homo sapiens
ccacttctctgcctttctctctctagttcacatctattcagcyttcagactcttctcccatctatcacattcctagcttgttgtccagatcaggctcacctgttacttattcccatcaaagcatagttctttctttcagagcatttgacttggtttctaatcaattatcatttgcataattcatgtttttcttctcaagtataattgatactccatgaaagcagggactatttctggtttgtccctatttttctccaacatttaccagagggcctggtacacagaaagaactcaatgtttgttgaatgattgcttgaataatttctccatcctgggacaacttatcagaacatttcatgtttcttttcaaaaatctcaaattgcctcccaagcttgatttcactacataattattcaaagaaataaatttgaggattataattgaattttgggatgaaatatggcaa

SEQ ID NO: 300798 - DNA, 430 bp, Homo sapiens
ggattacaggcatgagccaccacgcctggcctcccagtgtcttttatgacttcacttcctcgccctcttctcacctctgccgactgaacatgcaggtctgggcccactatgaggagcagcccgtggaggaggtgatgccagtgctggaggagaaggagcgatctgctagctacaagcccgtgtttgtgacygagatcactgatgacctgcacttctacgtgcaggatgtggagaccggtgagtgctcaggccgctggctcgtggttcctggcttggtccagctggcgctgcctgggggtagggggcctctgcccagtgggtgggaggaacaatgcctaggcagtccaggagcctcccctgaagagctcacgttgccgcccctgtctccctgccttgtcccactgctcctctgggcttggagttacttcag

SEQ ID NO: 300799 - DNA, 436 bp, Homo sapiens
agtggcttctgggtccacatctcaggcatttgacgacttaaccctttgcatgagcctcgcaaattgcaactcaaatccctgccaccctagagaacctattccctccagagggagagggactcrggagaggcactattccaaaaaggctcctgttcccaatgttaaaggaaagaacccagacttcagaatcaatccgatctggattcaaatctcaggttgtccctgcgccagctatgtggcctcaggaaagtccttagccctctctgtgcctcggtgtcctcatctgtaaaacagggaaaatcatgcccctctgacagggcggtgggttctagtcagtgaaataatgtcaggacaatggatggtccccaccataaaaagcaaggcccccgattctgtgtccaggggtatcagctctggggggcatctgcttggctgc

SEQ ID NO: 300800 - DNA, 436 bp, Homo sapiens
agtggcttctgggtccacatctcaggcatttgacgacttaaccctttgcatgagcctcgcaaattgcaactcaaatccctgccaccctagagaacctattccctccagagggagagggactcaggagaggcactattccaaaaaggctcctgttcccaatgttaaaggaaagaacccagacttcagaatcaatccgatctggattcaaatctcaggttgtccctgcgccagctatgtggcctcaggaaagtccttagccctctctgtgcctcggtgtcctcatctgtaaaacagggaaaatcatgcccctctgacagggcggtgggttctagtcagtgaaataatgtcaggacaatrgatggtccccaccataaaaagcaaggcccccgattctgtgtccaggggtatcagctctggggggcatctgcttggctgc

SEQ ID NO: 300801 - DNA, 526 bp, Homo sapiens
ttttatcaggagcctcttgataccttccttctggatacccaggcctctgctggtggccatgaccgaggacctcactccagcatcaggcagggactactcctttcccctttagcccagcctctgaaacccaggacaggcctcccagctgccattggaagtggctacccttgtagcccacacaccccaacctgcttggtagggccagctcccttactagcacagcttgcsgcacaggccagagaccagctcgccaacctgaaagtgttcccagcagagccaagccaggctcaacaaagacctccccattctcagctctgggcctgcctcgtttcctgtggggctagccatagccatgccttttaaagggaactccagtagggtgtggttggcccctgtcctacaaaagagtccccacagcccagcaatgtccttccaggccctggtttatgcagtcacgttcctgcatggtgtcactaaccacccttcccacgctgtgctgtgcaaaggccatcccagttcttaccta

SEQ ID NO: 300802 - DNA, 415 bp, Homo sapiens
acaccccagctgttttttttttttttggcagaaatggggtcttcctactttgcctaggctggtcttgaactcctgggttcaagccagcctccagccttggcctcccaaagtgctgggattacaggctcatgtgagctaccgtgcccagccagccacgctcgtttatgtgtatagtgtctgtgtctgcttccacagagtggaacagttgcaacagagatgctgtggcctacaaaccctaaaatgtttactgtcagggcctttatagaaaatgtctgctgacagcattcccctctcaatctcctccaggggcctcccgttcctcttacagggtaacccgaagtccttgctttggcctaaaggcctgtgccactctgacttatctcccrcttctcccctgcatcactgcactacactc

SEQ ID NO: 300803 - DNA, 609 bp, Homo sapiens
tcttatccttttattgccaccctctgcccttgtgtactctggaatccaaaccaatagcttaccagaaggtcaattagaaagaaaatcatccccatccgtcccgatcgccaaacaacattaagttggcttagatttatttgttatttaaaaatttttttgtttttgagacagggtctcactctgttgcccaggctggattacagtggcatgatctcagctcactacaacctctgtctccctggtttaagtgatcctcccacctcagcctcctgagtagctcggactacagacgtgcaccaccacactcagctaatttttgtattttttgtagagatgggttttcgctacgttgcccaggctggtctcaaactcctgggcccaagtgatctgcctgcctctgcctcccaaagtgccaggattacaggcatgatccayggcacccagcctttaactttttttgagacagggtcttgctctgttgtccaggctgaagtgcagtgatgtaattctggctcattgcagcctccacttcccaggctcaagcaattctcagcctatcttagcctcccaagtagctgggaccacagatgtgcaccaacacacctggct

SEQ ID NO: 300804 - DNA, 423 bp, Homo sapiens
cgaactcctgacctcaggtgatccacctgcctcggcctcccaaagtgctacgattacaggcgtgagccaccacacccagccagggccctcctttctttagcaggtctgcacttaacatttgcagggctctgggcaagagcaaagacagtagttcacatgccataggttgaaatatttaaaagttatacatcaagccaacaaattcctaaataaaatatgtttcatgtttgagcctaggagttcaaggtcagccygggcaacaaagtgagatcccatctctcaaaaaaaaaaaaaaaaaaaatttagcctggctgagggagcacctgtcccaactacataggaggctaggacaggaggatctcttgagcctgggatgttgaggctgaagtgagcagtgtttgcgccactgcactccagcctggg

SEQ ID NO: 300805 - DNA, 456 bp, Homo sapiens
tgccacatgcccccacctgctctccattactggccatgacctattgggtcagggataggcacttgacctggagacgatcaaatgattggtcagaagtccacatggtagcctggcataagaggccctgtttgatagtggtgatgggtgcacaatattgtgaatgtactacatgccattgaaatgttcattttaaaactgttacaggctgggcatggtggtgcatacctgtaatcccagcactttgggatgccacggtggaaggattgcttgaggtcaggaatttgagaccagcctaggcaacagagtgagacccccatctctacaaaaataatactactactaataamtttaaaaataaaaaatttacaatggcaaatttgaagttatgtgtattttaccatagtttttaaaaattaaaagtacaagaaaaaattgccaaaaaaatacaggtaccca

SEQ ID NO: 300806 - DNA, 260 bp, Homo sapiens
cattctaagttcagttacaactaaaatgcttaacaatgagttcagtcttcagtcaacattaaatctcttctatcagtcatgttttatgatgtctcagacccatctaaacgtattttacaattttaacaatcttaaaggtttacattttagaggggcamtaaaacaatttccatcaagtctccttgttttctacattgaacagcaagaaacctggaaatcttccacttactactgagcagaacaagttttgctgttgttgc

SEQ ID NO: 300807 - DNA, 659 bp, Homo sapiens
cattccagcccagctgaaagtgcccactgggtttacacaggtcagagcagttacagagtagaaaaaagatttacctctactttgygaaagcatttgttttagaaacaatctgaggtaacagatcatattttctgcattctcattttcttgtttcttattccaaagctattttcagaaaaataggatgttacgtgattccaagttcattttttttctgctcactcacctccccaacagaaagcttggtccttaactggtcagcactagagaaaatcacagtacccacaccccctgctccacacacacacacacacacacacaaattatatatatataaaatttcagatggataataagccaaggtgcaaagagggaaaatattaagctatcatcatgaaggtcttatttctattcctgtatcagacacaaatgggaaggcagaaagcacagaatcacactgttacatgatacatgggtattcataggggttgttttgaaatagcccaccctaaatcttcctgcataaaaaactctgatcacacaggttggtaaaacatgaagaaacaacatgctttcaaagtgaagaccaatttggaagtatccaccttttaacactgaacatggaaattacctggactggcaatatggcagcaggcaaa

SEQ ID NO: 300808 - DNA, 593 bp, Homo sapiens
aaacaacctaagtgtcgatcagtggatgacagataaggaaattgtggtacatatacacaatggaatattattcagccataaaaatgaaggaaatcccgccatttgttacaacatgggtgaacctagaggacattatgstaagtgaaataagccagacacagaaagacaaatactgcattatctcacatgtggaatctaaaaaactcaaactcatagaaggagggtaaaatggtggttactaaaggctggggatgagggaaatggggagacgctgatcaaactgtacaaaccttcagttataagatgaataagttctgggatctaatgtacatcatgggtggtgaagaatgttttaattattctgatagtgataatcattatacattatatacttaaataaaatcattgcattgtataccttgaatatattcagttcttattcatcaattaaatatttcaaaattttaaaaagtctgagatgttcattatctagaaacgaaacgttcaatgagatgagctcacttgcccaagccctggtttccagcaggtgacaaaaccaagattctaacttggttgaccctatagcccaggct

SEQ ID NO: 300809 - DNA, 593 bp, Homo sapiens
aaacaacctaagtgtcgatcagtggatgacagataaggaaattgtggtacatatacacaatggaatattattcagccataaaaatgaaggaaatcccgccatttgttacaacatgggtgaacctagaggacattatgctaagtgaaataagccagacacagaaagacaaatactgcattatctcacatgtggaatctaaaaaactcaaactcatagaaggagggtaaaatggtggttactaaaggctggggatgagggaaatggggagacgctgatcaaactgtacaaaccttcagttataagatgaataagttctgggatctaakgtacatcatgggtggtgaagaatgttttaattattctgatagtgataatcattatacattatatacttaaataaaatcattgcattgtataccttgaatatattcagttcttattcatcaattaaatatttcaaaattttaaaaagtctgagatgttcattatctagaaacgaaacgttcaatgagatgagctcacttgcccaagccctggtttccagcaggtgacaaaaccaagattctaacttggttgaccctatagcccaggct

SEQ ID NO: 300810 - DNA, 593 bp, Homo sapiens
aaacaacctaagtgtcgatcagtggatgacagataaggaaattgtggtacatatacacaatggaatattattcagccataaaaatgaaggaaatcccgccatttgttacaacatgggtgaacctagaggacattatgctaagtgaaataagccagacacagaaagacaaatactgcattatctcacatgtggaatctaaaaaactcaaactcatagaaggagggtaaaatggtggttactaaaggctggggatgagggaaatggggagacgctgatcaaactgtacaaaccttcagttataagatgaataagttctgggatctaatgtacatcatgggtggtgaagaatgttttaattattctgatagtgataatcattatacattatatacttaaataaaatcattgcattgtataccttgaatatattcagttcttattcatcaattaaatatttcaaaattttaaaaagtctgagatgttcattatctagaaacgaaacgttcaatgagatgagctcacttgcccaagccctggtttccagcagrtgacaaaaccaagattctaacttggttgaccctatagcccaggct

SEQ ID NO: 300811 - DNA, 589 bp, Homo sapiens
ttttttcttaaaaggaccctttctgtaaaggtgcctgtaaggccaaagttgagtatgcactattgtcattcacttttgcttaataatgaataatctgaaaaggcaaatgttacacactctttctttttaaaaatttcctgttataaggacaatggctgcactgcagtcaagtacagcccaaggtacacacccggcacagcatgacacagcaggattggagtgcaggtgcacaatcctgtgcattatataatcatatctacgtagccataasatgggagggctcatcacctggctctgagccactattgtctgggaggtgcataaatgcagcaccaacagtgtgagtgagttgctgaataaagccatgtcccacctacctgtggtctctcaagtgttctttcagctacccactaccccatcaattcccctcagacctcagcttgggctggaaactcacacctgtataatcttataattttattcttctaattgaactctagaatccttttgtcaagttctcccaagttcctttgggattttacaatagtattcattattattagtaacagaagctcacacttagtgagaa

SEQ ID NO: 300812 - DNA, 608 bp, Homo sapiens
aaatgggaaaacattgaacacagttgtgagacgtggcggattagggcactggctactgagaatcacaaggaaggagattgaaagtctgcaggaacagaggtaggtatcttgggaagccaggggttccgtaggaaaaggattaactggaaagggcggccttcagagatttgatgttgaagaaaaacaagaaagaactggaaatkaaagtactggaaaaacaagagaattacaaaaccagaaggcaaactgccactccccaaaaggagggcaatttttaaggaaattgcacttcacaaacaaacagaagaatctcttgaattcagaaacctcatgtatcacccggtcctcacctcctcacctctgtctacatgtgacagtcattgctggccgctccaggaaagaaaacatctcaaaatgaagggtaaatagcaacatatccatacaaagtgactagaagatgaaagcagatcataaaaaaccttttagctgatgaatattcttcctccccaaacaataatgaagcatgagaaaatgtgaacaccccagtcttaattaaataacaagtaaacttggaggtatgggagaaaaaaaacaccctgcctcaggaa

SEQ ID NO: 300813 - DNA, 575 bp, Homo sapiens
ttgtgacaattcatcaatctctgtcgttataatttcctgcactcctccgtatgcgcattactatagttaatgaactgttaaaatgtttgcaagaaaacaacaaaacatatcatgtcatctactgacttcgccacaggttcctcacacattagatggaaaccttaccctygcctatctctcagggttgctgtgaaaaagaattctgataatatcaggggcggggctttgtaaactgtgaagctggtggtgccattatggcggatcacatcaatactgagcttctcaaagggctatgttttgcaggactagcctttaccagtgtaatgtatttacagttgataagcagacaaagcagaatgaaggaatacatgatttacacattgttagaccacagttggaacttctattgcccaacccttctctcacccacagtcccaagacagattattttgcaactaattacttacagatgtgaaatcatttagagtgttatgaaaatagcagtatggatcctggaatgggaggcagtgagtccggagtagacaacataacacaattattgttattccgggctt

SEQ ID NO: 300814 - DNA, 609 bp, Homo sapiens
tgtacattgctaagctttcagacttttctcttgcatttggaaaaggatgggttttccttctggctgcagaatttacagtattattgaagctagctgttatttcagtgagaactctgctctctataagaaaagcattagcagtgagaagttagtgaagtagttgatttgggggtatttcctagagagaaaataacactttttttccccttgaagtgtcttttcttcccttgaagtgttcctggtgyggtcttgctttatctggggggtggggtgctggagaaggaggggtaacttgattgtagggggatgtcaggccagggaaatggatgggagaagagccggcttaggatgctgcttctagtccccctcccctcgctgtgcacacacagacacatgcacatcagtggtcagtttagctgcaatattcacagcacatttgctggggttcaattgatcactgcacacaagagatagagtcagcaaggatgtggtgcggagaggccaggggcttgggggcttccgctctcacacatcttcaagccccattttgaaatggtttgaattaatgacacttattcagacagacaaaggaggtaaatggaaatatta

SEQ ID NO: 300815 - DNA, 481 bp, Homo sapiens
gttctggaccagcagtcttgttccaaaggctggtcctctggtagcaggcaggaatagatgtggtatggagctcccacaaactgagcagacgtgcaacaccatggcagtcataaggggacacatttaacaagaaagtatgaggatgggaaaggatgttgccaagtttaaattaagaaaagtckttcatcacccaaatcctcatattctctttaagtccatgtaaacatacaatgtggcagatctgctcctggagggctttaagatgttcctaactaaatgtttactgaattgaataaaatgaatgggcaggaggtcaagtgagtagaaatagaacctgaagggcaaaagtgtccagaaatgttaactatgtaactttgaccttgtgagcatcagatgcagtgtgtgtatgtgtgtgtgtgtgtgtgtgtgtgtgtgcattgtagaaacaaggtataactatgaaaagggaacagtgatcata

SEQ ID NO: 300816 - DNA, 481 bp, Homo sapiens
gttctggaccagcagtcttgttccaaaggctggtcctctggtagcaggcaggaatagatgtggtatggagctcccacaaactgagcagacgtgcaacaccatggcagtcataaggggacacatttaacaagaaagtatgaggatgggaaaggatgttgccaagtttaaattaagaaaagtcgttcatcacccaaatcctcatattctctttaagtccatgtaaacatacaatgtggcagatctgctcctggagggctttaagatgttcctaactaaatgtttactgaattgaataaaatgaatgggcaggaggtcaagtgagtagaaatagaacctgaagggcaaaagtgtccagaaatgttaactatgtaactttgaccttgtgagcatcagatgcagtgtgtgtatgtgtgtgtgtgtgtgtgtgtgtgtgtgyattgtagaaacaaggtataactatgaaaagggaacagtgatcata

SEQ ID NO: 300817 - DNA, 535 bp, Homo sapiens
aagtcatgattttacatcaagtcttaagaaaaagaaaagaaaagaaaaaatcacaatgttctgcaaaggcctggaagctcaccgatgactaaccatggtgtaaaataattggaagtaaaactgtctagacaacacaaaagaaggaaaataagaaaaggaaaataagaaaagaaaaaaaaagagtacattagtctattaagraattgatagtaaattattctggaaatcgtgtgtgtttaaattcatgtgcgtgaaaaacaaactgaaacagtatatgctatatatattatggcttttactttctaaaaaccttgtaaggataaaatgagatcatataaatgattttgaaaaggtcagaatatcatataaatgttagtggctatcatcattctggaaccagcaaggcttttgaacccaaactacaagaataaccaaccctcttggcaggtgatacttctaactttcatgaaaattaaaaccagctatttatcagctgggctccgtttgttactactgaaggctgttcaggtaagta

SEQ ID NO: 300818 - DNA, 600 bp, Homo sapiens
ggcctcctttatgttctagccaggggtcaacaaacattctttaaagggagggcttcaggtgcagggcgaagtgagtgaggcacttgctttgggtgcaacctacaaggagggggtcaaaaactcagtaaacaagataaagaatatcttactgcaatattttaaataatcaaaattaacacaaaattccaagatgaagaaaatgtcargattttaaatatggaccagacacttgcagtgccctgcagagctatgcaggaatgtgaggcaaaaggagcaaccagggatactgccccctagctagagtgttggaatcctacttaggattttgtctttatttggcttcatcattctccaaagacctcaaaactgtcctcacgctcttccccagcagatctccctgggaaatctcttttcttatgcagaagcttgccttgctgcttctggctacttccaaatttggaaaaccaaacttttgatttccaaggagacttcagagtctagaaaatgtctctgaggatttcctacagcaagtggccgtttcgaagagctgggcagacaggaatatctgtggcttcctgggccttacacgcctgcttgcta

SEQ ID NO: 300819 - DNA, 629 bp, Homo sapiens
atatatctccctggataccaggactctcagtagctgttgctattttgttctcctactttgaaacatacttttctgaaatcacctaccttgttatttctcttaacttttgagcagtatttggtgctgctgacgattttctccttgagcactcttccccaggctccagggcatcactttccactgattgtctcatctccttggctgctccttctcagcctctttcatgggcctctcttctctgcttagcctgagaagttggtattccttcagattctgtccttggctcttctcatttactgggtggttttaatttctgttattagttactttctgcatgctgatgacttctcaatttgaattctcaccaggtcttctctcccaagctctagatccatacatccarttgtttattgaccttttccacttaaatgtgacagaagtaccttaatctcaatattttcagaaactgaagtcattatcttccataccccgtcttaccccaaaacctacttctctttgtatttaatatctcaggattagtactggcacctataggtgctcaagctagatttaaatagatgcataaaatctcttgccctgaaccatatctctctgtccccacccattag

SEQ ID NO: 300820 - DNA, 575 bp, Homo sapiens
gtgttccattatctcaccagccttctcatcaggaaggttttttcccttaatgtttaactttaatccctcctgttgcaatttaagctcatttccttttgtcttggcttcagtggaaataaacaatactcactagcacctacccatccctatttttaattgaacatgtctgacttccccaggcagctttttctttctagtgctaaatggaccccattttgcctttttctccttatgctwcttcttggagacccttccttttaaaacttgctttgctcttactgcaacaactattagggactatacatttcaagtctgtcgtttaatcctgcagttcatttttctaatctaccaatctgtatgatcttagtaagccacctaatacactgaagaagaattgatggacaccattttaaagtgctttagagttgtggagttcttttctaagtgaactgctaccattgtccaatattcttctctctccgcccaactccaccctggttttcctacttaagggtaaatgtttgtcctgtcttattttctacttcttcatgcataagtttaatgcaggccatgat

SEQ ID NO: 300821 - DNA, 602 bp, Homo sapiens
gataggcttccacagccctctcaattatgtgttccattatctcaccagccttctcatcaggaaggttttttcccttaatgtttaactttaatccctcctgttgcaatttaagctcatttccttttgtcttggcttcagtggaaataaacaatactcactagcacctacccatccctatttttaattgaacatgtctgacttccccaggcagctttttctttctagtgctaaatggaccccattttgcctttttctccttatgcttcttcttggagacccttccttttaaaacttgctttgctcttactgcaacaactattagggactatacatttcaagtctgtcgtttaatcctgcagttcatttttctaatctaccaatctgtrtgatcttagtaagccacctaatacactgaagaagaattgatggacaccattttaaagtgctttagagttgtggagttcttttctaagtgaactgctaccattgtccaatattcttctctctccgcccaactccaccctggttttcctacttaagggtaaatgtttgtcctgtcttattttctacttcttcatgcataagtttaatgcaggccatga

SEQ ID NO: 300822 - DNA, 562 bp, Homo sapiens
gtgttccattatctcaccagccttctcatcaggaaggttttttcccttaatgtttaactttaatccctcctgttgcaatttaagctcatttccttttgtcttggcttcagtggaaataaacaatactcactagcacctacccatccctatttttaattgaacatgtctgacttccccaggcagctttttctttctagtgctaaatggaccccattttgcctttttctccttatgcttcttcttggagacccttccttttaaaacttgctttgctcttactgcaacaactattagggactatacatttcaagtctgtcgtttaatcctgcagttcatttttctaatctaccaatctgtatgatcttagtaagccacctaatacactgaagaagaattgatggacaccattttaaagtgctttagagttgtggagttcttttctaagtgaactgctaccattgtccaatattcttctctctccgcccaactccaccctggttttcctacttaagggtaaatgtttgtcctgtcttatttyctacttcttcatgcataagtttaa

SEQ ID NO: 300823 - DNA, 609 bp, Homo sapiens
cagataaaattccagtttaaattagtgaaatttgtkgtgagacagcctgtgcactgcagatgcctgtggtcctagaagataaagtctatttccttttgaaggacatacatgtagatcaacatggaaggagtagcccttgaccatcagtgtatgactccattgcatagtgcttgctgcagaattgccttgcctgtcagatgacacagccagtgctgaggtgagctggtatctaccccgaccctcctttgccagaagtaaagatgatgagggggagcccccttactgacccttgctggggatggatggatgggtgaaggcttctgacaacagccacctttcccaatgaggtcatgaggacctcagtgctgtatgatggggaaggatatggctatttttgtaccatggataataaaaggggaaaaccctgctaatttgacgtaaaaaagattcaaagtcataaatatcccaaactgaaagcaaaccccagaaaggctagttttgaaattggaggtaattaattcctcatgcgatgtgctgaaattcaacccagacatccctttttttttttaatttctttcagacagtttacagtccagtggaaagtaaaac

SEQ ID NO: 300824 - DNA, 609 bp, Homo sapiens
cagataaaattccagtttaaattagtgaaatttgttgtgagacagcctgtgcactgcagatgcctgtggtcctagaagataaagtctatttccttttgaaggacatacatgtagatcaacatggaaggagtagcccttgaccatcagtgtatgactccattgcatagtgcttgctgcagaattgccttgcctgtcagatgacacagccagtgctgaggtgagctggtatctaccccgaccctcctttgccagaagtaaagatgatgagggggagcccccttactgacccttgctggggatggatggatgggtgaaggcttctgacaacagccacctttcccaatgaggtcatgaggacctcagtgctgtatgatggggaaggatatggctatttttgtaccatggataataaaaggggaaaaccctgctaatttgacgtaaaaaagattcaaagtcataaatatcccaaactgaaagcaaaccccagaaaggctagttttgaaattggaggtaattaattcctcatgcgatgtgctgaaattcaacccagacatccctttttttttttaatttctttcagayagtttacagtccagtggaaagtaaaac

SEQ ID NO: 300825 - DNA, 593 bp, Homo sapiens
ctgtaggcctcgaaaaaaagggctgtgtgctgtgtagctgcacctgctcagcctcttcatggctcttggaaagaggcactcccaggtgcaggcagcaccactctgcatggcctcayatattcccttggttgctgccctttgtcctcaccctcccttccctgagtttgtgttctcaaacagccatcactttaatccttgccccaggctctgtcctcttgagaaaatcactgatactgggagtagttgtataacaagaagtaggtcttcacaatggaattttgaagttagactggccacccatctgaaagcactaggggctccatagctggaggtgaacgggatggtaatagcccctggtgtgcaattacttatgcttttacccatgcttaactaggatgatgtgcaggcagaagtcaagacactgggagatcaaggggctgtggcatgtaattataaggatttcagatgctgcttctgatgactgcgtatcttgcaaaaagaaaatggcagctcatgggctaatgggcaatgggaggtaagtccacaaattcggaaggcctctttggccttgctcatgtaatgagatcacacca

SEQ ID NO: 300826 - DNA, 593 bp, Homo sapiens
ctgtaggcctcgaaaaaaagggctgtgtgctgtgtagctgcacctgctcagcctcttcatggctcttggaaagaggcactcccaggtgcaggcagcaccactctgcatggcctcatatattcccttggttgctgccctttgtcctcaccctcccttccctgagtttgtgttctcaaacagccatcactttaatccttgccccaggctctgtcctcttgagaaaatcactgatactgggagtagttgtataacaagaagtaggtcttcacaatggaattttgaagttagactggccayccatctgaaagcactaggggctccatagctggaggtgaacgggatggtaatagcccctggtgtgcaattacttatgcttttacccatgcttaactaggatgatgtgcaggcagaagtcaagacactgggagatcaaggggctgtggcatgtaattataaggatttcagatgctgcttctgatgactgcgtatcttgcaaaaagaaaatggcagctcatgggctaatgggcaatgggaggtaagtccacaaattcggaaggcctctttggccttgctcatgtaatgagatcacacca

SEQ ID NO: 300827 - DNA, 627 bp, Homo sapiens
ctttctttcctgggtattctttaaggggtaaagaaaagggtaccggtatgacgtggtggcgctgctcagttgtatggggctgttagaggaaagatcgtcttcttaatggtacatcaaagcaagcagagcattgatgatctctatgacctcctcagctctttctgggcctcagagccatrgatgtcaggtgcgggtgctgcaggagatacatacaggtccatatttacctgaagtagattcggaagctctctaagcagctcccatcatcagcctccctgctgcaggttttcagtggagccccacagagctgttctggcattctcagtgttgaatagcagtagccatttcttccactggggggagggggaggactatttggcagctggtcaggtcttgctttagttaggaatatggtcaacattactgtaaaagaggactctcgggccggcagacgtactaaaggcgtggtcaaggagacaggtccaagtttcttcaggagctcagcttaggcaagtattttaaaggctgttgtaataatcttcctttaccataattcaggcctcagttacatcttcagttggaagaatgttgtttccagtaaggctagaagagaaggaatggcccaca

SEQ ID NO: 300828 - DNA, 627 bp, Homo sapiens
ctttctttcctgggtattctttaaggggtaaagaaaagggtaccggtatgacgtggtggcgctgctcagttgtatggggctgttagaggaaagatcgtcttcttaatggtacatcaaagcaagcagagcattgatgatctctatgacctcctcagctctttctgggcctcagagccatggatgtcaggtgcgggtgctgcaggagatacatacrggtccatatttacctgaagtagattcggaagctctctaagcagctcccatcatcagcctccctgctgcaggttttcagtggagccccacagagctgttctggcattctcagtgttgaatagcagtagccatttcttccactggggggagggggaggactatttggcagctggtcaggtcttgctttagttaggaatatggtcaacattactgtaaaagaggactctcgggccggcagacgtactaaaggcgtggtcaaggagacaggtccaagtttcttcaggagctcagcttaggcaagtattttaaaggctgttgtaataatcttcctttaccataattcaggcctcagttacatcttcagttggaagaatgttgtttccagtaaggctagaagagaaggaatggcccaca

SEQ ID NO: 300829 - DNA, 627 bp, Homo sapiens
ctttctttcctgggtattctttaaggggtaaagaaaagggtaccggtatgacgtggtggcgctgctcagttgtatggggctgttagaggaaagatcgtcttcttaatggtacatcaaagcaagcagagcattgatgatctctatgacctcctcagctctttctgggcctcagagccatggatgtcaggtgcgggtgctgcaggagatacatacaggtccatatttacctgaagtagattcggaagctctctaagcagctcccatcatcagcctccctgctgcaggttttcagtggagccccacagagctgttctggcattctcagtgttgaatagcagtagccatttcttccactggrgggagggggaggactatttggcagctggtcaggtcttgctttagttaggaatatggtcaacattactgtaaaagaggactctcgggccggcagacgtactaaaggcgtggtcaaggagacaggtccaagtttcttcaggagctcagcttaggcaagtattttaaaggctgttgtaataatcttcctttaccataattcaggcctcagttacatcttcagttggaagaatgttgtttccagtaaggctagaagagaaggaatggcccaca

SEQ ID NO: 300830 - DNA, 488 bp, Homo sapiens
gtaaatcatcactagtattttaggataataatttgttttctttacactcttcttaggtagctaaatgataatctccattggtctttttcacaacactctgggctaagttttttttttttattttttaatgtaagcctagtgctctggaataattaccaggacttctcaagatgcctgcttttcctacagctgacttgcaacaatttatagaaacttacaaataagctacataccagggaaagctctgtgcccaacacaccaaagcatcaaataagcttagtaccagtgagactctgagcccaatataccaaaaagtaccgagtctggcttcaaaaagtgtaacatctcaaatcagtgcctggagtattgaaagacattgttttttaattttgtgattttaaaaaacttttcccytgaatgctagggaattgatctgagaatcatcatctcaatgcatttcctgaggaattctttgggagcaggaattt

SEQ ID NO: 300831 - DNA, 583 bp, Homo sapiens
gatattcctaaacttgaagtgatttttcaagtatagtagccatgtttagctctcagtaattttgacctcaagattttaatctaaggagtatttctcaaagtaggtccacctgatgttaataaattttactcaaaactagggacatattttaaaaatgttccatgacaaacagtgcctgtaaaatattgggttaaaaacaatcaagatgcgttctttttagcaggacttggcagggcttcgaacctgctaaattgctctgtgacctacattatgaatgatagcccrtaattacttgaccatggaagacttttctaggactagtgttaaaagtcaaaacaaaaacaaagcaaaaataacaaacaaaaacagacactggaaagtacaaacctagggaatccagaatttggaacagttttataggacttgtgcagatgaaactcagagcttttctcttctctgatcccaatttagaagccacttgccgaattttttttcatctgtgtgctcacttagatgtaacctgaatttaggattgagactttttccaacttctttctctaaaattgaaaggtcacattttttc

SEQ ID NO: 300832 - DNA, 582 bp, Homo sapiens
tgatctagcagaagagtccttctgagaaataaacacttccttaggtgttcaagttgctattaaccactggttctcattctgctgaaaattttataaataaaactatgcagtagttaaaggtaaaatctataaatctactttaaaaattgcgtatcagcttgaaatgtagagcaagatcagcacttytaaggtgctcctcagaataccagttctagaggatgttaataagtgtgaccaaaaaaaaaaaaaaaagaaagaaagaaagaaaagaaaaaaaagaaaccaggctgaatattcaaaaaatctggtaaataccaggttgaaggatattgacctggatttcacatcagagcccttctcactgtgccacataggctaagagcactgccatacaccttagacttgtttgaccatgtagcctcttttcaagaagaccctcacaaaatcagttttccacagaaaaaactttggggacaactatgcagcacagagccaacagaaagtgtgttgaaggtattgctgtgtctagcaccacacttagcattcaacagtccagaggcccagaaagctttgcaaggtaac

SEQ ID NO: 300833 - DNA, 582 bp, Homo sapiens
tgatctagcagaagagtccttctgagaaataaacacttccttaggtgttcaagttgctattaaccactggttctcattctgctgaaaattttataaataaaactatgcagtagttaaaggtaaaatctataaatctactttaaaaattgcgtatcagcttgaaatgtagagcaagatcagcacttctaaggtgctcctcagaataccagttytagaggatgttaataagtgtgaccaaaaaaaaaaaaaaaagaaagaaagaaagaaaagaaaaaaaagaaaccaggctgaatattcaaaaaatctggtaaataccaggttgaaggatattgacctggatttcacatcagagcccttctcactgtgccacataggctaagagcactgccatacaccttagacttgtttgaccatgtagcctcttttcaagaagaccctcacaaaatcagttttccacagaaaaaactttggggacaactatgcagcacagagccaacagaaagtgtgttgaaggtattgctgtgtctagcaccacacttagcattcaacagtccagaggcccagaaagctttgcaaggtaac

SEQ ID NO: 300834 - DNA, 657 bp, Homo sapiens
  misc_feature (1)...(657): n = A,T,C or G
tttgcatttaagattaatctgtgccactgggtttttatccaaatggaatttcctggagataagaacatagccactgagttcaccaaagcagaggaaccctggcatcattctgccaagctgctccatgccctaatatatcytaaaattggaagaataaggtgcctggtcttgggaggaggatggttgcctgcatggcttgtataagatgatgctattcagagagagagacagagaagcatattgacccttctctttgtgttgcttgcatagaatccaagctttgcataggagaaagtcagccatggacagaacccacacatggtagggcagaggtgggctaaggtaggctaaggcatgcttatatcaaaacaattatgcaattctattcatttatttctttaaaaactttcatcttcctttacctctctgaatacacacatagtttactatgcacgtgcgccaatttnaanttttttttcccccccccctgaataaatatcatttccttttagagaacctcgctctgcttgttatttaaggttgatgctttctcaggtaccacaaggactgaatcacttttcttgctcttcggaactacccttctttgtcctgtgttcaaatggaggcagataacacaaaagaaagtgcttggccttg

SEQ ID NO: 300835 - DNA, 657 bp, Homo sapiens
  misc_feature (1)...(657): n = A,T,C or G
tttgcatttaagattaatctgtgccactgggtttttatccaaatggaatttcctggagataagaacatagccactgagttcaccaaagcagaggaaccctggcatcattctgccaagctgctccatgccctaatatatcttaaaattggaagaataaggtgcctggtcttgggaggaggatggttgcctgcatggcttgtataagatgatgctattcagagagagagacagagaagcatattgacccttctctttgtgttgcttgcatagaatccaagctttgcataggagaaagtcagccatggacagaacccacacatggtagggcagaggtgggctaaggtaggctaaggcatgyttatatcaaaacaattatgcaattctattcatttatttctttaaaaactttcatcttcctttacctctctgaatacacacatagtttactatgcacgtgcgccaatttnaanttttttttcccccccccctgaataaatatcatttccttttagagaacctcgctctgcttgttatttaaggttgatgctttctcaggtaccacaaggactgaatcacttttcttgctcttcggaactacccttctttgtcctgtgttcaaatggaggcagataacacaaaagaaagtgcttggccttg

SEQ ID NO: 300836 - DNA, 480 bp, Homo sapiens
agttgctgttgaatcagagtgaaatgagtgtttccctggctggccacatggagaagacagaaactggatccctatttctcaaaatagacaaaaagcaactcaagatggattaaaggcttaaatcaaagatctgaaaccataaaacctaagaggaaaacctaagaaaaactattcaagacattggcctaggcaaagaatttatgacaaagaccacaaaagcaaatgcaacaaaacccaaaataaataaatgggaccaattaaactaaaaagcttctgcacagcaaaataaataatcagcagagtaaacagacaacccacagaataggagaaaatatttgcaaactattcattcaacaaaaaacttgtatccagcgtctacaagtaactcaaacaaatcarcaaaaagaaaacaaataattttgtcaaaaagtgggcagaggacatgaatagacatttctcaaaagcagttatgcaaacagc

SEQ ID NO: 300837 - DNA, 501 bp, Homo sapiens
ggtgtcaaaacggtgaatgtctgtcaggttaraaaaggaaagactcaaacttccaggataaaaaaaaaattgataaaattacacttcattctcatgaattttgtgatgtactttgagtttcaatttccaattatattcccaaaggcttctctttcatatgtttgataacatataagatttctgaaaaaaaaaatttctaggattctttttcaccaggcttttccctcatgaatttgatactttttgatattatatctatgcaatataacaataattgaacaaaaacttttaatagggtagctagaaatatacttttttttccagtatgccaaataacagatttcaaaaactcccccaatacactgattatgtgactcatactttgaccaatttaatctgttttttttggtatatgtaaacaaaatcttagaaaacattggtaatacactgaggttaattctgtttagacatatctcccctcgagtgactctggtttgatgc

SEQ ID NO: 300838 - DNA, 501 bp, Homo sapiens
cactctttttctagaatctacaagtggatatttggagcgctttgaggcctaatgtggaaaatcaaatatcttcacataaaaactacacagaggcattctgagaaacttcttttttgtgtgtgcattcaactcacatagttgaagtaatctttggatttagctgttttgaatctcctttttgcagaatctgcaagttgatacttggagccctgtttcaccctatagtggaaaagcaaatrtcttcacataaacaaaccctacagagaagcattcagagaaagtcctttgtgatgtgtgcattgaacatgcagagttgacactatcttttgattgtacagttttgaatacgtctttttgtagaatctgcaagtggaagtttggagctgtttgcaccctgtggtgtaaaaggaaatatcttcatataaaagctacacagaagcattcagaaagacttctttgtgatgaatgcgttcctcacacagagttgaatcttccttttta

SEQ ID NO: 300839 - DNA, 505 bp, Homo sapiens
cctttgtgatgtgtgcattgaacatgcagagttgacactatcttttgattgtacagttttgaatacgtctttttgtagaatctgcaagtggaagtttggagctgtttgcaccctgtggtgtaaaaggaaatatcttcatataaaagctacacagaagcattcagaaagacttctttgtgatgaatgcgttcctcacacagagttgaatcttcctttttattgagtagtattgaaaccctctttttgcagaataaccaggtggatatttggagagctttgaggcctgttttggaaaagcaaatatcttcaaattaaaaccacacagaagcattctgagaagcttctttgtgatgtgtgcattcaactctcagarttcaacgtgtcttatgatggagcagtttggaaacactcttttttgtagaaactgcaagtggatatgtagagcgatttgaggcctactgtggaaaagcaaatatcttcacataacaactacacagaagcactc

SEQ ID NO: 300840 - DNA, 505 bp, Homo sapiens
cctttgtgatgtgtgcattgaacatgcagagttgacactatcttttgattgtacagttttgaatacgtctttttgtagaatctgcaagtggaagtttggagctgtttgcaccctgtggtgtaaaaggaaatatcttcatataaaagctacacagaagcattcagaaagacttctttgtgatgaatgcgttcctcacacagagttgaatcttcctttttattgagtagtattgaaaccctctttttgcagaataaccaggtggatatttggagagctttgaggcctgttttggaaaagcaaatatcttcaaattaaaaccacacagaagcattctgagaagcttctttgtgatgtgtgcattcaactctcagaaytcaacgtgtcttatgatggagcagtttggaaacactcttttttgtagaaactgcaagtggatatgtagagcgatttgaggcctactgtggaaaagcaaatatcttcacataacaactacacagaagcactc

SEQ ID NO: 300841 - DNA, 627 bp, Homo sapiens
gctccaaatatccatgtgcagattctaaaaaaagagagattctaagctactccatcaaaagataggttcagctctgtgagttgaattcacacatcacaaagaagtttctaggagtgcttctgtgtagttgttatgtgaagatatttgcttttccacagtaggcctcaaatcgctctacatatccacttgcagtttctacaaaaaagagtgtttccaaactgctccatcataagacacgttsaactctgagagttgaatgcacacatcacaaagaagcttctcagaatgcttctgtgtggttttaatttgaagatatttgcttttccaaaacaggcctcaaagctctccaaatatccacctggttattctgcaaaaagagggtttcaatactactcaataaaaaggaagattcaactctgtgtgaggaacgcattcatcacaaagaagtctttctgaatgcttctgtgtagcttttatatgaagatatttccttttacaccacagggtgcaaacagctccaaacttccacttgcagattctacaaaaagacgtattcaaaactgtacaatcaaaagatagtgtcaactctgcatgttcaatgcacacatcacaaaggactttctctga

SEQ ID NO: 300842 - DNA, 546 bp, Homo sapiens
cttttccacagtaggcctcaaatcgctctacatatccacttgcagtttctacaaaaaagagtgtttccaaactgctccatcataagacacgttgaactctgagagttgaatgcacacatcacaaagaagcttctcagaatgcttctgtgtggttttaatttgaagatatttscttttccaaaacaggcctcaaagctctccaaatatccacctggttattctgcaaaaagagggtttcaatactactcaataaaaaggaagattcaactctgtgtgaggaacgcattcatcacaaagaagtctttctgaatgcttctgtgtagcttttatatgaagatatttccttttacaccacagggtgcaaacagctccaaacttccacttgcagattctacaaaaagacgtattcaaaactgtacaatcaaaagatagtgtcaactctgcatgttcaatgcacacatcacaaaggactttctctgaatgcttctctgtagggtttgtttatgtgaagacatttgcttttccactatagggtgaaacagggct

SEQ ID NO: 300843 - DNA, 627 bp, Homo sapiens
gctccaaatatccatgtgcagattctaaaaaaagagagattctaagctactccatcaaaagataggttcagctctgtgagttgaattcacacatcacaaagaagtttctaggagtgcttctgtgtagttgttatgtgaagatatttgcttttccacagtaggcctcaaatcgctctacatatccacttgcagtttctacaaaaaagagtgtttccaaactgctccatcataagacacgttgaactctgagagttgaatgcacacatcacaaagaagcttctcagaatgcttctgtgtggttttaatttgaagatatttgcttttccaaaacagrcctcaaagctctccaaatatccacctggttattctgcaaaaagagggtttcaatactactcaataaaaaggaagattcaactctgtgtgaggaacgcattcatcacaaagaagtctttctgaatgcttctgtgtagcttttatatgaagatatttccttttacaccacagggtgcaaacagctccaaacttccacttgcagattctacaaaaagacgtattcaaaactgtacaatcaaaagatagtgtcaactctgcatgttcaatgcacacatcacaaaggactttctctga

SEQ ID NO: 300844 - DNA, 627 bp, Homo sapiens
gctccaaatatccatgtgcagattctaaaaaaagagagattctaagctactccatcaaaagataggttcagctctgtgagttgaattcacacatcacaaagaagtttctaggagtgcttctgtgtagttgttatgtgaagatatttgcttttccacagtaggcctcaaatcgctctacatatccacttgcagtttctacaaaaaagagtgtttccaaactgctccatcataagacacgttgaactctgagagttgaatgcacacatcacaaagaagcttctcagaatgcttctgtgtggttttaatttgaagatatttgcttttccaaaacaggcctcaaagctctccraatatccacctggttattctgcaaaaagagggtttcaatactactcaataaaaaggaagattcaactctgtgtgaggaacgcattcatcacaaagaagtctttctgaatgcttctgtgtagcttttatatgaagatatttccttttacaccacagggtgcaaacagctccaaacttccacttgcagattctacaaaaagacgtattcaaaactgtacaatcaaaagatagtgtcaactctgcatgttcaatgcacacatcacaaaggactttctctga

SEQ ID NO: 300845 - DNA, 546 bp, Homo sapiens
cttttccacagtaggcctcaaatcgctctacatatccacttgcagtttctacaaaaaagagtgtttccaaactgctccatcataagacacgttgaactctgagagttgaatgcacacatcacaaagaagcttctcagaatgcttctgtgtggttttaatttgaagatatttgcttttccaaaacaggcctcaaagctctccaaatatccmcctggttattctgcaaaaagagggtttcaatactactcaataaaaaggaagattcaactctgtgtgaggaacgcattcatcacaaagaagtctttctgaatgcttctgtgtagcttttatatgaagatatttccttttacaccacagggtgcaaacagctccaaacttccacttgcagattctacaaaaagacgtattcaaaactgtacaatcaaaagatagtgtcaactctgcatgttcaatgcacacatcacaaaggactttctctgaatgcttctctgtagggtttgtttatgtgaagacatttgcttttccactatagggtgaaacagggct

SEQ ID NO: 300846 - DNA, 514 bp, Homo sapiens
actctgtgtgaggaacgcattcatcacaaagaagtctttctgaatgcttctgtgtagcttttatatgaagatatttccttttacaccacagggtgcaaacagctccaaacttccacttgcagattctacaaaaagacgtattcaaaactgtacaatcaaaagatagtgtcaactstgcatgttcaatgcacacatcacaaaggactttctctgaatgcttctctgtagggtttgtttatgtgaagacatttgcttttccactatagggtgaaacagggctccaagtatcaacttgcagattctgcaaaaaggagattcaaaacagctaaatccaaagattacttcaactatgtgagttgaatgcacacacaaaaaagaagtttctcagaatgcctctgtgtagtttttatgtgaagatatttgattttccacattaggcctcaaagcgctccaaatatccacttgcagattctagaaaaagagtgtttcaaaactgccctatcaaaagaaacgt

SEQ ID NO: 300847 - DNA, 642 bp, Homo sapiens
atgcttctgtgtggttttaatttgaagatatttgcttttccaaaacaggcctcaaagctctccaaatatccacctggttattctgcaaaaagagggtttcaatactactcaataaaaaggaagattcaactctgtgtgaggaacgcattcatcacaaagaagtctttctgaatgcttctgtgtagcttttatatgaagatatttccttttacaccacagggtgcaaacagctccaaacttccacttgcagattctacaaaaagacgtattcaaaactgtacaatcaaaagatagtgtcaactctgcatgttcaatgcacacatcacaaaggactttctctgaatgcttctctgtagggtttgtttatgtgaagayatttgcttttccactatagggtgaaacagggctccaagtatcaacttgcagattctgcaaaaaggagattcaaaacagctaaatccaaagattacttcaactatgtgagttgaatgcacacacaaaaaagaagtttctcagaatgcctctgtgtagtttttatgtgaagatatttgattttccacattaggcctcaaagcgctccaaatatccacttgcagattctagaaaaagagtgtttcaaaactgccctatcaaaagaaacgt

SEQ ID NO: 300848 - DNA, 392 bp, Homo sapiens
ctttctgaatgcttctgtgtagcttttatatgaagatatttccttttacaccacagggtgcaaacagctccaaacttccacttgcagattctacaaaaagacgtattcaaawgtgtacaatcaaaagatagtgtcaactctgcatgttcaatgcacacatcacaaaggactttctctgaatgcttctctgtagggtttgtttatgtgaagatatttgcttttccactatagggtgaaacagggctccaagtatcaacttgcagattctgcaaaaaggagattcaaaacagctaaatccaaagattacttcaactatgtgagttgaatgcacacacaaaaaaagaagtttctcagaatgcctctgtgtagtttttatgtgaagatatttgatt

SEQ ID NO: 300849 - DNA, 392 bp, Homo sapiens
ctttctgaatgcttctgtgtagcttttatatgaagatatttccttttacaccacagggtgcaaacagctccaaacttccacttgcagattctacaaaaagacgtattcaaatstgtacaatcaaaagatagtgtcaactctgcatgttcaatgcacacatcacaaaggactttctctgaatgcttctctgtagggtttgtttatgtgaagatatttgcttttccactatagggtgaaacagggctccaagtatcaacttgcagattctgcaaaaaggagattcaaaacagctaaatccaaagattacttcaactatgtgagttgaatgcacacacaaaaaaagaagtttctcagaatgcctctgtgtagtttttatgtgaagatatttgatt

SEQ ID NO: 300850 - DNA, 392 bp, Homo sapiens
ctttctgaatgcttctgtgtagcttttatatgaagatatttccttttacaccacagggtgcaaacagctccaaacttccacttgcagattctacaaaaagacgtattcaaatgtgtacaatcaaaagatagtgtcaactctgcatgttcaatgcacacatcacaaaggactttctctgaatgcttctctgtagggtttgtttatgtgaagayatttgcttttccactatagggtgaaacagggctccaagtatcaacttgcagattctgcaaaaaggagattcaaaacagctaaatccaaagattacttcaactatgtgagttgaatgcacacacaaaaaaagaagtttctcagaatgcctctgtgtagtttttatgtgaagatatttgatt

SEQ ID NO: 300851 - DNA, 243 bp, Homo sapiens
gaggttcaattctgtgtgaccaatgcactcatcacaaaaagtttgtctgaatgcttctgtgtagaatggrtttgaagataattccttttccaccacagtctgcaaatggctaaaaatatccacttgcagattccacaaaaagagagattcaaaactgctcaatcacaaggtaggttcaacttggtaatttgaaagcacacatgacaaacaatttctgagaatgtttctgtgtagcttttaagg

SEQ ID NO: 300852 - DNA, 569 bp, Homo sapiens
taaaatatccacttgcagaccctctgaaagagtgtttcagaattgctcaatcaaaggagaggttcaattctgtgtgaccaatgcactcatcacaaaaagtttgtctgaatgcttctgtgtagaatggatttgaagataattccttttccaccacagtcygcaaatggctaaaaatatccacttgcagattccacaaaaagagagattcaaaactgctcaatcacaaggtaggttcaacttggtaatttgaaagcacacatgacaaacaatttctgagaatgtttctgtgtagcttttaagggaagatatttgattttcaaatgtaggcctcaaaacgctccaaatatccacttgcagattgtacaaaaagagagattcaaaactggtcactcaaaagatagttccagctctgtgagttgaatgcaaacctcacaaagatgtttctcagaaagcttctgtatagtttttatatgaagatacttgcttttccacaatatacctcaaatctccccaattatccacttgcagattctacaaaaagagtgtttcaaaactgctcaatcaaaata

SEQ ID NO: 300853 - DNA, 563 bp, Homo sapiens
cgttcaactctgagagttgaatgcacacatcacaaagaagcttctcagaatgcttctgtgtggttttaatttgaagatatttscttttccaaaacaggcctcaaagctctccaaatatccacctggttattctgcaaaaagagggtttcaatactactcaataaaaaggaagattcaactctgtgtgaggaacgcattcatcacaaagaagtctttctgaatgcttctgtgtagcttttatatgaagatatttccttttacaccacagggtgcaaacagctccaaacttccacttgcagattctacaaaaagacgtattcaaaactgtacaatcaaaagatagtgtcaactctgcatgttcaatgcacacatcacaaaggactttctctgaatgcttctctgtagggtttgtttatgtgaagacatttgcttttccactatagggtgaaacagggctccaagtatcaacttgcagattctgcaaaaaggagattcaaaacagctaaatccaaagattacttcaactatgtgagttgaatgcacacacaaaaaagaagtttctc

SEQ ID NO: 300854 - DNA, 380 bp, Homo sapiens
tttctatgtgaagatatttacttttccacaattgtcccaaagctctaaaatatccacttgcagaccctctgaaagagtgtttcagaattgctcaatcaaaggagaggttcaattctgtgtgaccaatgcactcatcacaaaaagtttgtctgaatgcttctgtgtagaatggatttgaagataattccttttccaccacagtccgcaaatggctaaaaatatccacttgcagattccacaaaaagagagattcaaaactgctcaatcacaaggtaggttcaacttggtaatttgaaagcacacatgrcaaacaatttctgagaatgtttctgtgtagcttttaagggaagatatttgattttcaaatgtaggcctcaaaa

SEQ ID NO: 300855 - DNA, 563 bp, Homo sapiens
tcaactctgtgagttgaatgcacacttcacaaagaagtttctcagagtgcttctgtgtgtttttatgtgaagatgattccttttccacaataggcctcaaagctctccaartatctgcaagcagagtctacaaaaagagagattcaaaactgctcaatgaaaagataggttcaactctgtgagttgaatgcacacctccaaagaagtttctcagaatgcttccgtgtagtttctatgtgaagatatttacttttccacaattgtcccaaagctctaaaatatccacttgcagaccctctgaaagagtgtttcagaattgctcaatcaaaggagaggttcaattctgtgtgaccaatgcattcatcacaaaaagtttgtctgaatgcttctgtgtagaatggatttgaagataattccttttccaccacagtccgcaaatggctaaaaatatccacttgcagattccacaaaaagagagattcaaaactgctcaatcacaaggtaggttcaacttggtaatttgaaagcacacatgacaaacaatttctgagaatgtttctgtg

SEQ ID NO: 300856 - DNA, 517 bp, Homo sapiens
tttccacaataggcctcaaagctctccaagtatctgcaagcagagtctacaaaaagagagattcaaaactgctcaatgaaaagataggttcaactctgtgagttgaatgcacacctccaaagaagtttctcagaatgcttccgtgtagtttctatgtgaagatatttacttttccacaattgtcccaaagctctaaaatatccacttgcagaccctctgaaagagtgtttcagaattgctcaatcaaaggagaggttcaattctgtgtgaccaatgcaytcatcacaaaaagtttgtctgaatgcttctgtgtagaatggatttgaagataattccttttccaccacagtccgcaaatggctaaaaatatccacttgcagattccacaaaaagagagattcaaaactgctcaatcacaaggtaggttcaacttggtaatttgaaagcacacatgacaaacaatttctgagaatgtttctgtgtagcttttaagggaagatatttgattttcaaatgt

SEQ ID NO: 300857 - DNA, 539 bp, Homo sapiens
cttgcaaactgtctgagaggcagatataggttgaagttccacataagaagaataagccttggctgggtagacagacatttaccctggcttttaaaggaatagggtacattgttttttctttattacttctatcgctctcttttttcctctctgactccctctttgtctcttcctctctttacttctctctttgamtttctgtctctctgtctcttcctcagtctctctctttgactcctttgtctgtctctttctctctgactttttgtctctttctctctttctgtctctctcttttactttgtctttttgtctctttctctctgactccctctttgtctctatctcttcctctctctctctctctctctgacttcctgtctctttctctctttcctttctgctggtctttccctgcttctgccagctgcttatgctgctgttctcccctctccttctccttttgatggctttggtagtgtaagactgtcacctctttgggtttttgcactgcatgcaataacttcatggtttccttg

SEQ ID NO: 300858 - DNA, 575 bp, Homo sapiens
agggtctcatgtgctgcaattaaggtgataagtagactgcatccttatctggaggactgactaggaagactctactttcaagttcattcaaattggaagaattcatttccttgcagttctatgagtgtagtcctgtctcataagcagttcactacatacttgtttgcttcttaaagagcagcagaagaatctcttgcttgccagtctgctaaaatgaaattttatataatataacrtaatcatgggagacacatcttaccatctttgccatataaagtgtccaatcaagtgagtgatatcctattacttttgccatattgtaacatttacaagcaaaacagaggctgctgccacacacaaaggatgggattacacttacataacaccaggggtgaaggtaaaggggactcagaattctcactgccacatttctctattgttccataaatttattctatataggtcagatccacctaccaatttttaggatgaatataaaaaatatattatcttatattgcactagtagaaaagctatgcttccagcttaaataacccatgaaatttctaaattca

SEQ ID NO: 300859 - DNA, 593 bp, Homo sapiens
aggtccgttggagcagaggaagtgaaactgacaagatgaacggggacctcgggaggagtctgccaacagcagatataaggacagtgccctaaagaagtactgttcagtgccctaaagaggtactgggaatgatataaggtcagtgctggaaagaagtactgggartgagaagttttctgaatcagggtaacatggggcataattagtctgttgaagaaaatcattatgtgcagttgcttcaagttctgttgagacagtctggaactcaggttaatttgcagacactaactaagcttctgcaggaggttattatgcataacccatggtttccacagacaggcagttttgatgtggaaaattaggacagagcaagagaaggattaaaatggcctcatcaaaaaggtcttaaagttgatccttctgtttcctccacttgcagtttagtttctactgtccttctgccattgtctccttcttattctgctggacagcaggagtcatgttctgagcctaaaaatctgaaagaatctgctgttaaacagcaccaattgaaaataaaaataaaaaaaaaaaacagaaaagggaggataaaa

SEQ ID NO: 300860 - DNA, 593 bp, Homo sapiens
aggtccgttggagcagaggaagtgaaactgacaagatgaacggggacctcgggaggagtctgccaacagcagatataaggacagtgccctaaagaagtactgttcagtgccctaaagaggtactgggaatgatataaggtcagtgctggaaagaagtactgggaatgagaagttttctgaatcagggtaacatggggcataattagtctgttgaagaaaatcattatgtgcagttgcttcaagttctgttgagacagtctggaactcaggttaatttgcagacactaactaagcttctgcaggaggttattatgcataacccatggtttccacagacaggcagttttgatgtggaaaattaggacagagcaagagaaggattaaaatggcctcatcaaaaaggtcttaaagttgatccttctgtttcctccacttgsagtttagtttctactgtccttctgccattgtctccttcttattctgctggacagcaggagtcatgttctgagcctaaaaatctgaaagaatctgctgttaaacagcaccaattgaaaataaaaataaaaaaaaaaaacagaaaagggaggataaaa

SEQ ID NO: 300861 - DNA, 455 bp, Homo sapiens
tattcactctcacacaacttcctggaccactatctctaggtaatgatagagcagataaattgattggatctgtgtttcagcaagctcaagcctctcatgcgctactgcaccaaaatacttctgctcttactcgcatgtttcacttgttttgcagcaaagctagggctataatacaagcctcttctacttgccagcaagtccctggagccacacctgtagaaggctgtaacccacaagatttggctccaaatgaaatctggaaaatggatattacacatatcgcasgctttggcaagcttagctatgttcatgtgactatggacagttattctcatatgctgcatgatacatgccaaacagctgagacagctggtcatgtacagcgacattgtctgtcatcatttgctcacatggggattcctaaacaattaaaaactgacaatggacttgcttat

SEQ ID NO: 300862 - DNA, 455 bp, Homo sapiens
tattcactctcacacaacttcctggaccactatctctaggtaatgatagagcagataaattgattggatctgtgtttcagcaagctcaagcctctcatgcgctactgcaccaaaatacttctgctcttactcgcatgtttcacttgttttgcagcaaagctagggctataatacaagcctcttctacttgccagcaagtccctggagccacacctgtagaaggctgtaacccacaagatttggctccaaatgaaatctggaaaatggatattacacatatcgcacsctttggcaagcttagctatgttcatgtgactatggacagttattctcatatgctgcatgatacatgccaaacagctgagacagctggtcatgtacagcgacattgtctgtcatcatttgctcacatggggattcctaaacaattaaaaactgacaatggacttgcttat

SEQ ID NO: 300863 - DNA, 591 bp, Homo sapiens
ttgggaaaatagtggaaaatatgcttggaatgataagcagtgttagataagattgggaagagctttgaatgcaaatctgaagaattttaacttcaacttatgcagaaagaaactattaatattyattgaagggaaaataatagctggaaaataatattataaaaatatctaatatggcaaaatatatgtagcatgatagtgggagtttaattgaatagtaaagaaaactgttagaagccattgtcatacccaggaataaagggaagatagaatagtgatatcatcaactctggtgttgtttattccatatgtacagttatatttagagataaagtatgtctgtaaactttacatgtacattttgaagaggtaaatcagttgcagaagcaatttaaaattatttttctagggtttttatggttgtaggtctaacgtttaagtctttaatccatcttgaattaatttttgtataaggtgtaaggaagggatccagtttcagctttctacatattgctagccagttttcgcagcaccatttattaaatagggaatcctttccccattgcttatttttactcaggtttgtcaaat

SEQ ID NO: 300864 - DNA, 591 bp, Homo sapiens
ttgggaaaatagtggaaaatatgcttggaatgataagcagtgttagataagattgggaagagctttgaatgcaaatctgaagaattttaacttcaacttatgcagaaagaaactattaatattcattgaagggaaaataatagctggaaaataatattataaaaatatctaatatggcaaaatatatgtagcatgatagtgggagtttaattgaatagtaaagaaaactgttagaagccattgtcatacccaggaataaagggaagatagaatagtgatatcatcaactctggtgttgtttattccatatrtacagttatatttagagataaagtatgtctgtaaactttacatgtacattttgaagaggtaaatcagttgcagaagcaatttaaaattatttttctagggtttttatggttgtaggtctaacgtttaagtctttaatccatcttgaattaatttttgtataaggtgtaaggaagggatccagtttcagctttctacatattgctagccagttttcgcagcaccatttattaaatagggaatcctttccccattgcttatttttactcaggtttgtcaaat

SEQ ID NO: 300865 - DNA, 594 bp, Homo sapiens
actaaatttattaaaaaattaaataattttgctgcatcttataatggctacaatgtcactaaacaatggaaagttttcagttccattataatataggaccactgtcaataatgtacggcgtctgactgtatatgacaacaaaatatgtgacagaccaagagaaaagataagagttacacagaagtacttgtttgaaaacatttcagacatggagaaagtatcctgatttgaaactttgggtgtggaacagattcrtatgtgttgtaatattaactgacttaattggaaggaatctggaattgaggtcaaagagttaagaggccaagaaattaatggtatggcatcatatatcaaattacggaaaattataattcctgtgagcaactattcttttacctttttaagctattttggtaaataagatattttatcagagctaaaaattactttaaatattacttggccatacatacaaatcagattggcctcttatagactttttcggaggtcaggggtacaaatttcctgccaagatgggcataactcatggatctaaggatatagaattccctgactgaagaaggacagagacaa

SEQ ID NO: 300866 - DNA, 577 bp, Homo sapiens
taaagaattacttcatcccaatgtgaccatctcacctcataatcaaatgaccctaaatccctcactaacctacccccaccctcactaaacttaataataaatgctggtatatctagtgcattggcggcaccacaggaccagaaggcagtgacctccctggacccagctttcactatcttgtgtgtgtctattatttctcgacctgctgatctgcctgggaacaaagagagagcccagttgcattgcaggctgctggccagatcccacgccagatctttcattagtccatattagaagacattgaataaaaatctaagcagtcatctttttcaagacaaaataaataaagaaataattatttaaaacrttttcccagaacaagcataaatcacaaattccaggggtaacgttccaatatcatatgttattttaaacttcattaaagtatcaattagtgtgtatacgtgtgtgtgtgtgtgtaatgataaccatattagtttaaaattctgaataaataaaaagtactacgtggcaacataaataactgttggtttctttaagtgaagagaaatcaaga

SEQ ID NO: 300867 - DNA, 470 bp, Homo sapiens
ttacaaaagtaatagggataagataagactatatgctaaggattgtggcctctagctgcatccatgttcctgcaatggacatgatttcagtttttatggctttgtggtattcaatggtgtatatggcacctaggtttattccatttccttgctattatatatagtgctgcaatgaacacacaagtgcatgtgtctttttagtagaacagtttattttcttttgggtatatatccagtaatgagactgatgagttacctaaggtattgattttgttatataacacaactaccagtttcctttctattcatacataaacacacatatttggaaacatggtccataggtggaattgtattgcaaacttgaatgagrtttaaaatgcaattgttgaaatggcaacaaaaaaataaataaaaagctaaggtgttttgatatataacttaagttgtactttgtacgtggcaaattt

SEQ ID NO: 300868 - DNA, 329 bp, Homo sapiens
ccattctgggttctggagtacagtggccttcttctcacagctccactaggtggtgccccagtagggactgygtgggggggctgtgaccccacatttccattctgcactgccctagcagaggttctccgtgagggccttgcccttgcagcaaatgcgtgggcatccaggcatttccatacatcttctgaaatctagggggaggctcccaaacctcagttattgacttctgtgtgcctgcaagctcaacaccatgtggaagctgccaagtcttggggcttctaccctctgaagcaacagctagggctgtaccttggccccttttggtcata

SEQ ID NO: 300869 - DNA, 329 bp, Homo sapiens
ccattctgggttctggagtacagtggccttcttctcacagctccactaggtggtgccccagtagggactgcgtgggggggctgtgaccccacatttccattctgcactgccctagcagaggttctccgtgagggccttgcccttgcagcaaatgcgtgggcatccaggcatttccatacatcttctgaaatctagggggaggctcccaaacctcagtyattgacttctgtgtgcctgcaagctcaacaccatgtggaagctgccaagtcttggggcttctaccctctgaagcaacagctagggctgtaccttggccccttttggtcata

SEQ ID NO: 300870 - DNA, 555 bp, Homo sapiens
tagggggaggctcccaaacctcagttattgacttctgtgtgcctgcaagctcaacaccatgtggaagctgccaagtcttggggcttctaccctctgaagcaacagctagggctgtaccttggccccttttggtcataggtggagcagttgrgatatagggcactaagtccctagactgcacacaagatgggaacacagggcctggcccacgaaaccgtttttcttcctcagcctctgggtctgtgatgggaggggtggctctgaagcctctgacatgtcctggatacatgttccccattggggaaaatggggcttacgaatggtaatccccaaaatggggatttaccatttgggtcctgattacctatgcaaatctctggaaattttctgaacgtttatgcactgcttcccttttaaaactgaatgtttgtaacagcactgaagtcacatcttgaatgctttgctggttagaaatttcttccaccagatacccttaatcatctctctcaagttcaaagttccataaatatctaggtcaagggcaaaatgttgcca

SEQ ID NO: 300871 - DNA, 640 bp, Homo sapiens
tgcaaatctctggaaattttctgaacgtttatgcactgcttcccttttaaaactgaatgtttgtaacagcactgaagtcacatcttgaatgctttgctggttagaaatttcttccaccagatacccttaatcatctctctcaagttcaaagttccataaatatctaggtcaagggcaaaatgttgccattcaacaagtctctagggagttccaaactttcccacattttcttgtcttcttctaagccctgtaaactgttccaacctctgcctgttatccagttccaaagtagcttccacaatttctggtatcttttcagcagcgccccactaccagtaccaatttactgtattagtccattttaatgatgctgacaaagacatacccaagactgggcaatttacaaaaaaaaataataataagtttaattggatttacagttctacgtggctggggaagcctcaggatcatggtggaatgcaaagaggagcaagtcacatcatacaaggatggcagcaggcaaaaagagagcttatgctgggcaacttctgtttttaaaatcatcagatccccgagatccattcactgtcatgagaaaaggatgggaaasacttgcccccataattcagtaatctctcac

SEQ ID NO: 300872 - DNA, 435 bp, Homo sapiens
ctagaccttctaaattttaaatttcagttgagcaagatcactaaatatttaaaattgagatgttttatttctttgtgaaattgattttacagaaccatttacaaatctttaggctacacagaaattatttaaaatatttttatatttattctaattaagtaaataacatgtaaataaatgtgtattcattgaataacttmttttggacagataataatgctactcaccaccttatataattccatattgtaagaagcttcagagacgtggatttttctgttttcaggacctgaaatatattcctacatagagtaaatggtaagtttaatcagaagattatgtgattaatatagctaattttgttttatcttttggatgatgtaacctatccctggcaagtgtgaaaaatgacagtatatattgtacagtggtatt

SEQ ID NO: 300873 - DNA, 543 bp, Homo sapiens
tggttttaccaatcctcttgtctgtgtcttattattgattgctccctctaagactacatttttgaataacaggacattttaatgactatayttacatgatgctaagtgtttgaatttgacgtttgtcaatagctgctgtaagcatcaagctctatgtaattgcaacaaatctttgtcaactcatttctacagagattttttaccttctatttattctataaaatgctttctgtcattttacttactaatcacgtctcgttcatctgagtgctatgttctgtgcatttcaagacactatggaaatacagaaggcaataaaattatttatgtttggtgtctaagctcaagatgactctccccaccatggagtaaaataggaatatgatacaacgtccttaatctgaaacagctgaggattataatagagctcaaggatgccttaaatattttgcacttattatcattatacaagtaaaagccatgaaaatgggattttaaaaaacggcttctcaattattatctttggttggttttctgttctat

SEQ ID NO: 300874 - DNA, 560 bp, Homo sapiens
gacttgttacaagctgaattgtgtgacatccctcttccagattcagattagtcaatgctagagcatcagattagttgatgctctaattcccaggacctcagaatgtagctgtatttgcaatagggtctttaaaaggtaattaaattaaaatgaggttatcagggtgggtcttattccaatatgactggaaaccatacaggaagaggaaatctgaacaccagtggttacagagggaagatcatgtaaagacaaagacatagggagaagacagccatctgcaagccaaggagaggcttcagaataaaycaaccaacactgctaccaccttaatctcagacttctagcctctcaaattgtgagaaaataaatttctcttctttgagccactcagtctgtggtgcagagagctatgatcaattctaggcctgaaggcagttgtaactataggaaaagtgtccctgtagaagctgtcatctgaaaaagttgtatgcagttaccaataaatagcaggctggcaggaagggagcatggagaataaatacctggaccacttactactt

SEQ ID NO: 300875 - DNA, 567 bp, Homo sapiens
ccactcagtctgtggtgcagagagctatgatcaattctaggcctgaaggcagttgtaactataggaaaagtgtccctgtagaagctgtcatctgaaaaagttgtatgcagttaccaataaatagcaggctggcaggaagggagcatggagaataaatacctggaccacttactactttctacttccgtctttcaattttctagtttctcctgctggctaaatctaattggcaaccagagggtaagtrtgtgctcatgattcagtttgtgtaagtcagtcttccagggggacacaaaaaatagaatgaacggtgatggggagtagattggaatgacaaatagaaattgttcagcagagttacttatctttctttccttcttttcccttttggtaactgttcctcatttttagagtatcaataccagcagctacaagactgttttcctaatgcctcttgcatctttatctatctgtaagtgacagcacgttaacttctttttttcaatatgaattgaaattgttgagtgagacttcaagacatgctccctaaaagaggtatagctagct

SEQ ID NO: 300876 - DNA, 547 bp, Homo sapiens
tggtttctactatatctgcatctggttctcaatgcctactaaaaacaagtttctttttatatattattgatatcccttataggccactaagttttcgggagttgtaacatgattctgaggaggtatagatggaagttagagaatactgaccatgtgagaatagaacaacaacctcctctttgaggataacttttttttttcacgagctgtcattcagaatattttttgtcatgataaaaaatcattattaaaatggcattttattctatgttatgcactgtgctagatayatgaaatatattttgattgactataaaaactcaagtgtgttatctccttaaaatgtgtgttgggagggttgtatagtattaaaaatagagaaggaagtactgagaacacagttcagtgaactataatgaaaggatggggcagcaaatcaacactgatttctagaagaaaaaattcccaattatgcctcagtggaagaaatagttgtcaggaataatatgatgcctctaattataaaaagtcattaagaagggagatt

SEQ ID NO: 300877 - DNA, 582 bp, Homo sapiens
tgagaatagaacaacaacctcctctttgaggataacttttttttttcacgagctgtcattcagaatattttttgtcatgataaaaaatcattattaaaatggcattttattctatgttatgcactgtgctagatatatgaaatatattttgattgactataaaaactcaagtgtgttatctccttaaaatgtgtgttgggagggttgtatagtattaaaaatagagaaggaagtactgagaacacagttcagtgaactataatgaaaggatggggcagcaaatcaacactgatttctagaagaaaaaattcccaattatgcctcagtggaagaaatagttgtcaggaataatatgatgcctctaattataaaaagtcattaagaagggagattacatcaatatctgtttacattaaaaagtgttggtatgatacaaaaacaatcacaagattagatgataagtgayaattcatcattgtgtttaggaatcataagagtgaagcttctgataatgctctactgaattatattttgttcacaattgagttaaatattttaaactcaatttataaatcaaattca

SEQ ID NO: 300878 - DNA, 469 bp, Homo sapiens
gtaactccagggtaaaagaaatgtgttattgttatactcttctcccagtaaaaaggtggtttttgcaaacttctcccaggaaatagggcactaaaatgcttaaattttgtttctcctttcttctttcctagttcacataatatttttgaaccaaaataaaaggaaggattctcaaaaaattaacaaattgaattaccatatgatctgacartcttacttctgggtatttaaaataattaaaatcagtatctcaaggagatagtagcactcccatgtacattgcaacactattaaccatagctaaaatgtggaaacaacctaaatgttcattgacaggtaaatgaataaagaaaatgtggtaccatgcagtggaatattatctgagcttatttttattctctgttttcttccgtgattttctatctgctgtgtttcctctccactggagaggatttgataaaccagcagc

SEQ ID NO: 300879 - DNA, 469 bp, Homo sapiens
gtaactccagggtaaaagaaatgtgttattgttatactcttctcccagtaaaaaggtggtttttgcaaacttctcccaggaaatagggcactaaaatgcttaaattttgtttctcctttcttctttcctagttcacataatatttttgaaccaaaataaaaggaaggattctcaaaaaattaacaaattgaattaccatatgatctgacaatcttacttctgggtatttaaaataattaaaatcagtatctcaaggagatagtagcactcccatgtacattgcaacactattaaccatagctaaaatgtggaaacaacctaaatgttcattgacaggtaaatgaataaagaaaatgtggtaccatgcagtggaatattatctgagcttatttttattctctgttytcttccgtgattttctatctgctgtgtttcctctccactggagaggatttgataaaccagcagc

SEQ ID NO: 300880 - DNA, 298 bp, Homo sapiens
tacaaatatttcccatttagtccctcttcctacacatgcatagcttcctgcaatctactgaatctttgtgtctaacccctgaactcatatgttaaaatggtaacccccmaggggatggtattaggaggttgggcctttgaaagatggttaggttgcgagagccaagctctcattaatgaaattagtgcccttataaaagaaaccacagagaggtcccctgcttcttccaccatgtgagcaaaatgatagtcatctatgaatcaagaagtgagaaatacatttctgtttataagtcacc

SEQ ID NO: 300881 - DNA, 298 bp, Homo sapiens
tacaaatatttcccatttagtccctcttcctacacatgcatagcttcctgcaatctactgaatctttgtgtctaacccctgaactcatatgttaaaatggtaacccccaaggggatggtattaggaggttgggcctttgraagatggttaggttgcgagagccaagctctcattaatgaaattagtgcccttataaaagaaaccacagagaggtcccctgcttcttccaccatgtgagcaaaatgatagtcatctatgaatcaagaagtgagaaatacatttctgtttataagtcacc

SEQ ID NO: 300882 - DNA, 489 bp, Homo sapiens
accaacttttttgatgacaggatttcttttaatattgggaaaatttgatttaacttttataatgaacaatgcttttgatgtaatatatgtaggaatcctttcctaacctaaggtcataaggattttcttctatgttttctgctagaaattttcaagttctctgttttacatggagatctatggcacatcttttttttttattttattttattttwtttttgagatggagtcttgctctgtcacccagcctggagtgcagtggcacgatcttggctcactgcaacctccacctcccaagtttaagcaattctcctgtctcagcctcccgagtagctgggacgacaggcacccaccaccatgctcggctaatttttgtatttttaccagagatggggtttcaccatattggtcaggctgctctctaactcctgacctcaggcccaccttggcctaccaaagtgctgggattataggcgtgagccactgtgc

SEQ ID NO: 300883 - DNA, 489 bp, Homo sapiens
accaacttttttgatgacaggatttcttttaatattgggaaaatttgatttaacttttataatgaacaatgcttttgatgtaatatatgtaggaatcctttcctaacctaaggtcataaggattttcttctatgttttctgctagaaattttcaagttctctgttttacatggagatctatggcacatcttttttttttattttattttattttatttttgagatggagtcttgctctgtcacccagcctggagtgcagtggcacgatcttggctcactgcaacctccacctcccaagtttaagcaattctcctgtctcagcctcccgagtagctgggacgacaggcacccaccaccatgctcggctaatttttgtatttttacyagagatggggtttcaccatattggtcaggctgctctctaactcctgacctcaggcccaccttggcctaccaaagtgctgggattataggcgtgagccactgtgc

SEQ ID NO: 300884 - DNA, 554 bp, Homo sapiens
tttttttagtttctccaaggttgtagtattagaagtaggaattatatttattggtttatttacttttaacatgtatggaggygggataattttttatagatttaattttcttgattaatttgtgaattcaaataccaaatggcaaattttattatattcttatggctaggactttaatattaaaatgctgaaatttatctgagcctgtgcccctggaaaacaactatggttgagaaaccttgtgacatggtttggctgtgtccccacccaaatctcatcttgaattgtagttcccataatccccgtgtgttatgggaggggcctggttgcagataattgaatcatggggcaggtttcccccatggtattctcctgatagtaagctctcctgaggtctgatggttttatcagtggcttccccttttgcttgactcacattcttctccttcctgttgccatgtgacaaaggacatgtttgcttccccttctgccataattgtaagtttcctgaggcctccccactcctgtgaaactgtgagtcaattaaacctttc

SEQ ID NO: 300885 - DNA, 567 bp, Homo sapiens
tagagacaaaatagaattttttaagaactcagctgaggagaaggcattaattctgtgttatatgcatttatttatttagctttctacatttatttcagcttataggaacacagttttgcaatgatttatttcttaatgtttttctaaatgcctttctccataaattataagttgtatgagagctggagccatatatgtttttgtgcctcattgtatcacaacaccctagactgtacaataggttaattaagtatttgttgaataagtgaataaaatctaactgcctttggaagcagttttctctctctccaatgccttcggtccatttcaccggctggaaaagggttcctaagctttcaagacactcttcactagctccttttgtgtctgcaactgcccatgcatacaacactcttacttagaactcactgtattagtttgctagggttgtcataataaastaccacagactaggtggcttaaacaacataaacttattttctcatagttctggaggcttaactcaaggtctcagtatctgaaatcagtgtccacaggtttggtttt

SEQ ID NO: 300886 - DNA, 575 bp, Homo sapiens
aaaataatattctaattctaattctaatattctaaaagagtgtaaagaagaatgcaaattgataattttctaggaataaacataacctattagtttaaaggaaatatgcaacctgagaggttgtatatttttatttctgtatgtactgtcatgttgtatgctacaattaataacataatttataaaatatttacctaaataaaagtaggtactcatatatttagagtaatattctttttttgtttgtttgttttcgagacagagtctcgctctgttgccaggctgaagtgcagtggtgctatctctctcactgcaacctccacctcctgggttcaagcgattctcttgcctcagcctcccaagtagctgggactacagttgcctgccaccacgcccatctaatttttgtatttgtagtagaggcggagtctcatcatgttggccaggatggtcttgatctcttgacctcatgatccagctgcctcrgcctcccaaagtgctgggattacaggcatgagccaccgcgaccggcctagagtagtattctttaaactttcattccccttgacataccc

SEQ ID NO: 300887 - DNA, 572 bp, Homo sapiens
gatgtggggcatggtgggagttgtttgaatcatgggggctaatccctcatggtttcatgctgtctttgagatagtgagttcttgcaatatctggtcctttaaaagtgtgtggtaactcctccccaactctcagccatgtgacgtgccggctcctctttcgccttctgccataattgcaagcttcctgagatctcgctagaagcccaataaatgcaagcaacatgcttcctataaagcctgcagaaccatgagccaattaaacttttctttataaattactcagtttcaggtatttctttagagcaatgcaagaatggcctgacatactttttctgtttttttctcatagtattcataaaaaatgttctcatgcttataattttacttattgtttattgactatttccccttgctagaatgtaagatcyatgggggtcgagaaatttatctgttttgtccatggttatattccaagcactaagaacaatgactgtcacttagcaaacactcagaaatatttataaaatgaatgaatgaatgaatgcacaaataatgatctaaacacttacatg

SEQ ID NO: 300888 - DNA, 572 bp, Homo sapiens
gatgtggggcatggtgggagttgtttgaatcatgggggctaatccctcatggtttcatgctgtctttgagatagtgagttcttgcaatatctggtcctttaaaagtgtgtggtaactcctccccaactctcagccatgtgacgtgccggctcctctttcgccttctgccataattgcaagcttcctgagatctcgctagaagcccaataaatgcaagcaacatgcttcctataaagcctgcagaaccatgagccaattaaacttttctttataaattactcagtttcaggtatttctttagagcaatgcaagaatggcctgacatactttttctgtttttttctcatagtattcataaaaaatgttctcatgcttataattttacttattgtttattgactatttccccttgctagaatgtaagatccatgggggtcgagaaatttatctgttttgtccatggttatattccaagcactaagracaatgactgtcacttagcaaacactcagaaatatttataaaatgaatgaatgaatgaatgcacaaataatgatctaaacacttacatg

SEQ ID NO: 300889 - DNA, 573 bp, Homo sapiens
tctggatattaacttagtttaatttatttcccatagcttgtggtcagtaaaggaaatatgtgtattgcaatttaggtttataagtactttgaatcaaattcaatctcataaaactattataagaacataccagtcagatggtgaatagttcacacaattattttcagtatcatctgatatttcagtatctgcatgaaatcaaatggaattttagtttatcgtatattcatcagttttactatttaaacaataaaaattcaaacctttaattaaagagcacagaaggaaaaacaacatgactttggcttaggttaggggttctgtttttgtgttcagaaattcattctggggctccactgtaaaatgcaagagctaggcagtggtcttttcaatctgtggggcaaaaaattaagagcatttagcaactgtttagctgatatctgggcagaggagtgggaagaacttgctatggagattatcacctttccaaatacttaatatatagcacaacamtacagaaaaaggaaaatcatgacactaaaaatactgatgttttgctttattttatagtga

SEQ ID NO: 300890 - DNA, 629 bp, Homo sapiens
aggatattatgaacaaatttgtgctacyaaatttgataattcaaaaaaactaaatttattgataaatgcattctacaaaaactggcataagaaaataatcaaaatctccgcaagcttaatcctattagaggaaataaatagaaaattacaatccttccaacaaatgagatatgtaagtaatgtattctaaacattaagaaaaaaatcataacaatgttatactttagttgctattcatggaacttcatgtgatcccttaagtttattgttgactagaaaaggttgttcgaaagtaaaaataacagttttttccatagcactaaatcaaaatttgttcatttctcccttttaaaaaaatatttccataggtttttaggtaacaggtggtattcagttacatgagttagattttggtgcacccaaagcccgagcagtatacactgaacccaatttgtagtcttttattcctcaccctcttcccacttttgcccctggatctccaaagtccattgtatcattcttatgcctttatatcctcatagcttagctcccacttatgactgagaacatataatgtttggttttccattcctgaatcacttcacttagaataatagactccaacccta

SEQ ID NO: 300891 - DNA, 629 bp, Homo sapiens
aggatattatgaacaaatttgtgctactaaatttgataattcaaaaaaactaaatttattgataaatgcattctacaaaaactggcataagaaaataatcaaaatctccgcaagcttaatcctattagaggaaataaatagaaaattacaatccttccaacaaatgagatatgtaagtaatgtattctaaacattaagaaaaaaatcataacaatgttwtactttagttgctattcatggaacttcatgtgatcccttaagtttattgttgactagaaaaggttgttcgaaagtaaaaataacagttttttccatagcactaaatcaaaatttgttcatttctcccttttaaaaaaatatttccataggtttttaggtaacaggtggtattcagttacatgagttagattttggtgcacccaaagcccgagcagtatacactgaacccaatttgtagtcttttattcctcaccctcttcccacttttgcccctggatctccaaagtccattgtatcattcttatgcctttatatcctcatagcttagctcccacttatgactgagaacatataatgtttggttttccattcctgaatcacttcacttagaataatagactccaacccta

SEQ ID NO: 300892 - DNA, 591 bp, Homo sapiens
acgctgttttggtgactatagccttatagtatagtttgaaatcagctaatgtgatgcctccaaactcgttctttttacttagmcttacactggccatcggattctttttttgttccatgtgaattttaggattgttttttctagttcagtgaagaataatggtgctgttttgatgggaattgcattgaaattgtagattgctcttggcactataatcatttttcacaatattgattctaccaatctgtgagcatgggatgtgtttctatttgtttgtgtcatctatgatgtctttcagaagtgttatgtagttttccttgtagaggtctttcacctccttggttaggtatattcctaagtgttttattttatttttttttttacagctattgtaaacggggttttgttcttgatttgattatcaggttggtcgctgttggtgtatagcagatctactgatctgtgtacattcattttctatctggaaactttgctgaatttgcttatcagtcctaggagctttttggaggagtctttaggattttctaggtgcaagatcatatcatcagcagacagtgacagtttgacttc

SEQ ID NO: 300893 - DNA, 572 bp, Homo sapiens
attatcccagcaccatttgttgaatatggtctcctttccccattttatgtttttgtttgctttgttgaaggtcagttggtggtaaatatttgggtttatttctgggttctctactgtgttccattggtctatgtgcctatttttattccagtaccacgctgttttggtgactatagccttatagtatagtttgaaatcagctaatgtgatgcctccaaactcgttctttttacttagccttacactggccatcggattctttttttgttccatgtgaattttaggattgttttttctagttcagtgaagaataatggtgctgttttgatgggaattgcattgaaattgtagattgctcttggcactataatcatttttcacaatattgattctaccaatctgtgagcatgggatgtgtttctatttgtttgtgtcatctatgatgtctttcagaagtgttatgtagttttccttgtagaggtctttcacctccttggttaggtatattcctaagtgttttattttattttwttttttacagctattgtaaacggggttttgttcttgatttg

SEQ ID NO: 300894 - DNA, 591 bp, Homo sapiens
acgctgttttggtgactatagccttatagtatagtttgaaatcagctaatgtgatgcctccaaactcgttctttttacttagccttacactggccatcggattctttttttgttccatgtgaattttaggattgttttttctagttcagtgaagaataatggtgctgttttgatgggaattgcattgaaattgtagattgctcttggcactataatcatttttcacaatattgattctaccaatctgtgagcatgggatgtgtttctatttgtttgtgtcatctatgatgtctttcagaagtgttatgtagttttccttgtagaggtctttcacctccttggttaggtatattcctaagtgttttattttatttttttttttacagctattgtaaacggggttttgttcttgatttgattatcaggttggtcgctgttggtgtatagcagatctactgatctgtgtacattcattttctatctggaaactttgctgaatttgcttatcagtcctaggagctttttggaggagtctttaggattttctaggtgcamgatcatatcatcagcagacagtgacagtttgacttc

SEQ ID NO: 300895 - DNA, 567 bp, Homo sapiens
atttctttgcctctgctaccaagaacactatgaaagtgtatctaatgtctgtgtaaactagtgatggttttctgctattctgttgatgcaaaagtaattgtgttttgccattgaaagtagtgacaaaaaccgcatttacttttgcaccaacctattactttagrcaataacgtgggtgtaagaaattttacatcacttatagggagggaaaaatgctaacttttttctttgacatctagctacagtgttacaacatataatcatcttatttaaatattctagttgccttttgattaccacttttatttgttcatgagcattgtcaaaagtgtattttatgtcacagaatacatccttcgaagaataggatgtgccaggatcaattgctaagctgaaaagctagcagtgaccaaagaacaccaacaaagaaacccagcctccaaaagagaaaagtcattctgacataacagctacagaactgacaagtgttaaggacaaacatattaaaatttttatgctttcagagtctatgatacttcttattaattgaataattgttttgtttag

SEQ ID NO: 300896 - DNA, 598 bp, Homo sapiens
ttgtagttctcattcttaaagttacactttctcccacatagtttgtagttaccattttatgctacttactattttctaagcacttgtcttgccacccctcctcactcattcatttccaactctgacttaggaaacatcacatcctgttcaaattggctatgagactcttaaaccttgtaccaccattgaagctggtcatcctataytgaatgaaaactgagccatttcaaactctggatccatttgtctgcctctatgtcagttcctgctatcacaaatatcaatattctgtccacaccttgttacttggtcctgttctgccttcccaaccaccttcaccctaatatctctcagatctgcttgacaactctatgactggtttcacttggctctcatcttccttaccacatttttttttagcgtaccttaaatgtaataaaacaatgttacccttgttctttccactccagtacacatccttcaagagcatatgtttctggactgtactgcccagtgtatctggactcttttgggggtgagatgctgctttttttttcttcaaatatctctgttgttcctgatgctactgacacacaga

SEQ ID NO: 300897 - DNA, 501 bp, Homo sapiens
tttgtcattttgccgaggctgatctttaactgctgagctcaaataattggcccacctyggcctcccaaattgctgggattacaggcgtgagccaccacacttgctcccacatgccaatcttaagtcacacgatcactgttttatccagctaagtaggtgaaaaaaagaaacattgtaaggcattttaagggaaacaaattgcagtgaactttctcatctaaggcatatcctagataaaaattgtaaaataaacaaacgtgttttctttaaacctcttttgatctcttgtagaaaatcttcatctaaaaggattctcagctttggttgcacattgcaacctactgggaaggactaacacagaaagcccccttgagatgaggctttacctgagatgaattcagttaacatctgataaggaaggggagcaaacatctgtattgttcaaaagtcccctaggtggttttaatgcggaaccagctagagaatccctaataaagtcaa

SEQ ID NO: 300898 - DNA, 501 bp, Homo sapiens
tttgtcattttgccgaggctgatctttaactgctgagctcaaataattggcccaccttggcctcccaaattgctgggattacaggcgtgagccaccacacttgstcccacatgccaatcttaagtcacacgatcactgttttatccagctaagtaggtgaaaaaaagaaacattgtaaggcattttaagggaaacaaattgcagtgaactttctcatctaaggcatatcctagataaaaattgtaaaataaacaaacgtgttttctttaaacctcttttgatctcttgtagaaaatcttcatctaaaaggattctcagctttggttgcacattgcaacctactgggaaggactaacacagaaagcccccttgagatgaggctttacctgagatgaattcagttaacatctgataaggaaggggagcaaacatctgtattgttcaaaagtcccctaggtggttttaatgcggaaccagctagagaatccctaataaagtcaa

SEQ ID NO: 300899 - DNA, 283 bp, Homo sapiens
aattgtatcaacatctaaggaaatataaaacaatatggcctatgatttagcagagaaaaagtttgaaataacaactaatgatcatttaccaggatgcttgcaggtttggagatcagcgaatgtttgccagaatgcttggggtctaacagatctccacttccacaaaatagaaatacatactstggttcatatgggctagggcgttagagagacttctccccttcttttcttctaatttgaatatcaaataaacactaggttggaaaaaggcactgcctggcag

SEQ ID NO: 300900 - DNA, 603 bp, Homo sapiens
gctctcctttacatttatggcttcagagaagccaacaataaactcctccccagacctatatagaatactggttcaaccaaacaaagcattcacactaattatgtttatgcacaagcaggatgaatttgaagtgcaggccagaggagccagcctagggagtgggggcaggaagaggcagggattgcttaatctgaggggcgacttcaggtacagagaggaacatgaaccatcaggcatcatagcatgtcccaaggacactcacttcctgtttcccattcaagctccatgatctaagaatttcatgtcaacctggaactgcggctgccctcacccaggtggtgcacaacacagatttgggacagatcctctcaggaccctccctctaagaaagcccagcattagggaaggggcctgtgttagttcaggtgctctaaagtggccaagatgggattatttgtgccagagacttgttaaagkaaacacctgtgaatgaggaaggaaaggggcaggagagccttcagattgtaataccatttggacacctatgaaaggagacagggaaggaaggggcgatggaaggaagggcctcagactcagttctaa

SEQ ID NO: 300901 - DNA, 610 bp, Homo sapiens
tcataaaaataaaaatcatgaaatataattgcctataaaaataatgagactagggccgggtgcgttggctcatgcctgtaatcccagcactttgggaggccgaggcaggtggatcacctgaggtcaggagttccagaccagcctgtactaaaaatacaaaaaattagctgggcatggtggcgggtgcctctaatcccggccacttgggaggctgaggcaagaraattgcttgaacctgggaggcagaggttgcagtgagccgagatcgcgccattgcactccagcctgggcaacagagtgagactccgtctaaaaaaaaccaaaaatcacaagactagaattgccttaaattttgaagtgtttttccagtgaaacgccgagtgcctctcaggtccttctgtgcattttcctagggcccgcaacacgaggtagaggacagagagaggagggctgccagcccttggctctgcctctgagtcgagttttctgggggcccagcctcttccccaggctttcctctccacagatgtgtggggagcctgtggctatgagaccaccttctctataggaaagcacttgaagaaactctagtgggtataaaaccccaaca

SEQ ID NO: 300902 - DNA, 525 bp, Homo sapiens
aaagtaatttcaaaattgctttatttggtgcttatggacaagacaaaaatagaattaaatatgtcaccgtcacccagacactcaaaatgaccaatagctgtattacagtaactggcaccttgaaagatgacaaatgtcacatttaaggtctcagtaatactgtctagtttttaggtactagggataataaagtrttatggccaagtggtacaagagtgggaagcggtactgttgaaacatacaaagaagaaaggcatatatttttgtaatttagtggtggcatgtccccacaccctaggcatttcctcctgtttgtctttgctgtgaggtccttgttgtgcccaggtgtcatcagggagcccctgctagatgctgtgccaacctggagataatgcagccctctctctgctcccatagactggatagctagccagcctgattatcaactcccaggaagatgaatacaactcacaggaacatgaatttatcttttgtatttttccagatttctctctcattatattc

SEQ ID NO: 300903 - DNA, 506 bp, Homo sapiens
  misc_feature (1)...(506): n = A,T,C or G
nnnnnnnnnnnnnnnnaggtcactctagaggatccccaaatgacatagttttcagtaaccacataggaacccataatttgcttaactaatcctccatgatgatagacagctccatgctgacaaccatcgtcttagataaaaatttacattaatcatttcctcagtataaataccctcaggataaatttcctcaagataaaaattcctgagtcaaaaagtatgaccatatttaacaactaatcaaggtgtaataaacatatgatcaactgtgcatatttaaagtacatttatccgtgagtccaggacccctgggaataccaaaaccatggatgctcaactcccttatataaaatggtattgtaaaaaaaaaaaaaaaaggtattgtatttgcrtatagcctaagcacatcctccacatactttcttttaaacttaaaacgccatgcatcaggaacccatatactttaaatcctacctagattacttattattaatgtagatgatatg

SEQ ID NO: 300904 - DNA, 533 bp, Homo sapiens
gcagatgaaattaaataaaaagtgtgatcaactaggaaaggaaaaatttgtttgaagatccctttaggatcatttgcagaatagctatggaaagtgaagctccagaacaggagaaaagttcatgaaaccctacaggatagacatagccaaattgttggttgcctgatcaaagggcagtatgaaatgatgcattttattatgcttaaaaggcatatgtgagttgttcagatattgaagctaatctttgcccttacagttagtctgttatatgccttggtcattttgttggccttcattcagagtatttawaatgatgatttctgtaaaagttatcacctggttaaaagattgatggtataataatataagcagaacttttacaagatgtgaatttttagtgagcattaacatttggagtcatctatgacaaaactccacagtagcccatggtgtcctctgtgtcatttaccaagaacatgtcaactcaaattgtttttcagggttcactgaggtagtaaaaaaacaagggggta

SEQ ID NO: 300905 - DNA, 586 bp, Homo sapiens
tgatttgacttttattgcattttagtttggtgcaaaaataactgcggtttttgccgcaaaatacatttaatggcaaaaaccacaattacttttgyaccaatctaatagatttttgccaatatatatggcaaaaaatgatacctttgtcttatgagtgaagctgaatcttcttttcgtgtttaagaggcatttaattccttctctgtgatatctttttgcatgtcttttgccatttggctactggattgatctcctttttttccctcatttcataagcactctttcaatactagggagattagccctttgtggtacaaatagcaaatattcccagtttctcatttctgttatgagcctttgctttcatgtcttctgaattttgagtctttcttagaaaggtctcatggtttcttcttttacatttaactgttttattctttgggagtacatcctgacaaatggttataaggcttggatgaacgtttttaatttttgtaaataataactaatttaataccttggtaatatttttctgtgcatttatttgattgttggcagtgtcaaatattattctgtgtgttttctg

SEQ ID NO: 300906 - DNA, 486 bp, Homo sapiens
acattatatttctattgggtaatgctgatttagaccatttatacactaattatcagttgacttttttttttttttttttttttttttgagatggagttttactcttgttgcccaggctagggtgcaatggtgcgatcttggcacactgcaacctccgcctcccastttcaaaggattctcctgtctcagcctcccaagtagctgggattaaggcgcatgccaccacgcctggctaatttttatatttttagtagagacagggtttcatcatattggtcaggctggtctcgaacacctgacctcaagtgatcctcccacctcagcctcccaaagtcctggtattacaggcatgagccactgcccccggccgactcttttttttttaaatgaattgtagtatttgtaaatatatctctgaatttttatattcattttttcaatctgtattgtgatgcttcttaagccaatgtctgtaattctataccg

SEQ ID NO: 300907 - DNA, 486 bp, Homo sapiens
acattatatttctattgggtaatgctgatttagaccatttatacactaattatcagttgacttttttttttttttttttttttttttgagatggagttttactcttgttgcccaggctagggtgcaatggtgcgatcttggcacactgcaacctccgcctcccagtttcaaaggattctcctgtctcagcctcccaagtagctgggattaaggcgcatgccaccacgcctggctaatttttatatttttagtagagacagggtttcatcatattggtcaggctggtctcgaacacctgacctcaagtgatcctcccacctcagcctcccaaagtcctggtattacaggcatgagccactgcmcccggccgactcttttttttttaaatgaattgtagtatttgtaaatatatctctgaatttttatattcattttttcaatctgtattgtgatgcttcttaagccaatgtctgtaattctataccg

SEQ ID NO: 300908 - DNA, 576 bp, Homo sapiens
actagggtgatagttgttttactttttcttttatttttataaaataactcgaactttaytatgtttcttattaggatgtatttcttttaggcatttaaaaaataaactttattgaggtataatttatatgcaataaagtgtacctattttagtacatttcagtgagtcttgactacatgtatgtgtataatcaacaccatatcaagatatagaacattttcatctcagaaagttcctttatgcttctcattcttccctgggcgaccatggatctgctttctgttgctatagatttcttgagccattattttaggctctaaaaacatcttgatgttttatttggcctttaatgaaccatattagtaaagatttttaaagagagattaatttatcccttcacccactcccaaagagtaaatcttattatagcacattacatagtatactttcaaccaaaatgttttgtaagaagtctgattagtgcatttgggtatgttttataagaagtctgattagtgcattcgggtgttatatgggttttatatgattaaaagtagtaactattacttgtaaggt

SEQ ID NO: 300909 - DNA, 576 bp, Homo sapiens
actagggtgatagttgttttactttttcttttatttttataaaataactcgaactttattatgtttcttattaggatgtatttcttttaggcatttaaaaaataaactttattgaggtataatttatatgcaataaagtgtacctattttagtacatttcagtgagtcttgactacatgtatgtgtataatcaacaccatatcaagatatagaacattttcatctcagaaagttcctttatgcttctcattcttccctgggcraccatggatctgctttctgttgctatagatttcttgagccattattttaggctctaaaaacatcttgatgttttatttggcctttaatgaaccatattagtaaagatttttaaagagagattaatttatcccttcacccactcccaaagagtaaatcttattatagcacattacatagtatactttcaaccaaaatgttttgtaagaagtctgattagtgcatttgggtatgttttataagaagtctgattagtgcattcgggtgttatatgggttttatatgattaaaagtagtaactattacttgtaaggt

SEQ ID NO: 300910 - DNA, 635 bp, Homo sapiens
taagacaaggtgtaaattaattgtaatatatatttatattattgtaccatctattctggttatttgctgtaattatgttcttcaaagttgccacaaacactgaattagcaaatactgaaacaatgatcctaggggaaatgyagggttacattcctgagagcctctgctcacaacagtttcctcaagtgatcaataaaagaccttgttttatgtttgtttttgtttaaaacatgttatttaatatatattgttgatttatttaacattaaacttagggccaacagcactgtaactcatgcctgagtgacacttacctaagcatatgtgttttccccataaggcacatcatgggattcttgctcttaggaacactaaccaacacttactacactaattgggagccatttgaaacggcaaaattgccaacaaaaagtacaaaaatgcaaaaatcatggcactaaatagactgtgaaaaggatacttgcagtatgagagctgaaagaaggaggcatagcataccttgcttaatttcagctgggaatatgcatgtcaagtgactcaagtttttcaccactctgcacatgtcaccaatgaccaagaaagcattgctagtattgatttgggggttacaaata

SEQ ID NO: 300911 - DNA, 576 bp, Homo sapiens
aagcaggaccgtatagaaatagtacgtattaaaatagtcagtgtattaactattctgtgcctggtctctacaatccctttattatgcatctagcatttggaaacacttctatcaggactccagatactcctcggccttaattagctcaggtagacagaatgtgggcaagtagttagggcgaggagaatgacaatgmaaataagtaaaactgttccttgagtttgctttgagagatacccagaactgacatttcagacactcgcatttttaaaaattaatgttttctcacctttgtgttctaaaagtctcttctatttattgtatctcagaatttaattcttcacttttttacatgtgtttttgtttatagcttctgctggcactataggaagggtaaacaactatttactgatggtgcttccaattttgctgttacatgactcaaacaaactgggttttatgagatctttttagaaaaatactaataaattattcattttcaaatattatctctaatagtgtgcataggatcttaatatggccacactttggttacataagtcatgattaagcaga

SEQ ID NO: 300912 - DNA, 596 bp, Homo sapiens
ctgtccactgtgaaaaggccattgtaagaagcaatgacactatagtaattatgagcacacttagtgcccacatttttggtttctaagtatcatgctccaccagtgcagaacagtcagtgctcaaagactggtgcaaacaaaggaaccattctgaggggtcatccaatggccaaatgtgggacaatataagcctaaaaataataacagtaattgataatacattaaatttgagacaacataagcctaaaaatagtaacagtaattgataacacattaaattaaaaatgaaatttttaaaaagatgcatgtrttgggaatagggaaagttcttcatcaaaacatgacagctaataaatgtagaaggaatggtaaaattaccaccagtgtaataattgactcagacaagggccactgatgcatgctaaaatatactgggtgaaacattgttggtcaaaaagatatttgaaaagtatcaaagtagataattttttttttttttttttacaaagggaacaaggtatctttccaatgggaagatctggtaaatactaacttaacacaatgaccaaatttagcagcatactgatatcatgtgg

SEQ ID NO: 300913 - DNA, 605 bp, Homo sapiens
aatttgaaatacagtagcttggaaccagttaaaccaaacccgggaactctgtataaatttattatatttgctgacttttctagtaaagactttatatggaaaagaataaaagatactacacataaacagaggtggtagtacattaatggtgtgcatcaggtataaaattgattatattttaattatttttataatttcaagaaaatactttagtcacctatatttagttaaaatgttaaagtttaaaaacatttagactgaggctgtataatttattttttaaaagatacagctactaaacaaaaragctatgagataaaatccaagttctatgaataaatattttaaaattaagtactctaagatcataacactgacaacactaattatcttttctagtcttggcagttacgttgcatactgtttgggtgactgatgggataatttcacttcattttctctcagtttatattggatcgtgttagaaaaaaatattaaaataattaacacctccagccaaagtacttgataaagtttttagttgaaataaaagctaacaaaatcaattaactaactcactgatttttaagcacacaactaaacct

SEQ ID NO: 300914 - DNA, 562 bp, Homo sapiens
tgagctttgagtcctacttttaagatcttaatggaagcacctgtggcctactgtgtcacagggtactcctgtaggtcatagatgaagtcacaatgaagtttagacaaagtaaatactgtgagagttggacctgattcatgattcagataaatagtttggaatttatacaatatcagtttgctctgcaagtttttcaggcagcatattactgaatttagctgttctagaaggacagcttttcatgacactttagtacctcagatttaagtactaagtatttaccagaggctccaaatactgacactactttgtttcrattttaaatggagattgacatactgtttaggtaagaagagtatccaaatataacttgctatttttaagcctttcataccagagctatttttcaaaactcttacaataaacctactttcatattgttatttcttttgaataccgttattaattttttcttcttgactcagcttcagtaaaatggctcctcaaaaaaaggaaatgaacttgaacatctctaaaagtgaggatttaggtttgctagaag

SEQ ID NO: 300915 - DNA, 586 bp, Homo sapiens
cccttttgagaataaattatgtaagactgtaacttcttgctagccaattctgttgatgctcttccttgctggttgccaaaatgtaagctgccacatacagagacccttgtttcagtaaggtgaaggacgcttctttccaccccagtggacatcagtttaacagggacagattcctgccaacatcttcatgagcttagaagcagatcatctcctgcatgagtctcagatgacacacccctttttgacaccttgatttgtacccttgtgagaaacctaaagtagtcacatttctgatccagaaaattgtgagttactaaatgtgtgctgtttttagttactacttytgcgttaatattggtacacagcaataactacctaggtgtgtgagactagtcaaactttcacttcttattgccaatttattttacagttagattattgataaagatccaaatttaatgagggaagaattaatttacttagttaaaatatatgccacagatatgttttcatactctttaaagtttcagattacaagtctctcaattgtgtttaaattaaaaaaaaaatgtttaaacaataccag

SEQ ID NO: 300916 - DNA, 586 bp, Homo sapiens
cccttttgagaataaattatgtaagactgtaacttcttgctagccaattctgttgatgctcttccttgctggttgccaaaatgtaagctgccacatacagagacccttgtttcagtaaggtgaaggacgcttctttccaccccagtggacatcagtttaacagggacagattcctgccaacatcttcatgagcttagaagcagatcatctcctgcatgagtctcagatgacacacccctttttgacaccttgatttgtacccttgtgagaaacctaaagtagtcacatttctgatccagaaaattgtgagttactaaatgtgtgctgtttttagttactacttttgygttaatattggtacacagcaataactacctaggtgtgtgagactagtcaaactttcacttcttattgccaatttattttacagttagattattgataaagatccaaatttaatgagggaagaattaatttacttagttaaaatatatgccacagatatgttttcatactctttaaagtttcagattacaagtctctcaattgtgtttaaattaaaaaaaaaatgtttaaacaataccag

SEQ ID NO: 300917 - DNA, 586 bp, Homo sapiens
cccttttgagaataaattatgtaagactgtaacttcttgctagccaattctgttgatgctcttccttgctggttgccaaaatgtaagctgccacatacagagacccttgtttcagtaaggtgaaggacgcttctttccaccccagtggacatcagtttaacagggacagattcctgccaacatcttcatgagcttagaagcagatcatctcctgcatgagtctcagatgacacacccctttttgacaccttgatttgtacccttgtgagaaacctaaagtagtcacatttctgatccagaaaattgtgagttactaaatgtgtgctgtttttagttactacttttgcgttaatattggtacacagcaataactacctaggtgtgtgagactagtcaaactttcayttcttattgccaatttattttacagttagattattgataaagatccaaatttaatgagggaagaattaatttacttagttaaaatatatgccacagatatgttttcatactctttaaagtttcagattacaagtctctcaattgtgtttaaattaaaaaaaaaatgtttaaacaataccag

SEQ ID NO: 300918 - DNA, 586 bp, Homo sapiens
cccttttgagaataaattatgtaagactgtaacttcttgctagccaattctgttgatgctcttccttgctggttgccaaaatgtaagctgccacatacagagacccttgtttcagtaaggtgaaggacgcttctttccaccccagtggacatcagtttaacagggacagattcctgccaacatcttcatgagcttagaagcagatcatctcctgcatgagtctcagatgacacacccctttttgacaccttgatttgtacccttgtgagaaacctaaagtagtcacatttctgatccagaaaattgtgagttactaaatgtgtgctgtttttagttactacttttgcgttaatattggtacacagcaataactacctaggtgtgtgagactagtcaaactttcacttcttattgccaatttattttacagttagattattgataaagatccaaatttaatgaggraagaattaatttacttagttaaaatatatgccacagatatgttttcatactctttaaagtttcagattacaagtctctcaattgtgtttaaattaaaaaaaaaatgtttaaacaataccag

SEQ ID NO: 300919 - DNA, 590 bp, Homo sapiens
tgtgagaaaaacacactcacccttccaaacccaaagaatggactcagagacacaaagaacagcggaagcgagacttttaatggtggtctttcaagatcgagtgtctgataggcaaacacacccagggcagttacaacaggtaatttatctcctaccacgcaagtccctacccccacttcctcattggttgagtactatggggttacaatcatcccagacgttacctaagtttcattatcccccgataatgttatagcccagtccccttccccactaaagtttctatttcccaataacaaaactttcttcccttttacgggctgacccctcctctacattctgttcacttatcgtgaccttctaggtgcgtgagccrtgcagtttgtaacatccgcagcctagctgccagtacttagatttatcatgccttgaaaatggacaatttaaaatgtttcctcacaataatgaccaagatcttcccaaattaatgattgacaccaaactacagattcagaaaattcagtgagcaccacaaccacttaatgcacaacaaaagaaagcaaacaaataagcacacaacactaacatat

SEQ ID NO: 300920 - DNA, 597 bp, Homo sapiens
gtttctattgacttgagtgtcaagaaactgactggctaatacttttataaaaagttattggtattgtaaaatgcaggctgtatctcaatatatgatcacatgcaaagctgttgtcacgagagtgaacaataagtatattaaataaacactttttaactatataaacaaatcaagtaactctaggtctagcagggaaatgtcataaattaacattactmtgtatagtttcaagattatctggtaactatctttgaagtaaattgaggacaagtgaatgattatgtgataatttcctcggcacatttgtttaaattcttgacatacatatcaaccctccctcccaaccttctgtgaaattttcataataatatatacacaggaaatactataaaggtaatttatatcacaagtgtttaaatattaataaatgaaatttaaagcaaaatcagtttgtgagaatagtctttttttaaaaccaatgtcagtttgtaaaatgctaactcttctaataataactttaacaaaagaagctaaactaaatttctactggattttaaaataggtaaaaaatgtaatagaaaataccattataaatat

SEQ ID NO: 300921 - DNA, 597 bp, Homo sapiens
gtttctattgacttgagtgtcaagaaactgactggctaatacttttataaaaagttattggtattgtaaaatgcaggctgtatctcaatatatgatcacatgcaaagctgttgtcacgagagtgaacaataagtatattaaataaacactttttaactatataaacaaatcaagtaactctaggtctagcagggaaatgtcataaattaacattactatgtatagtttcaagattatctggtaactatctttgaagtaaattgaggacaagtgaatgattatgtgataatttcctcggcacatttgtttaaattcttgacatacatatcaaccctccctcccaaccttctgtgaaattttcatartaatatatacacaggaaatactataaaggtaatttatatcacaagtgtttaaatattaataaatgaaatttaaagcaaaatcagtttgtgagaatagtctttttttaaaaccaatgtcagtttgtaaaatgctaactcttctaataataactttaacaaaagaagctaaactaaatttctactggattttaaaataggtaaaaaatgtaatagaaaataccattataaatat

SEQ ID NO: 300922 - DNA, 496 bp, Homo sapiens
cacaggctctgtcacctgggaagctttcttaaaatgattgttgcctaatagtcgtcacggtgaagttgtttactgccaatgrttgaaattaactgtagtgcctgtttgcccaagagaaacaaaaatttgaaatgagagcctcagcacttctgatttctcatggagtccttacatcaaacatattcacaaacagctagtagaaagcaataaacaattcaaatgacagtcaagttttaatatgatatattgctgtatcctttctgtaagtctaacttaaataataacagcaagaacatcaaaacccaaccctccttgtgttaatattcaatctggttggtaatcttgagcctcacaaggcagaacagctgttttaatttattttttaaataagaaaacaatgctgacattttttcgcatacagtgagaaaattattatagaaaccttgtgcccatttacagtcactctgtattctcaaccctcttccgaggtgaccac

SEQ ID NO: 300923 - DNA, 606 bp, Homo sapiens
catccgaaggtcaccaacatcaaagaccaaaggtagataaatccacaaagatgagaaaaaaacakcacaaaaggctgaaaattacaaaaaccagaacacctcttctccaaagtatcacaattccttgccagcaagggaacaaaactggacggagaatgaatttgacgaactgacagaagtaggcttcagaggtgggtaataacaaactcctcagagctaaaggcgcatattctaacccagtgcaaagaagctaagaaccttgaaaaaaggttagaggaattgttaactagaatatccagtttagagaagaacataaatgacctgatggagctgaaaacaaacaaacaaacaaaaaaacaaactgcacgagaacttcatggagcatacacaagtatcaatagccgaattgatcaagtggaagaaagaatgccaatgcacctttacataacagtaacacatagaagaaaattttcagcaattattgtacactttggaaagtattacaaaccgtaatactgcaggccaaattattttgaatgcctcaggtttttattttcaagaaatacgttttcatatacataaaaatatttaggttgatgcagacgt

SEQ ID NO: 300924 - DNA, 606 bp, Homo sapiens
catccgaaggtcaccaacatcaaagaccaaaggtagataaatccacaaagatgagaaaaaaacatcacaaaaggctgaaaattacaaaaaccagaacacctcttctccaaagtatcacaattccttgccagcaagggaacaaaactggacggagaatgaatttgacgaactgacagaagtaggcttcagaggtgggtaataacaaactcctcagagctaaaggcgcatattctaacccagtgcaaagaagctaagaaccttgaaaaaaggttagaggaattgttaactagaatatccagtttagagaagaacataaatgacctgatggagctgaaaacaaacaaacaaacaaaaaaacaaactgcacgagaacttcatgragcatacacaagtatcaatagccgaattgatcaagtggaagaaagaatgccaatgcacctttacataacagtaacacatagaagaaaattttcagcaattattgtacactttggaaagtattacaaaccgtaatactgcaggccaaattattttgaatgcctcaggtttttattttcaagaaatacgttttcatatacataaaaatatttaggttgatgcagacgt

SEQ ID NO: 300925 - DNA, 673 bp, Homo sapiens
ataagcagtcaaaattgtccttatttcttaattacttttctaaacaattttaacgaagcacagtagcttgcactgcttttcctttatttttttataaaaactaaaattgtctctcacctttgctttagttattcctgcacctgggttctcattttaaacaaccacaattttcattattttctttcttaatagtatttcacactcacatctttataacttacagtaatacttatataaaaacacaaaactccttcagtagttctttcacaattggcttgtatcttcccatattctttgagacaggaatctatttactctcggtctacatttattactggcctctttccagattcttcctttaaactttgaattttattcatagtactttgacttcctgatagttaccctgtcatatctacttgaagacaaatttctcacactttttagcttttctctgatatatcataacattatagtacatccaattcttttgaaaataatatttatttttttactttctcctctttatcacattatgctgcttctcccatcttttagrtaaactgtcccttatttctaattagtacagggtgagcgcattgttaccactctaactctgactgttaaaatgaatctgtttttctatacattacacttcagtaaaacaaaaaaa

SEQ ID NO: 300926 - DNA, 454 bp, Homo sapiens
aggaagcctaacctctgggaaatgattgctcataatagttgcactccctggtccataaaatattttctaaaaatagaaactcacagacgtggaattaaaagacaggtaataaaactaacgagcagaatatcacagagacacagtagtattactgtgaagaatactgaaggaatacagtactatgctggtatgtttcatcaaaaaatagatcaaatgaaacaaaaatttttctctcaacttttttctcaaaaagcaagaacatggatgttctgtgtatatatgaagtgaggaggcattgttaattctaaaatattaragatgttgaggagagggttcaaaagtggaaaaaaatgatgctaaaagatttgaatgtaacataaaagtaaagcaattagttttgttaaaaagaaaaagtaaaaggtggaggtgatactgagactgggttttttaaaca

SEQ ID NO: 300927 - DNA, 507 bp, Homo sapiens
taattgagtcattttttaaaattcattcggccactctatgtcttttcattggagagttttgttcatttacattcaatgttattattgataaatagggacttactcctgccattttcttatttgttttctgtttattttggagtcttttcttccttctttcctttctttctgcctttgttctagtgaaggtgattttatcttgtgctgtgctttaatattttgctttttactttttgtgtgtctgttgtgtgtttttcaatctgaagtaagcatgaggcttgcaaatattataacccattattttaaattgatgacaacgtatcacygactgaataaagaaacatgcaataagaaagctaataaaaactcaacacttctactttgtcccccactttttaatcttgtgttgtttccttgtatgtcttattgtactgtcttcatcttaaaaagttactgtagttattattttttattggctcatcatttgttatttctacttaagacaag

SEQ ID NO: 300928 - DNA, 569 bp, Homo sapiens
gctattattatgactagtgggaggataataccaagagtttggcatatgctcattaccagggtccccataagccaaaccacctaaagccaaatagatcaaagaatgagctagataaagagtctattaaatccacgaagccgtctcttcattaatcccatacaactgaatctctataatacctgatgttttctccataggccataagtgctagcagctacacagatactttaaatcctcttgtgaaagttatgctgaataatagaattggctgaacagagaagtactttcttttttcatgtggaaattttacttgttttttatcttttgtttgtcttgtgctgcattaaaataattgaattttggccaggcacrgtggctcacgcctataatcccagcactttgggaagcctaggcaggtggatcacgaggctaagagatcaagaccatcctggccaacatggtgaaaccctgtctctactaaaaatgcagaaatcagctgggcataatgacgtgcacctgtagtcccagctactcaggggtctgaggcaggagaattgcttgaacccggg

SEQ ID NO: 300929 - DNA, 440 bp, Homo sapiens
tatgttgcaaataacaggagctcattcatttttatgcctgaatagttctccattgtgtatcatatcttttgattggagagtttagttcattaattttaaatgttattattgataagtaaagacttacttctgctattttgtttgttatttgttttctgtttgttttgtgattttctcctccttctttccttccttctcgccctccttttagtgaaggtgattttctctggtggtatgttttaatttctgttttttttttatttttttktgtgtgtatctgttgtatattttttgatttgaggtaaccatgaagcttgcaaataatatcttataactcattttcttaaactgatgaaaacttaacactgattgcataaacacacaagcaagcaaagagaaaactaataaaaactctactctttaacttcttccccttaact

SEQ ID NO: 300930 - DNA, 623 bp, Homo sapiens
agacaaaaatactgtctgaatagacaaagcaagaatcccaaccaaactcaaacatgaaacagattatagaattatctcacagtaatataaaatacctatggttaacctgttgaaggctttaatggaraaagtagacagcatgcaagaatagatagacaagtaagcaaagggatggaaatgataagacagaatcaaaaggaaatgctagaaatcaaaaactctgaaatggaaacaaattatgcttttgatgggctcatcagtaaactggcagaccaaagaaaaatattagcaagaatcaaagaaatctcccaacctgaactgcacagagaaaaaggaatgaagaaaagctgaatgtgagacaatttcaaagggcataacttatgcaaaaatagaaaaccagaagagagaaaagagcagaagaatagctttagataatagtggtcaaaaaattgaaaaaatcaattacactaaaaaaagtcaattacagacaaaaaaaaaacaaaaacaaaaacaaacaaaaaaacccaccagatccagaaatctcagagaacacaacgcaggataagtcctcaagcatctatacctaggtatagcatataaaaagtgtagaaaatcaaagacaa

SEQ ID NO: 300931 - DNA, 562 bp, Homo sapiens
aaggcatttaataatcaaactcctaaaggtcaagcataaagaaaggaccctaaaagcagcaagaggaaagaaataaatgatgtacaatggagctccaatatgtctggcagcagactttccagtgaaaaccttacaggccaggggagagtgccctgatatatttaaagtgctaaaggaaaaaacttttacccgataatagtatatctggtgaaaatatccttcaagcataaaggaaaaagactttcccagacaaacagaagctgcgggatttcatcaagaccagaactgytgtaccagaaatgctaaagggagtacttcagtcagaaagaaaaggacattaattagcaatacataatacctgaaggtacagacctcaccagtaattgtaagtacatagaaaaacacagaatattgtaacattgtaactgttctgtgtaaactactcttatcctaattagaaaaactaaatgatgaaatgatcaaaaaaaaaactacaactttttaagacatagtacaatatgatataaatagaaacaataaaaagtttaaaagtcagagaatg

SEQ ID NO: 300932 - DNA, 501 bp, Homo sapiens
tggtcaaaattttggcaagttgactaatatttccttatctcaaaccattctaccactcctatcctgacatataaattactttgcccaattttttaaacttaagtataattctgttaactctgaagacacataatagtctaattagatgtttcaaaccagctaaaatctcggtgaaaaatatacctggagaagcacttcattaatactttctagtaactactaagttgctgaattttatatcaatcttccggtttccaactaaatgatgttatattactaaggcctaggatctgtgtgactggggtaacaaacatggaaaagtggttaaacaggtgacactaagatgagttagttcctacagcactgcatcgcacagttaaaaggaaggattatgccaagcacrctaaccggtggaaaaccatgcaagaaggcaacaaagctgccaccgaattctggaaatgctgccatttcctgcaatccaagaaagagttacaaaacggc

SEQ ID NO: 300933 - DNA, 501 bp, Homo sapiens
tggtcaaaattttggcaagttgactaatatttccttatctcaaaccattctaccactcctatcctgacatataaattactttgcccaattttttaaacttaagtataattctgttaactctgaagacacataatagtctaattagatgtttcaaaccagctaaaatctcggtgaaaaatatacctggagaagcacttcattaatactttctagtaactactaagttgctgaattttatatcaatcttccggtttccaactaaatgatgttatattactaaggcctaggatctgtgtgactggggtaacaaacatggaaaagtggttaaacaggtgacactaagatgagttagttcctacagcactgcatcgcacagttaaaaggaaggattatgccaagcacactaacyggtggaaaaccatgcaagaaggcaacaaagctgccaccgaattctggaaatgctgccatttcctgcaatccaagaaagagttacaaaacggc

SEQ ID NO: 300934 - DNA, 616 bp, Homo sapiens
gtgcctccgggtagtcattttgaatactatccattactgtgtaattgtgtaggtgctgaaagtgaagtcttcgtaaaacatatcttttaaagctctttgtttggctttaatgaaaaagaarcatataccaaggttagtatagatttgagacaggagaaatatgtgattatgtaagggttcaaagaatcaagtgactggcttttacgggtgtttagacttatttttaaaaaatacacataagatttgccttgtttgtcacatcatgtttaccttcattagcccaagtttacaaaagattctgttgccaaagagaaagatgaaaatgttcatttcttgacatgtcaatagagatagtaagatcatgatagtgcctttttagggctagtttagttaaaaaaaaaaaaaaagcccttgatctctgatgctgaaacacacagttagggggaaaattgttagacctttttttggaagttctcaccaggctacaggaagtgtcatattctatttggggatatttgcctgttaaaaactatttctgatactttgaagtcatcaaatatgagttctgtttctatggaaattgttaaatacatgttgctttccccagagagaggta

SEQ ID NO: 300935 - DNA, 606 bp, Homo sapiens
ggatgagtgataaaccacagattgggaaagacatatttgcaaatcatatatctaccaaagaacttttatgcagaaaacaagaaactacaaatagcaaacaactcaattttaaaaatagacaaaagtttcgattacacatttcaccaaagaagacctattatggcaaacagctatatgaaaagatgttcatcattaatcattagaaaaatagctaaaaccacaatgagattctaccacatacctattggaatggctaaaatgaaaaatactacccatagcaagtgttaagaaagatttggtgccactgaaaacttcatacactggttatgaaaatgaaaaatggtgaaaccactttggaaaagagtttggcagcttcttaaaaagttaacctacacttactctctgttccagacactcaagtcagaagtatttacccargagaaatgaaagcatgttcatatgaagacttaaacataaatgtctgcagttttatttgtcataacccaaaactaaaaacaacccaagtgcccatcaaaagatgagtggataaacaagccatggttacaatgatgaaatctaacagctcccacaataaaaatgaactac

SEQ ID NO: 300936 - DNA, 554 bp, Homo sapiens
tcactcgtcactcaggctagagtgtagtggcacaatctcagctcactgcaacctccacaggttcaagtgattctcctgcctcagcctcccaagtagctgggactacaggcatgtgccaccatgcccggctaaattttgtatttttagtagagatggggtttcaccatgttggccaggctggtctcaaactcctgacctcaagtgatccacccacctcggcctcccaaagtgctgtgactattggcgtgagccaccacgcccagccttgaaattcgttaagtgagtttttcaattcaagaagctctgatttatttatttttaaaatgcttctctcttccttcttttcctggattgctttagaagtttctttgcgttaattttcaactttctcttgaatctcattgagcttcttttcaatccatgtttcgaattctttatctgtcattkctgagtttccagtctggttagggaccattgctgaagagctagtatgatcgtttggtggtgtcaccacattcagatttttcatggtgccagaattcttgcactggttc

SEQ ID NO: 300937 - DNA, 586 bp, Homo sapiens
actacactccagagaaagtgctcccatccccgaactgagactaaaatgcccacatggctaccctgttgggttgctaaagaatggctgactttgtatgcacccggattaaaagtggcgtcctactcttggtcccagggctgggaaaatgcctgcagctttttcctgtgtctttcccctacagcagctccaagcctctccccaagctagatccraggattgggagaaacaaagtgctctccctccgcctgagttccttaaatctccagtggaaaggtgagtcacaaagggaggctctctgcctctctcatgtactgaggcttcactcacttttatcagcaaggcactgtcacagaaggctgttttcctgcattctcctccctgagatctggggtgtgcttcacaatttcagtagattctcattttccttcttgaattaaaggtcacagaattgatctttatgcactatcttgttgtttccaagtgactgagtcatgctaaaagccttgaatccactatcttggggggaaaaactttttattttgaagcaaacctccacacattgcatcattttatctagagttcagtg

SEQ ID NO: 300938 - DNA, 529 bp, Homo sapiens
ttccctcatacctactaaaggcacctctcattcctcagtgtgctggtcaaaccctatgtcttccaggaaactctcctagatcctctggggtagaattattctctccctccaccttaccattgtgactcttcatttatgagcacataataacttatcattagagacatttgtgtgtgtgacaatctctgacaaactatgatgctagaaggcagggaccagaactgttcatctttgtatcccccaccatgtacaraatagtgtctgaaacataacaagtgctagatcattgtttgtggagtttaagagtgtgatgatctatatataatgcgatatacacattcctaaaaatcactgccctatgcaatatcttgtaatataaaccacagggcatctgagaaaatatgggattaggtgccatgcatgtcagtgacacataaaaacaagacaagaacctggaaaaaagagtagcacacattaagtggttaagaaatacacaaatactgcagtaactattgcactttacttgaac

SEQ ID NO: 300939 - DNA, 541 bp, Homo sapiens
ggtgggttttgctctagatcacggcaataaggcaastattgcaataaagtgagtcacatgaatattttggcttcctggtacatatgaaagttatgtttaagtatattgtagtatattaattgtgtaatagtattatatgtgaaacagaatgtagatactttaatgttaaaatactttattgctaaaaattgccaacggtcatccaggccttcagtgactcataatctttttgctgctggagggtcttgtctcaatgctgatggctgctgattgatcagggtggtggttgctgaaggttggggtggctgtggaatttcttaagataacacaacaatgaataacacacaatgcctcttcctttcatgaaagatttctctgtagcatgagatgttggtggatagcatttacccacagtaggaattccttcaaaatcggagtcagttctctcaaaccctgctgctgctttatcaactaagcttatgtaatcttctaatcctttgttgtgatttcagcaatgttcacagcatcttcaccaggagta

SEQ ID NO: 300940 - DNA, 556 bp, Homo sapiens
aagccctctctctaagaggtagagtggccagctgctaaggagacaagtgtttacttatttattctaaaatagtcaaatttgaactgttaccatcattgtttgtcacaataaaagaagaactgctttttttttcatactatgtatattcatgcattccccaaacaaaagatctttgagcacctactctgtgccaggaaccattctaagagctcgtgatgcgggcaatgagtacaataggcaaaaatggttatggggagaaatatgagtaaaattgtttagtgctccttctattaaataatgtrtaagttattaaagtcagacttgctggtgggaaagcagaaaacagaaaacctcagaattctacccaatacactttaatctcacctgcaaacctgctatttcttaccacttggaaaacgagcaaatctgctttttttaaaagaggcttttaagcagaagaatttaatcgagttgtgttcaatgaatactgactgacttagcattttgagtgtttaacacaatcagaggaaaacctgagattatattatgagaaaaa

SEQ ID NO: 300941 - DNA, 625 bp, Homo sapiens
aaacattatttcaaccaggcacggaggcatgtgtctgtagtcccagctactcagggggctragaaaggaggattgctagagcccaggaattcaaggccagcttggggaacatagtgatatttcatctctaaaagaaagagagagagaggaggaaaggcaggcaggcgagggaggaagagaaggcaagaagaaagaaagagaagggaagaaaagaaaggaaggaaggagaaagagggagggaggaaggaaggaaggtaggaaggaaggaaggaaggaaggaaggaaggaaggaatccattatctcatttggatctcctcatttaagagaattcattatctcatttggttctcctcatcaagctgttagctaaggcatcagggcaagtattgtgatattcatttatcagtcttcatgggatgaaaactaggaaatagtacccagctctaattcttaatctatatcctttcctctgtggtcgatttgttttgtttttatgaatagctcacacatgtattactgccattagaaagaaactttctacaatttatcttagaagctatctagtgcttactaaatgccaagaattgctgtaagccctttacatttattaagttattaaattgt

SEQ ID NO: 300942 - DNA, 519 bp, Homo sapiens
tttggtaagagacattcacatctattctctctgaagcctggaggcttgtctacatgataaaaaccttggcttccacaaccaccaccccccaacccttacctcaagcygacttcaacttttcaggcagagtttaaccctttcaactaatcaccaatttgaaaatctttgaattcacctatgacctataagcaacccctcccctcttcaagttgtttggcctctccggacctaactactgtatatctcacataccttgattgatgtcttatgtctccctaaaacatataaaaccaagctataacccaactgccttcagcacatgttctcaggagctcctgagactatgtcatgggttatgatccttaactggcaaaataaacttctaagttgatggagatctgtctcagatactttttggcttacactatgtattattttcatattgaaataagtcttctggtaatagaatctccctctcaccagtcatggataccctttcctatgtaactccagagtttt

SEQ ID NO: 300943 - DNA, 565 bp, Homo sapiens
ccaaacataaaatctgaaagtcctaaataatattgaggaatttggaatttaatatgtcactctctccagggatacttgcctttgactaacagctggcaggagaggagacagcttaacacaatattcctccagaggtgccatttcaggtatgaaggaagtgctggtgagagtcctatcttaagggtcatgccctttctagcatcccacagtcacttttaaatattccaacttcagaatatgtctctgagtcctacacctgaaatagccaaagcagatttgtgtacagctctctgtatccacgggtttcacattcatgggtttcaccaactgtggatcagaaatgttttttaaaacaatataataaggcaaaataatacaaataaaaactatataactatttatatagaatttatattgcattaggtattataatattgtatatataataatgtattacatatattctatataastatatagaatttatattgtattcggtattataagtaatctagggattatttaaagcctatgggagaatgtgcatgggttacatgcaaataca

SEQ ID NO: 300944 - DNA, 565 bp, Homo sapiens
ccaaacataaaatctgaaagtcctaaataatattgaggaatttggaatttaatatgtcactctctccagggatacttgcctttgactaacagctggcaggagaggagacagcttaacacaatattcctccagaggtgccatttcaggtatgaaggaagtgctggtgagagtcctatcttaagggtcatgccctttctagcatcccacagtcacttttaaatattccaacttcagaatatgtctctgagtcctacacctgaaatagccaaagcagatttgtgtacagctctctgtatccacgggtttcacattcatgggtttcaccaactgtggatcagaaatgttttttaaaacaatataataaggcaaaataatacaaataaaaactatataactatttatatagaatttatattgcattaggtattataatattgtatatataataatgtattacatatattctatataactatatagaatttatattgtaytcggtattataagtaatctagggattatttaaagcctatgggagaatgtgcatgggttacatgcaaataca

SEQ ID NO: 300945 - DNA, 518 bp, Homo sapiens
ctgacatttctatgagacatacaagtagagctctccagcagggagtcagatatggaggtctagagtctagaagagctagatgaagactcaggatctgtgagtgaaaggagaagatgactacaaagggacaggaagcaccatttgggggtgattgaactgttctatgtcttgattttagtggtggttatatatggctgtatacaattatacacactcagaactgtacacccaaaacagtgaattttacttttgtaaatttaccttaataaaacaatatttgaaacaataaaacaatagttgaaacaaacaaaaaagttgatcattattgaagctgggtgatgrgtacatgagggtactttatattattctctggttgtttgtaggttaaatttccaaagtaaaaaggaataaaaacaacagcaatgacagagcaaaccccttgacctcacattcccctctcacaatcataccacttctgggcctcctgtctaaaaaaatttcttgaaagagttgactac

SEQ ID NO: 300946 - DNA, 652 bp, Homo sapiens
gctgtatgcgtttcttgcccctactcctctctttgataaatatttatgcttaatttaagttctaaatttccatatgtagttttatgaatggtgcctataatatatgaaactttaaatttaaatttctataaaactacaacactctactctttcgtttcttagagacagagcctgaattttttaaagtagtactgaagaaaattgaggcattttattaaaatgaagatggggaaaatatggaaatcccctgtctagttcaaagtcaaractgcatagctaaatttgaagacggagtttagtgccaagtcactgttaagaaagtacatgctctttgtgcagggaaatcgaatgcttgaaaaccaataatatttggactggttggtacagattaaatcttggaagtaaccttctggttttggtctgtctttagaaacatggagataatcctaggagagagaaacactggttccttttagatctgtttgatttcattaggactaatttatcagtaagccattgggaacctggaaattagtagatgaacaaggcagcacaagttaattaattaaaaattaattagtcaccacaaatttcatgtcagctgctcacaggtctatgttttttgttgttgttattggtctggatacaaaca

SEQ ID NO: 300947 - DNA, 511 bp, Homo sapiens
gtcaattggaagtggaactctgttcattgataatatcaatcaatttcatgaatttgttattatcaaccaaagaataattacgtataaataacaagccattgtctagaacttcaaatgtagaaataatttttaaaaatcaggtttctaacatgcttactgatcctaatatcagagaaaaaataaaggtccattaatttgtaatatcttttacttgttggtagttgttgtttttcctgatttaggaaagataagagcctaagttattgatgctttcaaactttgagaaaaatattttctggaaaggacttgtggcatctgacattgatggggttcaacrtgctacacccaaatatggtacttttgcgtattgaatattttaagctgaaggaatttgaaaaaaattgcggaagcagaaagatctccctggccttccctgcccttcctccctgaaggattttctgacctttcctaggagcaggtcataagacgctcatgtaagagatgtgctccc

SEQ ID NO: 300948 - DNA, 591 bp, Homo sapiens
ataattacgtataaataacaagccattgtctagaacttcaaatgtagaaataatttttaaaaatcaggtttctaacatgcttactgatcctaatatcagagaaaaaataaaggtccattaatttgtaatatcttttacttgttggtagttgttgtttttcctgatttaggaaagataagagcctaagttattgatgctttcaaactttgagaaaaatattttctggaaaggacttgtggcatctgacattgatggggttcaacatgctacacccaaatatggtacttttgcktattgaatattttaagctgaaggaatttgaaaaaaattgcggaagcagaaagatctccctggccttccctgcccttcctccctgaaggattttctgacctttcctaggagcaggtcataagacgctcatgtaagagatgtgctccctataccagaggaaaggaacaacctcatctctgaagacacagggacacagagaagaatctgaacaaacaggccttgctaagtcccctccgtcccctagtttattacattaaattctgccctttttgccctatcatatttctccacaagtgtcct

SEQ ID NO: 300949 - DNA, 591 bp, Homo sapiens
ataattacgtataaataacaagccattgtctagaacttcaaatgtagaaataatttttaaaaatcaggtttctaacatgcttactgatcctaatatcagagaaaaaataaaggtccattaatttgtaatatcttttacttgttggtagttgttgtttttcctgatttaggaaagataagagcctaagttattgatgctttcaaactttgagaaaaatattttctggaaaggacttgtggcatctgacattgatggggttcaacatgctacacccaaatatggtacttttgcgtattgaatattttaagctgaaggaatttgaaaaaaattgcrgaagcagaaagatctccctggccttccctgcccttcctccctgaaggattttctgacctttcctaggagcaggtcataagacgctcatgtaagagatgtgctccctataccagaggaaaggaacaacctcatctctgaagacacagggacacagagaagaatctgaacaaacaggccttgctaagtcccctccgtcccctagtttattacattaaattctgccctttttgccctatcatatttctccacaagtgtcct

SEQ ID NO: 300950 - DNA, 596 bp, Homo sapiens
tgggtttttcccttgaatcaactgccccaagaatatcaaacaacgcttacatgggcctgttctctgtgggtgcttttctccttgwcatagcaacagttacaccagctctaccccaaaatgtgccaaggtcttgatacacaaaatttgggtgttgtgttgaagtgataggttcaagatcctaagggtcaatagtctgtaaacctactgttagggaattttaaacttctccagtgtggtgtgtgagcgcaaaggagcataggacaggaactccaaagaccttggtctactctccagtgccctttgattctgggctcctcacttaacatcagcaccttcatctgtaaaatgggactatataataagaacttgtcaggattgctaaggcgatccagtgaggtaatgtttgagacagttatgtgtaaagcagagaggcctgtactggtgttagttactgtctttatgattgttccctcatttggcacctcttctatagcaattacggtactggatttggggtaaccaccactacctcaggtttactaggtgtatgtgtttttccctccaagatttactgtatttaaacaattgatggatcc

SEQ ID NO: 300951 - DNA, 596 bp, Homo sapiens
tgggtttttcccttgaatcaactgccccaagaatatcaaacaacgcttacatgggcctgttctctgtgggtgcttttctccttgtcatagcaacagttacaccagctctaccccaaaatgtgccaaggtcttgatacacaaaatttgggtgttgtgttgaagtgataggttcaagatcctaagggtcaatagtctgtaaacctactgttagggaattttaaacttctccagtgtggtgtgtgagcgcaaaggagcataggacaggaactccaaagaccttggtctactctccagtgccctttgattctgggctcctcacttaacatcagcaccttcatctgtaaaatgggactatataataagaacttgtcaggattgctaaggcgatccagtgaggtaatgtttgagacagttatgtgtaaagcagagaggcctgtactggtgttagttactgtctttatgattgttccctcatttggcacctcttctatagcaattayggtactggatttggggtaaccaccactacctcaggtttactaggtgtatgtgtttttccctccaagatttactgtatttaaacaattgatggatcc

SEQ ID NO: 300952 - DNA, 597 bp, Homo sapiens
aactttttcttttcttagacagtctcactctgttgcacaggctggtgtgtaggctggtgtccagtggcatgatctcagctcactagaacctccccctcccaggttcaagtgattctggtgygtcagcctcccaaagtagctgggattagaggtgtgtgccaccacaccccagctgatttctgcatttttagtagagatagggtttcattatgttggccaagctggtcttgaactcttgacctcaggtgatccgcccaccttgacttcccaaagtgctgggattataggtgtgagccactgcacctggcctaagatagtctaattttctcacacttgtaaaaaagttttccagagttatctgttacattcagtgagattatccagatggaagagctgttaaaaacatccagtcgcctttgctttaattctttcttcattagccaccttctaatccatcatttgcttgtctcaatgagttttctccacaaagaacacatatcttacttagacgagggaatctagcttccaagcatctgtatctttgttaactaatcagaatacataagtaagcaaagttattttcatgtctgagatttc

SEQ ID NO: 300953 - DNA, 597 bp, Homo sapiens
aactttttcttttcttagacagtctcactctgttgcacaggctggtgtgtaggctggtgtccagtggcatgatctcagctcactagaacctccccctcccaggttcaagtgattctggtgtgtcagcctcccaaagtagctgggattagaggtgtgtgccaccacaccccagctgatttctgcatttttagtagagatagggtttcattatgttggccaagctggtcttgaactcttgacctcaggtgatccgcccaccttgacttcccaaagtgctgggattataggtgtgagccactgcacctggcctaagatagtctaattttctcacacttgtaaaaaagttttccagagttatctgttacattcagtgagattatccagatggaagagctgttaaaaacatccagtcrcctttgctttaattctttcttcattagccaccttctaatccatcatttgcttgtctcaatgagttttctccacaaagaacacatatcttacttagacgagggaatctagcttccaagcatctgtatctttgttaactaatcagaatacataagtaagcaaagttattttcatgtctgagatttc

SEQ ID NO: 300954 - DNA, 589 bp, Homo sapiens
cttataataggactgttgttaatattacactgactgctttctctcagctccaccttrctcagccacaggcttcctcacttgggcactcgggacatgcccagggtcttcggtttgctttttcttcagactatcttgttcttccccattgacatttcaattgctattctctcacttccttcaggccattattcaaatgttgtttctcaggctttgcctggctgccctttctacaattgccacacccccaaactcagcgctttccatcattcttcttcccttgatttattaggcaatatactgaattcttcatatttacattttttcacttaatttttttttttttttgagggatgggatttttgcctctgcattcagtgtggtaactctggtacgaaaacagtttctggaacttgggaaatatgtattcaatttcttcatgaataaggtagctgagggtggaggggtgggaaaactgagctttgtttcaggatctcagatggaaagctaggtgaaggtggcagagcaaccaagatctgttgctgtttgtcctacatgtggtttccctttttctcgttttctatctggaatt

SEQ ID NO: 300955 - DNA, 589 bp, Homo sapiens
cttataataggactgttgttaatattacactgactgctttctctcagctccaccttactcagccacaggcttcctcacttgggcactcgggacatgcccagggtcttcggtttgctttttcttcagactatcttgttcttccccattgacatttcaattgctattctctcacttccttcaggccattattcaaatgttgtttctcaggctttgcctggctgccctttctacaattgccacacccccaaactcagcgctttccatcattcttcttcccttgatttattaggcaatatactgaattcttcatatttacattttttcacytaatttttttttttttttgagggatgggatttttgcctctgcattcagtgtggtaactctggtacgaaaacagtttctggaacttgggaaatatgtattcaatttcttcatgaataaggtagctgagggtggaggggtgggaaaactgagctttgtttcaggatctcagatggaaagctaggtgaaggtggcagagcaaccaagatctgttgctgtttgtcctacatgtggtttccctttttctcgttttctatctggaatt

SEQ ID NO: 300956 - DNA, 463 bp, Homo sapiens
ctacttctgtacattggggccatgatactattagtacattcttagaattatgtagtcagatttcagttttactatctttgcattcatggttccaagttttatgtttaggaggattgaggaagtagtatagatttccttggcctacactgaacatttcttcctattgtgctttcttttttatccatattagaaaattccttaacctcagtgcctcagaccatgttcactatctctctatattcactaggatgtaagttgggctgctgcccaaaataatggctgaaacaagttmgcagttctttttttctcatataaaaaactaaagtagtataattatatacatcttcattgccgccaaagggaagagggaaagggtaagaattgtgaaggtgcacatcatttacactcatatgtttgaccagaacatagtcaaatggccactcctagctgcagagaggctggg

SEQ ID NO: 300957 - DNA, 512 bp, Homo sapiens
cgataaactactcttgctgactgcttcttggcttcatatattcatcgcttatataytgtatgttgttgcttggatcttcttgtaagttattttttcttttccttaaacctcatcattggggctgcaaggctcttctctcttttcaagagtttcctaatgtttaatttaattatatattcctttctattccccttttctgctaacaacctttgaaaagtatttaatgtgtatcacttagctttaagtgtttttgaaaaatgtctaccagtgtcttctgtgcaagttcttctaatttcctcaaatgctattgtgttactatctgtcactctgtttctcaccaagcactgtttttgtgctgtgcacatgttgctatggacatgtctactctgttcttcttaaggacacaaagtactccatggtgtgcatttaccacattatatctattcactcctccatcaattcccagattaccttcaattccctaccaccataaacaaataaacaaaaatctt

SEQ ID NO: 300958 - DNA, 589 bp, Homo sapiens
gaaatgtaagtagggaaagtgtgctactcatttgttatttttatagcccatcaacaagagaacttgctggcattatctgtatagcatgtggagaaccccaaacacaataatccaaaagtaattttaaaaaaaacaccaaaaggaatccaggaactaattggttgtgattggttttaatagttttgtgcctttacagggcagagagggcatgatcttgtccctgacttgaacattttatgctaatctgcaatcataagaagtcataaaatcaccagggctcaagaaggtgcagagtagaacagaaaggaattgggttctaarggtagatttatttgtttttttttctcctatttttattttgacaaacttcaaattttagaaaagttgcaagaagaatatgtaaacacctttctactcttcatgaagatccactaagtgttaccattttaccacatttgctctgtctctttctctctccattcacccacccgtctacctaccatttgaatgttctcccataaatattcagcactcctttcctaagaacaaaagaattctcaccaataaccaaaatacagtctcacactag

SEQ ID NO: 300959 - DNA, 578 bp, Homo sapiens
accttgttttactcatctttgtgtttccaaagcctagcacagtgcctggcacatggtcagatggtaggtgttcaataggtgctagataaataaatgaataagtgaattgtaatagacacttgataaccattgtctgaatgggcacaagaagaatctgatacaatttgttttcataacagaataatatggcctaattcaggrtctggggctcagatgccaaaaaagtctctctcctccaacctagccatgtgtttttgtggctttatgtaaccttgtccctccacaaatgtacatgggaatggaggggtacaaccctggtcccaaaaaggagaagtgaaaacataaaatcatgactgatggccttcagtgtcccagatcaaagtttgagggagagggtaatagggctttgggtaagaacttcaccatagagaggatgagcttgaagaggtaagctgaactcaataccagggtttgcatctttgctgtgaggtgctgatcttcagaaagatactagcaacactactgcagcagccacctgttgccatgagagagctttggggtaaatggttgcaaaaatg

SEQ ID NO: 300960 - DNA, 563 bp, Homo sapiens
gactgatggccttcagtgtcccagatcaaagtttgagggagagggtaatagggctttgggtaagaacttcaccatagagaggatgagcttgaagaggtaagctgaactcaataccagggtttgcatctttgctgtgaggtgctgatcttcagaaagatactagcaacactrctgcagcagccacctgttgccatgagagagctttggggtaaatggttgcaaaaatgacaattgaaagagctgtgctattcaactgaaacactgtaatgcctgggctcaggcagtgttgctgtaggtcatacctgaagacaatcacaagaaggaacacctacactcctaccacaagaagccacaccagcctgggcaaattgtcagagatctctcctggtcatagtggcaggaggcagacaaatcctaggcagacaggggtgggtccctggtgaaaccccatctccaaaccaaagacactttaaagcctgaaagcctagctacaagctaaatccatggaccagattgagaacctgtcttctggttttgcatgttttcctctgattgatccccat

SEQ ID NO: 300961 - DNA, 563 bp, Homo sapiens
gactgatggccttcagtgtcccagatcaaagtttgagggagagggtaatagggctttgggtaagaacttcaccatagagaggatgagcttgaagaggtaagctgaactcaataccagggtttgcatctttgctgtgaggtgctgatcttcagaaagatactagcaacactactgcagcagccacctgttgccatgagagagctttggggtaaatggttgcaaamatgacaattgaaagagctgtgctattcaactgaaacactgtaatgcctgggctcaggcagtgttgctgtaggtcatacctgaagacaatcacaagaaggaacacctacactcctaccacaagaagccacaccagcctgggcaaattgtcagagatctctcctggtcatagtggcaggaggcagacaaatcctaggcagacaggggtgggtccctggtgaaaccccatctccaaaccaaagacactttaaagcctgaaagcctagctacaagctaaatccatggaccagattgagaacctgtcttctggttttgcatgttttcctctgattgatccccat

SEQ ID NO: 300962 - DNA, 592 bp, Homo sapiens
gctgaatgggtagggtgtctcctgcatcactggggtatatgagggggatggctctgtgttggtggaggtggtgacagtgytgacagcaaggcagagggtcagcagatggatggcttggtcatagccacatggctggagtgtgggaattttcagcctggcactcagcaatagtgggcttctagctccacctgccatagaatgttggcagagcaggctgatgattggggtatcaggtagacagggccttgtctggatttctgcagccactgcaagggactgcagtaaagattagttcactgatacacgcaagacactctgaggaagttcttaaatatttggagtgaattattctggaaaagactgaaattcttaccagaagtagtggaggcttgaggcccttataagttaggcctaattgtaaacatggcttattttgcattcacaggttggtgaaaccagggacaaagtgatgacatagatgaaagcaagcttttgactatttaagtgaaaagatgtaatgatgggaggcattatagcccataatggacagggccagaattttactcatcagcctggacctcttcacacaggg

SEQ ID NO: 300963 - DNA, 496 bp, Homo sapiens
aacatgtatgtgtgggaggaagaaagataaaatgtgaattatgacaaatgaatctatattataaataaatcacattatcatattaaagagaatgggaagaaacaagatgattaagcaactttggaacagtactttggataccataaagctaaagatggaaagtccatactcaaacactatgctgtagttgggaaactgtttctcacagggatatagggtagaaattttgattctactttgtttttatacttgacttgaacaaataagtaaatgggctgtgcctaaggagacctagagcaagtagctacaattatggaaatgaagaagactagaatgaatcctgtggggctagaaaaatcgcagaggtatcaatacagacatgtggttgcaaaagacaggtagacagatgatagatagatagaaaaataarcataaataaggctatatacaccagtgtgtttgtgtgtatgtgttctatctctatctagagacagga

SEQ ID NO: 300964 - DNA, 360 bp, Homo sapiens
gttaaatagttttgatcatcaaaatgataatttatgatgtccctggtactaggaatttagtagctgagaataacttaacatttcattaccatttttatcgccattttggaaaacacatcatgaacttggaacagccagtcagccacatttattgagcrtcacagcataagagcccaatattgcatagtatggggaaaatacagaagaatcttctgttcataggtccaaaatctagcttgcagaagcttaagtcttaaataattgaataaaagtttatataatcttatgtaatgtaatctgagccccccaaaaagtgataagtatgaatgcctgcaaaaagaggctctgagtatttaaaag

SEQ ID NO: 300965 - DNA, 527 bp, Homo sapiens
gcgggcgggtcacgaggtcaagagactgagattatcctggccaacatggtgaaaccccgtctctactaaaaatacaaaaattaaccaggcatgatggtgggcrcctgtaattccagctactctggaggctgaggcaagagaatcgcttgaacccgggaggtggaggttgcagtgagccgagattgcaccactgcactccagcctggacaacagagcaagactccaccaaaaacaaacaaacaaacaaacaaaaaacacaaaaaatagacaggaaaggtcatcatgtaaatggtgattatctgttacagctgaattacagatgatgtttgctctctctatgcctttcagtgttttccaaattttcaatattaggcttgtatactatattaataaagataacaggttttatgttaaaaagataagccagagaaaaagctcttattgttatggatctaagaagaaagtgtataacaaagagagagagacagagagagagggagaataattatcttttctctcccccaagt

SEQ ID NO: 300966 - DNA, 625 bp, Homo sapiens
ataatttatataattaacttacataaagcactttgtaaaatgccctgaatggtataggcgcttaataaatgctggccatagttttttatcctttgctatattccctaacaaaccaaacaaaaatcaaagcacagtcttttcatggggcttattggaaaaatggtcatcataccctctttccctctattgttcctgtgacatattttaagtatttataattgctgttcagattggtgacaattttcatttcacaaaatgactcttcttacaattatgcttaaagtcctctctaaatggttcttaaatgtgttaattatgcaagatttatcacctgacatatgaaaggctaacttttcaaatgatttcagagtaaatggaatgctaagccctctcccaaccagtaatagtaatgtgttcatttgaaccaggtcacgagcctgcctgcctagagaagtgaagcccctggaatgtctctgaascaaacgggcaggtgtgtctgcatgaaaaaaggcaaaatcgaccatggagcattgggttaaatgcaggatgataggcgactctgcaactcactttacaatcacttaaccccttttggtcctttgagacctaaaggtgctgctgacaa

SEQ ID NO: 300967 - DNA, 607 bp, Homo sapiens
acactgtctttctgatcgaatgctttcatctgaagacttcttcccatatccacaacagtastttgaactcaaatgacatttgttttatatattaaatgaagggttccattttcttgtctttgttttcactagtgtccaaaaaattgtttctacatgaagtagtaggacccccaaaaaactcagtaaattattacagccctaatagaacaagcaaaggtaaagaaatggaccccaaattcaagatcaaaatccattaaaaagctacacccatgcattaatggctttgttaagaaccaaacagaaacatcttttttcctcactccacccccttcagctttactaaaataagcccaaggagcaccatgtcattgatacttttctttgagaatatcagggacaatttaattgaacacataatagaatcatttacctttgtggaccgctgtatacactttccaaagtattttcacatatattattacatattagcttaaatcttttacaatcagggaaactgatgtatacagaagttaaacatctagctctcagttattaggcttattcatgtgaactcatgaagagacacatccagccaatggccacagat

SEQ ID NO: 300968 - DNA, 607 bp, Homo sapiens
acactgtctttctgatcgaatgctttcatctgaagacttcttcccatatccacaacagtactttgaactcaaatgacatttgttttatatattaaatgaagggttccattttcttgtctttgttttcactagtgtccaaaaaattgtttctacatgaagtagtaggacccccaaaaaactcagtaaattwttacagccctaatagaacaagcaaaggtaaagaaatggaccccaaattcaagatcaaaatccattaaaaagctacacccatgcattaatggctttgttaagaaccaaacagaaacatcttttttcctcactccacccccttcagctttactaaaataagcccaaggagcaccatgtcattgatacttttctttgagaatatcagggacaatttaattgaacacataatagaatcatttacctttgtggaccgctgtatacactttccaaagtattttcacatatattattacatattagcttaaatcttttacaatcagggaaactgatgtatacagaagttaaacatctagctctcagttattaggcttattcatgtgaactcatgaagagacacatccagccaatggccacagat

SEQ ID NO: 300969 - DNA, 513 bp, Homo sapiens
taataaacaacttctcatacttgtggtgattgcaatttattcatgatatttcaattttccataaaatacttgtgaatttcaggggagtatactgtgcacatgaacatcagccttccctcttatcacagaatccaaaagcatgaagcatgctagtactttgctgtyacccagtagttttaacattctatttcaaggctttcatgaaagcataaaagatgttttactttttcttcctacctttgccccctcttgatggaaatgatttcctcaagcaagaaaaaaaaggttatgacagcaccatgaggaagacactattccaggagctcagtaatctggtccttttccattttcccaaagcaacacagacagagaaaggataaaacaaagttgtgctgtttattccaaaacaaatagttgaaggcaaacttcttaaaggaaatgtagtctagaaggaaaatgaatttagagaaaaggagagctttgcttgaaatgtgtgagttttctttttggccg

SEQ ID NO: 300970 - DNA, 586 bp, Homo sapiens
ctcacttagtggaaccctaaaacatcagttactctgagtccactgaatattttaagtattcaaatgcatcctccctctaagcaacgcataatagacattcattataatgttttttgcatgttagtaagatagcttttctgagatagaggtttctggtagtagtttattaaaatattagatattagaccaccttgtaattcttacagatttgtttatattttccctttgtcctctgtattaaaaggaataaaggttttgaaggtttytccctaaaaatagaaataatttatttaaagaaaaaataatttagaccttggttgaaattattaggcaataagaattatatttaacaatgtattttcaattaatttttaattaatccagataaaattatgagaagggtatatttgccaaatataaaaatgaatgataacagtataaagacaattagtcaaacagactgagaagccaaaaatgaaattacatctaatacttttgttaatgcaaaagaacaaatggtatcatatttggaaggttttcttttgtaaaattgcttaatcaagagcctgaggcttcagtactgttg

SEQ ID NO: 300971 - DNA, 589 bp, Homo sapiens
aatgtttctagggacaggctatagctcctattgatagttctttgagaccagaatatttattcatatgactcaatatacgtcaatacctttttatattttttggatcattagagccttttaaaaaggttatgaaagatacagatattctccctagaaaaaggcacatgtgtacataactttagggtatccccatttataatcccctttgacatttatcctccaatatctctttcatacctacaatctctcattggagtcctccaaaaatcttcctggcatccagcctccccagctttcctgcttctttcaccctaamctcacccttctcacacagcaggaactttctctggcttattattcacactcttctggacttgacatttcacctggattctccacaacaaaggagagcccagcaatgttgacttagctctcaagaatcctttttttccttcaatctgttcagccttgtttttctctttatgtttgtttgattccatattctaagattaggtacaaggctgaaaaagaaaaacctctcttgggagagtagcggaagaaaaggagccaagcaggcagatgcctaact

SEQ ID NO: 300972 - DNA, 589 bp, Homo sapiens
aatgtttctagggacaggctatagctcctattgatagttctttgagaccagaatatttattcatatgactcaatatacgtcaatacctttttatattttttggatcattagagccttttaaaaaggttatgaaagatacagatattctccctagaaaaaggcacatgtgtacataactttagggtatccccatttataatcccctttgacatttatcctccaatatctctttcatacctacaatctctcattggagtcctccaaaaatcttcctggcatccagcctccccagctttcctgcttctttcaccctaacctcacccttctcacacagcaggaactttctctggcttawtattcacactcttctggacttgacatttcacctggattctccacaacaaaggagagcccagcaatgttgacttagctctcaagaatcctttttttccttcaatctgttcagccttgtttttctctttatgtttgtttgattccatattctaagattaggtacaaggctgaaaaagaaaaacctctcttgggagagtagcggaagaaaaggagccaagcaggcagatgcctaact

SEQ ID NO: 300973 - DNA, 543 bp, Homo sapiens
aacagttttgggtagtatgccgtaattggaaagttaccaacactggtacttataaagctttagaattttgcttgaaatattataaattccatgattcaaattaaaagtgttaatttagactccaatgctaaggmgaagttacatctaaattattgacagccttaaattatccattctattctttgaatttcctccattagtgcatgtaatgacagtcatctatatgattgatgatatggtttggctgtgtcccctcacaaatatcatcctgaattgtagttcccataatcccaacatgtcatgggagggattcggttggaggtaattgaatctggggtggctacctccatgctgttcttatgatagtgagtgagttttcatgagacctaatggttttataaggggcttttccctctttgcttggcacttccctctcctgccaccacgtgaaaaaggacatgtttgcttccctttccaccataattgtaatttttttgagccactccccctcccccagccctgcagaactgtcaatcaattaaa

SEQ ID NO: 300974 - DNA, 621 bp, Homo sapiens
tgctatgtctgatcatcaggattattaaggaagtcaattatcaattagcaaaaccttaattaactgctctccctttagcacctggaaactcttggctctccaccatgttcttctgctcattgcccccaaaagtactcttcccacatcttctttatccctaagtcactcttgctatcagctttgcctgagatgcagccttccctgacctctttgtgtttcctccatcacattattctaatgatcttttctctccttgatactcaagtagagtcttgtgccaaagttatgaggtggaaagaaacataacatgttccatacctctagaaactaaatgtagctggtgtatggccatgcggttttactcaggatgaattagagaaatagggtttagttagataacatcttacagttcamcagttaaaaaaaaaaaaactaaacttttatcccaagcacaattcaatgtcgttgtaaaatgagaggcatacacaatatatgctgaacattaatgaaggaaagagaccatatgagctgtgtaagggaagatttcacagagaaaagagcctttaaggacgggtaggatatgcattgccaaaaaagaggcagagatgtcatggatataaa

SEQ ID NO: 300975 - DNA, 486 bp, Homo sapiens
aattcttgtctccctctcatcttcccaccttttggagtcttcagtgtctaatttttcccccttgtatgttcatgtgcacccattatttagctcctacttataagtgacaacatacattatttggctgtctgtttctgggttatttcacctaaaataatcgcctccagttctgttgctgtaaaggacatgattttatccttttctatggtggagtgctayagatagatagatagatagatagatagatagatagatagatagacagacagacagacagatagatagatatgtgtgtatatatatatatatatatacacacatatataagtatatataagtatacttatatatatgtatatatattcttttctatggctgagtgtatatatataaatatgactttgctattgtgaatagtgctgtgataaacataaaagtgcaggtacttttctatataatgatttctttttttttcttttcattttt

SEQ ID NO: 300976 - DNA, 486 bp, Homo sapiens
aattcttgtctccctctcatcttcccaccttttggagtcttcagtgtctaatttttcccccttgtatgttcatgtgcacccattatttagctcctacttataagtgacaacatacattatttggctgtctgtttctgggttatttcacctaaaataatcgcctccagttctgttgctgtaaaggacatgattttatccttttctatggtggagtgctatagmtagatagatagatagatagatagatagatagatagatagacagacagacagacagatagatagatatgtgtgtatatatatatatatatatacacacatatataagtatatataagtatacttatatatatgtatatatattcttttctatggctgagtgtatatatataaatatgactttgctattgtgaatagtgctgtgataaacataaaagtgcaggtacttttctatataatgatttctttttttttcttttcattttt

SEQ ID NO: 300977 - DNA, 525 bp, Homo sapiens
aaggtagagaaatccatgaagatgaggaaaaaacagagcaaaaaggctgaaaattcccaaaaccagaatgcctcttctcctccaaaggatcacaactccttgccagcaagggaacaaaactggaaggagaatgagtttgatgaattgacagaagtagcttcagaaggtgcgtaataacaaactcctccaagctaaaggaccaygttctaacccaaggcaaggaagctaagaaccttgataaaaggttacaggaactaactagaataaccagctcagagaagaacataaatgacctgatggaactgaaaaacacagcaagagaacctcgtgaagcatacacaagtatcaatagccggaatcagtcaagcggaagaaaggctatcagagattgaagatcaacttaaggaaataaagggtgaagacaacattagagaaaatagaatgaaaaggaatgaacaaagctatcaagaaatttggaactatgtgaaaagaccaaacttatgtttgattggtatacctgaaagt

SEQ ID NO: 300978 - DNA, 478 bp, Homo sapiens
attttattttatatttgtagctattgtaaatgggattgagttcttgatttgggtcttgcttgattgttattagtatatagaaatgctatcaatttttgtacattgattttgtattctgaaattttactgaagtcatttatcaaatctaggacactttagggcttatccatgtataagatcatatcactagtgaacagagataatttgacttactcttttcctgtgtggaggccttttatttctttctcttgcctgaktgctctaagtaggacttccagtactatgttgaataggagtggtgaaaatgaatatcttcattttgttccaattcttaaagggaatgctttgaactcttctccattcagtataatgtttgctgtgggcctgtcatatatgacttttattatgttgaagcatgttctttgtatgctcagtttgttgagggattttatcataaaggaatgctgaattttattta

SEQ ID NO: 300979 - DNA, 540 bp, Homo sapiens
ggtatctcatgcaaatcttaaccaaaaggtagcaggagtggacacacttgtatcagacacaataggctttaagtcaaaaactgtaaaaagagaaaaaaatgacatatataatgatatatataataataatatataatatataataatatgtcattacatatataatgatatatataataatatataatatataataatatatcattatatatatataatgataaaagggtcagctcattaggaagatataacaattataaacatatatgcccctaacatcagaattcccaaacatatgaagcaaaccttgacagaactgaagagagaaatggacagtaatacaataataayaggagacttcaacagacactttcaatagtggatagaacaacaagcagaagcttagttgggacacacagaacttgaacaacactataggccagttggagcttacagacatataccaaacattccatccaacaacagcagaatacattcttctcagagacatgtgaaactgttctagaaataccatgttac

SEQ ID NO: 300980 - DNA, 593 bp, Homo sapiens
aaaatcctcaacaaaataccagcaaaccaaattacaaattaaaatgattgtatattatgaccaagtaggattatatatcatgaccaagtaggatttattcctggaatgcaaagatagtttgacagatgaaaatcaacagaatgaaaggaaaacaaaatcacgagattatcacaatttatatagaaaaaatgcatttgacaaaattcaataatcttttattataaaatacccaacaaactaggagtagaaggaaatcacctcaatataatgaaggccatatattaaaaccctacagctaacatcatactcaatagtaaaaaactgaaagctttttctctaagatcagaaacaacgtaatgatgcccattgtcatcatttctatttatcgtaayactggaagtcctactcacaagcaattaggtaagaaaacaaaataaaaatcatccaaaaattggaaagaagggaataaaatgatgtgttctccaatgacataacttcttataaaaaacctgaaagattctacaaaaagactgttagaattaataattaaattcaataaagttgcaggctacaaaattgacatgcaaaattca

SEQ ID NO: 300981 - DNA, 617 bp, Homo sapiens
tgtggaaaagttattttggggggttaataattcaatattgccttattctgtggtttcaaatttccattagcaaatgatttcctttaataaatcttttatgattagaactagctactctgatgtcttcataattgtcgacctcaccattgtttatttatataagactcttttgcccttgtttcttgttgaacacaagtcagttatttgctgtgcctcagtgtctgtgttctcaataatatggtgaagtccgtgataagaaaggccagatctgctgtgtatccacttttaggatttagaacagtgttgtgcttttactgagtgtctagagcaagtcaatgacccaatcacattgagatcttactgtgttttgttatttaaaacacattttcacctccactattttgtttgattagattctaagaaatgccaatactgtagaatcccttggctagttgtaataaattactaaggttgttggcatcagttatctggccttataagagattcccaggtttattttagggaatgactccctttttattcttcacccttgtgatttaagtgtgagaagatsacatcccagtttccagagaagatacttgattcaggtttgtcca

SEQ ID NO: 300982 - DNA, 526 bp, Homo sapiens
gtgtcacccccccaatgatacctccaaatcttctctcattctctcttaaatctactccaaccagctctttgttctttcaaagatttccacatccacccatgttatcagacatttcctttcaagatcgccaatgaactctatgttgtgaagtctaatggtcaactctcagtcttcatatagatcagtagcagtattttaayccagttgatcccactcatctctttaatatactttttgcatttggcttccaggctgccagaatcttttttttttcccccatcttattccagtagctattccttcctattctcttttgctgtctcctcccttttcccccagtttctaagagatgtggcccaaggatctgctttggttcttttctcttttctatgtatactcctagggtgatttttctacccagggtcttgtgcttttaagagtatctatgttccaaagagtcctaattttttatcttcattcaaaatttctctcctgaatttcagattgcctatttgacatgtgtact

SEQ ID NO: 300983 - DNA, 580 bp, Homo sapiens
ttttgagtccttctcatttggaatgggaaagggatttgggatttaagaagcgatcctcttctttctcccataggaaagaagaaaaaatgtccaatattttacttctaactttatgactcaaggctgtcaattttttttatgcctgcccaaaccctcccaatcattgccatataaggggaagttggctagcatagcagagtcatttagcttttagtagataagccctcagaaggatataatccaaattgttttcagctctattctgaatgtggaakaattaaagccccttcattctcagctttacatcctagttacaaattttgaggcaagaagagaagtttcaagtgacatacttaaaaaacacaacaaaataataacagttgcatactatgcactcacctctgtgccttcttttaatactatatgttgaagactgctctggaccagttcatgtatatcagcccctgttagttacctacagctgtaaaaaaagttatccctgacttaatggcatcaaagaacatcacttattatttttatctctttcagttccagagattgacaggactcaactagatgg

SEQ ID NO: 300984 - DNA, 580 bp, Homo sapiens
ttttgagtccttctcatttggaatgggaaagggatttgggatttaagaagcgatcctcttctttctcccataggaaagaagaaaaaatgtccaatattttacttctaactttatgactcaaggctgtcaattttttttatgcctgcccaaaccctcccaatcattgccatataaggggaagttggctagcatagcagagtcatttagcttttagtagataagccctcagaaggatataatccaaattgttttcagctctattctgaatgtggaataattaaagccccttcattctcagctttacatcctagttacaaattttgaggcaagaagagaagtttcaagtgacatacttaaaaaacacaacaaaataataacagttgcatactatgcactcacctctgtgccttcttttaatactatatgttgaagactgctctggaccagttcatgtatatcagcccctgttagttacctacagctgtaaaaaaagttatcccygacttaatggcatcaaagaacatcacttattatttttatctctttcagttccagagattgacaggactcaactagatgg

SEQ ID NO: 300985 - DNA, 428 bp, Homo sapiens
agtatttttttcataggtttgttagctgcttgtatatctccttttcggaaatgtccattcatgtctttttcccactttttgatgggctttttttttttttttcttgcttatgtttgggttccttgtarattctggactctagtcccttgtcagatgcatggtttgcaaatattttctcccactttgtgggctgtctgtttactctgctgattatttcttttgctgtgtggaagctttttagtttaatcaggtcccatttattttatttttgtttctattgcatttgcttttggggtcagatatggtttggctctgtccctacctgtattagtctgttctcacactgctatacataactacctgagactgggtaatttataaagaaaagaggtttaattgactcacagttctgcatggctggggaggcc

SEQ ID NO: 300986 - DNA, 613 bp, Homo sapiens
tgaattgggatatgtttaaagcattccccctgacaagcagaaaaagataaagatgcccacttttgccacttctattcaacatagtactggaagtcctagctagagcaataagataacagaaagaaataaagaacaaccaaattggacaagagaaagtcaaactgttgctgttcaccaatgatatgatcatctacctagaaaaccctaaagacacatccaaatagttcctagatctgacaaataaatttagtaaagtctcgggatacaaaatcaatgtacacaaatcaatagcagtgctaaacaccaacaacgaccaagctgagaataaaatcaagaattcaatcccttttacaatagctacaaaaaatattagcaatttacagtttgtcatagcactcattattgcataaaattaaaggatgttactcttttctcccatttcttcatcaaaagatagyatttcacgtgtgatggtagaaataagtcatggcaggctgaatgtagatagtatattatatagttgctgctgcaattttaaagattctggggatagcttttctttctagggtcaagcttcaattaaaaacatacatatgctaaaaaaggataactc

SEQ ID NO: 300987 - DNA, 662 bp, Homo sapiens
gttaaataatgtatgtccaatacctagcagattgcaaatagccactaattgtatcatcattattaattcttctttatggagagggccataaaggatccataaggcaaggtgctttattttttaataccctaaattcttatttcagccgtagaattacttaatcccttctaaaagtaaatttccccaagaaacttcagaagaaaactttttcaactacaaccaaattaaaagcattcaatatcttagtcttcactaagactaatgcaaccttcacttcagtttttttttgcccattttctcttattatttcttcaggaaaaatgaaaagcaattatatttatsaaaatcttacaggtcctcttcgaaatggttaagtcatgggaggattccgttaaggggtggaaaaaaaaaaacagccttccctagttcaatacaagaagaggagctttcccaggatttctgcctcttctggagtttaaggcccctgtcttgccattctctcagtagcaagcttctctatggggtattttaaatgtaagaagcagaagggctattataccaaccgctgtcatacaaataaaacttcagccatccatatcactgacaccagctgtttctgttaagagaaaaagtgtaatcatttttcttgtaaggattcttgc

SEQ ID NO: 300988 - DNA, 621 bp, Homo sapiens
accatggtggggtggccattcctttataattttgagaccaccagtatggtatgtgtaccctgccccaaagagctttatctagtcaaatgaataacacaaacacacacagaagagaggggaattaagtgctgttctcagttcttatcaaaagtgcaatggagaatagagtaatgcgttatgtcacttttctctcctgcaatttgctatttccctcaagtatttcttccctttgcgagcttcccagtattttacagaataagatggcattttatctgaaagcatttggtaaatgttctttgagtctaggaggctgcaatttaacaaatggcttcctcacacaaactataaggttgatacagaatgattgacaacgatgccaacatttgaaaagcagctaagagcttcaaagcctacagtagctgaggccaggagtggagtttatcaccagccttggagattgtggtttatgttggcaacacaaaatatctgtcattttaatacagctcttacaaagatttttaaacatgtcattaaacaaacataccagaaggatgggcccagaagaaaccagttttaagataacaatagamtcaaaatacattatcaccagataatagtctc

SEQ ID NO: 300989 - DNA, 496 bp, Homo sapiens
agccatatagtcgacttctgctttttgttttgttttgttttgtttttaaatgagataccaatgtgtcccacctcgcgttctccttcatcgcccttccctttcctcccttcttctatgcagaatgcaattctcctccacatttcaatgttttgggacttgcctcccactcctctcccttcccaagggcttcctgtctccatggaaacattcgcttaattaacccaacgcagggagagggcatcgctggcccaaaygaaagccgccagagcagctgcagcaagagctggagcagagcgagagaaggatactaaagggaggcaggctgcgaggtgggctgtgacccaggaatcgtgggcagcttgggccgccgcacccagagcagtgccagcacctccgggccagttgccctggcacccgaaacttgcaaagcacaggcgccgcgcggctgcaggtccgggtccgggtccagatgggggtcagggcggattgcaggggt

SEQ ID NO: 300990 - DNA, 496 bp, Homo sapiens
agccatatagtcgacttctgctttttgttttgttttgttttgtttttaaatgagataccaatgtgtcccacctcgcgttctccttcatcgcccttccctttcctcccttcttctatgcagaatgcaattctcctccacatttcaatgttttgggacttgcctcccactcctctcccttcccaagggcttcctgtctccatggaaacattcgcttaattaacccaacgcagggagagggcatcgctggcccaaacgaaagccgccagagcagctgcagcaagagctggagcagagcgagagaaggakactaaagggaggcaggctgcgaggtgggctgtgacccaggaatcgtgggcagcttgggccgccgcacccagagcagtgccagcacctccgggccagttgccctggcacccgaaacttgcaaagcacaggcgccgcgcggctgcaggtccgggtccgggtccagatgggggtcagggcggattgcaggggt

SEQ ID NO: 300991 - DNA, 636 bp, Homo sapiens
caggccggtctcaaactactgggctcaagcgagccattcattttagcctcccaaagtgctgggattagaggtgtaagccaccttgcctaatgatcatagaggtcttgatgtaaattcttcacacttagtttttcacaacactggcaatatgaaaactaactcakttcatctcttactttggctaaattctttctgccttgttaataagtattatagtgtctagaggataggtttttaatgaatggtatagatggagtaattaatatatccctctgtaacccatttttccttcatagatgctgggagcttttgctgctttttaaacaatccttttgagaaataataagggtcattaagatgattatggcattgtactactcaaaaaattaatgtcatacttttctgcctttcagcataattttcaaagagaaaaatacataatttagggttttgttttgctcttcatcttgggaaaagttatttagactaagggatgtgaaaagctgattgaaaggctttttattgccattatattttattgctattaattaaaatgcctcaatgttagtttcatcctttatattaaatctgaaatgtcaagaaatattctatcttgtatgctttgtcttacaattt

SEQ ID NO: 300992 - DNA, 636 bp, Homo sapiens
caggccggtctcaaactactgggctcaagcgagccattcattttagcctcccaaagtgctgggattagaggtgtaagccaccttgcctaatgatcatagaggtcttgatgtaaattcttcacacttagtttttcacaacactggcaatatgaaaactaactcatttcatctcttactttggctaaattctttctgccttgttaataagtattatagtgtctagaggataggtttttaatgaatggtatagatggagtaattaatatatccctctgtaacccatttttccttcatagatgctgggagcttttgctgctttttaaacaatccttttgagaaataataagggtcattaagatgattatggcattgtactactcaaaaaawtaatgtcatacttttctgcctttcagcataattttcaaagagaaaaatacataatttagggttttgttttgctcttcatcttgggaaaagttatttagactaagggatgtgaaaagctgattgaaaggctttttattgccattatattttattgctattaattaaaatgcctcaatgttagtttcatcctttatattaaatctgaaatgtcaagaaatattctatcttgtatgctttgtcttacaattt

SEQ ID NO: 300993 - DNA, 564 bp, Homo sapiens
aagactctgggctataaaatatatgaataaaaattttcttcaaacatcaaatcttaattcccaaggagatatatcaggatgaataaaggttgcaatgcctcacctttgtaaatacacagggtactacgtgcaattaaacattaaaaaaaaaaaaaaaaacctaagtggactacattgtaaaggagctactattttttaagtctaaacttttctagagaaaggtaatttctagtaaaaatatgtttgcactgcaacttcagtcaccactccagacttcatagtgctgtgtagaataagatgtcaatataagcctctcattccagtgttcagaccctgtttggataacagtcttactcactagaagcttttcagccagcacctagtctagtgatcctgacagtacccrgatttccctttaatgaagtatacttctctcattgtggaggtcaaggaatttagggcatgagcctcggttagcataaaggtgatcctagccctctctctgcagcgcttagttaagaatccagctagcagagtggctgtctacatgaaagcaagagctaa

SEQ ID NO: 300994 - DNA, 609 bp, Homo sapiens
atttccagtctcagttattactcaataataactattgatttagtacatatactcaataatgcctatttccaaatcataaccttaagtcaccatagaaatttatgctatgtttagcatactctaaacaagtgaggaaccatgaaaaccattttagcaaaaatttccaaaaatgttcaaatttttaaacaggaaatttggatattttgtgtaatttaktgagggcaaggacttagccactcatttttgagttgtcagcctcaagcataatgtcagacacacaataggtgatccataaacttttatttaattaatatttactgagattaaaaatagatatatttgtactaaaccaacatttattgactgtgtgtatttatgtgttgtgtttacattaactttcacatgtaatccaaacaatcttgaaaatggatattactgtccacttttaaagatgaggaaactgacattctcttcagagcacacaactgtaaagagaataacctgtgttcaaatttctagcagacaccagagccagtattctttttatttcattatgtacctacagatatttctaatttgttttctttgacttaaaactcttcatatatc

SEQ ID NO: 300995 - DNA, 571 bp, Homo sapiens
gttaacatgaatttactatattattacactgaataaatttgtacgagtcacacagcttctctggttatctgttacacctgcaaaatgaggggaatttataatgacttctctataaaccattcaggttttaaataatccattwtctatctctaagcatatcactctttattgctatctagatgacaattttaactgatcacatttaccagattaaggagtacatattaaagggtaccttaatttggatagctatagcagactttgcaaattaagaaaaaaagagctactgagtgaaattgaaggaattttgcaaaataaccttccagttgatgagaatatactgtatctgcaccaagttgtaattaaatacataacagcatttcagctgaacaacttacagtcatttgattttctaaaatagagtaaagcaataaatttaattttgctattgaaactgtatatattttgtacaaattgctaaatttccacattccaagtctgaaaaatacagtattgttaaacagcataaatctgccacatgcctaagtaatagcaataaaagttaattcta

SEQ ID NO: 300996 - DNA, 477 bp, Homo sapiens
aaattcacttggccaaaatgtggcaaactgggatttgtgaacaatttggcttcagggccagtgagcatgacctccatgctaygtggcctactgtatggttaatacatcctagtgtagggatgatcaccgcacattgtcatcacaggttctacataatgtgcacagacaacaatctgagaaaatgctccaataacttcctcactcaaaaattcctgtcacacccagttctgttatgacaatctccatctgtgcctttgtattttctggcatttctcctgcagacttgtggacccagaagcagaattttctatgcatattgaatctctctacctcttgctacttgctacattttgctctctgttaacaagtctgctgagcttctagtgatggttcattcttctaatgtgttacagaatccttcaaacctgttcttctagtttcatttgtaataccgtattgataatatcagagcatgaa

SEQ ID NO: 300997 - DNA, 612 bp, Homo sapiens
ttagtgataaggacaatatatttacttctgtcatttgaatacaaggtgtctgtttccattgacctctagaagatttctctagttcagcagaaacctaatcttacttctagagagcctttgaggtctatagctattgaattttctgcagcaagcttcactcctttatgcagtgtttaaaagtcatgctttcttttcaaaatccagaagcttgatatctatcttgagtctcctcaagaaatcgtttcatccttgtgaaccctcctaaagsagttcaagacagcaactaatttgccttttctgttgagaatatatttctgcaagcccttctaataatagattttaaacagtacaaattgagcttcaaaatacctaatgttaaatgacaagttaatgggtgcagcacaccaacatcgcacatgtatacatatgtaacaaatatgcacgttgtgcacatgtaccctaaaactgaaagtataataaaaaataaaaaaataaaaaataaaaaaaaattttacctattgaatacagttcttctatgcaaagattcctaagtctggcaggaggttttgtgcaaacccagatgccagaattctgcaagggttcttactctgg

SEQ ID NO: 300998 - DNA, 571 bp, Homo sapiens
aagaagtagttattgagagcctactatgtggcaggcaatcttcttgctgctggggagacagtactgaacaaaatagacaagtacttgccctcatgaagcttacatattgttggattgagcagaaaataaccaaacaaaaatgtaaatatataatgcaacatattgttatggcggatatgtgttacagagaaaaataaaggaaggtaagggagacagagagcataaggcatgtgtgtgtgtttgccaattaatrttggtggtcagtgaagagcaccctgacaaggtgacatctggtcagagatctaaatgtagtgaaggcactggccaggtggatatctggggaagaatctttaatttgagaacagtgcaaaggtcttggagtgggaatgtgtttggtgtgttcgaggatcagcaaggaggtcataagttagaacaaagtgagcaaaatggagagaagtgggagatgagaccagagaatcatattagtgggcaaatcatataaggctttgtagcctgttgtaaggactttgtcttttactgtaagataggagacctggctgcattttaggca

SEQ ID NO: 300999 - DNA, 579 bp, Homo sapiens
cactggggaggacattgagccatattttgaaatggcatttggctagtttatgacttcttatgggatgacgtgggatgatcagtctctggggtggtggaacccagatccttaatgcttccagtgtattgggctgtagctgtccataagtttctctttctgtatgtttgggatgcagggaagagactcacgatgaaacttcgcccctgccaaactgattctcatctctacctccatttctttctcctttttgctttcgttgtgccaaagtggctaattattgctccttatacctgcagtacttgaggaaggactcaaatactgagctggggtttcagtatgcccctgtgccccctcctccaagtccgcgacataaccagcactcttgttytaggtgattgcagtttctggcacatagcaagtgtttagataaaaatgtttcatgaaaattagagcttttacgagaaaagctgcccccgtcaacataccatagagcacatatgtaaatactgttattcctattatctaatatgcctattatgagaaccattctgcatctgaggcattaaacttatcagttag

SEQ ID NO: 301000 - DNA, 579 bp, Homo sapiens
cactggggaggacattgagccatattttgaaatggcatttggctagtttatgacttcttatgggatgacgtgggatgatcagtctctggggtggtggaacccagatccttaatgcttccagtgtattgggctgtagctgtccataagtttctctttctgtatgtttgggatgcagggaagagactcacgatgaaacttcgcccctgccaaactgattctcatctctacctccatttctttctcctttttgctttcgttgtgccaaagtggctaattattgctccttatacctgcagtacttgaggaaggactcaaatactgagctggggtttcagtatgcccctgtgccccctcctccaagtccgcgacataaccagcactcttgttctaggtgattgcagtttctggcacatagcaagtgtttagataaaaatgtttcatgaaaattagagcttttaygagaaaagctgcccccgtcaacataccatagagcacatatgtaaatactgttattcctattatctaatatgcctattatgagaaccattctgcatctgaggcattaaacttatcagttag

SEQ ID NO: 301001 - DNA, 619 bp, Homo sapiens
agtcacagcccctaccctaaaactgctgatagaccagaggctgttgcaatcttacaacaggggtaaatacaagcagcccacactaggaccatcatatttattttggaggtgtggtgtcagaggttaatcraagacagaagttgggtaggctaagagaagagggaaatatgttcctattagaaggacagcatgtgcaaagtctggaagtgagagagaatatgtcacatgaaggaatcttaagcaggtcagtgtatcttgaatgtgcagtttgaggggaattgtgccgaaaggtggagtggaagagattatcgggggcaggtcacaaaggactcatggtaagaaacaggatttttaaaaaggcattaatagcttcactaaaaccatcactagtaagactgcttctctggttagctaccatttgagtactaattatatgccaggtataggattaagcatttgtcatacttttaatcttaataagagccctacgagagaggtttacccttctagagatgaggaattactatactgttgtgaaattttaggcatcagtgaatttagtatagtttaaagcatgctttgggagaaggtggaggtacttcgcctacatcattcaatt

SEQ ID NO: 301002 - DNA, 619 bp, Homo sapiens
agtcacagcccctaccctaaaactgctgatagaccagaggctgttgcaatcttacaacaggggtaaatacaagcagcccacactaggaccatcatatttattttggaggtgtggtgtcagaggttaatcgaagacagaagttgggtaggctaagagaagagggaaatatgttcctattagaaggacagcatgtgcaaagtctggaagtgagagagaatatgtcacatgaaggaatcttaagcaggtcagtgtatcttgaatgtgcagtttgaggggaattgtgccgaaagrtggagtggaagagattatcgggggcaggtcacaaaggactcatggtaagaaacaggatttttaaaaaggcattaatagcttcactaaaaccatcactagtaagactgcttctctggttagctaccatttgagtactaattatatgccaggtataggattaagcatttgtcatacttttaatcttaataagagccctacgagagaggtttacccttctagagatgaggaattactatactgttgtgaaattttaggcatcagtgaatttagtatagtttaaagcatgctttgggagaaggtggaggtacttcgcctacatcattcaatt

SEQ ID NO: 301003 - DNA, 564 bp, Homo sapiens
atcacaaagctgtagttatcaagacagtttggccattgtaaatccacacccagataatgtttataagcctttgatgattttagataacagtgaactgttaagaccactgaacttcccagtcattagaatttttttttttttttttttttttttgaggkggagtcttgctctgtcactcaggctggagtgcagtggcatgatcttggctcactgcaacctccaactcccaagttcaagcaactctcctgcctcatcctcccaagtagctggaactacaggcatgcaccacatgcccggctaatttttgtatttttagtagaggcggggtttcgccatgttggccaggctggtcttgaactccgggcctcaaatgatcttctctcctcggcctcccaaagtgctgggattacagatgacagccaccgtgcccggccagaaatattaaaagtttttaaaatgtcgttgtggtatgctgaataatggtcctccaaagatgtcactgtcttaagtccccagaatttatgaatatatgaccttatatggccattcatgtgactaaattaa

SEQ ID NO: 301004 - DNA, 584 bp, Homo sapiens
gtctactattttattcctttattacttacaggtctccttgtcattcttttaatacattaggtacattcttgcctcaaggcctttgcacttgctggtccctctgcctggaactttgttgacccagtcctctacattggttcactctcttaacatttgcagatcatttgcttagaggttgccttatcagtgaagattttcaaaycatcttattaaaaacagtattatttttctcctgaccagcacctctgacattttatataacttcatttattttgcttattggctatctcagaaactccaatagaacgtaaactctggaaaggcagaaatatttgcctacttttatattttttccataggatctgaatagtgcctggccagaaatggtgctaaataaatattggttgaataaatagtttatcagagcaaatggtatatttgatataagaagatctctgcccaactcttaggagagaaaactactagttctaggagacaatgacttttatcttttttgcttccagtgtatgtttaacatcttacacagtggctgacatcaagtagatgcttaataatattttatg

SEQ ID NO: 301005 - DNA, 531 bp, Homo sapiens
caagtagatgcttaataatattttatgaatgcctgattcacagataaatccatactagataactctttattaaggaatcacacttaagatcttatttcaattttgtttttcttagtgtgactagaagctaattaataagaaatatcagttacaattgttccaatgaaatgcatatttcttaatatcttttagcaaggctagactagagaacatatcaaaaaaagtttagtagcatttggatattgacacagaaatttgaatggatgatatatggaaatgacaaagagctggaagatattgctcagtcatacctcacattccaagcctgtagttggtgttagcatatcaaacacagtgatgtctgatggagtaatcatttcccaaactgtcagaaatgaaaaagtaatcctcattagtggaatgcatttatcttgcatggaattgatatgtgacagaaactgkgctaagaaattttgtatagattatttcacatattccttcctagaatcctgtgatgttggtaataatagt

SEQ ID NO: 301006 - DNA, 498 bp, Homo sapiens
gaatagacaattctcaaaagaaggtatacaaatggccaacaaacatgaaaaaattatcaacatcactaattatcagagaaaaacaaatgaaaaccacaatacaataccactttattcctgcaagaattaccataatttaaaaatcaaaaaataatagatgttggtatggatgtggtgaaaagggaacactttcacacggttgttggtaatttaaactagtacaactactatgaaaaagagtatagagattcctgaaagaactaaaagtagatctaccatttgacccagcaatcctactcctaggtatctccccagaagaaaagaagtcattatacaaaaaaagatacctgcatacacatgtttatagcagtacaattcacaattgcaaaaayatggaaccagcccaaatgcccatcaatcaatgagtggataaagaaaatatgatatatatacatatatgccatatatatatacatatatatacatacacacacacac

SEQ ID NO: 301007 - DNA, 500 bp, Homo sapiens
taatatttgcatcaccttagaaaggaggagaatgtaggcagccccaacgtaagtaaaaagggaaagcataacagagattcaaatatgttttgrctatggagagttgtagcttttaaatccaacaacatagcagtttcctggtagtgattgaaatacctagaaattcagaagatagtaggcaaagaaagaggtccctgacatccttattcaactagagccactctgaagcttatattttcgagaggtctcctaagaattcatttgaatcaagaattctgcaactaagaattaattctctgagttcagtcatatagtatcaaactacctagcaattagctgtcagtcttcacatccgatagcctgtgcttatgtaactcatacactccattttataaatgttagcctctggttcatactgagggtgtcatttcaaaaaactaaaccagctggacatatctcactggaagtatcaggaaggaaggaagtgtgagtaatatggt

SEQ ID NO: 301008 - DNA, 619 bp, Homo sapiens
taaatgattctaattttcattcaaatttccttccttggtctataacacaggaagaaataactaacataaaattaacagttgctctcaaaactatcaaactcccctgaagaaaaacagggtctccaagtagttatgaagaaaagatttatgttagaaagtttcttaacttttgttttcaaagaaagattctagaagaaaaaaaggagtatggaaaataattcagtaaaaggtgatagtaataaagcaagtaagatggctcagaaaaaagagaaatgtcaccactgagtgtcctaaagattagcatatacagcatcagagtgttctagtctttcaaaaacgtctttttatggtatccacagagaaaaataactattgaccaaaaaaagtcatatttacgtgtctgggacctggatgtggggagcattagtcattcaaagtatgctggaatttggctggtgtggtggcttgtacctgtaatcctagcaatttggtaggccaaggtgggcaggttrcctgagctcaagagtttgagaccagcctgggtaacatggtgaaactccgtctctactaaaatacaaaaaattagccagcatggtggggtggcacgcatctgtaatcc

SEQ ID NO: 301009 - DNA, 579 bp, Homo sapiens
gcacagtatctattcaagacagaattayctggaacgccgtatataactcaaaatttcaaatgggaaaaatagaacagagcttttattcattcatgaaaataacacattcgccattatgtataagccacaatgaaagtatgaccttagaaaatatcaatgtgtattttctaaattatataataataaattttcttagatacaacaaagtacaaaccattttgcattcagtctcattaaaagggggacagaccattgtgtagttcagaattattgctccttcatcagttttaacacattcatatgtggtgcaattgtagtgccaggtactccctacctaaaaatcaaaaagaaagttactatttagcatattaaaatctgctgtatttattaagtacaatattattctattgaataaaaagtcaaatcaagatgcaaaggcttcttgtgacacaaaatgttccatctgaaaatgaccctaagtttatctaaaatgattaaaaatacatacacgtgtatagtgtatacttatctaaaatgataaaaatacatacatatgtatagtgtgtttgtatatgctag

SEQ ID NO: 301010 - DNA, 598 bp, Homo sapiens
agtgtgactaaacaacctggccaatcccttagagttcactttaattgcagcttttgaaccaagtatttagctattttatactgcatcaagggtcctaaaagttgtttatcaggagatttttcaatccatatctaatggtggtgtgggagcctgctaaactaaaattaaaatgctttgtataaaatatgctctaagtagagtaatttactgtccatattgggacatttttgagagagaaaggcaggcattattaattattatgctgggaaaaaaatgaaagtagaccaggacttctatgttgtcacatagctagatgtagacatgaattatggaaacagaattctcaactagacaacaaattatatttcttcctatgtgtacagaaattctgacaagtctaatttctttgtgaagtcatccctgaaggatgagttggaatgcagagagaaatgcaattttaatcaccattaagaaactatgcattcactggcaytcaatcaaactcactctctctaaagatttttctaatcagcaaaatacaggttgagtttcaagaaaatatcaggcttcttaaagctaaaggtaatactgctcatct

SEQ ID NO: 301011 - DNA, 668 bp, Homo sapiens
tgtcaattattcaacttattcctatcaagaagggatacaaaaatagtttttgacctaacatagacatatctgacccaaatgggtttgaaccactagaatataaacttgaagatgtgaaaggctttgttcactgatgtattccaggttcctaaagcagtggatacagaggtatcccgaccttctgacccaaagcaaatgctctattaaaatgtgttatgtgagtaagtgcttcatgctaatttagcaaaggtaaactagttcatggttttcaagaattacaccaaaatattttcctattcaacctttacttaaaatcactaaagcaggcaagtgacagccacaaattttcccmaagctatgacaagtcttctgggtacaaacaacttggtcaggggaagaagaaggctttagaaggtacccacacatttattctgcttcacttaccttgcagaattatgaaatcatcagattgaatgtcattgtagtttccacataggccacatgatttccccttatggtcctcagacagcttgaggtagatcccagatatcccgtcccaagccaatgaaaagccaaaggttgttttcacaagaatgtagtcagctagtttctcaatgaaaatctgtccaattgtctgaggcaatgttaaacttgaaaaacagaacaaa

SEQ ID NO: 301012 - DNA, 462 bp, Homo sapiens
ggctccatgaccccaaaaaggttcagtgttactaaataaaatatactccagagtatgtatcaagggtgttcacattctgtgcctagcttacattttctagactctccctacgtgcccctctgttctctagccattcctaatgttcaaatgttagtgtcttcaaaaaggcttctctagctttcctaggtcagctttgttgaatgtcttttctctgtcctttgcctaggcacatgctgcttgctctacctgcagcatctttctgcctccctactgtcacctgctgactaatttctactccttcatgattaagcccatcacttacccatraccatcggcaccctgagtttgggctaactgatccttctctatgttcccatagtatccacagcataactactctaatggcaattataatgcggcactatcactgttaacttatttgtctcattcttactgagacta

SEQ ID NO: 301013 - DNA, 536 bp, Homo sapiens
gttaaatattcttgatacatccaaatacagttagctgtattttttccaacttctgtaatactcaaataagttaatgatgtcctatattggaaatttagatttttttaaaatagaatttcaaaggatatgttgataaacattatcatacagatatccttatctatacccccgactattttttccatctttaaattctattttatttttatgaaaataatatatgtgtatggtgaaagatttcatcccagaatatatggcaaaaaatagcctctgccttccttcatcctccacccwagcagaagcctggctcacaagagacaattacttcaactaatttagctgtttcttctggtttttatcttacacatcaaaatatgccattatctctttatttttcaaagttaggccttattccttcacttcctgttacggaaaatgagaaattatcttagttatgccacccttcctgctcctaacacacacacacacacacacacacacacacacacacacacacacacttcccttcactcctc

SEQ ID NO: 301014 - DNA, 623 bp, Homo sapiens
ctaacatgttaattaagtacatacgaataccaaagtttgtatcagaaacacataattttcacatgactttacattgctgcttactaacttttttagccaagttctagtagtgttagaaataactattataaaatgtttattttattgaactgtaaaatttaactttggtttatgcttgagatttttccatatggctgttatttttggaatttttttttctttgatatggagttttactcttgttgcccaggctggagtgcaatggcacgatctctgctcaccacaagctccgcctcccaggttcaagtgattctcctgcctcagcctcctaagtagctggtattacaggtatgcgccaccactcccagctattttgttttgtrtttttagtagagacggggtttttccatgttggtcaggctggtctcaaactcccgacctcaggtgatccccctggctcggcctcccaaagtgctgggattacaggcctgagccaccacgcccagccctgacttttggaaatttttaagtcaagcaaaaagtcaaacagttactagattaggaaaaataatcctgaagtatgatttatagatttttcatagtgtaggttaagttatatggga

SEQ ID NO: 301015 - DNA, 563 bp, Homo sapiens
ggttgtctgcaagttctaaagcttcagatgctgtatgtagttggaaagcctggaattcctttttgaattactttattacatagctatatttattagaatttgagtaccctacaaatatgcatacttctaagatgccatcataataaagaccatcaatttggttacatttcagggggaaaggctacactgaaatgaacattgtaagaaaactcaatttaatgataccttggagtatattcttgcttcatgtactgctgttttcattacaaggtaagaactcagattaaatttttatgttaatttattgtatttttgtttctcttacaatttatacaaatagttttcccttataaagcactttgaagtcattagaatgaattgtactaaatgatactcagrtcaccttttaaaaaattcttaataatgtagataatttggaccttttggttttcattttttgactctttgcaaaatggctagttaaaaatcatgcttttattatgatatgcaattgtactagaaccttttagttttcatttcttgaatcttttttaaatgactgg

SEQ ID NO: 301016 - DNA, 591 bp, Homo sapiens
gataaatttgaaataatagcatatataacactaaattccacagaccatgactgaaaaaatagacttgttcataaggctggagaaatttaagaaaattcttattttcaagaaaatagcaggagtttggacttataatatgtaattactacctacrtgcaggtttttaaagaatatttttaaaattatgtttccattttaaggatacatttatttttaggcaatggttctaaatagttcacacataagaaagcaaaagtgagtttcatcatttagatccaacattaagagtggctattttgtgtgaaatttttccattcaacttctcttttaaccaaatacagttttgcaacaagtttgattgatggaatatcatattactataatgttttagctactattatggtttagttcaaagaaaagattttgaggtcatatagacatgaatttgactctttctattacctactgtttgtgtgaccttaggtaatttttttttttctgagcctccatctcttcctttggaaaataataaaatacttaatataattgtgatgattaaaatataatgtataaatagacctaacacataga

SEQ ID NO: 301017 - DNA, 603 bp, Homo sapiens
atttctagtgggttggaggagagctccctcctgtcccgctcatgcctatctatttacctactacagatcattattgctaaaataragatgcaaaaggtgcactgaatattctaaggtctaaaagcttaaatgtttactgctacttgtttatttttcaaaagtgtaaaatatgaattccatggatataatcagtgtaaatgtaatgaaaatttaaacttactcccatggccttttataaagattatttctgtgcttatgctaattcagagtatatattgcaataccaatttctccatcattaacaattaatagcaacataaaaccacagtatttttctgtgatatagatgaaaaactttttaaatatgtacttgatttactttctaagttttaataactttaaaggcacgtataaataaacatgcttttgatcttggtgtatcaagtgagaggagagaatacataattcttctcctgaaaatgtttaagaatatctcatagttactaagcttggcagaatatttacaggaactactcaataacattgtgtagccaagattttaacaaggataatcttataaatactatatatatgccaaaatat

SEQ ID NO: 301018 - DNA, 603 bp, Homo sapiens
atttctagtgggttggaggagagctccctcctgtcccgctcatgcctatctatttacctactacagatcattattgctaaaataaagatgcaaaaggtgcactgaatattctaaggtctaaaagcttaaatgtttactgctacttgtttatttttcaaaagtgtaaaatatgaattccatggatataatcagtgtaaatgtaatgaaaatttaaacttactcccatggccttttataaagattatttctgtgcttatgctaattcagagtatatattgcaataccaatttctccatcattaacaattaatagcaacataaaaccacagtatttttctgtgatatagatgaaaaactttttaaatatgtacttgatttactttctaagttttaataactttaaaggcacgtataaataaacatgcttttgatcttggtgtatcaagtgagaggagagaatacataattcttctcctgaaaatgtttaagaatatctcatagttactaagcttggcagaatatttacaggaactactcaataacattgtgtagcsaagattttaacaaggataatcttataaatactatatatatgccaaaatat

SEQ ID NO: 301019 - DNA, 605 bp, Homo sapiens
gtgtagaaaatcagaaaattgcataaagcacaaaattaagtcaataaactttgtccaaatgtttaaataaacatagtcctaattgcattcaaattgcatccaattgcatcaaatggsaaaaaaagggccctgaaaaacaccttaatgtgctatcttaccttattaggaaacataactgtgaagaagtctttagcaatatattatctccagtttttacctttctattctatttgtccagtgctataagtcacgttatttatttttaactttttctcttcttcaaagagttaatgagttcatgtggcatgaactatacaggtcataaaaaacaaccaggaaatcatttgtgtggttacatacacatttagtatgaaacagatatgagaggcaaaaatggaagcttgaagtgaactagaattatgcagggtccctttacagatgctgtaccagttataatttaatgttttcctgcttcaagtccgcccttctataccctgttttatgatgctgggcttgctcctctgaaatcgacttttctcctttgccagcttctctgttaggctttgccagtagggagtgctaaaggaaaaccgcaaaggtggagt

SEQ ID NO: 301020 - DNA, 594 bp, Homo sapiens
gaactagaattatgcagggtccctttacagatgctgtaccagttataatttaatgttttcctgcttcaagtccgcccttctataccctgttttatgatgctgggcttgctcctctgaaatcgacttttctcctttgccagcttctctgttaggctttgccagtagggagtgctaaaggaaaaccgcaaaggtggagttataagaaaaatacctgccccctcctgttaacctcctattggctctatttctgcttgccgyttctctgagtgccacacctgccacgtcactccagaagaagcatgcccttcccatagcggcaagagactacagttgtcaatttttctaccacttgcagaaccagattcagtgttctctttctgagatggcatctcagtcccacagggcccctacttcctgatctgtacaacagctccagataaacagtgcctcttcctgagaagttaaagccaacctccacaggccttttctttaataatttcagcttcttctgtttttgtcctcaatcctagagatggaaacttctgccagcagtgtgaccgccatgataccttagtgtttactttttaatcttac

SEQ ID NO: 301021 - DNA, 583 bp, Homo sapiens
aaactcttcaagcaatcaaaatacattgcaagaaaaaaggctgcagtgaaataagcaggatatgtgatagaacacaggaatcacaagggaatatatgtgatataatcattatgtaaagagataaaatcacttcagataatgatggattcaagaataactttagcaagttggtgggcaccagggtcaaacataagttaaagaagaaaagatattggtcaggartttgccattatatacacgtagcatggcattactaccttggttttaggtgcagtgaaaataggtctttataaccaggaaaattacaagttttgtttgaaactgttctgtgtgagagacatattgggcctttaagcacagatgttaatttggcacttaaacatagggttctgtggcatacgacaagcaagggtcaaaattgaaggtaaacctatatacacatttcatcaagtagctaagcatagttatacaaaatgactgtaaataatatataatgcacctctgatattgatttccaataccttgctaacagggaactgttagattggttctgcactagcacagcctgtatgtgtcttttcat

SEQ ID NO: 301022 - DNA, 610 bp, Homo sapiens
ttcagtctttaaccctccattaacatttatttataataaatttcatagagtgcttatccaaaaagtaagctcatcatttttactccatgttttctgtttgtttctctttccttgctcaccacattaaaaccttaaatatgccaattagctttgtcctccacgatttattttcagttgacagttttcacctctatagccaatatccttggcaacagtaatcttcttatgcctggacaatcacatttgaattctttgtagtatttctgctgctgttcctttttttttagtatagtccgtgcrgagcagaatttctcaagtacacaaatattaccaaatgctacatttctcaacttaagagacttataattttgattgtaaaagtttaagctctctatagtcttctttcattgtctggatttcctcacatatttttccactcttattttggttttgtttaatagaccagatatttcagtcaattcattttattgatattctttcaagaaatcttattcattcaatttttccatatccaaagctttctcttatttttttttgtttgtcgttcctttacaacctgtggtgcttatccagccctttgaatttgttc

SEQ ID NO: 301023 - DNA, 610 bp, Homo sapiens
ttcagtctttaaccctccattaacatttatttataataaatttcatagagtgcttatccaaaaagtaagctcatcatttttactccatgttttctgtttgtttctctttccttgctcaccacattaaaaccttaaatatgccaattagctttgtcctccacgatttattttcagttgacagttttcacctctatagccaatatccttggcaacagtaatcttcttatgcctggacaatcacatttgaattctttgtagtatttctgctgctgttcctttttttttagtatagtccgtgcagagcagaatttctcaagtacacaaatattaccaaatgctacatttctcaacttaagagacttataattttgattgtaaaagtttaagctctctatagtcttctttcattgtctggatttcctcacatatttttccactcttattttggttttgtttaatagmccagatatttcagtcaattcattttattgatattctttcaagaaatcttattcattcaatttttccatatccaaagctttctcttatttttttttgtttgtcgttcctttacaacctgtggtgcttatccagccctttgaatttgttc

SEQ ID NO: 301024 - DNA, 603 bp, Homo sapiens
tctttcattgtctggatttcctcacatatttttccactcttattttggttttgtttaatagaccagatatttcagtcaattcattttattgatattctttcaagaaatcttattcattcaatttttccatatccaaagctttctcttatttttttttgtttgtcgttcctttacaacctgtggtgcttatccagccctttgaatttgttctgtgaccatctctgctgtactctcttcccaagaaactgatctctagaggggtttcaagtggcacatcttgtccccagcaaaatgaagcactggcaaaattttcatctctcccacactgtctctgccaggctgctgtttgggcattggtggtgttcttctcctcacagacacaactcatttctggagacygttccctcacaaatacagattttgtcaattcgtaatacttctccctcctattgtacataacagtgagggtaacttctcactattcttagtcccttggttgtttcttgatatttgctgccaactatttctggagacatcatgatccgaatcaaagcttaccttcttaatatactaatttgttactcctttaaaaaatgatgatgt

SEQ ID NO: 301025 - DNA, 633 bp, Homo sapiens
taattgcaacctagcgctagaaaaaaaaaatgtttacttggaatattcttggagtttttccaacttatttactgtattgcagtctgttgctcacatcttctggagataaagaaataaatacaacattttttaaaaggcctattgtaagattttattgaaaatattttctctttgctgtaaatcttaattgctagttggtattataaataggaatttttcctttagtcttatgcaatctgttaaaaatgataaaaagtaactacagaacacttattacaraatttttttaaaaaaatgatactgaaggggaaaatatttatacaaagaatacagcaacttattttgactattttatgacaaaccacaggaaaatagagttttatcattagtctaaatattattgttatcaagacttataattgttattaaacaattcaattgatgaaaacaacagaaaaactagaggtaagttaaaacatgtattttacatttaaaaattacaaatgtacttatgatacctcaattatttgatgattagcaaaaaatataagattttacattataaaaatgtgttttaatattattgttctattcagaaaataactctgattcatgttctctgatgcctaattt

SEQ ID NO: 301026 - DNA, 567 bp, Homo sapiens
aacacgaacggactaagacagcaggtaattctttttcagttattagtatcacaatttttcaaaagatatttaggaattaagagtctatatggttttcaaagtaattttcataacaaggacatttaaaatttgctaccccactactaaaggtctttcggtggtcctccacttccttcagaatgatataaaatacatataacatgatttttgtatgcttaaataaaaacccctgggtatatacttgtccacctacattgatacaccgtctatgttaacagctccagagatcctacagaattttgtgctttccaaaatgtattgtgctactttmatctccataaattaatgaatagttcttgctcactaaaacgaccaaaatagtatttttttttaactttcagttagacataaagagcttgtaagttaccactccagtccgcacagtaagagaaaagctgaacaaattgaaaatcaacaactctcctttgatccatcagataattgatgccacaggagcaaactttttctctctaatctcacagaattctcacaaaatactcgtaaaaa

SEQ ID NO: 301027 - DNA, 561 bp, Homo sapiens
cctcacagtaacttgatcttggactatatagctccagagaaataaatttctgttctttataaattacccagtctatggtattatgttatagcaacacgaacggactaagacagcaggtaattctttttcagttattagtatcacaatttttcaaaagatatttaggaattaagagtctatatggttttcaaagtaattttcataacaaggacatttaaaatttgctaccccactactaaaggtctttcggtggtcctccacttccttcagaatgatataaaatacatataacatgatttttgtatgcttaaataaaaacccctgggtatatacttgtccacctacattgatacaccgtctatgttaacagctccagagatcctacagaattttgtgctttccaaaatgtattgtgctactttcatctccataaattaatgaatagttcttgctcactaaaacgaccaaaatagtatttttttttaactttcagttagacataaagagcttgtaagttaccactccagtccscacagtaagagaaaagctgaacaaattgaa

SEQ ID NO: 301028 - DNA, 518 bp, Homo sapiens
acattgcattggaagctctagataaagcaataaaataagaaaatagaataaaatatacagattagaaaggaaaaaataaaactggcttattttttgccagttttattattgacatgatcgtccatgtagaaaatccccaaaatcaaaaacaaacaaatgtaaaaatactcttacaactggtaagtgattatagtaaggtttcaggacagaacgtcaatatgcaaaagtcaattgctttcttatatattggcgatacaaaattrgatgtgcagttaaagacacagcaccatttacattagcatcagaaccattggaatatttaggtataaagttagcaaaaatatattactgctgtatgaggaaaactacaaaactctgatgaaagaaattgaaggtctaaataattgtagagagtctgtatttgcgaatacaaattactcaacattgtaaatatgtcaatttttccaacttgaactacagattcaaagaaatcttaatcaaaatctcatcaaattact

SEQ ID NO: 301029 - DNA, 518 bp, Homo sapiens
acattgcattggaagctctagataaagcaataaaataagaaaatagaataaaatatacagattagaaaggaaaaaataaaactggcttattttttgccagttttattattgacatgatcgtccatgtagaaaatccccaaaatcaaaaacaaacaaatgtaaaaatactcttacaactggtaagtgattatagtaaggtttcaggacagaacgtcaatatgcaaaagtcaattgctttcttatatattggcgatacaaaattagatgtgcarttaaagacacagcaccatttacattagcatcagaaccattggaatatttaggtataaagttagcaaaaatatattactgctgtatgaggaaaactacaaaactctgatgaaagaaattgaaggtctaaataattgtagagagtctgtatttgcgaatacaaattactcaacattgtaaatatgtcaatttttccaacttgaactacagattcaaagaaatcttaatcaaaatctcatcaaattact

SEQ ID NO: 301030 - DNA, 600 bp, Homo sapiens
actacaaaactctgatgaaagaaattgaaggtctaaataattgtagagagtctgtatttgcgaatacaaattactcaacattgtaaatatgtcaatttttccaacttgaactacagattcaaagaaatcttaatcaaaatctcatcaaattactgtggaaacaaactgattctaaaattagtatgaaaaggcacaagatctagaataggtaactttgaagaagaacaacgtcagaggactcccactacctggttacaagtttactgtatagtaacagcactcaagacagtgtagtatttgcaaaataataagyacaccaatccaagctgatagagtccaaaaatagacccacacaaatgtaataaattgatatttgactcaatagtaaagcaatccaatggggtaaggttagtgttttcaacaaatggtgctggaaaaactgaatatccacatacaaaaaaaattaaataatgactttggacactgaccttacatactgtcaaaaattaaagtggatcccagacctaagtataaggtataaaagtataaaacttctagatgataccaggccaaaatcgaggtgaccttatatgtgacaat

SEQ ID NO: 301031 - DNA, 604 bp, Homo sapiens
agattgacaacgcttattctatacttaggtcaatatttaccccatctagtaaataccactctttcccaattattttctcaaaccatgaataacaccctttaacatttccaaggtgatgatctggattttagtatctatcaataggagcggagacttttctttcaacatatatcctttttaataagcggaaatgtacatacacacaaatggttatcttattttttctgtttgagagtcacagccttattaatactccaatagacctggcgcggtggctcatgcctgtaatcccagcactttgggaggccgaggcagtcggatcacaaggtcaggagattgagaccatcctggctaacacagtgaaacattgtctctactaaaaataccaaaaaaaataagccgggcttggtggcgggcccctgtggtcccagctactcgggaggctgaggcagaagaatggcgtgaacccgggaggcggacsttgcagtgaaccgaggtcgcgtcactgcactccagcctgggcaacagagcgagactccttctcaaaaaaaaaaaaaaaaaaaaaaaaaaactccaataatattctacttaagaatatattcaa

SEQ ID NO: 301032 - DNA, 511 bp, Homo sapiens
tactaattgtgtctggtgccaggtgcacaaagcaaatcatttgattttgctttcacagtttttaagaaaaaggaaggtacatttacagagagaatcaccatattgcttctcaagatgtatttattgtttctggggatgatacctgctttttctttttcaatgtgttattctagctcaatttccttatattcttttctttttctcttttattttcatatcgaattgtgatcagaagagcaaatggaatttcattttgcaaagttctctgttgattcctatataaatttcagaaactgtagagactatcaggagactggtgtttctttcttaagaagttgttggtttgatatccttcaaactgagtgagattaatgggcatggatagataagagctcatgagcatgcatattatagctcatcactttttcgttaatgtaagaaccatagctattcacaatgttgtgttattttyttcagctctaatttttattctcctgctatgtctttttta

SEQ ID NO: 301033 - DNA, 540 bp, Homo sapiens
ttatttttccgcatgaatggtctcaatactattattgaaaatcaattgactatagacacattagtttgtttctggactttcagttctattctattgttctttatgttcattcttatgtcagtacaaactgcctggattactgttattgtctaggaaattttgacatagatatgtrtgagtgatttaactttgttcatttttaagattttatttatgggtattttgggtcccttacatttccatatgaatttgagaatgaatttgtaaatttctgcaaagaattcagctaggattctgatagaatttgcattaatatacatcaatttgtataatattgtcattctaataatcagtccatgaatatggattgtttttccatttatttagatctttaagttatttaacaaagttttaagggttaaggttacaagttttgcacttttttgttaaatttatttatacatattttatttttgatgctattatatacaaaattgcattcttaatttcatattcagattgttcattgctagtgtgtag

SEQ ID NO: 301034 - DNA, 546 bp, Homo sapiens
ccccatgaaaaatgcattcatcccactccaaaatttccaaagtcttcactatgtcccaaatgttatctaaatattattaactcaaaaagttcaaactatattatctaattcaggtatgagtaaaactctatgtatgatctattcgcagagtttcttctggtatgacattctgtagaaccttgttagttgtggatgtacgtcaaggagctccatgccattagtcataaataaggattcttcccagatctttcctgtacaactgcatatccatttctggattctgctgggatgatgtagtgaatccataaattgcatgcctaaaacctccagtaaaagtttgtccagccacaccacrgcattctctttagagcatgctttaacatcttttgagataacatataggctgagaattttccaaatcattatgttctgattcttttttgcttaacagtttcttcaatttgtctttctcacattttgctctaagtagccagaagaaaccaggctacacattcaacagttggcttgaaactatcatcagttaaa

SEQ ID NO: 301035 - DNA, 576 bp, Homo sapiens
atgtgacattcttggttggactctcttttctttagaagtgctaaaattaggcccccaatctcttctgacttgtaaggtttctgctgagaagtctgttattagtcttactttattcctttygtaggtgatacaacccttttctctagctgtctttaagattttcctttcatgttgaccttggaaagtctgatgactatgccttggatgattgtcttgtcttgtgtagtatctctcaggagttctctgaatttctggaacctgtatgttgacctctttattatgattgggaacattttcatgggatgtatccttgaaaatatttttcaagttgttaactctcctttcttctatctcaggaaacccagtgagttataggttgctttatataattctgtatttctcagatgctttgttcattttttacaattttttttttttttttttttttttttttttttttgtctgggcgggttgatttgaaaaacgggatttgagctctgaacattttttcccccggattgatctagtctgttgtcaaggcttccaaatgtatttaaaaaatcctttcagtcaagt

SEQ ID NO: 301036 - DNA, 576 bp, Homo sapiens
atgtgacattcttggttggactctcttttctttagaagtgctaaaattaggcccccaatctcttctgacttgtaaggtttctgctgagaagtctgttattagtcttactttattcctttcgtaggtgatacaacccttttctctagctgtctttaagattttcctttcatgttgaccttggaaagtctgatgactatgccttggatgattgtcttgtcttgtgtagtatctctcaggagttctctgaatttctggaacctgtatgttgacctctttattatgattgggaacattttcatgggatgtatccttgaaaatatttttcaagttgttaactctcctttcttctatctcaggaaacccagtgagttataggttgctttatataattctgtatttctcagatgctttgttcattttttacaattttttttttttttttttttttttttttttttttgtctgggcgggttgatttgaaaaackggatttgagctctgaacattttttcccccggattgatctagtctgttgtcaaggcttccaaatgtatttaaaaaatcctttcagtcaagt

SEQ ID NO: 301037 - DNA, 501 bp, Homo sapiens
tcgctcttgttgcccaggatgaagtgcaatggtgcgatctcagatcactgcaatttctgcctcccgggttccagctattctcctgtcttatgctcccaagtactgggattacaggagtgagctaccacgcccaactaatttttgtatttttagtagagatggggtttcgccatgttggccaggctggtctcaaactcctgacctcaggtgatctgcctgcctcggcatcccaaagtgccgggattacaggtgtgagccaccacaccctgcctgttttacaagtttttataattttatactctcacctcctcygagacactttgtattataaccagtctctttaatttcagccattcttagcattctgaagctgcatatcattgtgactttaatttttattttcctggacactatgtcaatgtattttcattgaccaattacacgttttcttgattaaagtttttaaattatttttatttgattatttctcatgtattcatt

SEQ ID NO: 301038 - DNA, 566 bp, Homo sapiens
agaacatcaaaagtttaaaagaaggagaaaaatatagagtcctaaagatggaaataactagctagatgagtaactgagcccagaataaacaaatggctttgcaatggacaattttggaagacctaacaagaattaayagtagaatcttaattaagtcttcaaggtgaattcactatgagtttatacagactttatatgaaagcctcgaaaatgtttcacctttacaaaatgaaataataaaaataattgctatccattagcacttaatatgtgacagttttgacatttgttgatatacatgtacattcattccttggtatctgaagggagttggttcgaggatccacccacggataccaaaatccgctgatgctccactcccatatataaaatggaatcatgtttacatataacgcatgcacatcctcctgtacacagtgggccctctatccatgtgttccttatctgtgaattcaaccaattactgatcaaaaatatttggaagaatttcatttgtactgaatatgtacagagtttttttcttgccagggttctctaaatgatac

SEQ ID NO: 301039 - DNA, 643 bp, Homo sapiens
aaagctttttgtcataaaaagaaaatgaggtttattattaggtacaacagtcaaagaatgaactaaggagcagatcttgttttttgtttcatgtaataccattttaactaatagtgttagaatcagaatataaaacataagcaggaaagcatgtgatatttactaatgactaagcttcccaacatctcaaatcattttgaaatcaaaatatgaatctctgacgaatactccccactcagctctacaaagatcctaaaataaaagatagctctaactatattatttcctcataataacccagcttccctgggataaacatctttcataccaaatagaatacagggacagaaggcaatgtatagaataagaaacataaaagagacagatattttgaaaatctgtttaagagagtatttctaatgacccaacactgtatactatactctttttatttttaaagacaaagataatacaggcagaaatgtaaggaagtgtcattgttattagatgaaatactgtgaattattagtacccgggtgcytaagtgtaacacaatgtgaaaaaggagatacagcatatgttcagcatattggtaataacagataatgtagcacaactggccagaagcctagatctattaaca

SEQ ID NO: 301040 - DNA, 593 bp, Homo sapiens
tttattatatgatattgacatggatgaggtcaaagttataatccaaagtaatagttttcttaatctattaatagtcctgatgtatgaaccaaagtacaatgctatgcagtgtgtttttaggttcattatgtatttgaaaacaattaaaaygtgccaatgtaattgtaaccatatggcaaaaataagttaatatttttcaactctagattcaaattcatattcatatttatcgaagtgaattatttataatgtctcaattaatttagcaaagtcaattactttagttttcttctcatcaaaatttactcgatgaaattattaattttctgtatgttttgtttgtttcctgtaactaatatctctgtgttatggcttcagtagctcttgtgcagatattttgccaaattttgaattttcataacaatttatgaaacatagtaagctgcaaatccactatcagagctcactttttctttttttccaggaagaagaaagagaaatgaaacgaaatatacaattttgcctacattgtggatattatgaactacttttacattacattacacaacttcctctctgaatgattagttatg

SEQ ID NO: 301041 - DNA, 593 bp, Homo sapiens
tttattatatgatattgacatggatgaggtcaaagttataatccaaagtaatagttttcttaatctattaatagtcctgatgtatgaaccaaagtacaatgctatgcagtgtgtttttaggttcattatgtatttgaaaacaattaaaacgtgccaatgtaattgtaaccatatggcaaaaataagttaatatttttcaactctagattcaaattcatattcatatttatcgaagtgaattatttataatgtctcaattaatttagcaaagtcaattactttagttttcttctcatcaaaatttactcgatgaaattattaattttctgyatgttttgtttgtttcctgtaactaatatctctgtgttatggcttcagtagctcttgtgcagatattttgccaaattttgaattttcataacaatttatgaaacatagtaagctgcaaatccactatcagagctcactttttctttttttccaggaagaagaaagagaaatgaaacgaaatatacaattttgcctacattgtggatattatgaactacttttacattacattacacaacttcctctctgaatgattagttatg

SEQ ID NO: 301042 - DNA, 630 bp, Homo sapiens
caaaaactcctctataagaaakatagatcaaaatatttttaccaaaatgtgtgtacaaacatgtatatatgtcatatatatataacatatatattatgtatgtgggtgtgtgcatatgcatatatgcatatacacacatatttctttaaattcatccaatctaaaatgtatctaatttactggtattatgtcaaaatttcctgatatatcattgttgaacacataaaagttttcttggttttggtttagttttattctatttcttaatttataaataatttttcattgtggatatgtcatctgttgtatttagaacatatccaacacctctcagttgtgttaactgaggcataatttcctttgctaaaaattgcaggacaatttggcctccaaatcacagtagctgcattttgtcagtggaccttacatggaaacttttgctgctttagatggaagacttatgttaagttcccatgaatatgatgtaattgagtttccaccaaggtagttgctagaaaataaattaaaactgaggcgatcacatacttaaatttatagtgtgtttattaatttaaaatagttcacattaattaatggctgagtttttacaaatactttgaaatgtttatt

SEQ ID NO: 301043 - DNA, 577 bp, Homo sapiens
tcatggctaatgactgctctatgtggcatatccagcatgctgttctccatggggtcagacttcccacatggcagccagctttccccaaagcaaacatccttagagaaccagagagaagaagcagtggccttctctctgacttagctctggcaaaatcatactattacttctgctccactctgttggtcaaagaaatcacaaggcctgccaagggaagggaattagatttcagcttttgaagtaggaggagaaaggtcatattgtattwaaaaaaaagccctgaaagatggaagataactttgtggctatctttatgactgcattgagctagtttaataattttggcttccaagaaaataatataaatcattctttgttattgatttaacaacagtgcatcaaacaagcttctgcagcaggtaataatgttttagaaatactaattcatagttccaaaactgctatatgataagtctggatgcaggagaagaaacagataataggactgatgaagtgatagttcttttggttaaagatactaatgcacaatgggaagaagcatacaagtaacttaata

SEQ ID NO: 301044 - DNA, 577 bp, Homo sapiens
tcatggctaatgactgctctatgtggcatatccagcatgctgttctccatggggtcagacttcccacatggcagccagctttccccaaagcaaacatccttagagaaccagagagaagaagcagtggccttctctctgacttagctctggcaaaatcatactattacttctgctccactctgttggtcaaagaaatcacaaggcctgccaagggaagggaattagatttcagcttttgaagtaggaggagaaaggtcatattgtattaaaaaaaaagccctgaaagatggaagataactttgtggctatctttatgactgcattgagctagtttaataattttggcttccaagaaaayaatataaatcattctttgttattgatttaacaacagtgcatcaaacaagcttctgcagcaggtaataatgttttagaaatactaattcatagttccaaaactgctatatgataagtctggatgcaggagaagaaacagataataggactgatgaagtgatagttcttttggttaaagatactaatgcacaatgggaagaagcatacaagtaacttaata

SEQ ID NO: 301045 - DNA, 570 bp, Homo sapiens
gtcccaaaggacatggacagcctcataagctcttaaaccagaatttagagaagcttaggttgcaggcagcatcagccacttacattttttttcaggatggggctgagaggaatatgaggaatatactttttggtctgaataagattttttttttcacagaggagatagatataaaatgagcattcctctttggatatatctcctaaaggaacctttcctttaggcagatatcatgmaggtaagccttgtgtgtctgtgtgtgtggttctgtgtgcatgtgtgtttctgtgtgtggggttgggggcaggcaggaaatgtggtgtgtgctttcccatgtgtgaggatggcaaggtgatgtcaaccttactggccaagccagaccctagcagcctttggctacacctttcttctaagccttcctctttcttctaagccttctctttcatccatgattaggtttgcctatacatatcttgttctgatttaggttactttcatctgagtatttgtctatcgttaccactaaccacaggtgtgggaacctcaccctctctccaagttgctactctg

SEQ ID NO: 301046 - DNA, 570 bp, Homo sapiens
gtcccaaaggacatggacagcctcataagctcttaaaccagaatttagagaagcttaggttgcaggcagcatcagccacttacattttttttcaggatggggctgagaggaatatgaggaatatactttttggtctgaataagattttttttttcacagaggagatagatataaaatgagcattcctctttggatatatctcctaaaggaacctttcctttaggcagatatcatgaaggtaagccttgtgtgtctgtgtgtgtggttctgtgtgcatgtgtgtttctgtgtgtggggttgggggcaggcaggaaatgtggtgtgtgctttcccatgtgtgaggatggcaaggtgatgycaaccttactggccaagccagaccctagcagcctttggctacacctttcttctaagccttcctctttcttctaagccttctctttcatccatgattaggtttgcctatacatatcttgttctgatttaggttactttcatctgagtatttgtctatcgttaccactaaccacaggtgtgggaacctcaccctctctccaagttgctactctg

SEQ ID NO: 301047 - DNA, 570 bp, Homo sapiens
gtcccaaaggacatggacagcctcataagctcttaaaccagaatttagagaagcttaggttgcaggcagcatcagccacttacattttttttcaggatggggctgagaggaatatgaggaatatactttttggtctgaataagattttttttttcacagaggagatagatataaaatgagcattcctctttggatatatctcctaaaggaacctttcctttaggcagatatcatgaaggtaagccttgtgtgtctgtgtgtgtggttctgtgtgcatgtgtgtttctgtgtgtggggttgggggcaggcaggaaatgtggtgtgtgctttcccatgtgtgaggatggcaaggtgatgtcaaccttactggccaagccagaccctagcagcctttggctacacctttcttctaagccttcctctttcttctaagccttctctttcatccatgattaggtttgcctatacatatcttsttctgatttaggttactttcatctgagtatttgtctatcgttaccactaaccacaggtgtgggaacctcaccctctctccaagttgctactctg

SEQ ID NO: 301048 - DNA, 484 bp, Homo sapiens
atgagaaacaggttataggaaactggaggaaatggaattcttattataaaatggcaaaggacttggctgaattgtgttatagtgttttgtggaagctacaatttgcaagtaaygacactgaacatttagcagaggagatctctaaacaaagtattgaaggtgtggtttgggtccttttgactgctcatagtgaaatgccaaaagagagaggtgaattgaaaaaggctttgttaaacaaaaaggaaccataacttaaagatctgtaaaattctcagtctgcccatattgtaaaaatgagaaagtgttctgaagagattacaccaagggtgtggctagactgttacctgataaagaggttatgaaattagacaagcagaaacactgccagtttgaactaaagaagatgggcatgggaggctaatgggaactaaaggagataaatgagaaagctacggaacatcttggattttacagaatgggacca

SEQ ID NO: 301049 - DNA, 497 bp, Homo sapiens
aaacatgggtctaaagatcattgtgaggattaaatgagagaatccatctaagctgcttagaacagtgcctggaacatagaaagctatgaattaaagttagctgttttatgtttggtatctcctctaytatttcactgataatttaaaaaaatctcttttcaaactgttttccccactaccaataaatcctttaggataagtgctatagttggttcacttttctaaccctggtgcctagggtagagtctgacatatgatacaggtagatagtaaatatctgttggaaagataaaggtcccaagacagtagggactttgcactgggtcttaggaattcttttctggcactggttctgtcactcatttgttgtgggacctgatccgaggcattccagcttagaacttcagttttctcatctgtaccttataggagcgggcacatagtttctaaatctccctccacttttaactctaagtaattttattacatgtgtatac

SEQ ID NO: 301050 - DNA, 531 bp, Homo sapiens
tgatccgaggcattccagcttagaacttcagttttctcatctgtaccttataggagcgggcacatagtttctaaatctccctccacttttaactctaagtaattttattacatgtgtatacatggctgaactcttgtggataggtcttttgtttgttttgttattgcttatgaaacaagcatttttctgacattcttaattgagtgggaggatatgaggaaggcacagcctggctgttgctttgcaaattaaacatacctgataaatttagtgtagctttcasccatcactacatagaatcatttggaaacttaaaaatactgatccctaggctgaccttaaaaacatgtctgaattaactgatcatattgagtcaggtattttttcgaagcatcctagttgattctaaagtgaagccagaggtaagaaccttgctggcggtaatgcctaatgccacatagttttaaaacaatttgcctgggctaaatggcaaaaacccgtctctactaaaagcacaaaaattagacgggc

SEQ ID NO: 301051 - DNA, 543 bp, Homo sapiens
ttcctggcaaaggccaggatattgggagtgtttgacttaggcaaaatgggtctagcaatatgtttatgtgaaaagaggcatagcacaggacacctggcctggatcaatgctgggaagcacctaaactaatcagccagagtacaagaggtggtcgtggactgggaggaatcaacctgggggcttcaggatacagcagactggccattcrtgggtggctaggcctggagtcatggcagacagacctcagggcagacgaagtgctctcacactgggtagcaagcaagacaggaggtgaggaccaagtggattgttttggggcagacaaagaatcttgaagagcatcaaaagatttctcagtccacagcaggacccttctgacagaggcagtggctgaagcgatacgtggcctctctgtgaagctaacatttccaaacccacgagagacttttccaagaagaattatagtcatccattcagagcagcaggagcttcagaagatctgggacttcaggtgtgagagtgacagacaggacactgaggagc

SEQ ID NO: 301052 - DNA, 633 bp, Homo sapiens
gaatgcccacccacaccagggagagccatctgcttccctcagttcaccaattcacactctaatcccatccacaggcaaccttacagaygcacccagagataatgtttaaccacatatctgggcatcctgtgaccctgtcaagttgtcataaaattaaccaggcaaacttagttttacagtcctcatggcatattgtccatatccttcttaattgtgggcagatgtcagagctcccagaagagttgcattggccttcttagatgcttttctaaatgtattcttcatttaaagcaaaatacaaaaagtatatattgaataaaattttttgttgatcagcatctttcaatttcattactgtatcatcaatttcattactgacatttttcaaatgtttctgtctcattactagggttttcatgtagacagtcatagtgagcaatcatttggtctttcaggccaaatgtcctgattttctacagggcatctgatttcctctttcattccattccacaaagaaagaaaaaaaactggctgagcatggtggctcatgcctgtaatcccagagctttgggaggccaaggtgggaggatcacttcagatcagtaatccaagaccagcttgagcaacatagca

SEQ ID NO: 301053 - DNA, 486 bp, Homo sapiens
catcattaaagatgaaaaagattgacataattttgatgttttaaaagcaataatttttcctaatcttttgaagttgtttcaagatgcattggtcatccatctgggtaggtcttaagtgatgtttctccagtcctgtatttatgttactttctattagttaattcctctctactgaagcttttgctctatattcctgtcctctgcttcttgactgtcctcccttctcatttctgcattttctttccagcgaagtgttattctttctatttcctagcttccatttatcttttaattaaatcaccgggggatgtatcgaaagtccttagggctcactttgagctggggaagtggagaaagctctctcctcattataaacaaatgttaatttagatgaagcttgagaaatatttcctctgcatggtttatttttgaattacttgtaatatcactgttagcrtacatatcctagagagacaaatttttttg

SEQ ID NO: 301054 - DNA, 509 bp, Homo sapiens
gtaatttgcacttaataaatggctgctttatagttgcctgtccctgatgctgaactcaccaggcactacttcatgaagatacaagtgcagtgtgccagctcccctcgttcagatctcctcctgaggacactatcctataaacttggcatgcagtgtacagtaaggwctaagccaatggcctaggagcaagatgaggctttgcacctcagctctgattcttagccacatgcacttgggctgaatttcctgggcaaactttggagagctgcaggagtatgaacaaataatccctttctcagaatactctcctcactctttatctagatatcattctcatccttcaagtctcagcttaatgggctttccctggccccagagccctaaggagccccacgtggtcacagatgtactgagtgccgtgcaggtcaaaggcacagcagatataagtgggaaaagcatgacatttttctctgagaagactgatgttttaaaaaagaaagggaaaaaaa

SEQ ID NO: 301055 - DNA, 509 bp, Homo sapiens
gtaatttgcacttaataaatggctgctttatagttgcctgtccctgatgctgaactcaccaggcactacttcatgaagatacaagtgcagtgtgccagctcccctcgttcagatctcctcctgaggacactatcctataaacttggcatgcagtgtacagtaaggtctaagccaatggcctaggagcaagatgaggctttgcacctcagctctgattcttagccacatgcacttgggctgaatttcctgggcaaactttggagagctgcaggagtatgaacaaakaatccctttctcagaatactctcctcactctttatctagatatcattctcatccttcaagtctcagcttaatgggctttccctggccccagagccctaaggagccccacgtggtcacagatgtactgagtgccgtgcaggtcaaaggcacagcagatataagtgggaaaagcatgacatttttctctgagaagactgatgttttaaaaaagaaagggaaaaaaa

SEQ ID NO: 301056 - DNA, 556 bp, Homo sapiens
catgattaatccaatgcagaacagtaaggggtgtttatgaatcaacaccccaatcactgcccagaaattacattatggtgggagaaaaaagtgaaattcaatcatgatatcatagcagtgtcagtgtgtgggacagcctcatcagctccttctggcatttcacyatcttcaactcaggaaaggtcactgtctcccatgagagatcaggccaagggcccctttccgtcatctgctgttcatttggcagctgctgggtgtgtcttctgaggacccatcacgaggtctctgaattatgaggtgtgcttatatttggctctgaagcttgctgctggacaagctgatttaattccttcagtgtctttctctggcacagaaagaaataaaaaagacataattatattcatttaagaagttccttttttttaaatgtaggcacaacactagtggttacttctcagagaagtggagaaatagaaatagaaatgacttacttgtgtatttgtgcttgtttgtaaatcatacaattttaatgaaaacatatacaataaagctgctt

SEQ ID NO: 301057 - DNA, 627 bp, Homo sapiens
gtggttttattttctagcctgtttgaggatgtgaatatgtaattccagtgcaaacactctcaaccttgtacctgtttattttaggaaatagcatggcaggctacaactcagagttaattgcaacaaacaaatgacagattgttcaaaagtaggatacatgccagaaatacagatgactaggtcttatgtgtctctatgttagattttctatagcctttgattttgctttcaccctttaacgatttctttcacacatcaccagatgctgctcttacagcttctagtgagaagacaaagtatatttcagcagtggaggctgtgaagttagacacatctgggtttcaatcttggcttcatcaagcctcggttttcacccckagcaagttatttaatttttctaaatctcaatttcctaatccgtaaaacaatattatgcatcttataaattgctattaggattaagtaaaataaagtatggaaaggacctatctttgaaccttgcaaggaataatcctcaacaaaattataatattttgaaactctctgaggcagtgacttctcttgttgtaacaacatctgacgtcaaagaacaagtgggtttgtaattacatcaattctcctctttgg

SEQ ID NO: 301058 - DNA, 627 bp, Homo sapiens
gtggttttattttctagcctgtttgaggatgtgaatatgtaattccagtgcaaacactctcaaccttgtacctgtttattttaggaaatagcatggcaggctacaactcagagttaattgcaacaaacaaatgacagattgttcaaaagtaggatacatgccagaaatacagatgactaggtcttatgtgtctctatgttagattttctatagcctttgattttgctttcaccctttaacgatttctttcacacatcaccagatgctgctcttacagcttctagtgagaagacaaagtatatttcagcagtggaggctgtgaagttagacacatctgggtttcaatcttggcttcatcaagcctcggttttcacccctagcaagttatttaatttttctaaatctcaatttcctaatccgtaaaacaatattatgcatcttataaattgctattaggattaagtaaaataaagtatggaaaggacctatctttgaaccttgcaaggaataawcctcaacaaaattataatattttgaaactctctgaggcagtgacttctcttgttgtaacaacatctgacgtcaaagaacaagtgggtttgtaattacatcaattctcctctttgg

SEQ ID NO: 301059 - DNA, 474 bp, Homo sapiens
tcctaggcagaaaggaagaccccctttccagctttctgggatgtctggctagcacctgttgagagatttggtcaatgaaatctggacagaaggatgtcgaggcttggccataggtgcagctgtgaggccctcatagcctctctttcctctctgtggaagtcaggcagcccatatatctaaaatggcagcatcatgaagcagagggaagctgagtttttaactcaccacttggactcaagctgttgtggagaaccatagaccttcactgtgttaaaccattaaaatttggaagttacctattgcagccaccatcaattatgtgaagagtatgatgttcactctggtaagggaaagcagatatgcagggaacagtgtactgtcatgtaacaggtgctgtgacagaaatatccacagtgatatggaagccaaaaggtaggaggkgtgggttactctgtgagtaggaagagaaacatg

SEQ ID NO: 301060 - DNA, 560 bp, Homo sapiens
gccctccccaacacttcttgcaatgtgcagagcttaagcacctattgagtaaaccattattcactgaaatttctttcatgtgtacccaaatgcctcctgtcaccattcattcaacaagaatttattgaggaccagttgtataccagacgcttactttaggaactagagatataagagtaaaagtaatctctgttgctgcgagacttactttctagtgaaaagagaaagaatatttcttaaaatattaacttttgaatttctgtacgtagccatgatggggtaactggtactaaatttgccctgctcctgtagtcaactagaaaactcaagattcttgcagaaggcaggcgaggtgataagatatggagggtggggaatgaagaatttgattttataytgaggtcagggagttttctaaactgactcagcagggtttttgctaaaactgggccaagtaggccacgaacagagtccaaggtcagggttttaaggacttaaaggagtttcactaaagctaggtcaaggagagcatctttgttaactcccagggaaagaataac

SEQ ID NO: 301061 - DNA, 602 bp, Homo sapiens
gaacagtataatctggatgaattatgcattctctgcactttaatacataatgtgtgttctgttgtttattccagagcaagtgttcatactacaagaagtatgtccctagagttgatgtaaaaggttcagcaatgtctctttcattcttagaatattattagagtgctgattattaacaggaaatactgaatttaatttgaacatactattctttttaagagtgtttcccygccttatggagaaagcatgttaggaaaacaggattctgttttctatttactgtaccttgtcctctttcacttgaaataagcagaaggaggagaatggaaagacacagagatcacagagtgcacatttttgaaaatagctctgacttggtgtggcttatttcagagccttcatttcacctggaaagccttcttagtatactgcaaaaatatcaatcctggaaaaatctctaaacctcaggcaaaaatttttccaaacttctgattcactctgctaattccttttatctttggcctttgcctatccttataatttctaacaaagtgaaccaatagaaagacagaagttcgatttcagcatggaagcaggcagaa

SEQ ID NO: 301062 - DNA, 540 bp, Homo sapiens
aaagtttaattctttaagccatttgctcctmctgctctcaattatagcagcaaaaacaatataatggagttttaaaatccagttaggtacatttaaaatcaaaaattaagaaatgaattatatttttgcctttaatataatcccaaaatcactaaaataaaaaaaactttttttttttttagttttctttatgcatttttccaaaaatgcagtttaaaagttaataaactcagctacttgggaagctgtggcagggggataacttgagtccagaagttcaagcccaacttggcaacacagtgatatccagtctctatttaaaaaaacaaaatagttctagatccctgaggaatcgccacactgacttccacaatggttgaactagtttacagtcccaccaactgtgtaaaagtgttcctatttctccacatcctctccagcacctgttgtttcctgactttttaatgattgccattctaactggtgtgagatggtatctcattgtggttttgatttgcatttctctgatggccagtgatg

SEQ ID NO: 301063 - DNA, 574 bp, Homo sapiens
gtccattgttgactgaaatgtctttagtggcgcatgactattccatttttatattaagaaacatttattggttacctgctctttctgacagtcatggaggttaaagtaatgaatattacagtgttcttgctcctgagatgttctctgtctaatgggacaatggatatgtcaacaagtgtgcttcatgaccttacaggtgacttgactttgagctgagtattattcaagcatactcaaaatgacaaactattggagaaaaatcacatacacgttgaactacatagacaaaggatggaaaacactgctacatttaatcctaatacctgcaaataagaacttaaaataaagaaatatagaaaaacgactaaatttttggttagtttttaaaataaaataactaaaaaacccccacygcttttctaaaacacagatgtggccatttctgcaatagatttatggtccttttacgacccattaaagtcactgtatatgactaatcacagacccagaagcccaggcaatgagagccaagaattagtcctccccagggtccgttattctgctcaactgaact

SEQ ID NO: 301064 - DNA, 599 bp, Homo sapiens
ggtatagcaataaagtcagcattaactacttaatgtataagagtcctgggtctcttttcggggttcaaaaggctgaatagcagcttatctctsttgttgaaggtcaacacaaacatgattatgaaagcccctaaactttccccaaaagtagaaacatattacatttaccaaagcatttaaagcaaagaaaaatgagatcctttccagtctgttgcataccccttcaagaataaaggattcttgatggcttccttgctattggacatgtgcctcccctcttgctgcagctccatcttcaggtccattttgctcatgcaaatggaacacgcaaatgtggactagcacctcctctttgctgtgtagtttcaagtcaatcctctcaggcagaccctctcacaaaattgagatgtgctgacatttaaaatgccaggctgtgtttattgagcaagagggttcataaaagtttattttgtcatcacaatttaaaagaccaaacatccccttggcagcattgctcggatgtctaaagagcctcacagagagtgtgaactgatgaaaattcctgatgaaatgtttatggaagcagcagggctggtaag

SEQ ID NO: 301065 - DNA, 631 bp, Homo sapiens
gacttattctgctgttaggaaaccattttttaaaaaaattttgcaaaagggttgctaatggtagaatgatttatcaattttcacaaatacagtaccctttcttcctcaacttgcccccgccatacatctgtaagatgttacgaaagtaacaagtaaaaaacttttaaaattaccaagtctttcaaatatatatgtgtgtgacagtatgtgtgtttgactatatatacacacatgtgcctrtagtacatgtatatatgcaaatataagtgtgtatatgtgtatacacatacatatataataatacactatatatatatatataaaattcaattttgtatatatacaatcctggatttcctggactttattattttatgtacttatgttcattaagaagttagtgttctccccatatcccttcttcctttttcctcccatggtatctgggctaaacttaccctacactatccacacacatcccacacttccaggtttgaggaggaggaaagttaccatgctttgacattgtatttagttataataacagaattcaggcaggccaaaaactgatcccaagaaaattacctttttttaatcctagttcttcagcaaccaggttgctgtgtgtgat

SEQ ID NO: 301066 - DNA, 561 bp, Homo sapiens
agaggggtaagacaggcaatgccaacaggactttgagcaaatatggtttagggaactcaagggctacatgcctgagtcaacaactggacctgttactccaataacacatccctcaggtgggttggttcagtagtccacattctcctgattcaagctgtacctgcccctaattatgtcctcaccttttcgaattataatacctggttgctttcaacagttttctgtaaccytgatatatgttcttttatcacttgaatgtattcaacttaatcacttactgcctgattgaattctgcattcctttcatattattctctacctattattctataaacacgattatcatttcattaaaactcagattcttctttcatggttgcctgggtcttcagctataacactaagtgataacagtattttgttttaagattggatacatttttgaggaatagacagggagcagagatggtttaatgttatcctattgatgagaatattgaggcacaaagaggagaaacagcttaactagagttagctcactttagtagtcaatagagctcc

SEQ ID NO: 301067 - DNA, 549 bp, Homo sapiens
ctggcatttatcattttttaaagtagtaatatcataaatcaatcattgacaatgactgatagtcctcctgggtcccaagttcctactctttatagtaaattagaggcttatcggggcaccttcattttttttttttccagattcctaatttaatgctgaggctatcattacttcacctccctaaagcaaccaacactcagaagcaatttagatcctgggaaatctttatgtagctcaagcaagtcacaaaacaatgtttttctaaatttttcgtcttcagtagaaatttctaaacatatattgatgaaaaaataggtggtgggaactttgaggactgatccaaatgtcatacatttcatatcaagccagatcagtaacagttggtaccaagmtgccagtttgattgaggacataagttatattcagcctatcatttggtttccaggactccagtctccgagttactcttatgcagttcaaagagaaagttgttcagaagagctgttatggtgtttaaagagactcactgtaaggaaagccaggagatgg

SEQ ID NO: 301068 - DNA, 483 bp, Homo sapiens
ttataggtttatacttaggtatatcattttgagggtgttaatataaatgatactgtgtttttaatttcaaagtctacttgtccattactggtatataggaaagcaataaacttttwtatattaatctgtatcctgcaacttagcttactgatgccaggagatttttgtcaattcttttggattttctacatagattatcatatcatctgtgaacaaaggcagttttatttcttccttcccaatctgaataacttatttccttttcttttattactacattatctaggacttttactacactgtttaaaatcagtaatgagtaatatatctttgctttgtccctgatctgagtagaaatacttcaaatgtctcaccattaagtttgttagccgaaagatttttgtagatattctttatcaagttgagaaagttattttctatttctagtttactgagagtttgtaatcaaaaaagagatgttag

SEQ ID NO: 301069 - DNA, 483 bp, Homo sapiens
ttataggtttatacttaggtatatcattttgagggtgttaatataaatgatactgtgtttttaatttcaaagtctacttgtccattactggtatataggaaagcaataaacttttatatattaatctgtatcctgcaacttagcttactgatkccaggagatttttgtcaattcttttggattttctacatagattatcatatcatctgtgaacaaaggcagttttatttcttccttcccaatctgaataacttatttccttttcttttattactacattatctaggacttttactacactgtttaaaatcagtaatgagtaatatatctttgctttgtccctgatctgagtagaaatacttcaaatgtctcaccattaagtttgttagccgaaagatttttgtagatattctttatcaagttgagaaagttattttctatttctagtttactgagagtttgtaatcaaaaaagagatgttag

SEQ ID NO: 301070 - DNA, 483 bp, Homo sapiens
ttataggtttatacttaggtatatcattttgagggtgttaatataaatgatactgtgtttttaatttcaaagtctacttgtccattactggtatataggaaagcaataaacttttatatattaatctgtatcctgcaacttagcttactgatgccaggagatttttgtcaattcttttggattttctacatagattatcatatcatctgtgaacaaaggcagttttatttcttccttcccaatctgaataacttatttccttttcttttattamtacattatctaggacttttactacactgtttaaaatcagtaatgagtaatatatctttgctttgtccctgatctgagtagaaatacttcaaatgtctcaccattaagtttgttagccgaaagatttttgtagatattctttatcaagttgagaaagttattttctatttctagtttactgagagtttgtaatcaaaaaagagatgttag

SEQ ID NO: 301071 - DNA, 510 bp, Homo sapiens
gggttaatattttttattttccagctatttttggaaaaagtcagtttaaacaggtgcctctaagtcaaagaggcataattagtgatcatttgataggacttggtgtagsccttttggtatagatgactaatgactagtagcaaatccttttgtgtgacatggattccatttctttcccttcagaaaataaaaggaaaaactaactgagtcatcaaatgatacaaccattaaaataattggtaatcaccataggatttatttggcatataacccaggagctcacaaactgagtgacattgtaataataacattctgtgcacttctccacatatgcatttatgtaagcaaaatagcttgggagcagtgtagaagttttttttttttcaaaaagtttctagaattgattctgaagcatgtcttggtacaccaataaataatttttatccacagatatataagctgttttaaaaagcaccaattgctactattatatactaaaatcactctact

SEQ ID NO: 301072 - DNA, 622 bp, Homo sapiens
taatataaagtcaaagagaaaaagttacagtgtaaaacttccaaccactaaaaaacttagtcacatatatcttaaatggatgatgatgggtatcaaattaccatggtaattaaatccagtgcatgcatttaagtggtaatgtgaaaatttcatttaaaatcatcaatatttataatactcaagaaattgcaccatcatagatatttaaatttatgatgaagaattttagatgccaacctaaaaatatgcaataaggtataatttttcaaacttattttatggagtatagaatacacaattttgaagaccagtaacttagaatataggcatatgatccttttctttgggtttcagttgcttcatacagtgtttggacggtagttagaattattcatktcgggtgctggaagagtggatgtatcacagtgctacaagggggcgcaccctgatgtcagatccctgggttcacattccagctctgtcacctacaaagctgtgtgacagtaggcatgtcagctaacctcttatccttcccctcattgaagcaatgatgaggtgaggatgactctagatgatgtatgtccaatgttcaggacccacatatcatccatttagggtaggt

SEQ ID NO: 301073 - DNA, 561 bp, Homo sapiens
gctgattcaatttttgattgaatactaaattcagttcttgcaaatctttgtctcacttctttcatttgggttggaggctatggcgggagattctgaaactctttgaagtgtattttttagattatttttaaacttaccaaaaagtgacttcatcattttacccaaagatttagagggtaatttgctttgtctttgaagtttaatagttgtttttaggatgtgtatcagaacgtatcgttttgggtttattctctccacattcactgtgggtcgtttaacatctacatttaagtctttacaattcaacattctgccctagaattgtttttgtttttttgtttttttttaataatgttaagcattagttcaatctattgcttggtttttcttctgcagacattactgtgttagacctttttctgtatttatttctatatcattttatctgtaatttttaaacttttttgcawgtttttttatacctcttttcaatgcatctcagtacattttcagttgattctattcctccctagatatttgtaattagtgttcatttccgat

SEQ ID NO: 301074 - DNA, 578 bp, Homo sapiens
gcttcttgtggatgagtaaaaaatgtgaagtggtttttttttttttgagaagaaatctattcctggtgaagatgtgaatattgttgaaatgataacaaagcctttcaaatattagataaacttagtagataaagcaacagcagggtttgagagaattgactctaattttgaagttttttgartaaaatgctatcaaaaagcactgcatgctacagagaaatctctcatgaaaggaagaattcattcatgtggcaaactgtattgttgtcttattttaagaatttgccactgccaccccaacctttagcaaccactactctgatcagtcagccgccatccacataaaggtaagacccttcatcagcaaaaagattatgacttgctgaaggctcacataatcattagcattttttaacaataaagtgttttcaattaagctgcgtacactcttttaaagacatgaagcacacttaatagactacaatataaacaactttaaacgtactgaaaatccaaaaactttctgggacttgctttattgcaatatttcttttattgcaatagtctgcctctaaacc

SEQ ID NO: 301075 - DNA, 578 bp, Homo sapiens
gcttcttgtggatgagtaaaaaatgtgaagtggtttttttttttttgagaagaaatctattcctggtgaagatgtgaatattgttgaaatgataacaaagcctttcaaatattagataaacttagtagataaagcaacagcagggtttgagagaattgactctaattttgaagttttttgaataaaatgctatcaaaaagcactgcatgctacagagaaatctctcatgaaaggaagaattcattcatgtggcaaactgtattgttgtcttattttaagaatttgccactgccaccccaacctttagcaaccactactctgatcagtcagccgccatccacataaaggtaagaccctycatcagcaaaaagattatgacttgctgaaggctcacataatcattagcattttttaacaataaagtgttttcaattaagctgcgtacactcttttaaagacatgaagcacacttaatagactacaatataaacaactttaaacgtactgaaaatccaaaaactttctgggacttgctttattgcaatatttcttttattgcaatagtctgcctctaaacc

SEQ ID NO: 301076 - DNA, 578 bp, Homo sapiens
gcttcttgtggatgagtaaaaaatgtgaagtggtttttttttttttgagaagaaatctattcctggtgaagatgtgaatattgttgaaatgataacaaagcctttcaaatattagataaacttagtagataaagcaacagcagggtttgagagaattgactctaattttgaagttttttgaataaaatgctatcaaaaagcactgcatgctacagagaaatctctcatgaaaggaagaattcattcatgtggcaaactgtattgttgtcttattttaagaatttgccactgccaccccaacctttagcaaccactactctgatcagtcagccgccatccacataaaggtaagacccttcatcagcaaaaagattatgacttgctgaaggctcacataatcattrgcattttttaacaataaagtgttttcaattaagctgcgtacactcttttaaagacatgaagcacacttaatagactacaatataaacaactttaaacgtactgaaaatccaaaaactttctgggacttgctttattgcaatatttcttttattgcaatagtctgcctctaaacc

SEQ ID NO: 301077 - DNA, 578 bp, Homo sapiens
gcttcttgtggatgagtaaaaaatgtgaagtggtttttttttttttgagaagaaatctattcctggtgaagatgtgaatattgttgaaatgataacaaagcctttcaaatattagataaacttagtagataaagcaacagcagggtttgagagaattgactctaattttgaagttttttgaataaaatgctatcaaaaagcactgcatgctacagagaaatctctcatgaaaggaagaattcattcatgtggcaaactgtattgttgtcttattttaagaatttgccactgccaccccaacctttagcaaccactactctgatcagtcagccgccatccacataaaggtaagacccttcatcagcaaaaagattatgacttgctgaaggctcacataatcattagcattttttaacaataaagtgttttcaattaagctgygtacactcttttaaagacatgaagcacacttaatagactacaatataaacaactttaaacgtactgaaaatccaaaaactttctgggacttgctttattgcaatatttcttttattgcaatagtctgcctctaaacc

SEQ ID NO: 301078 - DNA, 483 bp, Homo sapiens
ttagttttccagcagagtggaaagaaacaagcagactaaataccttttgtgctcaagtacatactatatgatttttaagacagccatttccctgttcttggagaagtggacaagagcagaggtttatggagaaatgactcaaaactaattatgtcagaaaaaaaaagtgagaatagcatgcacaatttcaattgcttaccayatgttttacttacattcaccctcttattaactcttcagcttgattctattagctgtgtatttctatccatgctatattcaattaaatggagattaatgtaagatatttggtctaagatacacacacctggttagtgacaaaatcagggatttgcctgtgccctttatgttgtatcttgttgtctgtactcattactctcattaaattctggcttatctacaaccttggagtgttctgtgtttgaggattatggcatgtaagtattaaaggttatgcttggg

SEQ ID NO: 301079 - DNA, 483 bp, Homo sapiens
ttagttttccagcagagtggaaagaaacaagcagactaaataccttttgtgctcaagtacatactatatgatttttaagacagccatttccctgttcttggagaagtggacaagagcagaggtttatggagaaatgactcaaaactaattatgtcagaaaaaaaaagtgagaatagcatgcacaatttcaattgcttaccatatgttttacttacattcaccctcttattaactcttcagcttgattctattagctgtgtatttctatccatgctatattcaattaaatggagattaatgtaagatatttggtctaagatacacacacctggttagtgacaaaatcagggatytgcctgtgccctttatgttgtatcttgttgtctgtactcattactctcattaaattctggcttatctacaaccttggagtgttctgtgtttgaggattatggcatgtaagtattaaaggttatgcttggg

SEQ ID NO: 301080 - DNA, 561 bp, Homo sapiens
agaatgagacctttctgcttctatccagctgagtaattaraagtctaataatagcaaatttagaaaataaattatcccctgtgcatactgtaccctgcatcatataaaatggttcatatgcatcacatagtatcctgtgtgaatttaatatgaaatgtgggatttgggaatgaataagtggaggtgtgcagaatctttcatcttcagccatatattttaaatttgagaacacaaagaagtcaaatgtagagcaactgcccttacttttaaaagatcgacttatcaaagtcacaacttctcacagccaactctccagtgtcctcctaattaacaaacccattatattttagttctaattttaaaatgtaggtatttaaacatttcagcatggtaactagaacattctcaggagtacagaaaagtgtattaaagacagctgttcaacatcaaaacaatgaaagaactggtgagtttagtcagcatggctgttggactgcatggcagactctttagcttcttaccaattggctaagtaccagaagtatcaagtttttaagtgtg

SEQ ID NO: 301081 - DNA, 561 bp, Homo sapiens
agaatgagacctttctgcttctatccagctgagtaattagaagtctaataatagcaaatttagaaaataaattatcccctgtgcatactgtaccctgcatcatataaaatggttcatatgcatcacatagtatcctgtgtgaatttaatatgaaatgtgggatttgggaatgaataagtggaggtgtgcagaatctttcatcttcagccatatattttaaatttgagaacacaaagaagtcaaatgtagagcaactgcccttacttttaaaagatcgacttatcaaagtcacaacttctcacagccaactctccagtgtcctcctaattaacaaaccmattatattttagttctaattttaaaatgtaggtatttaaacatttcagcatggtaactagaacattctcaggagtacagaaaagtgtattaaagacagctgttcaacatcaaaacaatgaaagaactggtgagtttagtcagcatggctgttggactgcatggcagactctttagcttcttaccaattggctaagtaccagaagtatcaagtttttaagtgtg

SEQ ID NO: 301082 - DNA, 610 bp, Homo sapiens
ggggtggggaacatcacacactggggcctgttgaggggtggggggaagggggagggatagcattaagagatatacctaatgtatatgatgagttaatgggtgcagcacaccaacatggcacatgtatacatatgtaacaaacctgtacattgtgcacatgtaccctagaacttaagtataataataaattagatagggtgtttagcccacaagctgcccatacagggactaggcaaaagakaaccatgatcaccattattctgagcagtagattttgccactggggagaggagaatgctcaaggttcactttctgtctttgcaaatcgttaactgaaccatggctttcccctcccaacattatggtggtgaccatgtaaatgatctcacagctgttgtgtaagatatctatcctgcctcaggcactactaggagtaggattaccagatagatacaggattcccagttaaatctgaattttacataaattttagtataaatatgttctaaaaattggatgggacagatttctaaaaagttatttgtctgtaattcaaatttaactgggaatcctgtatttttatttgttaaacctggcaatcttaaccagc

SEQ ID NO: 301083 - DNA, 634 bp, Homo sapiens
gctgacaggttaagtgatttgccccagttctgtagccaggaagtagtagagctgggattggaatcyagatcattagatggtgtagaagttagacgactccagtaattgaggatcagaaaacaggttcttgccctgtttttactacttagcggccaagtgatcttagacaagctacttaacttcacatatgtaatatgattagaataaaactaatatgtactttgcagggctgtgtcagaactgagtgaaatgaatgaaatcaaataataggttcttaagaaatgtttgttgaatggattaaaaaatgtcagggagcattttatatatcatactttcagtccttactgcaatttgtctcagtatttcttcctagtttaggtgacagaccaaggagcacagtgcatagataactatggaggagggctggttttttcatttaatttaatgtgaagttaatttgaactttgacgtaagagaagaatctaagtctttatgtttccaccatacactagagttagttcacttcttcttagtacttttattatacttccaaattttactatagaaagcatgtcaaattttgaataagctaggaaataattagattaactcgttgaacattagagtttgcctt

SEQ ID NO: 301084 - DNA, 634 bp, Homo sapiens
gctgacaggttaagtgatttgccccagttctgtagccaggaagtagtagagctgggattggaatctagatcattagatggtgtagaagttagacgactccagtaattgaggatcagaaaacaggttcttgccctgtttttactacttagcggccaagtgatcttagacaagctacttaacttcacatatgtaatatgattagaataaaactaatatgtactttgcagggctgtgtcagaactgagtgaaatgaatgaaatcaaataataggttcttaagaaatgtttgttgaatggattaaaaaatgtcagggagcattttatatatcatactttcartccttactgcaatttgtctcagtatttcttcctagtttaggtgacagaccaaggagcacagtgcatagataactatggaggagggctggttttttcatttaatttaatgtgaagttaatttgaactttgacgtaagagaagaatctaagtctttatgtttccaccatacactagagttagttcacttcttcttagtacttttattatacttccaaattttactatagaaagcatgtcaaattttgaataagctaggaaataattagattaactcgttgaacattagagtttgcctt

SEQ ID NO: 301085 - DNA, 536 bp, Homo sapiens
tctgcatggggagcaaagatttacacatgaataaaaccaaatgctagagtgcagcctggagacaattcacttagtggaaattctaaggagggactcgaccactagagggccggagtcagaggtgaggaggtcatggggtgcctcagcctcagttggacttctcactttctgcagtggatgaatacccaaagctytcgcctgttggacgaagtccctgtccgaaggaagcagagcccccatctgcctgctctgtccctcctcgtgtccagtcccttccccattcctccagggccaaggaggctggtggaaacacctccaggtaatcagctcactggggaagacaactctgtgaaaagtaagctggattaaatggaattttaattgaactggatgctcaaaattaaatgctctctcagtggctgctcctagagggggcacactttgagccaactcatttataatcccaaccattatgccatttgaaagaggatgggttttctagattggaacaaatttgaaaaaaaaaaaaaaagaaa

SEQ ID NO: 301086 - DNA, 331 bp, Homo sapiens
gcctgactgctcttcaaaggctgatgaaatccacatttatttgagagtaaacctatgaacttcccatcacacaattctgattccacactgttgcccakgctattgagataacagtatcatttattccaacattctggcttaattgacacaaggactgagagtcatcaggaaacaatgaattgcacatttacaataagcaaagtgtgaacattgggtagaaaccagggtctgactgaatacacctctaacatgttcagcttttggaataagccaaactttggtaatcaaaaatagttttccttatttgttattctgccactgagtagcaaca

SEQ ID NO: 301087 - DNA, 504 bp, Homo sapiens
aacatgagatttggtggggacacatatccaaacgatatccccacctaaacagagctctaaatatttatctataaatgcattttataatttattgataaatttaaatatcagccaggagattatgattttaattttttttttactttcccttctttctaaaatatgtactttaatattatttctgtggttcatagtattcattggcatgataaatgtctcaaaccatgctgataagaaacctttatcttgagcaacaagcattttcatccatttatttaagtcatataatcaatcaatcaatttttaaaactcacactcaaaaaagagtaagtcgataactttgacgaaaagcaccaggtttctttattcagcaatgcaaatatgatctcaacacaggtacagccagtatgagctattaatactttcaagttcacagtatgagataatctatccattaggagaacrtgatctctttgctagaactgagaagttaagtttcagttc

SEQ ID NO: 301088 - DNA, 605 bp, Homo sapiens
gtagtgggcttgccacgagtttccatgtcgtaacatacagacatcttccatcatatctttgatgctagaaattaggtgatgtttttggcaacaagggccaatgtgctctgggaagacaacaattgatatatatacaaatgcagaaaaaatatcaagaaggaagcttgctcctccttaaaaaataaaaacaccctgggctaacaactggagacctgttgtctttatcttagttctgtttktttgaatattgagactttggaagaagttcataaaatcttaacatttcttcaaatatcttctgatttaatttttaaagggattctgtgtattaaacaggaccaagattattatcttctttttgtgaatgaggaaactgagaaagttcaatactgttgacaattaaaatcatggatctagtgaattgacagtctttaacaaccccaagacttacaaacgtgttcctgtaatctagtgacaaaggcatataaagaaaatggtgaggattaataacaataatacaaatatctgttaaagacccacatcttcccagaaaatgtattggatactctcacatatattttcatttaattctcatgacagttctt

SEQ ID NO: 301089 - DNA, 586 bp, Homo sapiens
ttaggtgatgtttttggcaacaagggccaatgtgctctgggaagacaacaattgatatatatacaaatgcagaaaaaatatcaagaaggaagcttgctcctccttaaaaaataaaaacaccctgggctaacaactggagacctgttgtctttatcttagttctgtttgtttgaatattgagactttggaagaagttcataaaatcttaacatttcttcaaatatcttctgatttaatttttaaagggattctgtgtattaaacaggaccaarattattatcttctttttgtgaatgaggaaactgagaaagttcaatactgttgacaattaaaatcatggatctagtgaattgacagtctttaacaaccccaagacttacaaacgtgttcctgtaatctagtgacaaaggcatataaagaaaatggtgaggattaataacaataatacaaatatctgttaaagacccacatcttcccagaaaatgtattggatactctcacatatattttcatttaattctcatgacagttctttaactgagatttcttctgtttttgttttgaacaaatgtagaaaagagactat

SEQ ID NO: 301090 - DNA, 581 bp, Homo sapiens
gatggcctgaagcctgggggctaagctttcacttctgtgatccagagtgagaagttatggtgctttctctcrcctgcctatggctgcccacagtccactcaacacacactttcttcctttggaagcccataaaaaccctggactcagccagactggggagacaacaggacttcctgcctgcaaataggagctacccactctgggtctattctccactaagggcttcagatattgggacaacatgcctgcagataggagctacacactctgggtctcctctcctgagagctgcactcactgggatgatctacctgcagaaaggagctacccactttgggtctccttaaagctatactgttactcaataaagcaccccttaaccttgctcattctacagttgtccatgtacctcattcttcctgagcatgagataagaacttctgacactgagtggtgagagtggaagagctgtaacaaacagggctaaaacacgcctctcaactacactcaccatattgctggcaatgagaaggagagaagagtggcaaccctttggggagcccagacctatgggtgctccg

SEQ ID NO: 301091 - DNA, 564 bp, Homo sapiens
gcctgttaccactgcctggcctctccctgctcctggtgcccactctgattttggagcaaagttgaggatgaccctgggtgctgttgtgacccaggcagatgtgtgcacacttggggtggtgctgacacagcagtcccctgtcaccttggctccctctggactttgggcaccaaagagcacaggagagagttgagggaaatctgagagtggctcagcatgggcctgcaggaacccctcagcatgaacagcctgggtgctgtggacagcatattgatggtggcaggaggcagacaggatcctggacagaagacagtggctccccagtgaagcctcaccttcaagccagggatggcctgaagcctgggggctaagctttcacttctgtgatccagagtgagaagttatggtgctttctctcgcctgcctatggctgcccayagtccactcaacacacactttcttcctttggaagcccataaaaaccctggactcagccagactggggagacaacaggacttcctgcctgcaaataggagctacccactctgggtctattctccact

SEQ ID NO: 301092 - DNA, 592 bp, Homo sapiens
tgccacttactagctgtttgactttggcaagtcagtttacacctctatgctcagcctcctcacctgcagtatgggcaataataagtttactccagactgtcacttagaatggattttcatgctactatctacctgaggtcattggatatgctgttttatttagtggggaacactcctctcccaggacattctatagcttgttattcttattcttaaggtctccaattaaaggtcttctggggttacccactaaacttgtctaaaagtatcccgccacaccctatcttttttcatcatagcactttattttcttcaaaacactttacaaatatgtatttttttgcctatcttattgtaagtttgttacctgtctttacctctgtaatattaagctccataaaagcagaaaacaggtttgttttgtagactgctgtgtctctattacctagcatagttcttagagcagcatagacatcaatatacatcatttgaatgaaaraagggataaagtatccaacgttttataacacagagtaagtctgaaattaaatattagcaattattaatcttggagaccataaagtaccaaaca

SEQ ID NO: 301093 - DNA, 615 bp, Homo sapiens
ggttttatttcccctgtttccagaagtctcataaatatcttgggaatttcattcagcactctacaattcacataatcaaattgttaggaattattgtgaaggtactggggartgactgaaagatatagttggaaaaaaagaagtgatgacactagctactcattctccctcacccacatcttaatttgcattccatgaaattagtgcctgaggcaaagacttgggtgcaggagatttatttgggaggtgaccccagaaagcaagaataaagaaagggaaaggaggaaaagtcagtacgacaatggtgtggaaaccaaggattccattgtcacaaagatctctcgaaaacatggagaatgtcgctcagaaatgagccttcagagtttgataggctgggcatttgtccaccagctcccatcccacatgacttcaggggctttaccacctgcaaactttcatgccacactgttcatgggctttacatattcctttgtcttcaggaatgatgctgaagtggaattggtcctgaaatagaaaagtggagatatgcaatagaaaatcaaggtatgtgttgtaccaccagtcagaactatcgaccataactgcagataaaat

SEQ ID NO: 301094 - DNA, 419 bp, Homo sapiens
tcctcttcagaagatatttttggcttttttgtttcctgtttttaaaattaacaaaaagttttaagtgttttgtttatatgcaagarcatgtgcaaacaagggtggaaaagtacatgtgtgcaatgtctatgtttttacttctaattgtgtatgtggacttaatttaatacaaaaagtgaagctctgcatgcttgaaatttaattaaattcaggatcacataataaatcagtgatcagaaacatagtattaaaaaatattctttaatcccataatgaaggttgtattgagaaaggttccaaaaagagattgcttctataaactaaaagatgttttcctttgtatgtctataccactaaatcttgttactttaagcttttcatcagcctctgaactattcagtagttaattttcagaattt

SEQ ID NO: 301095 - DNA, 579 bp, Homo sapiens
gaacaatgagatcacatggacacaggaaggggaatatcacactctggggactgtggcggggtggggggaggggggagggatagcattgggatatatacctaatgctaaatgacgagttaatgggtgcagcacaccagcatggcacatgtatacatatgtaactaacctgcamaatgtgcacatgtaccctaaaacttaaagtataaaaaaaaaaatacaatggcttaaataatggtatttgtttttaagtggaaacaactgaaagcactgtacaaatggcaactggttaatcattgaaacttgcatatttgaagcatagagagttgtctcatgagctttatatacaatactgtattttacttgaatttccatttagtgacattctatagtcattcagaattgttagtagattaaaggtgatgatactacagcatggttaatacattataagaaagttattgcattttctttgaaaatagctttattctttgaaagttactgtatttttatattattttggaaaattggctatgacgaaatgcattctctctagaaaactgatttttaataacaaaaaaa

SEQ ID NO: 301096 - DNA, 579 bp, Homo sapiens
gaacaatgagatcacatggacacaggaaggggaatatcacactctggggactgtggcggggtggggggaggggggagggatagcattgggatatatacctaatgctaaatgacgagttaatgggtgcagcacaccagcatggcacatgtatacatatgtaactaacctgcaaaatgtgcacatgtaccctaaaacttaaagtatawaaaaaaaaatacaatggcttaaataatggtatttgtttttaagtggaaacaactgaaagcactgtacaaatggcaactggttaatcattgaaacttgcatatttgaagcatagagagttgtctcatgagctttatatacaatactgtattttacttgaatttccatttagtgacattctatagtcattcagaattgttagtagattaaaggtgatgatactacagcatggttaatacattataagaaagttattgcattttctttgaaaatagctttattctttgaaagttactgtatttttatattattttggaaaattggctatgacgaaatgcattctctctagaaaactgatttttaataacaaaaaaa

SEQ ID NO: 301097 - DNA, 504 bp, Homo sapiens
gaaactgaaatgttttgtaatacattacatgaaattcaagtcagagaaattaaacttggatgagaaataaagaatagaaaaaaggcaaagaacacagtagtacaaaatttatctgcatgactcagtgacaactagttatcttttactcatatcacgtgatatggtttggcagtgtccccactcaaatttcctcttgaattgtagttcccataatccccacgtgtcatgggaggaaccaggtagagataactgaatcaagacaatggcttcccccatcctgttgtcatgatagtaagttctgaygagatctgatggttccataaaaggattccccctttgctcagcacttactctctcccctgcaggcttgtgaagaggtgccttctgccatgattgcaagttttctgaggcctccccagcaatgcagaactgtaagtcaattaaacatctttcctttataaattacccagcctccgatatttctttataatagcatgagaacag

SEQ ID NO: 301098 - DNA, 581 bp, Homo sapiens
ctcctctgttatccttttttgtttttgtttgtttttggtctccatggcatagtcaagcatttttataaaatggtgctatgataaataatatactttcaaaaattgctgtaaaatgtaatgatgattttcaattaaggaaagaaaatattttttcaaataagtataaaataatattaacgatgacagtatattaaagtctaagcatataaaataatcggggaagtagaaatttaacacagtgtatgtttgaagagaaagcagctaattgctttattcacattatcctttaagtttatataaaggcagaagaaaataaatgggtccaaaaaccttgctcttatttaacaaactaggaagaaacatgtaatcatacaaaaaggaatgaatacccccatggacaactctcaaggaatggtggacaggagctagtcaataggtgcccagcttctcagggacaatctacccactcaccttcacccttgccttcctttggaatcttccagcagtagcctaagaaattgctcgaagcatctccttgacatccctaatggcagcgatcttrtagattgatcaaatagctt

SEQ ID NO: 301099 - DNA, 558 bp, Homo sapiens
tgtctcttctggataagctgggaaatacatgattctgtgatatgtgttaaatacagagcagcaaattttacctttgtattatttacgtttagtttatcatatacttaaactcatcctgcacaaagtatatttttttctagaaattactttcattgtttaagtacatgtttataaaacttattggaaacaatgggataaaatacagagattaagtgrcattagtgaaattatatctagcctagacttcttttagtaagaaagaatataaacaaagaatataaactcctttcatttactatactgtaggtgacagcttaccgacagtaaatatttctttggataaactactatacagaggttttatgtttcttttgaggatcttaaaaaagattcccccaatttctgtaatttttttttcctgttctcatctttctttttctacctatactactttaattcagcctttgatggcctgaaacatgtgtaactacaaatgcttcttaaccactttattggcctttattgtcttttgtttctaattgtctctcactcagccat

SEQ ID NO: 301100 - DNA, 631 bp, Homo sapiens
gatatttgtctcttctaaggtctaacaataataatatatatttgttactgtstcttcttgctttctttttattttccaccaaggaaatttccttcgttatctctcagaaacccccacacatttttttctgtaaagacgttatgtttttaaagcatctttaggttttgcttaagcaaaaatattaggagataattatagagtttttttatacatcgattgctctcactcatttcccatatcatcaacttccccactagagtggtccattttgtacaactgatgaatccacacattattatgcaatagactaaggcttatgtcctcccaatattcatatgctgaaatcctaatcccccaaggtgatggaattgggaagtagggcctttgggatttgattaggtcatgaaggcagagccctcttgattgggattaatgctgttataaaagagatcctaaaaggctagtttctaaactaccatgtgactacagtgagaaggcatcatttatgaaccaaaaggcgaccatcaccagacataaaatctgtcatcaccttggctgtgaactatccagcctccgtaaaaataaattttggttgtttataagctgcccaatgtatactattttgttatag

SEQ ID NO: 301101 - DNA, 619 bp, Homo sapiens
gtgatttgctgaggaccctcttgcactgatctactttcaaatattctagaccagtagttagatcccaatattattaacagctgttttgagtaaaactattattttcaatataagtcagtgctcttaccttctctctttttgcataatatatacaatagtattaccctgttttctcctagtctctgacgctaaggtctatggtaagaaatttagttattggctacagtataaatgaggtaggaaaaaactacccccagagtcgctagtaccctttccccaaggtctgctttattaatctctaaactcatattatttctaccactattttttttctctctttctccttctttttttggcagaggtcactgtttctagagaaacccatccagacttcactcagaaactcaatgttacttgagtgagctgcaactgctgcttgaatgccttaattctctaattaatttcctagtaaaatcatccccgtaatgagacgtcttcatttgctccgtgtattaatccattcccacttcccacatttgagaaatgctaaactttcaamgatctccctctgggagagggttttgctgccttataaactactctgctgcttacaagccta

SEQ ID NO: 301102 - DNA, 532 bp, Homo sapiens
cttttgtatttaggtgattttctatagtggtatgctttgattccttacttgttgtgttttatatatctactatatgtttttgccttttcttactgtaagaattacataaaatatcttatagttgcaacaggttagttaagctgatgataaattaactaactttgattacatttaaaaaactgtacatttttactccatcactccacattttatgatttatgtcacaaattacattttaaattttacatttcttaatgtatcattgcagtcattttttaattgttttatctcttaaccttcatgcttcagacagaaatggtttatgcaccaccatgagagttagattattttgaatttgtrtactcatttttattagtaagagtttgcttttatatgttttcattttactaattaccatgcttttctttcagctgaaataactaaataactccctctagtttttcttttctttctttttctttcttccttcccaccctcccttccttccttcccttccttccttccattcctt

SEQ ID NO: 301103 - DNA, 498 bp, Homo sapiens
tacatggtataaaaactcataatccattttttttataaatgaaagtctttaaaaaatctttataggtataatgtagatatgctcaaatatttggctcacacacgatggtccrggaattaatacttttattttaaaaaggaaaacactgaccaaaataatcacttccaccaatatattatataaagatttttctgcttttaatgaatgtaaataggcaacttattattaatttattggaaatatgtttagaaacctttttcccaagtcattttttcttaatttgagttatacagatcatataatggaatatacagcattaaatttgaactattaaatataagaccaaatcatactgagataaatgtaactcaaaaaaaattaaactataaagaaaataatatcacaatgtggataaatatttaatagaaactcctccctaccacttgttgaataactctttgttgtaacagaagcagcaacgttttttaaaaagataaa

SEQ ID NO: 301104 - DNA, 498 bp, Homo sapiens
tacatggtataaaaactcataatccattttttttataaatgaaagtctttaaaaaatctttataggtataatgtagatatgctcaaatatttggctcacacacgatggtccgggaattaatacttttattttaaaaaggaaaacactgaccaaaataatcacttccaccaatatattatataaagatttttctgcttttaatgaatgtaaataggcaacttattattaatttattggaaatatgtttagaaacmtttttcccaagtcattttttcttaatttgagttatacagatcatataatggaatatacagcattaaatttgaactattaaatataagaccaaatcatactgagataaatgtaactcaaaaaaaattaaactataaagaaaataatatcacaatgtggataaatatttaatagaaactcctccctaccacttgttgaataactctttgttgtaacagaagcagcaacgttttttaaaaagataaa

SEQ ID NO: 301105 - DNA, 660 bp, Homo sapiens
ttattttttcattaaatgagtatttaaaacagtactttcaaagctgtgtttataaacgttatttatttgagctgacgaaaacagcatcacttatttgcaactttatttgctttcaaattttctctccttttctcaaaataatttaaaacctaaaatagctgagcacaaataggttcatcatgataatcctacgttcttttctaagaggccccsgagacagacgtgtttcagctgtgaaatgactgggggaggaagagctcagtggaagaagcttagcaaatttaggctcctagaaatggaggtaattgatgtttgctcagtgtaggcatcgttctgcaggagtaagaaacatgattcagtatgttgtatatcaacactattattatgctggaacagaaataagatggtcgttgattgcaaagatgaatccatatattttccctttattgaactagtaaagattatctcttctgtggaaataagctgaaatcacccagctgagaacaaacacagagtattttttccacagcttactacagaagaggatcagccaacatcacatgcatttggtagaaacccaaaggcagacaggatagggtaataatggggacaaagagaaggcttcagttaggcccagatttggaggttgttggcatattg

SEQ ID NO: 301106 - DNA, 641 bp, Homo sapiens
aatatcatcgtttgttgttaatttaatttraaataggaaaattatgcagccttttagttttcttcctttgttacaagtaaaataaaaatattttctatgtaattcaagtacttcttttgtgaaattactcttcttgcttttttctcatttacctgttgacatcttagtgtttttattatccaattctatgatctcttgtttaagaatttaagtcataatttatccatagcctgcagtcttgcttctctgttctggcatctgagaattccttccctagatgaataatcaccttgcttccataggaaggaggttatcatacttacatagacacacttcatacctatattgatcaactctgtgtaagagctgactaaagtaattttatttgaatcttctttgggtctgaaaagattatgctatcatattttaatctgctgaaggacaaatggaaatatcttgttaaaacaaagatcaacagttttttattctaagccaaaaggagctaagctattttaaacttggattaaaacaatcttgttatagctgcatgcagttatgtacagtgttctaggtactaaacactgatgggaatacagatgtagactgtgttgaatcagagctcacagataagattgcttgct

SEQ ID NO: 301107 - DNA, 604 bp, Homo sapiens
attctttacttaaataatttatatctttgcaagtgagtgatattaacttgttgtttccagtaccataaactgagtttttctttcaaatgtttgcctcaatataacttcctgagcattgcagcatgtttacatatttgatttgctcaatagtggatgttcaatagtgttgagcaattgagccagtaaccctcttacgttcagtttcctaggacggtttacttcccacagtgggcaattagttgttgctatgttccttgtcttcctggcatcactctgccctaatccccatttgtcagttattaataaattatgatstgctctctaattattttgattcagagcctttgaagaaaaaagcatgtaatcatgggaaaatagaagagataaaaaccctcagatattaaatcaatacacgtctggattttttccagttttacaaagtcacatctattgctaactcataagcttctgagatttacttttattgagcttttttctaaaatcagggattgtatatatgattacaaatgtttggttaccattattttaaaatataatatttatgagattaaaatgttttcataaaatttatttttcttattag

SEQ ID NO: 301108 - DNA, 360 bp, Homo sapiens
tgtaggaaagccacagaagcctttattctctaaatacttactggccggcagaagagagaagatatttacacaatgccctataatttgtggctgaaagtgttaaattctatgagaatactgatacattgttttgatatattgttcaaaggagagaatactttggctaaagggattgaggraatttctttttcctctattcatgacagaaagtttgatataagacttcacatgtcagtaaggcttaaatattgagagataatatgaagctttttccaagcaaatggaggatgtgaaaaagagtgtagagtgagagattctctttcctcattctcagtccacgtgctttgtatgaaactgacc

SEQ ID NO: 301109 - DNA, 461 bp, Homo sapiens
tcctacaggatgaataccaggtgcccatctccctttttttccccaaatatatactattcagtgttaataagttgtctgatcagcacattctctttagggtataaattctgtcttcttagctcaatgaatttggggttgaatctaagatacagattttcaaagaaagagataattttatatgagaattccatctaaatcctactcagtagaccttgggtgagcagtggtcatatttaccactaacccataactctaaaaagagakcctaaaatataaaaagataggcagaaagaagaaattctacaaaagaaagaagaaagaaactgaaagtgctgtaagtagaaatgcaggaaaagccctgaaaacataaaggacatggggtaaagtagataatgataacatagattagtggagcacagcgtctgttcatgtgatatgagctgagaggtgccaagcaggaa

SEQ ID NO: 301110 - DNA, 592 bp, Homo sapiens
tataaattctgtcttcttagctcaatgaatttggggttgaatctaagatacagattttcaaagaaagagataattttatatgagaattccatctaaatcctactcagtagaccttgggtgagcagtggtcatatttaccactaacccataactctaaaaagagatcctaaaatataaaaagayaggcagaaagaagaaattctacaaaagaaagaagaaagaaactgaaagtgctgtaagtagaaatgcaggaaaagccctgaaaacataaaggacatggggtaaagtagataatgataacatagattagtggagcacagcgtctgttcatgtgatatgagctgagaggtgccaagcaggaaaagctgcgactatattctctagatgtttgctggaattcagttctttcaatttattataatgtgacaaccctctcaatagatttctgtaaatgaggggataaatcaggcagaatccaagtaaaagagccacacatggaggatttctggaattataggctgattccagaaaatctagtcctccttttagttagattagggctgatctttgtcaggtacataccctttgactc

SEQ ID NO: 301111 - DNA, 542 bp, Homo sapiens
agcaaattctgagtaataggaactattttaagtgccttggataaccatatgacttagcrgatactcgcaacaaccctatgaggtaggcgccattgctatcctcattttacatatgagaaaactgaggcacagagataagaattgacttgcccgggatccataataataagtgattgctctgggatgaaaatccaagaagtatggctctagagtctgtccagctgacctctaggctacatgtcaatgtcagatatgaaagaaggagaaccattttcatcataattaatgactgctaaggaaatctttcacataacaattagaacagagctttaaaaaatgaaaagaaaagtggggttaatcgagattttaagtgtgtagcagagagaggaagggcaggtagccataaggaaaggagttacaaaaacatagaggtaaaggtaggaaaatgcaatatacattcaaaggatcataaacagggcagttagataggatggagtttttatttagaattgtgagaattagaaagatgaatatgttccaag

SEQ ID NO: 301112 - DNA, 542 bp, Homo sapiens
agcaaattctgagtaataggaactattttaagtgccttggataaccatatgacttagcagatactcgcaacaaccctatgaggtaggcgccattgctatcctcattttacatatgagaaaactgaggcacagagataagaattgacttgcccgggatccataataataagtgattgctctgggatgaaaatccaagaagtatggctctagagtctgtccagctgacctctaggctacatgtcaatgtcagatatgaaagaaggagaaccattttcwtcataattaatgactgctaaggaaatctttcacataacaattagaacagagctttaaaaaatgaaaagaaaagtggggttaatcgagattttaagtgtgtagcagagagaggaagggcaggtagccataaggaaaggagttacaaaaacatagaggtaaaggtaggaaaatgcaatatacattcaaaggatcataaacagggcagttagataggatggagtttttatttagaattgtgagaattagaaagatgaatatgttccaag

SEQ ID NO: 301113 - DNA, 542 bp, Homo sapiens
agcaaattctgagtaataggaactattttaagtgccttggataaccatatgacttagcagatactcgcaacaaccctatgaggtaggcgccattgctatcctcattttacatatgagaaaactgaggcacagagataagaattgacttgcccgggatccataataataagtgattgctctgggatgaaaatccaagaagtatggctctagagtctgtccagctgacctctaggctacatgtcaatgtcagatatgaaagaaggagaaccattttcatcataattaatgactgctaaggaaatctttcacataacaattagaacagagctttaaaaaatgaaaagaaaagtggggttaatcgagattttaagtgtgtagcagagagaggaagggcaggtagccataaggaaaggagttacaaaaacatagaggtaaaggtaggaaaatgcaatatacattcaaaggatcataaacagggcagttakataggatggagtttttatttagaattgtgagaattagaaagatgaatatgttccaag

SEQ ID NO: 301114 - DNA, 564 bp, Homo sapiens
atataaaaactcagtcccttgccagacagttttagctgtactgtagtgatgtttcactcaattcttgtcagtatcattttcaaagataaagaaagagccatcaaagaatgaatactgacaggcaagtttttatgatttgcatttgataaaggcagctaatactccaaaccaataggatgatgatattgatttaatagtggatgctcttagaggataaaaaggaatagtctaygtttctttaaattaaaaaatgtaagaagagttgtattgtttatttaacttgaaagaaataccagattttccccacaatggaaaaataattcatacttacaataatagaatcctaaaattaaaggaactatgaaagaatcttctgttcaaattcacagcgtttattatgtgatgcctgacacatggctctttaatctttccctttgtaattttccatcattactattcaatacagccctttctattttggatcatatggaaatttcatatttttattttgagaaacaacaattataaaagcagctaacatttattgagcccttatcatgagac

SEQ ID NO: 301115 - DNA, 564 bp, Homo sapiens
atataaaaactcagtcccttgccagacagttttagctgtactgtagtgatgtttcactcaattcttgtcagtatcattttcaaagataaagaaagagccatcaaagaatgaatactgacaggcaagtttttatgatttgcatttgataaaggcagctaatactccaaaccaataggatgatgatattgatttaatagtggatgctcttagaggataaaaaggaatagtctacgtttctttaaattaaaaaatgtaagaagagttgtattgtttatttaacttgaaagaaataccagattttccccrcaatggaaaaataattcatacttacaataatagaatcctaaaattaaaggaactatgaaagaatcttctgttcaaattcacagcgtttattatgtgatgcctgacacatggctctttaatctttccctttgtaattttccatcattactattcaatacagccctttctattttggatcatatggaaatttcatatttttattttgagaaacaacaattataaaagcagctaacatttattgagcccttatcatgagac

SEQ ID NO: 301116 - DNA, 564 bp, Homo sapiens
atataaaaactcagtcccttgccagacagttttagctgtactgtagtgatgtttcactcaattcttgtcagtatcattttcaaagataaagaaagagccatcaaagaatgaatactgacaggcaagtttttatgatttgcatttgataaaggcagctaatactccaaaccaataggatgatgatattgatttaatagtggatgctcttagaggataaaaaggaatagtctacgtttctttaaattaaaaaatgtaagaagagttgtattgtttatttaacttgaaagaaataccagattttccccacaatggaaaaataattcatacttacaataatagaatcctaaaattaaaggaactatgaaagaatcttcygttcaaattcacagcgtttattatgtgatgcctgacacatggctctttaatctttccctttgtaattttccatcattactattcaatacagccctttctattttggatcatatggaaatttcatatttttattttgagaaacaacaattataaaagcagctaacatttattgagcccttatcatgagac

SEQ ID NO: 301117 - DNA, 479 bp, Homo sapiens
ttccagaatgtaatatgaataggagaaatagggaagcagtaaaacaaaatttaacacaagcttgtgtctcttttcctctcatgtgtccaaaagctaatctctttattcactaaaaggaaatgtgtataagactaaatcccctttggctttttaaaaacattttgtgatatcagtgacaatgcagttcttctagccattaatcttgtacccctgtaagaaatttcacctttctgagtcctgaaaagtatcttgtcaagcaaagttgacaccgaagggcacattttcagcaggatgtagaaggatttaactgtgcaggcttctgttaatgttgttaaatccaggcacatagcasgaagcatcacccttaagtgttaatccgttgtaaccattcccattttgactcagttctagaaattttgactctaaggcagcaatggaattatgacaaatatatatatatacacatacacacacacaaa

SEQ ID NO: 301118 - DNA, 595 bp, Homo sapiens
agagcataatattccattagatacagcaatttcattttcctgttaacagacataagggatattttcaattcaggactactatgtgtaatgatgttatcagtattctttatgatgtcctttcatacattttcayttccctaggattaatatctaccagaggaatttgctgggtcacagaataggtatatgcttacctctatgaaaaactgaaaaatgattttccttagtagttgtgacattttacacaatcacaagcaatgtgtccttccccacatttgatattgtcagtcttcttttgtttcattttaatctcaatcattctagtggatgtgtagtagtatcttattgtggttctaatttggagtcccttaattattaatgctgctgaggactttttcatgtgcttattaaatattatttcttttgtgaaataactgttccaatctattctcatgttttgttgtttacctttctgatgagttatcaaagttttgaaaatctattctgttcatgaaagattttggtcagatgttttaagaatattttattcttctatttaataatgttctttttcttcatgatttcttctgaggag

SEQ ID NO: 301119 - DNA, 595 bp, Homo sapiens
agagcataatattccattagatacagcaatttcattttcctgttaacagacataagggatattttcaattcaggactactatgtgtaatgatgttatcagtattctttatgatgtcctttcatacattttcatttccctaggattaatatctaccagaggaatttgctgggtcacagaataggtatatgcttacctctatgaaaaactgaaaaatgattttccttagtagttgtgacattttacacaatcacaagcaatgtgtccttccccacatttgatattgtcagtcttcttttgtttcattttaatctcaatcattctagtggaygtgtagtagtatcttattgtggttctaatttggagtcccttaattattaatgctgctgaggactttttcatgtgcttattaaatattatttcttttgtgaaataactgttccaatctattctcatgttttgttgtttacctttctgatgagttatcaaagttttgaaaatctattctgttcatgaaagattttggtcagatgttttaagaatattttattcttctatttaataatgttctttttcttcatgatttcttctgaggag

SEQ ID NO: 301120 - DNA, 507 bp, Homo sapiens
gacatacagagatgaagaaagatattttgtcatcagaaaaagagaggtgctgtatttgactcacttctctaagagtattctgaggcattcattacaattcttacagaaatgtgaaaattttttttttcaaaaagtaagattgttttattatttcactaagatccttcctagcttccaacattccacttggaggataacactaggaacatgtcacgcttctaaattctttgtgttcactctctgaggtggtgctgttttgattcctttttacagatgagaaaagtgagacccgagaaattaagtgatatgcgcgagacctgcccgagaagtaattggagcccagtacccctgatgtgggagtgctgctctcaaggcacagtgctatactatggaaaggggaataatggaaggccaggtgggtgcctcactttgtcagcctgggaacctgacaaggcaagaaaggccttgactaatattctatrtgagctcaccaactactttgtagac

SEQ ID NO: 301121 - DNA, 615 bp, Homo sapiens
tattttagtattactttttttctttttaatatataaaagattttcaggaatatactcactttcattctgattggtattttgtgaggatttttgcttcaatgatttttttgtaatttggtttttttgttttaattaattattgtttctatccttattacatccttgcatcaactattttggttaagtttgctcttctagctacttaaggaaaaaatttagactatttatttttcttttttaatataggaatataaagctataattttctttataaatatcactttccttaaacatgtccttccagcagcttcccaagaaaggataagaaatatacgttcttggtttaagtttttgcatgctgaaaatatgtgtttaatctctcctcatctctgattaacttttttctgaaaaaagagctgtagattggaaataatttttttcccagaattttgaagtcattagttctttgttttctagcttttgcagttacaggaaaaaagttgaataccattttgattctctttcttttgtgtgtgarttattttttcccaaaatactgtctaggatttttgtcttacaataaggctccttgctgtgggcatttttacatttgca

SEQ ID NO: 301122 - DNA, 621 bp, Homo sapiens
cactgctctcagtttcttattggtagatgataaagatagcctagaaattaagttgttaggaaactcactcctctctaccagttgagctgaaaatggaaggytgtcataaactagaaacagtaaatggaggcgtagacggacttggatctatgagattcttttagtggattgtgcagcagtttcattccaaacccaaaacacagaggacactggatacataattatgtttgcatttggctcctttctacttgtgttatttttcttggcttaagactgtttaagtgttagaatgtcttcagtcttttatttacttatgatgttcagaaccagcagactttgtggatttaggactgtagaacaaaccctagattaacttagcttttgaatgtccttttgttaaaatataaaggattctatttggcccatcaaaacagatattaggtacattctttgcattaaagcacgcccacatctttcactaaggaggcacaattaggaatcaaattcatgatcctcttgtttcaaaagcaatgtttactccaagacaagatattttgatgttagtaatatttaaagcaggtttccaaaaaaaatccattgaagtataggataaaaaagatt

SEQ ID NO: 301123 - DNA, 620 bp, Homo sapiens
attactataggattaaatgactattatgaaaagaaaaaaattggaaaaaatatttgtcatacaaaagcaaattttatcagagtcatcttagttgttatacaatcaataaatgttcttaatcacaagcattttgtcatgccatatggggcagcctggtgatttattacgtcttcttgagaatcactgattgattctactgtctttgaggacaatggttcttcacaagagtgtttagtggtgtgtactgtttcatatcctccatgwcacacaccacccatgtccctttaccatgccccggagaataacttttcatttggtatacagtgtagccagagtgtgaggctagctggagtcctatgtcactgagggctgggtcatgggtctgactcccatagggctcagtgggcttgcgttctgccccacacccagactgtaccccagtttgactatgtgtcaaagagagggtggttggaagaggaggcttgggttggtgcacacaggttgtccccataggaaaagctgctcaaagcatgtgccttactaaaggatatctaggagacttatttcaaattacaggccaatacaacatcataatgttcatttactgcactgattatcat

SEQ ID NO: 301124 - DNA, 516 bp, Homo sapiens
ctgaatttccaagaaactcttgctgctccaaggaccaccaaaattattgtatgaatttcaagaaagatggctcttgagacccwgcttaaattctgcattcctaagagaatggagttaactctaaatagggtcagattttcaactaaagtttggatttcctatgcatatttaactaattagacatgattattgaaaaaaagaactgaattaaattagcaaaaaagtcttaaaggagttttatgttttaggctgcacagaatctaatggctgacaaaataatatccagtgacgatcttcttatatttgactacatgaagagataagatgtactctaattatcctcttatatcccactgcatttagttaagctttacttgcaaagtgactaaaaggtttgggtagtgcttaaaatgctgaaataatgcttccttcctaaaaattgcatacagctgttaaaaggttttttctattggcatatttggaaaagctattgtattttctgaactgctctttgaa

SEQ ID NO: 301125 - DNA, 630 bp, Homo sapiens
agaagagtgtggtccaggcacagagaatagatgcacaataaactatgtaaatgagagaaggcataaggttcaacttggttatatctcatggggaagtagtgtcaggaaggagaagcactttatcctaaagatattggggagttatagaaaatttttttatgcaatgatgtgaaatgactctttttttaatctctgtaaagggttttggagaccagatgggaggagaacactatgggcagaagcataagttaggaggtcatcaaaatcatttcataagagttaggggtagcctgatgagggtggtagcagagggaatgtagagaaacagattgattggacaagggtttgtaaaatagaaccagctgaacatagatccttattgggtatttggaaagggagtgaagaaaaygggctgataaaggaaagtaagaatgaaggaatactccagggtctagaccctattcagggtctattaacagagctagggaaagctgagagtaaaacagcttcagaaggaagatgagtttcatttcagacttcttcagttttcaatgcctgaaagacatcctagggaagatagtccagaggatatttaatatatgggtcccaagagtattcaggctggtgata

SEQ ID NO: 301126 - DNA, 458 bp, Homo sapiens
tggcaagcaatttgtcaatgttggttaatattaagaattctcatatccttcaacccatgatttaactattcagaaattattctctctatatataagcctacaaacatgaaatgacatatggacaccaactttttttgcattaatgttttcaataatgagactgaaagaaacctataataaatggcatataatatgcaactgactagataaattatagcacagttatacaaaggaatacatcatagcttttaaaaactactttttaaatatattgcctccaatatattgttaagtgaaaaaggcaagctacatttcaagtatagtaggttaccatacctacatattatatgtatttatayatggtatgtgtatatatataatatagtatgtatatattatatggtatataaaataaatatgtattatatataatataaaatggagatgagtatagaaag

SEQ ID NO: 301127 - DNA, 615 bp, Homo sapiens
tttgcacgtgtttaaccacccttgcatcccatctaacttggtcggggtgtatgatccttgtaatctgctgttgaattttgtttactaatgttttgatgaggatttttgaatctatgttcaccagagatattgggctataatttcctttttgtgtctggttttgttatcagggtgatatggtttggctgtgttcccacccaaatttcatcttgaattgtagttccataatcaccgtgtgtcctgggaaggactctgtgggaggtaattgaatcatggaggcggttacccmcgtgctgctgttctcatgatagcacgtgagttatcatgagatctgatggcattataaggggcttcccccctttgctcagcacttctctctcctgccaccatgtgaagaaggatgtgtttgcttccctttctgccatgattctaagtttcctgaggcctccccagccatgtggaactgtgagtcaattaaacctctttcctttataaattacccagtctcgggcagttctttatagcagcgtaagaacggactaatacacgtggtaatgctggcttcacaaaactactttagaaatgttccttactcttcctttgtttggaaagaat

SEQ ID NO: 301128 - DNA, 638 bp, Homo sapiens
cttctttctgccaacttcattcttagtttcttcttcttctgctagtttcctgaagtgtaaaattagggtacttatttgaggtcttcttttttaatataggcatttatcactataaatgtccttcctagtactacttttgttctgtacatttttttctgcaatatttttatttttgttagtctcagggtattttctaatttccttattacttaaaaaaagtgtktgtgtgtgtgtgtgtgtgtgtgtgtgtgtgtgtgtgtgtgtgtatgtgtgtgtgtgtgttttagagaaaaaatattgctatattgcctaggctggtcttgaacccttgaacttgagtgatcctcctgcttcagcctcccaagtagcttggactacaggcacatgccactgcatcacctctgattattttctttgacccaattttgatcaaaagtacattgtttagtttccacatatttatgaatttttcagttttcattcagctattgattcctgagttcacttaatttcttcaaaaaagatacttattatttcaatatattaaaatttgttaagacttgctttgtgacttagcatctgatctatcctagagaatactccatgtgcatttgagaagaatggatattctacttatt

SEQ ID NO: 301129 - DNA, 585 bp, Homo sapiens
tatcactataaatgtccttcctagtactacttttgttctgtacatttttttctgcaatatttttatttttgttagtctcagggtattttctaatttccttattacttaaaaaaagtgtttgtgtgtgtgtrtgtgtgtgtgtgtgtgtgtgtgtgtgtgtgtatgtgtgtgtgtgtgttttagagaaaaaatattgctatattgcctaggctggtcttgaacccttgaacttgagtgatcctcctgcttcagcctcccaagtagcttggactacaggcacatgccactgcatcacctctgattattttctttgacccaattttgatcaaaagtacattgtttagtttccacatatttatgaatttttcagttttcattcagctattgattcctgagttcacttaatttcttcaaaaaagatacttattatttcaatatattaaaatttgttaagacttgctttgtgacttagcatctgatctatcctagagaatactccatgtgcatttgagaagaatggatattctacttattatttaaatattttaaaatttgttaagacttgttttgtgacctaacatgtga

SEQ ID NO: 301130 - DNA, 585 bp, Homo sapiens
tatcactataaatgtccttcctagtactacttttgttctgtacatttttttctgcaatatttttatttttgttagtctcagggtattttctaatttccttattacttaaaaaaagtgtttgtgtgtgtgtgtgtgtgtgtgtgtgtgtgtgtgtgtgtgtgtatgtgtgtgtgtgtgttttagagaaaaaatattgctatattgcctaggctggtcttgaacccttgaacttgagtgatcctcctgcttcagcctcccaagtagcttggactacaggcacatgccactgcatcacctctgattattttctttgacccaattttgatcaaaagtacattgtttagtttccacatatttatgaatttttcagttttcattcagctattgattcctgagttcacttaatttcttcaaaaaagatacytattatttcaatatattaaaatttgttaagacttgctttgtgacttagcatctgatctatcctagagaatactccatgtgcatttgagaagaatggatattctacttattatttaaatattttaaaatttgttaagacttgttttgtgacctaacatgtga

SEQ ID NO: 301131 - DNA, 579 bp, Homo sapiens
ggacactctgtcaaactgtttctcttccctgggaggatctaagatctgggtttttgttttgttttgttttttgttttcctctttgctgatccagagaaggggctatgagaagtagataaatgctagttcgaaccatcatctgtgtcctcacttgacccccagctggggttgccatcagcactcaagacaggcgagacagaagtcagtcctctgggtagtcccaagaaaattggggtcattggacatgagatccacttgttttcmcctccagaagaagcttgaaggtaggattctttgtttgctgtctctgtgctgaggggatatagggttatggtgactgcaagcccacactgccatttctgttctccctgacttcagtcagactaaattatgctgggtcacataagtactgtgggatggactagacagaagccagttatttgggaagcctctgaaagagttggggaattggacatgtggtcaacctctttctctccctagggagaagcttggagctaggactttacctcccaagtctatggagctctgacagaggtaaggattatggcaaaagggtat

SEQ ID NO: 301132 - DNA, 620 bp, Homo sapiens
actgtgttcaagtttacaccctctctctggtgacagccacctccagtgacagtcaaagcaggtgggtgattgcccagcttccttgcctcaagatgaaatatctcttcagagccatctgagctcttgagcttcygcatgggagaagctgagacttttgctgcaaatgcctcatagttcagttcttctctttgcccagtcctgcctccttaagtcttttacatgtattgatcatgagagcatcccccaatatagctcctgcatataagtttctatcttagattttttttttacccacgagcctggtctaagacagttatctcatacatgctaggcaacaggataaaacatgagcagaaaatagggtatagcaaaggaatttcaaagctaatgtcagaaaatagctgtagattctgaagtgagacttgacacttacaccaatgcggccttagataaactccttgagcctcagttttttttttcatctgcagaataagatcgatggggtagttaaataggaagtgctcagtggtgttagataatattattcactgcatgtgaaaatataatactgagaatatcaaaagaaaaaaaaagctaaaagtgcaatggctttgttttgc

SEQ ID NO: 301133 - DNA, 551 bp, Homo sapiens
tcactgaagtcctaaggtgctgaaatgttcttgatcaaaggaaagtaaaatgtttttatcataaatrtattgacccttatgtttcaagaacagcagactgtgtcacataaagacactgcaaaagatgaagccatgtagagctagctatacacctcaatctttgtaaatctggcccaaagtgagtctccaaggaccaacatgtccagctgctagtgctgtttttagcaattctaattgtccattttaagcttctaaacaaacttcttttattctatatttgtctaagtttaaaagtctagaacgaacagaatcatatcagtgcatctgtgaggtttgaaacctgtccccaaacttttaaaacatttttcccattgagagatggtgccaaagtctctcctagaatctgagttctcattacctgaccaacacaataccagtggaggtggtgctgtgccagtttctaggcccaggcattacgagcctggaagcttccacttactgtttcttggtacactttttcttagagctcagccacaatgctgtgaagaagc

SEQ ID NO: 301134 - DNA, 551 bp, Homo sapiens
tcactgaagtcctaaggtgctgaaatgttcttgatcaaaggaaagtaaaatgtttttatcataaatatattgacccttatgtttcaagaacagcagactgtgtcacataaagacactgcaaaagatgaagccatgtagagctagctatacacctcaatctttgtaaayctggcccaaagtgagtctccaaggaccaacatgtccagctgctagtgctgtttttagcaattctaattgtccattttaagcttctaaacaaacttcttttattctatatttgtctaagtttaaaagtctagaacgaacagaatcatatcagtgcatctgtgaggtttgaaacctgtccccaaacttttaaaacatttttcccattgagagatggtgccaaagtctctcctagaatctgagttctcattacctgaccaacacaataccagtggaggtggtgctgtgccagtttctaggcccaggcattacgagcctggaagcttccacttactgtttcttggtacactttttcttagagctcagccacaatgctgtgaagaagc

SEQ ID NO: 301135 - DNA, 609 bp, Homo sapiens
ttattatcatccaaagtccatagttacattagggttcactcggttctgtacatgctatggattttgacacatatacaatggcatgtctccataatcatagtaccatatagaataatttccgttccataaaaatcctctatgctatgcctatttatccctctcctaccccaacctttggcaacactgaggtttttattgtcttcatagttttggttcttccagaatatcatatagttgaaatcacagccttttcagattggcttctttcattgagtaatatgcatttagggtttctccatgaattttgtgacttgatagctcatttttttgttgtttaataatatttcattgtctggatgcattatggtttatttatttattcatctaccagtggacatcctggttgcttccaagtttaggcaattatgaacagagctgctctaagcatctgtgtgctgcagggttttgtgtggacatragcttgcatctcatttgtgtaaatatcaaggagcacaatttctggattatatggtaagagtgtgcttagttttctaagacactgctgaactgtcttccaaagtagccgtaccactttgcattcccaccagc

SEQ ID NO: 301136 - DNA, 543 bp, Homo sapiens
tgtatagatattggattttgtccatgctttttctgcatctattgatataatcatgtgatttttcttctttagcccgttcaggtgacagtttatgttaactgattttcaaatgttcaaacagccttgcatacctgagataaatcacacttggttatcctgtatatttttgtttattcaatattggataatattggctaatattttgctgaagatttttgcatctatgttcatgaaagacattcatctgtagtttccttttctggtaatatttttgtctgaatttggtaatactcataaagtgagttggcagatgtttcttcttctgggagagattgtgcaaaactattgttctttaactatttggaaaaattccccagtatagccattttagcatraacgtttcatttatggaaacttttcaattactaattcaatttctttaatggttataagatcattcagattgtttaattcttttggttgagtttggtaaattgtaattttcaaagaattgattaattttttctaacttacttaatttat

SEQ ID NO: 301137 - DNA, 598 bp, Homo sapiens
ttaagccgacactggaataatgaatagaaatgagctaggcaaagtgaagtggacagagtctactattgcctttacatacacacagtggagaagagaacacggcattctcaaggaattgaactcaatgtggctgggagaggcaaaaacagaggaaagacatgtctggagagagaaatgggaccagctgatggcgcacctgtgcatcgtgccaaagacttcgctctcatttcccaggcaatgcaaactttttgaagactataaaacttgggaacatcataattatatttgcattaacgacaacaaaatcaccatggctgcaggtgaggactgaagagaaagaacagagcacaggattgaccttgagggtatgcagacacctgggggacagatgatggtgctcctactcaactatggcagacgcagtggggctagttaggaaagggcacgttcaagaatgtacgacaattgatatcaagggttagatagaaggaggagataaagacggggctggtttctggcatgagtaactgagtaattgttggtgttatttactgasactgagaacagcaaggaaaaaatagcggtgaggtgagagggt

SEQ ID NO: 301138 - DNA, 597 bp, Homo sapiens
tttaaaaatgaaatgaaacgtgttctaaccgcactccacgagcactccatttattctcaaaagccctgcacataggctgtgacaagtagggtaaatgtaaaattacgaggtgtagtgttcattttgttaactatcaagaaaaaaaaaaagcaggtccaaattcagggaggaaaatatgagcactgtgaaatgccatgtcttcctgcccctgggagatgtatttattggaaattatattgcaaggaaaaggtctaaataaattaaggccctagttattatgtcacatgtaactgcattgtagaatatagccacaattttgcagttatgtaaacgaagctgtcaagyacttgttattttaaagctggatccaggcagctcccctgacagccctgtggtcccagctcccagcctgattcatggccggcgctgagacacaggaagttcatgtctgctctaatctaaacacggtgaaaatggaacataagaagcagtgcagaaaggtaaaaataggctaaaccccataacccagacaagaaccatacaacacacttggaggaaagagaagacaaaatgtaagcctgtgagccacagcaccag

SEQ ID NO: 301139 - DNA, 597 bp, Homo sapiens
tttaaaaatgaaatgaaacgtgttctaaccgcactccacgagcactccatttattctcaaaagccctgcacataggctgtgacaagtagggtaaatgtaaaattacgaggtgtagtgttcattttgttaactatcaagaaaaaaaaaaagcaggtccaaattcagggaggaaaatatgagcactgtgaaatgccatgtcttcctgcccctgggagatgtatttattggaaattatattgcaaggaaaaggtctaaataaattaaggccctagttattatgtcacatgtaactgcattgtagaatatagccacaattttgcagttatgtaaacgaagctgtcaagcacttgttattttaaagctggatccaggcagctcccctgacagccctgtggtcccagctcccagcctgattcatggccggcgctgagacacaggaagttcatgtctgctctaatctaaacacggtgaaaatggaacataagaagcagtgcagaaaggtaaaaataggctaaaccccataacccagacaagaacyatacaacacacttggaggaaagagaagacaaaatgtaagcctgtgagccacagcaccag

SEQ ID NO: 301140 - DNA, 617 bp, Homo sapiens
atgcaaacatacgtatatgcacacataggtatgtatgtgtttataaacatgcatctccatctacatctctctctctatatgcatgcatacctgtgtgaatgaatacatatacatagtactctgtatatgtatgcatgcatacatatgtgaatgaatacatatatacatatgcattcaatgttcaccaaggtaacaaatttaaaaatcttagatccagaagaaacttcaagaagtctgctaatcgtacactctgtctataaatacatcccattctttgaccatttcaaaagatatggacatcagactaatattagtaattatcaaatctagattaagtactcrgggataaactgctctattttttctgctaacgtgcatgtgttaaatgttcataataaaatgttaaatacaagaaattgtgggctagtttctattatagtttttttcttctttcttgttttgtttttgctaattattttgcctcattcccaataaaaattaccacaatttccaatgcacatggatattccctggcgtataatttcataacaatttttcagtttatactgttaatggtattattaacactcttaccaccaattcattctgcaaaataa

SEQ ID NO: 301141 - DNA, 617 bp, Homo sapiens
atgcaaacatacgtatatgcacacataggtatgtatgtgtttataaacatgcatctccatctacatctctctctctatatgcatgcatacctgtgtgaatgaatacatatacatagtactctgtatatgtatgcatgcatacatatgtgaatgaatacatatatacatatgcattcaatgttcaccaaggtaacaaatttaaaaatcttagatccagaagaaacttcaagaagtctgctaatcgtacactctgtctataaatacatcccattctttgaccatttcaaaagatatggacatcagactaatattagtaattatcaaatctagattaagtactcggggataaactgctctattttttctgctaacgtgcatgtgttaaatgttcataataaaatgttaaatacaagaaattgtgggctagtttctattatagtttttttcttctttcttgttttgtttttgctaattattttgcctcattcccaataaaaattaccacaatttccaatgcacatggatattccctggcrtataatttcataacaatttttcagtttatactgttaatggtattattaacactcttaccaccaattcattctgcaaaataa

SEQ ID NO: 301142 - DNA, 575 bp, Homo sapiens
ctaaaaataacagtcttttacctagaacatcaatggtactacttcttaagatctttttacatcatttaaatttgagcccaagttttctattttcattaatatcttcccatgcttcaatgtgttgcaggtcttatttctttgggtttttttcaatctttcccatttttctacatttaatactaccatggaatattggagttgtaagaacttttctgataaaacatctctccttagatattagttatctattaaagggaaacaaattattctgaaaccagaaacttacataaccatagacatttattatcttacatagtttctgtaagttatgaatttgggagcagctttgctaagtggtctggctgggcttctctcatgaggtttctgtcaaaatgttggccagaactgcagtcttctgaaggctcaactagggctggaggatctgcttctaggatggctcactcccactgctgttggcaggaggcctcagttctttgccgggtgaatctctccacatgactgcttgacatkgtgtcctcatgacttggttagttggcttctccccagagtgagtg

SEQ ID NO: 301143 - DNA, 605 bp, Homo sapiens
aaaaaaatgtatgagtatgacactattgcatcatgtttaccactcatcattaagtgaacttgcatctaggtttagtatggctttccaaattattattataaaaattaccttaggcatatattgttcactttgagaaacttaaagagttaagaattgactttggaaatagatatgtaatggaaaycaagattaagtagtcacaggaatttcacaaagtgaagggggaaaaagtggaggaaaaaagtgaaatattaaatttatttcccctaagactctattagaaaaacaaagtgttcttttgcatagattatttgcaatttaaaagaggactacaaagaaaagatgatgctttcccaaaagaaatgaattgctaaaggtagaagtgcagatatccatataaggacatttcactctggctcaggccacctgtacacagatgtgaacctagttagatctccatgcttagaatagaatggaatgcgaataaaattctcgctggtttgtttaactgcaggcagactatctggccttcctgtggatgcactaaataagcactgaatcaaaccaacaaatttttcttttgttaccaggctgctaagctgtaa

SEQ ID NO: 301144 - DNA, 470 bp, Homo sapiens
tttcacaaagtgaagggggaaaaagtggaggaaaaaagtgaaatattaaatttatttcccctaagactctattagaaaaacaaagtgttcttttgcatagattatttgcaatttaaaagaggactacaaagaaaagatgatgctttcccaaaagaaatgaattgctaaaggtagaagtgcagatatccatataaggacatttcactctggctcaggccacctgtacacagatgtgaacctagttagatctccatgcttagaatagaatggaatgcgaataaaattctcgctggtttgtttaactgcaggcagactatctggccttcctgtggatgcactaaataagyactgaatcaaaccaacaaatttttcttttgttaccaggctgctaagctgtaacactcttgctttcaaggtgcccactattgtgctgcttatttattctgatgcatatttcttgtctcacacat

SEQ ID NO: 301145 - DNA, 536 bp, Homo sapiens
tggttacagcagaccttgggagagacccactgctgtggtggcttcaggtctgacccaatagaatcccagtgatggtgtacacagaagtactcatgccacccaacccttagctgcaagcagttcagaacagagagagagggagagagagagacactccatttgtgtgagggaaagtcagggaagagaacaagagtgtctgcctcataatccagagaattcttccagatattatccaagatcatcaaggcagtacttttgtgagtctgcaagaaccacagcattactgggcttttgggccccctaatgcagatatggcttaggtcacaacacccaaatcctattgatacctgaaaagccttcccaagaaggaagggtacaaacaagcccagactacaaatattacaataaatacctaatgcttcagttcctagacactgaagaacatacgtaagtatcaacaccaartggtaaaacaagacctcacccaacaaactaaataaggcatcagggcccaatcttgaagaaacagagatatg

SEQ ID NO: 301146 - DNA, 582 bp, Homo sapiens
agaattaatgtgcgtgtgtgtgcgtgtgcatgtgtgtgagtgtttgagtatgtgtctgtgacagagagagagcaccctggcaggcccctcctgtgtagctgtgactggttgctccttcccacatctcaggtggccactggctccaagagtccctttacattaaggtcagatgaagaaaytgacaactgaactgaaacacaaatgaccaaaaaaacaaaggtccaagacaggaaaaaaaaaaaaaagaaaagaaaaaaggtggcagtgggctagagtttctaggccaagaagtagattcttagcccccaaaatactcagtgtattccccaagaagaattttgtaccagaaagcatttagtccaattcttttcagctgacacttgacactattacattggttcaaaagtaatcatggttttagccatggaaagtaatggcaaaaactgggatacttctgcatcaacctaatggtttagattctagacagcaggcaacagagcctggcttggtccaactaaaacaagactgaatggattcaaagcacattggaggcatctgcaggttagtgggtggctctgtgcc

SEQ ID NO: 301147 - DNA, 582 bp, Homo sapiens
agaattaatgtgcgtgtgtgtgcgtgtgcatgtgtgtgagtgtttgagtatgtgtctgtgacagagagagagcaccctggcaggcccctcctgtgtagctgtgactggttgctccttcccacatctcaggtggccactggctccaagagtccctttacattaaggtcagatgaagaaattgacaactgaactgaaacacaaatgaccaaaaaaacaaaggtccaagacaggaaaaaaaaaaaaaagaaaagaaaaaaggtggcagtgggctagagtttctaggccaagaagtagattcttagcccccaaaatactcagtgtattccccaagaagarttttgtaccagaaagcatttagtccaattcttttcagctgacacttgacactattacattggttcaaaagtaatcatggttttagccatggaaagtaatggcaaaaactgggatacttctgcatcaacctaatggtttagattctagacagcaggcaacagagcctggcttggtccaactaaaacaagactgaatggattcaaagcacattggaggcatctgcaggttagtgggtggctctgtgcc

SEQ ID NO: 301148 - DNA, 492 bp, Homo sapiens
agcattccatcagagaaaatcaccatcacaaaaaggacgactggaaggaagaaatggaccattgaatgtaaatggactaaactctcttatcaaaagccatagagtggctgaatgaatgaaaaaacaagacccaatattctgttgcctgcaagaaacacacttcacctatagagatatacatagactgaaaataaagggatggaaaaagatattccatgccaataaaaccaaaaaagagcaggagtagctacacttatatcagacaaaatagatttcaagacaaaaactgtaagaagagacaaagccattttacaatgataaaataatcagttcagcaacaggatataatgattgtaaatatatatgtaccccaacactggagcacccagatatgtaaagcataaaaragagatagaccccaatagaataatagctggagacttcaacatcccattttcaacactgaacagatctcccagtcagagtatcaag

SEQ ID NO: 301149 - DNA, 534 bp, Homo sapiens
tgggaaaaccctggagatggacatcttactgcagctaacaaagtgcatggttttagacatgtcgacatcctcactggatcttaattttttttggtttatctaaagcaaagcagcggcaattgggttttttggagcattgactttactctaagaatggtcttctagttctaatatacaccagcacgtgtttagatcagagtgggaaggatggaagaaatcattcagatgggaaagtgttgaagaaactagactcaagaagatctcagtagctttccccaaattactgaaagactgccataaaaagaggacagatttgctccgtgtggccttgtagattgcagctaagataagcagcaagaaactccaattttccaattgtgtaagtgaaaatgtcttcgtgatcctaatcataagcaggatgatctccatgagaagcagagggttctctgttacaaggagcgttcaaacatattgcattaccatttcgaagggatttaaattcagcgggkctgggctttgagagacatttacagg

SEQ ID NO: 301150 - DNA, 338 bp, Homo sapiens
tcttttctcctgcagtgtctctgcagccatctatttgcaaaacctgacttcatgacagacggcaaggtaaaaaaatctttaaaaggcccagatcctttttcaaaaaccaggctacaaacctggatytggagcccaaaagtaataaacggataacagcacagaatcacttatatctcttctgataatattattctgctaataaatatgctcatttgcatttaatataattactaattcatttgggatcatagctaccatcttacttctttaaaaaattgtactttaagttttgggatacatgtgcagaacatgcaggtttgttgcataggtatacatgt

SEQ ID NO: 301151 - DNA, 609 bp, Homo sapiens
aggttcctggcagctcacccttgtggggttctcagaaaatcctgcctttaaagctcttttgggagtaagtggatctcgctggaaccccctcgatgagatccaggcgggacttggggtgtttcttcgcctgcccwgagccccaccctgctcaggaacttgcatagcttgtcccctcttgaaggctctggaagttcccgcctctgtgagcaggacagagccgtgcttggccatgtaggctgagctgctaggactcagaatctgcctgctgtgtagactgagctgttaggactcagaatctgcctgccgtgtaggctgagctgtgaggactcagaattgctgaccgcccagctgctcagatggggaggggcagtggagcaccagagggcctgggagaccctccccacagcagctgatgcctgttaattgtagaatcataaaacgataaaggggccttggagatcaatgcattttatctggcattgctgcaaactgcagctgttggcattcattcttccagcccccaacctggacgaataaatacgttgtccaaaaagtgcagcaaagacagtgctgctcttagcccccagccctctgttttggaggtttcgg

SEQ ID NO: 301152 - DNA, 583 bp, Homo sapiens
ttaaattatctttgatttcagatgacacaatcttataaatagaaaaccacagacatytcaccacaatgactattcaaagtgttgaaaaagagaaaacaacaaaagtaaaaagattccaccacaaaactgtaagaaatcaaaagcaaaattagtaaagctatatgatacaaaataaacatgcaaaaatcagtagtgcttctataaactaataacaaactattcaaaaaagaaatcaagaaaacaatcccatttataatagcataaaaatagaataaaacacttatgaataaatttaaccagggcagtaaaagacctgcacattgaacactacaaaagattgatgaaagaaatcaaaaaagacacagatggaaggaaagatgtcttgtgttcttggattgggaaaattaataatgttaagatgcctacagtactcaaagcaatctgtaggttccatgcaatccttagcaaaatctcaatgacaattttatagaactagaaaaaaattcctagcattcacatggaatcacaaaagacctctaatcaccaaaacattctgagcaaaaagaacaaagctggaagcatt

SEQ ID NO: 301153 - DNA, 579 bp, Homo sapiens
gggatttgctgaaatttcctcgcactgccatcggcataagaagctgtcctgcagcattactccaagcccattgcccaactttgaaaaccacagcgaccacagatttccactctggtgtgtttgtttattgcacaatccatctgctcattgaccaaatatcaatgatgtgccagggactgtgcttggaatgatgcgaggcatggaggttgaattcacacgatccctgttcccaaggtgttcataatctaatgagaaagtaatagctctgatatggtttcatgaaataaccactacaatctgaacattagcctgaaggaactgaaggaaacaaggaatcattaattcaggagaaagtattttatatcagccttcgaagatgaatagcagaatcagattttcatttgtgtttggagtgggacagtcttccccggaaagtgagaactaaataccatccttacccacacacacacacacacacacacacacacacacacacasagagagagagagagagagagagagagttcaggtgttaaccccagtccaggtaagaatttaagatttctgtaaacctccgta

SEQ ID NO: 301154 - DNA, 549 bp, Homo sapiens
aacggcaatggtactgggggaggtgggctacactgaccattttatttatgatttggaagaaaaagcaatgacgcaattgatttaaaacctatatttctagattactcaagaggccaaaacactcaggtgatgaactcttacactgtagagaatgcccagtgtgaccrtgtgcatttcatcctcttcctgcctccctctgtgaggaaggaaggacaatgccaggcatggagatgacagggattttcctgaggccagcagcgtggctagagctcactccttgaacccttcactatgggcttgttccactccagagagagaaataacacacataaccttttgcctcccactgtggaaggaggtaggcaactggcattggatgaacaattgctatgtggctgtctgacttgcctatctgaggctactttacaaaagtaatttatttcaaatatcataacaactctttgagacaagtattactgtcttgtttttaaaatgagaacagagtagcctagagacattaactttctcaagtaaacagcaaaatgtata

SEQ ID NO: 301155 - DNA, 577 bp, Homo sapiens
cgtgaaggtgaccggccgaccccagcaagacgcagatactcagtaagacacacagcaatgtgaaggtgaccggccgaccccascaagatgcagatactcagtgagacacacagcaacgtgaaagtgaccggccgaccccagcaagacgcagccactcacagtgggaggaaagcaagaaatggcaggaatgaaagccagggctcagagagaaaacgatctgctccaacatcgaaggaacacattctcctcaacagcaggggcctatgggcttcgcagacacccacagcaactcgggtctctaggatggcctcagacagcaaggacagaaagcaatgcccccatgcacccgccgtgagatgacagggaagcgaatgagcagacacggacatcattgagggtgatgaagataataaaaggatgtcctacgtgtgaccacatgtggcagagacagccatgggtggccggagatggaggaagctcagctggccattgctccccatgtctaaaactctcttgcaggagacgtggtcctggaagagcccggagttccgggtccagggacaggggtttgagtccc

SEQ ID NO: 301156 - DNA, 600 bp, Homo sapiens
gtaagttatgggccaggcaggcacctgctcagggcacccatttataaagaactctaaacagtcactggaataagttggaagtatggtgccagctaatttgtaattctttaaacatggcaaaatttccattggtttccactcttttctgtggctaaaaaagccctgtttttcatttgaacatgtaacwggaaaataattatttatagtctctctccactttctatgacacttagaaaattttttttctcattcagtcagttaataagtatttattaactgtcttttctacactccaggacatttttctagatcctggaattacaccttgaacaagagagctagagcttcaccttgaggggtatgttctcaccgccagtggttcacaaggagcagagtccactgaaggctttagtgggtatttctgtgagcatcgttcccaagaatctacccttggccttgggggacttgagagttttgcatttggatctatgcatattacactttagttaaatgtttatataaaaaatagattataaggaaaaaaatgttaatgctccttaattgtccccaaaaagggttagggtgcagacatcccagggt

SEQ ID NO: 301157 - DNA, 600 bp, Homo sapiens
gtaagttatgggccaggcaggcacctgctcagggcacccatttataaagaactctaaacagtcactggaataagttggaagtatggtgccagctaatttgtaattctttaaacatggcaaaatttccattggtttccactcttttctgtggctaaaaaagccctgtttttcatttgaacatgtaacaggaaaataattatttatagtctctctccactttctatgacacttaraaaattttttttctcattcagtcagttaataagtatttattaactgtcttttctacactccaggacatttttctagatcctggaattacaccttgaacaagagagctagagcttcaccttgaggggtatgttctcaccgccagtggttcacaaggagcagagtccactgaaggctttagtgggtatttctgtgagcatcgttcccaagaatctacccttggccttgggggacttgagagttttgcatttggatctatgcatattacactttagttaaatgtttatataaaaaatagattataaggaaaaaaatgttaatgctccttaattgtccccaaaaagggttagggtgcagacatcccagggt

SEQ ID NO: 301158 - DNA, 567 bp, Homo sapiens
tggggcacccatgaaagtctggtgctttcacataattgctgcctttatagcaaggttacacaaatggctgtccccatttaaaatcataccagcttcctgaaataggagctgtagctccttttcttggaaagcttccagtttgtctagagaaaacagacatatatttctggcaagagaaaaacacagaatgaactaaataataaagtcccaaatatgtgatagagtttgcaggtgatgtggatgtgtccttgggaaattggcagaacaatatgaattgtgaggaacaggggtacaccgaccttctgattatcttcatggtaacatacaagaagaaatatgttagaaaacagattcttgaaaagaaggctgtaaatgcacaggggatgccccaggagctcgttgctcttrgtggtacaacaggattacccttaatactgatgagtcatcttgcattttgcaagaacctggtggtagaatgttttccaagatagccaccagcaatcctgccatcccagtatgcaccgtagcactcctccaatccagacacagagtttatctcttctctct

SEQ ID NO: 301159 - DNA, 553 bp, Homo sapiens
ttgttgaatttaaaacaacacagttaataaaatgctttcactgtttttgaacttaatggcaagtggggttttattgatttaattctttatactcaccattaactcaataaaattgctttttaaatggactcaagtgcttttagctcacaatttttgaattcaataaaagtcattttaaaattcgctttattgctttgcacattctgaattaagcacttctccgaacttgaacaacagcttttgcaaatggrcaggtttgtagaaatacgatttctcatatgctcgttgccatctgctataattaaaatctgagcgtaagtcaatgggcacaatcaccagtgattagtcagaaagttgtggctgatagcaaagcctggtaagaatagaagctatgtgattattaaatttcgacaggtgttcttctaaccttcattgtgatagtaattgctgtaagacgtgtaatcttagtcagtggtgttgaaattgttaattgacatctggaacctcagcagatgtaaagattagctagttactgttaacattagcattatct

SEQ ID NO: 301160 - DNA, 396 bp, Homo sapiens
ataacatctccaaatgtccagaaataagccaaaattagctgtgggtasaaagtgtagattgcctgcccagcgtcaattctccttgttcttcctgaaagaatccatacccttcccatcgcatgtgagatgggaactgaagagaagctgactccatcccagccccagtgggtgtgtatcctgattagtgaggatctcatctctcttgccagttataggattagataggctaaagccaatctgctcatgaaattaatttggctgaattaagaaaggtgcacatgcaatctaaggtgttctaatatgattgaagggaagtatttaaggtccgtgataatagaaaagtttgtcttttttcttctgttagacacaagcaaggatctatgttgctgctgagag

SEQ ID NO: 301161 - DNA, 396 bp, Homo sapiens
ataacatctccaaatgtccagaaataagccaaaattagctgtgggtagaaagtgtagattgcctgcccagcgtcaattctccttgttcttcctgaaagaatccatacccttcccatcgcatgtgagatgggaactgaagagaagctgacyccatcccagccccagtgggtgtgtatcctgattagtgaggatctcatctctcttgccagttataggattagataggctaaagccaatctgctcatgaaattaatttggctgaattaagaaaggtgcacatgcaatctaaggtgttctaatatgattgaagggaagtatttaaggtccgtgataatagaaaagtttgtcttttttcttctgttagacacaagcaaggatctatgttgctgctgagag

SEQ ID NO: 301162 - DNA, 495 bp, Homo sapiens
tcctttttaaagcacaagccattatatttactttttgtgtcttttattcattcttaatcctataatctttctttcctgggctgttttacttgttagatcttaataacttttgacattgactaytgattgatttagcttagttttattatgtaattatgctattattatgttatttaaagccatgaatgacagtcatgtcactcacaatctggtacatattttatactttcattgtagatttcacctttcatcattataaagaaaactagtcatgttatattctgaaatgcaatattttcatatttattattttctaaaaaaattgttcattattttttaaatagcctgctttgatttcctttttgaataaataattatttagatgtgtgtgtatttttttagttgctaccttagggttttggttgcatatttctttctctgtgtgttccccattcttcttacatttttagcttttctacaatgcagctgcaaaat

SEQ ID NO: 301163 - DNA, 512 bp, Homo sapiens
ctttttaaaaaaacattttgtcattaggattatataatatataattagtacattataaatgatatatatgctatttttatttatatcaatagttacctttaaccattttttagatgattttttcaccatatgtgtttctaattttaaatggtccctgacttacaatggttcaacttacaatttttcaactttacaatggtgtgaaagctatatcactttagcttggttttaaataacacaataataccataactacataataaaaactaaaataaaccaattagtagtcgatgttgaaagttattaaaatatagcattcagtacgctccttttttatgatgaggttaggtcaggataagcccatgcaagttgaaaatatcataagtcaaaaatacactttagtgtttccaataaaaacagtcaagcatctgtattaatatttttactcctttgactccctgattcagaaaaaataatytatgtatttactgccttgaatttgtgccccactt

SEQ ID NO: 301164 - DNA, 611 bp, Homo sapiens
ttcagtacgctccttttttatgatgaggttaggtcaggataagcccatgcaagttgaaaatatcataagtcaaaaatacactttagtgtttccaataaaaacagtcaagcatctgtattaatatttttactcctttgactccctgattcagaaaaaataatttatgtatttactgccttgaatttgtgccccacttccactttccaatcttttatgtagtcttgagtttagacacaatcattctttatattttctttcagtttggcaaggaggcttataaaagctacttaaacctgattgcattaattcatttatttattcaataaatatatactgaaagtatactayagaccaggtactagggataaaacagttaacaagattgacaaaatcctgacttcatggagcttaaattctggtgcagaagatggacaatatatttgtaataagcattaaattaacaaaataatccagctaatgattactgcagtgaaggaacaacaacaacagcaacaaaaatcccagaataatggaataaaagaactagagtgtcattaccctggatgattgggaaaacctctttgagaagataatatctgagcagtcagttg

SEQ ID NO: 301165 - DNA, 450 bp, Homo sapiens
tgcctgctgtgaggcctcacccagctggcaaaaggcagccagttgctctgcggggccttcaataacactagaaaaacaaaataatccctcctcctcttggctgcctcgagagttcckttttaacacatttgattgactgaaagtaaattacttattctcacatcttcaccaggagattagacttccattatggagctaataggcctcagtcctaacacagagattgagaagggatgcattgttagaaccacaagcacacgctcactgtaattggcttcctgggtctcctggcaagcaggccaggtaaaatcctcatggctttgccatttgggtttttttgagtttttaaaattcacataccataaaattgacatataattcacaaaccataaaatccacccattgaattaaaagtgtacaagtcaatgctgttagtatattcacacagtt

SEQ ID NO: 301166 - DNA, 601 bp, Homo sapiens
aaaatgttcatattcttgttaccaagagtgtatgtaccattctttgggaaacctgggtacaggtggtatttttaaggtccaattaaactaagttccaccagtccataattctaccaatggagtgatcrctctgatcttggagctttccaagtctcagtgccaggttaggattgaggctctctcctcatttcccaaagtcacagaacaattcttgctctcctttggagcatgacctcaaagttgtagggaaagaaatgggattatttttatttcaacatgacaagctctcccttggcaataattacccccaaactaaagccatgtgatactctatctgtgaatctctgattttttttaattgcaaatttttagctcaaagcttcatttccacccacaatcactgaagctacagtcagagttatagtgtcaagacagttgaatatatatctgaagtgaagaggggaatatgccttgtgcttagaatcaagggaccagtttctaggtctggtctgccagtaatttcttagtaatctcactgtggacaagttacttgcctggtcctttctatcccatgagtgaaggatggagacaagtatgacta

SEQ ID NO: 301167 - DNA, 601 bp, Homo sapiens
aaaatgttcatattcttgttaccaagagtgtatgtaccattctttgggaaacctgggtacaggtggtatttttaaggtccaattaaactaagttccaccagtccataattctaccaatggagtgatcactctgatcttggagctttccaagtctcagtgccaggttaggattgaggctctctcctcatttcccaaagtcacagaacaattcttgctctcctttggagcatgacctcaaagttgtagggaaagaaatgggattatttttatttcaacatgacaagctctcccttggcaataattacccccaaactaaagccatgtgatactctatctgtgaatctcygattttttttaattgcaaatttttagctcaaagcttcatttccacccacaatcactgaagctacagtcagagttatagtgtcaagacagttgaatatatatctgaagtgaagaggggaatatgccttgtgcttagaatcaagggaccagtttctaggtctggtctgccagtaatttcttagtaatctcactgtggacaagttacttgcctggtcctttctatcccatgagtgaaggatggagacaagtatgacta

SEQ ID NO: 301168 - DNA, 545 bp, Homo sapiens
gactagtgcaatatcaggcatggccatcccctgccctggccacgggctgctgcccctgcctcaaaggcagtctgctgtagctgtctctgctctccaacccaggccagtgaggttttactttagagttttaggagaatctgagcctcagtttcccactccctgagggaggggagaatgagaggctgtgtaaatgactcccctctgggtagccagggagggagacaatggggagaagccacccgacaaggacccagtgtagcaggaggcctctcttccagaaccagcagttctgcaaacagagatgataaggagaagggtgctgtctccacagcatgatttaaatggcctgagagagtccctctattcagagacatgacccraaagaagactctagtattaggaaatctcaacactcaaataatagcattaacttatccacactacagagtgggagaaaatatttctaaactatgcatccgacaaaggtctaatatccagaatctataaggaacttaaacaaatttacaagcaaaaaacaaacaacc

SEQ ID NO: 301169 - DNA, 620 bp, Homo sapiens
ggggttttctccttccaaaatgtttagaaaagtagatcaagatgttagacaaacccctgcacacaccagggttccccagctcagattgtgtatctycagaattcatgctccgtaaacaaagggaaggttccaaatcagctccactgggcaagtctctcttacccactctgctttctgcctgtgcattgccaaatcttcccttctgcctctttctcctccctcactcagaaatgctgaggccatagtttcctcacaccctccccaaagccttgtgctccattgctgagacaacacaggcattggagccggggggccggcagtgtggtctttctctccagtctcatcctctagtgtctgaagaactcctagcccaggacttcactccaatctcagaaaccataaaaacactcccagtcaactgccctccacaccatctgaacagctttcctctagcccatccctctgaaaaactgaagcctgccaatggacttgaggctgactacaaggttacaacccctgcctttctactagatgagacttcttcttaaggggttggtggattctgtggggaaatggttatgccatgcaggctgaaaagacagctgcccatcaatgtatgg

SEQ ID NO: 301170 - DNA, 587 bp, Homo sapiens
ccaaagagtattcagctcagaacctgtccttgtgtcaatcttggatagtattaggtgacttgggacaaggaacaaggccactttgctactcagaaccacagtggagagaacaaagcaaaaattcagttacaggaacaaagtcggtgccaagggcatttgtgggagaggccagaactttgactcagtgtcattcccagtgctcagggactgtcttttgtgtctgcagatccagggctgcgtagacactaaagraaagaagagatggagtgaccgatgtgagtaccttctcacctgtccaggtttaggacctggaagtcagccattatgggacctccatacattctacaatttgtccctggggacaactaaggcagaaggagtttgagacagatgtgcacagtcagaaagaacatgctggaggccttagaaaacaaaggagaaagagagaaatagtttaaaaaggaaggaaattggggttcattttcttgtttctcctctcctgattagctttctttacaagggagaaagagatgccttccatacacataggtctgtggttttctcatctatagaaaagaaagagtaac

SEQ ID NO: 301171 - DNA, 499 bp, Homo sapiens
attagcacttaggggccctgatgtataaggctcacctgactctaccttcccacctgccccccaccatccccccccccctcctgcagcagggtgctstcctcctgagggcctgtgtccctgagggacaaaggccacacgtcgattttcagagtaagattttttattttcttgattagccttgtcagcctaaagggaagaaactgaggcaaaattaatataagtggagagatctttggggccaacttgaggactgcaacccgggagcacagattcaagttgccctgaatatccactccaaatagcagcagttacaagtgggtttttaaaggcaatgaacggggacagggagtgggctgatacaaagggctttgtcaggaattctcactggcttacagaaaatacgttgatcagtgattagccacacactgttatgtagggtgtgggttatgtccagcgtggccttattaggttaatttataggcacttgtagcagcagcag

SEQ ID NO: 301172 - DNA, 574 bp, Homo sapiens
gggcatgaaatgcattattcctcagcaaaatattccccctagatttattwtcaaggataattctagcctgatccagtctttactccgatgattacaaaataaaggtttttttctaactttattacttcttacacatttgccagtcatcatatagcattctattactagcaggaacttctgtgcctgtttatcactttatatctgtatgagctcctgaattcttattctttcaatggtttataactcattactattcttattctggtgctcacatcgcccaagattcgggtcattggagcccccttcagataatgccttgcagtatgcctccgccattgttttaaacactatcctactttgtggtataacaaggtgtttgggattcaccttgaacctaccatgcccaagtcacaaaaacaacaggtcttccaaggatccctagttctctttatggaaatgatattagagagcaaagcccagcctcttggtggtagtgaggcatctttccttctaggttcttttagcagacagagctaggaaatacaaaaattgacacagccatatacgcatatac

SEQ ID NO: 301173 - DNA, 574 bp, Homo sapiens
gggcatgaaatgcattattcctcagcaaaatattccccctagatttattatcaaggataattctagcctgatccagtctttactccgatgattacaaaataaaggtttttttctaactttattacttcttacacatttgccagtcatcatatagcattctattactagcaggaacttctgtgcctgtttatcactttatatctgtatgagctcctgaattcttattctttcaatggtttataactcattactattcttattctggtgctcacatcgcccaagattcgggtcattggagcycccttcagataatgccttgcagtatgcctccgccattgttttaaacactatcctactttgtggtataacaaggtgtttgggattcaccttgaacctaccatgcccaagtcacaaaaacaacaggtcttccaaggatccctagttctctttatggaaatgatattagagagcaaagcccagcctcttggtggtagtgaggcatctttccttctaggttcttttagcagacagagctaggaaatacaaaaattgacacagccatatacgcatatac

SEQ ID NO: 301174 - DNA, 574 bp, Homo sapiens
gggcatgaaatgcattattcctcagcaaaatattccccctagatttattatcaaggataattctagcctgatccagtctttactccgatgattacaaaataaaggtttttttctaactttattacttcttacacatttgccagtcatcatatagcattctattactagcaggaacttctgtgcctgtttatcactttatatctgtatgagctcctgaattcttattctttcaatggtttataactcattactattcttattctggtgctcacatcgcccaagattcgggtcattggagcccccttcagataatgccttgcagtatgcctccgccattgttttaarcactatcctactttgtggtataacaaggtgtttgggattcaccttgaacctaccatgcccaagtcacaaaaacaacaggtcttccaaggatccctagttctctttatggaaatgatattagagagcaaagcccagcctcttggtggtagtgaggcatctttccttctaggttcttttagcagacagagctaggaaatacaaaaattgacacagccatatacgcatatac

SEQ ID NO: 301175 - DNA, 590 bp, Homo sapiens
tcataatttttatggcttcatgtcttagatttaaacatttgattcatcttgagttaatttttgtataaggtgagagatagggattcattttcattcttctgcatatgactagccaattttcccagtaccatttattaactagaatgtcctttcctcaatttatgtttttgtatgttttattgatcagttggttgtaagtatttgacttcgtytctgggtcctctattctgttccatgtgtctacttttataccagtaccatactgttttggcaactatagccttatagtgtaatttgaagtctggtaatgtgatgcttccagatttgttttctcattaagattgctttggctcttcaggctctttttgattccatgtgaattttaggattgtttttactaactctggaaaaaatgatgttggcattttgatgggaattgcactgaatctgtagatcactttgggcagtatggtcattttcataatattgattctacccatccatgagcatgggatgtatttctatttgtttgtatcatctatgatttcttgcagcagtgttttgtagttctccttttgtagatccttcac

SEQ ID NO: 301176 - DNA, 564 bp, Homo sapiens
gccccggttagtgatcacgaatgtaagggaagagcaatcagcgtcactgtgggcttctccagccacactcagctctgtggagagctggatttacaagggatagagttgtgccaggtggttaccacgaggagagaaagggacaggtttgttgagaatatataaaaatgatgattctgaaaatcaactgggagtaaatagaccccatctggctccaactcaataaaacgtatacactatacatcagtgtatattgtaagtgtcacatcatacctcagggaaggtgcattccccagggatcctcgcacaggatccagcagtggctgagctatctctctagttctttgatagaagcacctgaaattttacctgctgttgctggttacaygcaaacctcctgttagtgaatagttaattactcccagaggatgcaatacctgagtagctcccaaagtttcctgtgggaaagttatcttggaggagccagtgtattgaacttcttcagctaacaaatttcttcaccatgtgcatgactatctcgttacaagttcccacaggcattcaaca

SEQ ID NO: 301177 - DNA, 568 bp, Homo sapiens
ttttgaataatattttgtatttctgtggtgttggttgtaatgtctccagtttcatttctaattgagtttatatgtatctcttctcttctttagtaatgattaatctggctaatgatatatcatttttttagcttttcaaagaaccagatttttgtttcattgatctctatttttgtttgtttgttttggtttcatttagttctactctgatctttgttatttcatttcttctgctaactttgagtggagtttatgattgtttctctagttccttgaagtyaacactaggttatcaatttgtgatctttcagactttttgatgtaggcatttagtgctataaatgttcctcttagcactgctttttctatatcccagaggttttgataaattctgtcactattattcttcatttcaaggaatttttaaatttccatcttgatttcattgtttcccccaaaataattcaagagcagattgtttaattttcatgtacttgtgtagctttgaggatgccttttgtaattaatttccagttttttccacagttgtctgagtagatacttgata

SEQ ID NO: 301178 - DNA, 493 bp, Homo sapiens
tatgtgatgaatctccgaggagttctttagcttcttgtatttggaaatctaaacctctagcaaggccagggaagttttcttcaattattccctcaaatgaactttctaaacttttttgctttttcttctccctcaagaacaccarttattcttatgtttgcccattttacatgatctcatatttcttacagaatttttaatttctttttattcttttttctttgtctgattgggttaatttgaatgctttgtttttgagctctgaaattcattattctacttgttctagtcttttgttaaattttccattgcattttataactccctaaatgtgtctttcattttcagaaattctgattggctttttaaaaaaatatctttttagaaaatgttttattcatatcccgaattgatttttaatttctttatgttggttttaaactttctctggtatcatcttgagtagcgtaacaatcaaacttttgaatttttt

SEQ ID NO: 301179 - DNA, 493 bp, Homo sapiens
tatgtgatgaatctccgaggagttctttagcttcttgtatttggaaatctaaacctctagcaaggccagggaagttttcttcaattattccctcaaatgaactttctaaacttttttgctttttcttctccctcaagaacaccagttattcttatgtttgcccattttacatgatctcatatttcttacagaatttttaatttctttttattcttttttctttgtctgattgggttaatttgaatgctttgtttttgagctctgaaattcattattctacttgttctagtcttttgttaaattttccattgcattttataactccctaaatgtgtctttcattttcagaaattctgattggctttttwaaaaaatatctttttagaaaatgttttattcatatcccgaattgatttttaatttctttatgttggttttaaactttctctggtatcatcttgagtagcgtaacaatcaaacttttgaatttttt

SEQ ID NO: 301180 - DNA, 448 bp, Homo sapiens
tttttatggaagcttcatgatgccagcattccttcccctcgggtgtagggcagggccacctctggcgagggtcttatgactcacaatcagaaggcaaggtgggagatcagagtccttccctggggcaggaaaaaaaaggaaggaggaagccagaaagattctgtttcctgaggcctgttcttgaggcacaacatgcccaacattataacaaatgcctgtaatgggggttatgggagttatgagccataaaagaaaacrtgcatgttgtgtgtgtgtgtaacaacaccacagatgtcaaaaattaaaaagaggacaaaactagcttaaagctggtgctctctctctcactttctgtcacttctatctctgtctctcttctttcctctcacattccagaatgattgctatttcaagggattatattcctcattcccttaatttgctcatt

SEQ ID NO: 301181 - DNA, 564 bp, Homo sapiens
gccccggttagtgatcacgaatgtaagggaagagcaatcagcgtcactgtgggcttctccagccacactcagctctgtggagagctggatttacaagggatagagttgtgccaggtggttaccacgaggagagaaagggacaggtttgttgagaatatataaaaatgatgattctgaaaatcaactgggagtaaatagaccccatctggctccaactcaataaaacgtatacactatacatcagtgtatattgtaagtgtcacatcatacctcagggaaggtgcattccccagggatcctcgcacaggatccagcagtggctgagctatctctctagttctttgatagaagcacctgaaattttacctgctgttgctggttacacgcaaacctcctgttagtgaatagttaattactcccagaggatgcaatacctgagtagctcccaaagtttcctgtgggaaagttatcttggaggagccagtgtattgaacttcttcagctaacaaatttcttcaccwtgtgcatgactatctcgttacaagttcccacaggcattcaaca

SEQ ID NO: 301182 - DNA, 621 bp, Homo sapiens
ataaaattcaacatcctttttatgttaaaaacactcaacaaactaggtattgaaggaatatacttgaaagtaatgagtcagatatgataaacccagagccaacattatactgaactagcaaactctggaaacattccccttgagaacaggaaacaagacaaggatgcccactyttaccactcctattcaacatggtagtagaagtcctagcaagagcaatcaggcaaaaggaaaaaaaataaaaggcatccaaataggaagagaggaagtcaacctatctctgcaggtgatataattttatacatataataccccagagtctctatttaaaagcttatagatctgataaacaacatcagcaaagtttcagaatataaagttaatgtacaaaaatcagtagcatttttatacaccaacaatctgcaaactgggaaccaaatcaagaacacaattccactcataacagacacacacataccaattatctagaatacagctaatcagggaggtgaatgacctctacaatgagaaatacaaaataatgctgaaagaaatcagaaaaattaaaaagtattccatgttcatggataggaagaattgacatcactaaaatggccacac

SEQ ID NO: 301183 - DNA, 587 bp, Homo sapiens
tcctaattaacaggaagtatggagtggaataaagtgaacttatcatggggaccctrgtgttccctgtagtgctttctcctcctctctactggacactctttttcttctttgtctttttccattcaataaaagcaagccatttatatgattcaatagactgtggattgagaatcagaattttggagttgttagtaattaacaaagtaattatccaagcatttaatttcactggacatgatagcagttgaaatgacgatttcttgttattccttgattctacatttaaaacacattattgtcccattttatttcaaggaggaataaaataggggagagaaatattaagcaaagggaaatgaagaaagaagcttaaaatgaaatgtgagacataatcccaggattatcttcagaaaaattcttaaatcttagtttggttgtgtacaggttaatctatgtaggccctccttctgggattttcttatctgtaatagaaatattgattccactatgacctctgtctctcttggctgttagaactccagatgccaataatgcaggaaaaggcacaaagtaaacaactttgtcaa

SEQ ID NO: 301184 - DNA, 587 bp, Homo sapiens
tcctaattaacaggaagtatggagtggaataaagtgaacttatcatggggaccctggtgttccctgtagtgctttctcctcctctctactggacactctttttcttctttgtctttttccattcaataaaagcaagccatttatatgattcaatagactgtggattgagaatcagaattttggagttgttagtaattaacaaagtaattatccaagcatttaatttcactggacatgatagcagttgaaatgaygatttcttgttattccttgattctacatttaaaacacattattgtcccattttatttcaaggaggaataaaataggggagagaaatattaagcaaagggaaatgaagaaagaagcttaaaatgaaatgtgagacataatcccaggattatcttcagaaaaattcttaaatcttagtttggttgtgtacaggttaatctatgtaggccctccttctgggattttcttatctgtaatagaaatattgattccactatgacctctgtctctcttggctgttagaactccagatgccaataatgcaggaaaaggcacaaagtaaacaactttgtcaa

SEQ ID NO: 301185 - DNA, 587 bp, Homo sapiens
tcctaattaacaggaagtatggagtggaataaagtgaacttatcatggggaccctggtgttccctgtagtgctttctcctcctctctactggacactctttttcttctttgtctttttccattcaataaaagcaagccatttatatgattcaatagactgtggattgagaatcagaattttggagttgttagtaattaacaaagtaattatccaagcatttaatttcactggacatgatagcagttgaaatgacgatttcttgttattccttgattctacatttaaaacacattattgtcccattttatttcaaggaggaataaaataggrgagagaaatattaagcaaagggaaatgaagaaagaagcttaaaatgaaatgtgagacataatcccaggattatcttcagaaaaattcttaaatcttagtttggttgtgtacaggttaatctatgtaggccctccttctgggattttcttatctgtaatagaaatattgattccactatgacctctgtctctcttggctgttagaactccagatgccaataatgcaggaaaaggcacaaagtaaacaactttgtcaa

SEQ ID NO: 301186 - DNA, 587 bp, Homo sapiens
tcctaattaacaggaagtatggagtggaataaagtgaacttatcatggggaccctggtgttccctgtagtgctttctcctcctctctactggacactctttttcttctttgtctttttccattcaataaaagcaagccatttatatgattcaatagactgtggattgagaatcagaattttggagttgttagtaattaacaaagtaattatccaagcatttaatttcactggacatgatagcagttgaaatgacgatttcttgttattccttgattctacatttaaaacacattattgtcccattttatttcaaggaggaataaaataggggagagaaatatwaagcaaagggaaatgaagaaagaagcttaaaatgaaatgtgagacataatcccaggattatcttcagaaaaattcttaaatcttagtttggttgtgtacaggttaatctatgtaggccctccttctgggattttcttatctgtaatagaaatattgattccactatgacctctgtctctcttggctgttagaactccagatgccaataatgcaggaaaaggcacaaagtaaacaactttgtcaa

SEQ ID NO: 301187 - DNA, 465 bp, Homo sapiens
aactcaagatgctcacatatccatggcatrttcaatcaacagtgaaatatgacttcaactgttctgcaatatgaaccccaatatttgccatcatagtacctacattttttttattttaaaagtctgagaccctaactactaactttacgtaatagtaacattaagcgcagcaaatctaactagaccaatggtatataactctagtctgtatagtaattgctcttttcaaatcaacttcttctgggtcttgggaggaaatattacattgtattcagcaacttagaaatctgtgaggtattgttttgttttgttttgttttgttttttgtacttgaaattgggttttactttctacagtttttaaattttttctttctgctttttcactaggcttcatagatctcccttgcacatgtgcaattttgctgtgagccagaaatttgcacagttcgttctttgaatttgg

SEQ ID NO: 301188 - DNA, 465 bp, Homo sapiens
aactcaagatgctcacatatccatggcatgttcaatcaacagtgaaatatgacttcaactgttctgcaatatgaaccccaatatttgccatcatagtacctacattttttttattttaaaagtcygagaccctaactactaactttacgtaatagtaacattaagcgcagcaaatctaactagaccaatggtatataactctagtctgtatagtaattgctcttttcaaatcaacttcttctgggtcttgggaggaaatattacattgtattcagcaacttagaaatctgtgaggtattgttttgttttgttttgttttgttttttgtacttgaaattgggttttactttctacagtttttaaattttttctttctgctttttcactaggcttcatagatctcccttgcacatgtgcaattttgctgtgagccagaaatttgcacagttcgttctttgaatttgg

SEQ ID NO: 301189 - DNA, 465 bp, Homo sapiens
aactcaagatgctcacatatccatggcatgttcaatcaacagtgaaatatgacttcaactgttctgcaatatgaaccccaatatttgccatcatagtacctacattttttttattttaaaagtctgagaccctaactactaactttacgtaatagtaacattaagcgcagcaaatctaactagaccaatggtatataacwctagtctgtatagtaattgctcttttcaaatcaacttcttctgggtcttgggaggaaatattacattgtattcagcaacttagaaatctgtgaggtattgttttgttttgttttgttttgttttttgtacttgaaattgggttttactttctacagtttttaaattttttctttctgctttttcactaggcttcatagatctcccttgcacatgtgcaattttgctgtgagccagaaatttgcacagttcgttctttgaatttgg

SEQ ID NO: 301190 - DNA, 465 bp, Homo sapiens
aactcaagatgctcacatatccatggcatgttcaatcaacagtgaaatatgacttcaactgttctgcaatatgaaccccaatatttgccatcatagtacctacattttttttattttaaaagtctgagaccctaactactaactttacgtaatagtaacattaagcgcagcaaatctaactagaccaatggtatataactctagtctgtatagtaattgctcttttcaaatcaacttcttctgggtcttgggaggaaatattacattgtattcagcaacttagaaatctgtgaggtattgttttgttttgttttgttttgttttttgtacttgaaattgggttttactttctacagtttttaaattttttctttctgctttttcactaggcttcatagatctcccttgcacatgtgcaattttgctgtgagccagaaatttgcayagttcgttctttgaatttgg

SEQ ID NO: 301191 - DNA, 263 bp, Homo sapiens
gcacattaattttatcagtgttcactcagcattttactggcagcagtctgcaggaataccatgtcatttttgcttttcagatgtgtattgaatttgcagaagkcctcttttccaaatgatcaatgaatttcaacaccagagtcttggagtcagacaaggaaactttcagtacataggtagacctaaccctttgtttgatttcatttgggcctgaaattaatattgctctcatcactgacactgcagttcatggagtaatttac

SEQ ID NO: 301192 - DNA, 263 bp, Homo sapiens
gcacattaattttatcagtgttcactcagcattttactggcagcagtctgcaggaataccatgtcatttttgcttttcagatgtgtattgaatttgcagaagtcctcttttccaaatgatcaatgaatttcaacaccagagtcttggagtcagacaaggaaactttcagtacataggtagacctaaccctttgtttgatttcatttggrcctgaaattaatattgctctcatcactgacactgcagttcatggagtaatttac

SEQ ID NO: 301193 - DNA, 512 bp, Homo sapiens
tgatctagcccaacgctccctctgggcatgtgcctctccaagatgccgcaggcagaggaagctgaaaggctgagtgagcctcccatttgaaygtctgctttttctagggcaagctgttcttttccataccttgtttgtaagacagagaaggggtccgcctgaattgtaccgggcactgtgttagcgctccatgcagatgggccaggttgctttcactcttctgagattaacagttgcacttcttaataacagagccatttcacagtttgataccaagcacccatacagacaatatttggagtcagtgaagagagtttttgcaaatgtcttagaagataaattagcgacagtgtgagagatcagtttgcactgtgcttcagttttccattgcaggctcttactaacctgatcccattacagctttgaattaggaaataagcctgaggcacaaatagctgtgaaagctttgtttggttgagggttttggaattcgaatgcttaacaaaagtttg

SEQ ID NO: 301194 - DNA, 520 bp, Homo sapiens
tcagctagaagatgcttagcacttctctgcctctttttaaaattccttcttctgggaagagagactgatcttaccactgagtgtgggagaagaaacagcatgattagcagaatgccatcccctctctcttttcaaatgtgtgagcctggagagagttctcttcagtgtgtgagcctggagagagttctcttcaatgtgtgagcctggagagagttcttttcaatgtgtgagcctggagagaggatgcttttttatccactgtgaggatggcttttcagggcaagctctgtctgcatgtgcaggggtacaacctccaattttgttctgttttcctttgttttgttttgctttgctcttctttgctttgagaagccttagcatagacctaggggaagtgttagaccatagagctaaagtcatcttctttggcatgattagaattttcaaaatacataacaaatattttaraattttgatctccatttatctgtcttctgggtcctctctcaatatattgtga

SEQ ID NO: 301195 - DNA, 512 bp, Homo sapiens
tgatctagcccaacgctccctctgggcatgtgcctctccaagatgccgcaggcagaggaagctgaaaggctgagtgagcctcccatttgaatgtctgctttttctagggcaagctgttcttttccataccttgtttgtaagacagagaaggggtccgcctgaattgtaccgggcactgtgttagcgctccatgcagatgggccaggttgctttcactcttctgagattaayagttgcacttcttaataacagagccatttcacagtttgataccaagcacccatacagacaatatttggagtcagtgaagagagtttttgcaaatgtcttagaagataaattagcgacagtgtgagagatcagtttgcactgtgcttcagttttccattgcaggctcttactaacctgatcccattacagctttgaattaggaaataagcctgaggcacaaatagctgtgaaagctttgtttggttgagggttttggaattcgaatgcttaacaaaagtttg

SEQ ID NO: 301196 - DNA, 416 bp, Homo sapiens
agagaaggggtccgcctgaattgtaccgggcactgtgttagcgctccatgcagatgggccaggttgctttcactcttctgagattaacagttgcacttcwtaataacagagccatttcacagtttgataccaagcacccatacagacaatatttggagtcagtgaagagagtttttgcaaatgtcttagaagataaattagcgacagtgtgagagatcagtttgcactgtgcttcagttttccattgcaggctcttactaacctgatcccattacagctttgaattaggaaataagcctgaggcacaaatagctgtgaaagctttgtttggttgagggttttggaattcgaatgcttaacaaaagtttgcaaaatcctgtgaaatttctttcttttcttttttttttttttttttt

SEQ ID NO: 301197 - DNA, 512 bp, Homo sapiens
tgatctagcccaacgctccctctgggcatgtgcctctccaagatgccgcaggcagaggaagctgaaaggctgagtgagcctcccatttgaatgtctgctttttctagggcaagctgttcttttccataccttgtttgtaagacagagaaggggtccgcctgaattgtaccgggcactgtgttagcgctccatgcagatgggccaggttgctttcactcttctgagattaacagttgcacttcttaatmacagagccatttcacagtttgataccaagcacccatacagacaatatttggagtcagtgaagagagtttttgcaaatgtcttagaagataaattagcgacagtgtgagagatcagtttgcactgtgcttcagttttccattgcaggctcttactaacctgatcccattacagctttgaattaggaaataagcctgaggcacaaatagctgtgaaagctttgtttggttgagggttttggaattcgaatgcttaacaaaagtttg

SEQ ID NO: 301198 - DNA, 520 bp, Homo sapiens
tacagctttgaattaggaaataagcctgaggcacaaatagctgtgaaagctttgtttggttgagggttttggaattcgaatgcttaacaaaagtttgcaaaatcctgtgaaatttctttcttttcttttttttttttttttttttgcatttcatttaccttgtcttatttgttctttctgttctctctagtmttattttcaaatgcaattaagaccacctagttctgtcattggctggaattcccaggaatcagtgaccctttgatagaggtgtgtgtgccctgcccaggggacccagtgggcagcatgaggctcccctctcccctttctcaaccagcctggagtatgttggaaataaaacagagagctaaagaatgtggagaaactgccggcctgaacccaactagagtggaaaacatccaaggaaggctggtggcgctgggaagtgagctgagtctcttgggttctaaaaagctggaaggattggagcaggaacccagccccacactttccagcttgt

SEQ ID NO: 301199 - DNA, 520 bp, Homo sapiens
tacagctttgaattaggaaataagcctgaggcacaaatagctgtgaaagctttgtttggttgagggttttggaattcgaatgcttaacaaaagtttgcaaaatcctgtgaaatttctttcttttcttttttttttttttttttttgcatttcatttaccttgtcttatttgttctttctgttctctctagtcttattttcaaatgcaattaagaccacctagttctgtcattggctggaattcccaggaatcagtgaccctttgatagaggtrtgtgtgccctgcccaggggacccagtgggcagcatgaggctcccctctcccctttctcaaccagcctggagtatgttggaaataaaacagagagctaaagaatgtggagaaactgccggcctgaacccaactagagtggaaaacatccaaggaaggctggtggcgctgggaagtgagctgagtctcttgggttctaaaaagctggaaggattggagcaggaacccagccccacactttccagcttgt

SEQ ID NO: 301200 - DNA, 512 bp, Homo sapiens
acattcatcctgacacatccctttggcacatttttaaggtgaaacktgtgactccataacgttttctttttaggcaagggcttctgtggtggtaatcatgacctaaagagcccgattctgcagtcttcagagagccaggattcctgcccaaagttagacaggcagcatttgaagcaaagtttacttcttctgactattcgttttttatttattacagcagatttatcatgtgctagataatttcacattcatggcttttctagtgctcaatttatcaaggacagtggtgccacatactcttgtattttatcacaagtaccatcaggataagagagacaggttctctgctgcagtgactgccacgaaatcataattcataatgatagatgcgtcttccctgggttcgatttttaatgtttcccttttttggaatgtttacataacagaaaaaagagggaattatatatgagtcacattcctatcactcatgtgttctttactgagagaatgaa

SEQ ID NO: 301201 - DNA, 512 bp, Homo sapiens
acattcatcctgacacatccctttggcacatttttaaggtgaaacgtgtgactccataacgttttctttttaggcaagggcttctgtggtggtaatcatgacctaaagagcccrattctgcagtcttcagagagccaggattcctgcccaaagttagacaggcagcatttgaagcaaagtttacttcttctgactattcgttttttatttattacagcagatttatcatgtgctagataatttcacattcatggcttttctagtgctcaatttatcaaggacagtggtgccacatactcttgtattttatcacaagtaccatcaggataagagagacaggttctctgctgcagtgactgccacgaaatcataattcataatgatagatgcgtcttccctgggttcgatttttaatgtttcccttttttggaatgtttacataacagaaaaaagagggaattatatatgagtcacattcctatcactcatgtgttctttactgagagaatgaa

SEQ ID NO: 301202 - DNA, 520 bp, Homo sapiens
tacagctttgaattaggaaataagcctgaggcacaaatagctgtgaaagctttgtttggttgagggttttggaattcgaatgcttaacaaaagtttgcaaaatcctgtgaaatttctttcttttcttttttttttttttttttttgcatttcatttaccttgtcttatttgttctttctgttctctctagtcttattttcaaatgcaattaagaccacctagttctgtcattggctggaattcccaggaatcagtgaccctttgatagaggtgtgtgtgccctgcccaggggacccagtgggcagcatgaggctcccctctcccctttctcaaccagcctggagtatgttggaaataaaacagagagctaaagaatgtggagaaactgccggcctgaacccaactagagtggaaaacatccaaggaaggcyggtggcgctgggaagtgagctgagtctcttgggttctaaaaagctggaaggattggagcaggaacccagccccacactttccagcttgt

SEQ ID NO: 301203 - DNA, 512 bp, Homo sapiens
acattcatcctgacacatccctttggcacatttttaaggtgaaacgtgtgactccataacgttttctttttaggcaagggcttctgtggtggtaatcatgacctaaagagcccgattctrcagtcttcagagagccaggattcctgcccaaagttagacaggcagcatttgaagcaaagtttacttcttctgactattcgttttttatttattacagcagatttatcatgtgctagataatttcacattcatggcttttctagtgctcaatttatcaaggacagtggtgccacatactcttgtattttatcacaagtaccatcaggataagagagacaggttctctgctgcagtgactgccacgaaatcataattcataatgatagatgcgtcttccctgggttcgatttttaatgtttcccttttttggaatgtttacataacagaaaaaagagggaattatatatgagtcacattcctatcactcatgtgttctttactgagagaatgaa

SEQ ID NO: 301204 - DNA, 282 bp, Homo sapiens
taacacagcagagttatttagagtcaggcagacctgggttcaaatcccagttccaactccctagcttgatggcctttatacaacgtggtctctaaactttagttccttcatatggaaaatggggtaacgaccacctttcacrgctgttgtgggaactacatgagaccatgtgcagaagcttctgagcacagttccttcactatacctcaagagtcaagagctatttcaccaagaatttgcttgaggtgaaggctataaatctaaatgattcaaatgtttaaa

SEQ ID NO: 301205 - DNA, 282 bp, Homo sapiens
taacacagcagagttatttagagtcaggcagacctgggttcaaatcccagttccaactccctagcttgatggcctttatacaacgtggtctctaaactttagttccttcatatggaaaatggggtaacgaccacctttcacggctgttgtgggaactacatgagaccatgtgcagaagcttctgagcacagttccttyactatacctcaagagtcaagagctatttcaccaagaatttgcttgaggtgaaggctataaatctaaatgattcaaatgtttaaa

SEQ ID NO: 301206 - DNA, 475 bp, Homo sapiens
acatgttcttaggtttacaaaagatggatcatttcttttctaagtagtgtttgtacggattattttggccaatgagcaatttctgagagtgggtgactgtgattaattgccaaatggttctaatctattatctaacaacattcttctaatggaaaagggaaaatgagtaaatttgccactaatgtaaatgtaacataagtagtaattaattttctttataaaaagctgagctcattgactatattgaaagtrtaagcaggaaagtaaaacatgaccctaacaacaaacagatggcattccccttcatgtgcctgcgcacacttttgaagtttgagagaaaccacacaacactcatgctttcaattatgtttccaacagagacagaccccaaatgtattttttctttataactgattgctcttccacgtcagtccatatgcctgagctggaaatttacctcagcaaaggaaagaga

SEQ ID NO: 301207 - DNA, 475 bp, Homo sapiens
acatgttcttaggtttacaaaagatggatcatttcttttctaagtagtgtttgtacggattattttggccaatgagcaatttctgagagtgggtgactgtgattaattgccaaatggttctaatctattatctaacaacattcttctaatggaaaagggaaaatgagtaaatttgccactaatgtaaatgtaacataagtagtaattaattttctttataaaaagctgagctcattgactatattgaaagtataagcaggaaagtaaaacatgaccctaacaacaaacagatggcattccccttcatgtgcctgmgcacacttttgaagtttgagagaaaccacacaacactcatgctttcaattatgtttccaacagagacagaccccaaatgtattttttctttataactgattgctcttccacgtcagtccatatgcctgagctggaaatttacctcagcaaaggaaagaga

SEQ ID NO: 301208 - DNA, 475 bp, Homo sapiens
acatgttcttaggtttacaaaagatggatcatttcttttctaagtagtgtttgtacggattattttggccaatgagcaatttctgagagtgggtgactgtgattaattgccaaatggttctaatctattatctaacaacattcttctaatggaaaagggaaaatgagtaaatttgccactaatgtaaatgtaacataagtagtaattaattttctttataaaaagctgagctcattgactatattgaaagtataagcaggaaagtaaaacatgaccctaacaacaaacagatggcattccccttcatgtgcctgcgcacacttttgaagtttgagagaaaccacacaacactcatgctttcaattatgtttccaacagagacagaccccaaatgtattttttctttataactgattgctyttccacgtcagtccatatgcctgagctggaaatttacctcagcaaaggaaagaga

SEQ ID NO: 301209 - DNA, 435 bp, Homo sapiens
aattcatatgttctcatggtcaaatcaaacttgttttctttgcttcaccaacaaasattgtcacatcggctacacccaaaagccagagctcagcagtcattcacaaccgtcaatatacttatcaactctaaaacaatcaggaggcggattttaaatttacaacgaggtacctcattttcaaagtattataaaatctgttctgtaagtcatgtgtggtgtcttttttttctctttcttttctctggagtgccttcaaaataaacattgtaatttgagatgtggaccacataaaatggaccaaatgataagataatgggcaaaagcatttccaaagtgagaccagctgtcgaccttgtcttcagaagggaggttctggcaaacttccattggcccccagcctagttttgtttcaaactgattagcaaactttctagt

SEQ ID NO: 301210 - DNA, 435 bp, Homo sapiens
aattcatatgttctcatggtcaaatcaaacttgttttctttgcttcaccaacaaacrttgtcacatcggctacacccaaaagccagagctcagcagtcattcacaaccgtcaatatacttatcaactctaaaacaatcaggaggcggattttaaatttacaacgaggtacctcattttcaaagtattataaaatctgttctgtaagtcatgtgtggtgtcttttttttctctttcttttctctggagtgccttcaaaataaacattgtaatttgagatgtggaccacataaaatggaccaaatgataagataatgggcaaaagcatttccaaagtgagaccagctgtcgaccttgtcttcagaagggaggttctggcaaacttccattggcccccagcctagttttgtttcaaactgattagcaaactttctagt

SEQ ID NO: 301211 - DNA, 415 bp, Homo sapiens
tgttctgtaagtcatgtgtggtgtcttttttttctctttcttttctctggagtgccttcaaaataaacattgtaatttgagatgtggaccayataaaatggaccaaatgataagataatgggcaaaagcatttccaaagtgagaccagctgtcgaccttgtcttcagaagggaggttctggcaaacttccattggcccccagcctagttttgtttcaaactgattagcaaactttctagtcaatcaatcctgtcccaaattaagttgctggtaagaaaaaaggagcagcctgatttgcattacaaagctctcaggcatctaagagttgagatgtgactatcctgaggctccttcatgctgagtaaaagcaaaggcttctcttctctccaagtcaagaggaagagacaagtaagcc

SEQ ID NO: 301212 - DNA, 415 bp, Homo sapiens
tgttctgtaagtcatgtgtggtgtcttttttttctctttcttttctctggagtgccttcaaaataaacattgtaatttgagatgtggaccacataaaatggaccaaatgataagataatgggcaaaagcatttccaaagtgagaccagctgtcgaccttgtcttcagaagggaggttctggcaaacttccattggcccccagcctagttttgtttcaaactgattagcaaactttctagtcaatcaatcctgtcccaaattaagttgctggtaagaaaaaaggagcagcctgatttgcattacaaagctctcaggcatctaagagttgagatgtgactatcctgaggytccttcatgctgagtaaaagcaaaggcttctcttctctccaagtcaagaggaagagacaagtaagcc

SEQ ID NO: 301213 - DNA, 549 bp, Homo sapiens
tgggtgcctgtaatcccaggcatgggaggctgaggcaggagaatcccttgaactcaggagacagaggttgtagtgagccgagatcgtgccactgcactccaacctgggcgatggagtgagactccctctcaacaacaacaacaacaaactagcaaataattttctgaccttccccagaatcaggtcacaagatcctcatgtgagaggtgcccacctcatatctggaagtaatgaatgtccttgttctgaggacatgaggacagagaagaatctgagaaaacaggcctcattcaaaaagtgttgccttggtttgttaccattaggcccttcctcctttgtctgatgatacttctctacagctatccacgatgtcacacccagcatcaagatgcacagatcactctgtttctttgggtcttcattttccaaggctctcatgtcacatgagacttactttagtaaatctgtacgctttccacttgttaatctgtcttttgttacttgggcttcagcmgtgaacccagtgatggctgagaaaggaaatctttc

SEQ ID NO: 301214 - DNA, 553 bp, Homo sapiens
gcatttatcttacctcacaatgttagcatattaactatagagagattataatgacatctcgtggatactacatttctgttgattaacttatgtgaagcctaagacttactttgtgcattaaagaattaagccaattacctaacaaacttagacttttctgtactttcatttattttttaacagaaaatgtaatgtagactaattgtttacaaatgtcacacatgtaatcacccaggaagcttctttaaaaaatcytaatgtccaggctattctgtgtaataataaagtcaaaaacttttaaaatgtatagtaaaaataaaaatccagaaagggtgttgttaaaaataatccacaagcctgtagagaaggtcttgaaggcaacaattatgaccacgttagagaaaatgcattcatgaaaacaagacccacaaccattttaacactggaagtttctctgttctgaagactatgtgatttaaagggactagagtttgtttgtaacaagaaacaagtggaggccacagctacaggcaaatgcattggactaaatggc

SEQ ID NO: 301215 - DNA, 608 bp, Homo sapiens
gtcacacatgtaatcacccaggaagcttctttaaaaaatcttaatgtccaggctattctgtgtaataataaagtcaaaaacttttaaaatgtatagtaaaaataaaaatccagaaagggtgttgttaaaaataatccacaagcctgtagagaaggtcttgaaggcaacaattatgaccacgttagagaaaatgcattcatgaaaacaagacccacaaccattttaacactggaagtttctctgttctgaagactatgtgatttaaagggactagagtttgtttgtaacaagaaacaagtggaggccacagctacaggcaaatgcattggactaaatggccaggtgtttattcattttacctctgtggtattttctatatctgctagtgaagattattggcrttaccacttgagaaactctgagggtcaacgttttagtgtttttgatttctttgcagcactgaatgtaggcattgttatattcatggaacatgtagaaacacgtgcttcattaactaagtggagactcagtctactgaattttttttagctgttgttcgtgatagtttaaaatataatggcttctaatgacttttagcgttagctata

SEQ ID NO: 301216 - DNA, 608 bp, Homo sapiens
gtcacacatgtaatcacccaggaagcttctttaaaaaatcttaatgtccaggctattctgtgtaataataaagtcaaaaacttttaaaatgtatagtaaaaataaaaatccagaaagggtgttgttaaaaataatccacaagcctgtagagaaggtcttgaaggcaacaattatgaccacgttagagaaaatgcattcatgaaaacaagacccacaaccattttaacactggaagtttctctgttctgaagactatgtgatttaaagggactagagtttgtttgtaacaagaaacaagtggaggccacagctacaggcaaatgcattggactaaatggccaggtgtttattcattttacctctgtggtattttctatatctgctagtgaagattattggcgttaccacttgagaaactctgagggtcaacrttttagtgtttttgatttctttgcagcactgaatgtaggcattgttatattcatggaacatgtagaaacacgtgcttcattaactaagtggagactcagtctactgaattttttttagctgttgttcgtgatagtttaaaatataatggcttctaatgacttttagcgttagctata

SEQ ID NO: 301217 - DNA, 534 bp, Homo sapiens
agtttgagtagttttttttaataaagtcatatacacatccaagcataataatttactattcactacagtgcgttcagcatagtgtgttatattcagtatatacgtaaatgcctcaagaacatgatcataatgctgattaaactcctcagtaaaacattctctcaagacaaactttgcttttctatcgttcggattttgtttaggaagaaaatttcaasaagccggccacatagacaaacttcgaagacaaagacttttttgaaatagaaagttacagagtttctcttttaaaagttccttgtgtttatacatctttgggtgttgctcttctttcattatcagagacagcagtgcctcaagtctagtgtcagaggcatctctctgcacccgaagcactttgtcaaagtcaggagggcttaataaggctcgattttcactgaatgcatttgttaggctcttgaatgttaaatcgcaagctgaatcattgtgcaattgctttcttttctttttttttctttttctggccaagtcaga

SEQ ID NO: 301218 - DNA, 534 bp, Homo sapiens
agtttgagtagttttttttaataaagtcatatacacatccaagcataataatttactattcactacagtgcgttcagcatagtgtgttatattcagtatatacgtaaatgcctcaagaacatgatcataatgctgattaaactcctcagtaaaacattctctcaagacaaactttgcttttctatcgttcggattttgtttaggaagaaaatttcaacaagccggccacatagacaaacttcgaagacaaagacttttttgaaatagaaagttacagagtttctcttttaaaagttccttgtgtttatacatctttgggtgttgctcttcyttcattatcagagacagcagtgcctcaagtctagtgtcagaggcatctctctgcacccgaagcactttgtcaaagtcaggagggcttaataaggctcgattttcactgaatgcatttgttaggctcttgaatgttaaatcgcaagctgaatcattgtgcaattgctttcttttctttttttttctttttctggccaagtcaga

SEQ ID NO: 301219 - DNA, 560 bp, Homo sapiens
cgggctctcatgagccggcacgagctggctccagcacaccaccggtttccagttgaaatagtgagaatatctagtttttattgagaacgtggctgtgcacagcctaggacaggatttctcagcctcacttctacaggccttctgggctggcacatcctctgttatgaggcctcactgtccatggtaagatgtttggcagcatcctggtctttacccaccatgggccagtagtattctcccagttgtgacaactaaaatatcttcaagctttgtcaaatgtcccctgtgggcaaaattgtgcccgttggagaaccactggcctagaagaagggtgagttggctcagtatggaagctgtgtatttgttttgaggtcctgctaacatttgaaggcaaagagaaggcctgacctttgctgtgggcttgggcttcayaaatgcccgtcaaagaatggtctgtgcaaaggcagtgatttcacatacgtctgaatggggatttatacttttttttctagttggtgtgtgtcaggtgtagaatccctacattctgtttgctctataag

SEQ ID NO: 301220 - DNA, 457 bp, Homo sapiens
tttcaaatgtcaatcaagatataaatgagatgaatgccttgtggaattaattatttttatgactgtgttatgatatgaaaatgttatgatagggaaaaatgcaagaaactgttacccctgtaggaatattgactttgtagccttggttagaagacaggctctgatggaaaaatttgctatgatggattgtgccatggagacttgactctctctacatttatggcactgaagccacctctgtggtgtgcagtgtggacrcacgccacgtctctcagacgaagcacacctggcagtgggcaggccctggctgtgccctgctgctgtggcctgccccttcttcctctagtagggcggggaccctctaaccaggcagctttggactagaccagtgctattcaaagaatgatctggagacagtgaccaggagtcctttgtggatctggggacctaacattag

SEQ ID NO: 301221 - DNA, 457 bp, Homo sapiens
tttcaaatgtcaatcaagatataaatgagatgaatgccttgtggaattaattatttttatgactgtgttatgatatgaaaatgttatgatagggaaaaatgcaagaaactgttacccctgtaggaatattgactttgtagccttggttagaagacaggctctgatggaaaaatttgctatgatggattgtgccatggagacttgactctctctacatttatggcactgaagccacctctgtggtgtgcagtgtggacacaygccacgtctctcagacgaagcacacctggcagtgggcaggccctggctgtgccctgctgctgtggcctgccccttcttcctctagtagggcggggaccctctaaccaggcagctttggactagaccagtgctattcaaagaatgatctggagacagtgaccaggagtcctttgtggatctggggacctaacattag

SEQ ID NO: 301222 - DNA, 589 bp, Homo sapiens
atttcaggtggaactgaaatctctcggactctgaggcctgctctcttgtaacctctaacttaagtgctagaaggtatactaaatgcattttcagttttgttgctatatttgccagtgtctgaaactctccctatagttcataattgtagataaagaagtaaaaaaaaagaaagcatttgttctgttgaaggtaaaatatgcccacatgtcatatgcaaaatgacattgatgtgagacccatttcctctcatttacataagacaaagttccttccatgcsaaacttctctagaaacaatatctggaaaagcacaggtgaaggagaggtatgacagaggaatcccaaattggatactgaacgcagaacttgttgcccttgtctagcaagttcagattgccataaggaagtcaccatgagtgttaggttaaatggccattgctacattaaactttctcttaatatcacttcaaacatttaaaaatatatattagaagaaatgctaccattttcaattaattctattttactggtttctctttctgttaatataaatatgcatagttcttttcttcaaatacaaagctgattg

SEQ ID NO: 301223 - DNA, 417 bp, Homo sapiens
aaccctgagccaggcagagtccggggactaaggttccatgcaggaatggagtggggtggcccatctcatggaggaggagatgagacataggcaacaagatgtggttaaagayggacagggggtcagaaatcaaagaaaaagagaaaatcaagtatcatcatctctcaagggtcggggtaccagaaagaaagccaacttgaagcaatgagtatttattgccagttataactacagatagctgagtggggagagaagcgttggaaggaaaatagaagaagaaacccagaaatgtccaggtatgtgaaaacaagtgccggcagtcgcattaagaggttactggggccttgaccgtggtcagggagagaaatggcatcaaggcagcttagagacgcgctgctgggaacttcattttggttt

SEQ ID NO: 301224 - DNA, 417 bp, Homo sapiens
aaccctgagccaggcagagtccggggactaaggttccatgcaggaatggagtggggtggcccatctcatggaggaggagatgagacataggcaacaagatgtggttaaagatggacagggggtcagaaatcaaagaaaaagagaaaatcaagtatcatcatctctcaagggtcggggtaccagaaagaaagccaacttgaagcaatgagtatttattgccagttataactacagatagctgagtggggagagaagcgttggaagsaaaatagaagaagaaacccagaaatgtccaggtatgtgaaaacaagtgccggcagtcgcattaagaggttactggggccttgaccgtggtcagggagagaaatggcatcaaggcagcttagagacgcgctgctgggaacttcattttggttt

SEQ ID NO: 301225 - DNA, 417 bp, Homo sapiens
aaccctgagccaggcagagtccggggactaaggttccatgcaggaatggagtggggtggcccatctcatggaggaggagatgagacataggcaacaagatgtggttaaagatggacagggggtcagaaatcaaagaaaaagagaaaatcaagtatcatcatctctcaagggtcggggtaccagaaagaaagccaacttgaagcaatgagtatttattgccagttataactacagatagctgagtggggagagaagcgttggaaggaaaatagaagaagaaacccagaaatgtccaggtrtgtgaaaacaagtgccggcagtcgcattaagaggttactggggccttgaccgtggtcagggagagaaatggcatcaaggcagcttagagacgcgctgctgggaacttcattttggttt

SEQ ID NO: 301226 - DNA, 417 bp, Homo sapiens
aaccctgagccaggcagagtccggggactaaggttccatgcaggaatggagtggggtggcccatctcatggaggaggagatgagacataggcaacaagatgtggttaaagatggacagggggtcagaaatcaaagaaaaagagaaaatcaagtatcatcatctctcaagggtcggggtaccagaaagaaagccaacttgaagcaatgagtatttattgccagttataactacagatagctgagtggggagagaagcgttggaaggaaaatagaagaagaaacccagaaatgtccaggtatgygaaaacaagtgccggcagtcgcattaagaggttactggggccttgaccgtggtcagggagagaaatggcatcaaggcagcttagagacgcgctgctgggaacttcattttggttt

SEQ ID NO: 301227 - DNA, 599 bp, Homo sapiens
aaattgtctcctgagcatattaaatgaacctttaataactccatatgggactctcatacatgattttacttaaagttttctaaagtttaaatatatgtatatatcctctctctmtatatatatacacacacatatatacacacatatatttaaagtaaaatatatatataaactaatatatattatatataaagtaaaatctaacttgatttcaaccttaaagtattcataactctcttagcccttaaataccaatatgtcttgaatatggcctagggataaagaaggggtcgcttacttaggtcccaagcgaaattgtcaaggattctgtttagccacaaaagccgttaggaaaagggcactgaagctctatgacagtaggcacagagaactaccagattatctgagcttcagattccaatctcatttccgctcagtttgcaagctgtttctacaaccatgatttccctctccccagtctcctgtgagtgatggctgccgggacggcctgtcggctgctggctcacggctcccagcctgcggtttccagtgcctgtgcgctccattgccagtggttcttgtctaggagaggtgccatt

SEQ ID NO: 301228 - DNA, 599 bp, Homo sapiens
aaattgtctcctgagcatattaaatgaacctttaataactccatatgggactctcatacatgattttacttaaagttttctaaagtttaaatatatgtatatatcctctctctctatatatatacacacacatatatacacacatatatttaaagtaaaatatatatataaactaatatatattatatataaagtaaaatctaacttgatttcaaccttaaagtattcataactctcttagcccttaaataccaatatgtcttgaatatggcctagggataaagaaggggtcgcttacttaggtcccaagcgaaattgtcaaggattctgtttagccacaaaagccgttaggaaaagggcactgaagctctatgacagtaggcacagagaactaccagattatctgagcttcagattccaatytcatttccgctcagtttgcaagctgtttctacaaccatgatttccctctccccagtctcctgtgagtgatggctgccgggacggcctgtcggctgctggctcacggctcccagcctgcggtttccagtgcctgtgcgctccattgccagtggttcttgtctaggagaggtgccatt

SEQ ID NO: 301229 - DNA, 373 bp, Homo sapiens
ctatggctatgtgagatgtcaccactggaattagtgaagagtacctaagacatccctgtacmttttgcaacttcctgtgaatctataattatttcaaaagaaagttgaaagtcatagcagactttcacttcaaagaggaaaaaaactgaagattaatgaaattgttgaaaaacatcaaatactcaatagtctgtatgagagctgtattctgtccactcccagcacagctgtcatttagccttttcctgatgtgccctggaggacttgagctcctcttgggttgccaaggccaatagtgtttatttgttactaactttgtactggacccccaaaaatgaaaagtgattgaataatcatttataataacaactag

SEQ ID NO: 301230 - DNA, 373 bp, Homo sapiens
ctatggctatgtgagatgtcaccactggaattagtgaagagtacctaagacatccctgtaccttttgcaacttcctgtgaatctataattatttcaaaagaaakttgaaagtcatagcagactttcacttcaaagaggaaaaaaactgaagattaatgaaattgttgaaaaacatcaaatactcaatagtctgtatgagagctgtattctgtccactcccagcacagctgtcatttagccttttcctgatgtgccctggaggacttgagctcctcttgggttgccaaggccaatagtgtttatttgttactaactttgtactggacccccaaaaatgaaaagtgattgaataatcatttataataacaactag

SEQ ID NO: 301231 - DNA, 373 bp, Homo sapiens
ctatggctatgtgagatgtcaccactggaattagtgaagagtacctaagacatccctgtaccttttgcaacttcctgtgaatctataattatttcaaaagaaagttgaaagtcatagcagactttcacttcaaagaggaaaaaaactgaagattaatgaaattgttgaaaaacatcaaatactcaatagtctgtatgagagctgtattctgtcyactcccagcacagctgtcatttagccttttcctgatgtgccctggaggacttgagctcctcttgggttgccaaggccaatagtgtttatttgttactaactttgtactggacccccaaaaatgaaaagtgattgaataatcatttataataacaactag

SEQ ID NO: 301232 - DNA, 417 bp, Homo sapiens
taatagcagcatttattacatttctgatcgtgtttctggacaatttcagttccagattcagctgcacttttcctctaggtcttcattccctgaagaggttgatatgggcatctggtctcattcctgatgtattcctcagatcagagtagttgtcagkttgagggatgagaaaggcatttgtgtgagagagctgtgtggactttggcagatagggaaaaaacaagagtcctgaggtgccacgtgtcccatgcctttggctccccaccttttccaccctgctgtctgccctgaaaggccaccattgccttctggccttgcttgtctttggccagtgggaagtctcaacaggaaagtttggagagagaaagaagtgtgagttggaggatcttgtcccccagttctctctctgcaggattg

SEQ ID NO: 301233 - DNA, 417 bp, Homo sapiens
taatagcagcatttattacatttctgatcgtgtttctggacaatttcagttccagattcagctgcacttttcctctaggtcttcattccctgaagaggttgatatgggcatctggtctcattcctgatgtattcctcagatcagagtagttgtcaggttgagggatgagaaaggcatttgtgtgagagagctgtgtggactttggcagatagggaaaaaacaagagtcctgaggtgcyacgtgtcccatgcctttggctccccaccttttccaccctgctgtctgccctgaaaggccaccattgccttctggccttgcttgtctttggccagtgggaagtctcaacaggaaagtttggagagagaaagaagtgtgagttggaggatcttgtcccccagttctctctctgcaggattg

SEQ ID NO: 301234 - DNA, 417 bp, Homo sapiens
taatagcagcatttattacatttctgatcgtgtttctggacaatttcagttccagattcagctgcacttttcctctaggtcttcattccctgaagaggttgatatgggcatctggtctcattcctgatgtattcctcagatcagagtagttgtcaggttgagggatgagaaaggcatttgtgtgagagagctgtgtggactttggcagatagggaaaaaacaagagtcctgaggtgccaygtgtcccatgcctttggctccccaccttttccaccctgctgtctgccctgaaaggccaccattgccttctggccttgcttgtctttggccagtgggaagtctcaacaggaaagtttggagagagaaagaagtgtgagttggaggatcttgtcccccagttctctctctgcaggattg

SEQ ID NO: 301235 - DNA, 597 bp, Homo sapiens
tcatgccattttgaaacccatcttagggtcccaaaaatatgatcatcctcttctgcctcagccccctgtttgttatataccacagtcttgcttccctgggtgccaggccattgacagtgccacagtatctgttccccattctcaaagtcatggctctttgagattctgcaataacttaaaaggtcagaacttaaagaaatggattatagtatctgagtggtctctatcttttcatgaagataaagaacctcggggaaaataaaaaggatgtctcttaaagcttgtctcagaggtttacatatgcatccccgcacaacgccaggaccacatttcacaatgtttatccctatttcaatccccattgcckttttatccccatccccttaaggctcaccatgtacagttgtgcaggttgtacacaaacatacatgatagtcctccatatgacagtgatgtgaaggaagggaagccatcaggagataggacttacttgtttctgaaacctcttgtgaccctttgtgtcccttactctgcccaacatataaaaaacactccatcaatatgtattatttctatacacacatatactacataaaa

SEQ ID NO: 301236 - DNA, 375 bp, Homo sapiens
tgatctcatgatccacccacctcagcctcccaaagtgttgggattacaggtatgagccaccatacccagcccatttttgtttattctcaaaccactatctcacatctttaagaatgatacttttggtasaaggcaagtaacagtgaatatgctaagtgtatgtttaactttaccatttctaaaaatgactataccactttatacttccattagcagtcaatgcaagatcacttgttctacatgctaaccaacacttgggatttttagtcattgggattatttgtagtgttatctcactgtggtttaattagcatttccctgataagtaatgatgtggttatcagtcattttatcatgtgctgattggtcatttta

SEQ ID NO: 301237 - DNA, 375 bp, Homo sapiens
tgatctcatgatccacccacctcagcctcccaaagtgttgggattacaggtatgagccaccatacccagcccatttttgtttattctcaaaccactatctcacatctttaagaatgatacttttggtagaaggcaagtaacagtgaatatgctaagtgtatgtttaactttacyatttctaaaaatgactataccactttatacttccattagcagtcaatgcaagatcacttgttctacatgctaaccaacacttgggatttttagtcattgggattatttgtagtgttatctcactgtggtttaattagcatttccctgataagtaatgatgtggttatcagtcattttatcatgtgctgattggtcatttta

SEQ ID NO: 301238 - DNA, 375 bp, Homo sapiens
tgatctcatgatccacccacctcagcctcccaaagtgttgggattacaggtatgagccaccatacccagcccatttttgtttattctcaaaccactatctcacatctttaagaatgatacttttggtagaaggcaagtaacagtgaatatgctaagtgtatgtttaactttaccatttctaaaaatgactataccacttyatacttccattagcagtcaatgcaagatcacttgttctacatgctaaccaacacttgggatttttagtcattgggattatttgtagtgttatctcactgtggtttaattagcatttccctgataagtaatgatgtggttatcagtcattttatcatgtgctgattggtcatttta

SEQ ID NO: 301239 - DNA, 375 bp, Homo sapiens
tgatctcatgatccacccacctcagcctcccaaagtgttgggattacaggtatgagccaccatacccagcccatttttgtttattctcaaaccactatctcacatctttaagaatgatacttttggtagaaggcaagtaacagtgaatatgctaagtgtatgtttaactttaccatttctaaaaatgactataccactttatacttccattagcagtcaatgcaagatcacttgttctacatgctaaccaayacttgggatttttagtcattgggattatttgtagtgttatctcactgtggtttaattagcatttccctgataagtaatgatgtggttatcagtcattttatcatgtgctgattggtcatttta

SEQ ID NO: 301240 - DNA, 415 bp, Homo sapiens
ccgggctgggggaccgttcataagaacagccagacaagatcctacttttcttaggtgcagacatgattaggaaacctgcagctcccagggacccctaccaattttctaacccgcagaatgaaggagtatgtgtgtatgtgtgtgtgtgtgtgtgtgtggtgtgaggtatgtgctccttaagaaaatggaaataaaccaacccatgagacagacagacagacagacagagattcacttagccaagtgttctgtcctgtcctctaaatccacttccaagtcacaagacgctgtaaactccaagtccacgcagagccckcaaaacgctccggccgctgctacgctcggcgaagatctgagtacaggcccgccaggctgggtttaaatagcctcagggcagcctagcagcggaaagggc

SEQ ID NO: 301241 - DNA, 287 bp, Homo sapiens
caaactcttctgacaaaatatatgaagaaggaatacttgctaattcattttttgataacagcattatccttataccaaagccaaagagagcacaaaagagagaactacagcacaatatcccttatgatatataagcaaaaatctcagcaaaatrctagcaatactagcaaaatactagcagcaatactgcgtaatcaaaggattgtaaactatcaccctttgagatttatccccaaaatgcaagtgtggctcaacatataaaaaatcaatcaatgtaatatactgta

SEQ ID NO: 301242 - DNA, 635 bp, Homo sapiens
ctaaaatgaataagcatgttattgtttcaattgatgcagaaaaaacattgatgaaatacaacatccttctataataaaaatactcartaaactaggcatagaagggatcttctgcaacatgacaatgggatgtacaaaaacccaacagttaatatcatgatcaatgatgaaacactgaaagctgttttcctaacatctagaacaagacaaggatggtgcatttgccacttctattcaatgtagcactggcagttctagccagagcaattaggcaagacaaagaagtaaaaggcatctacattagaaataaaaaataggtgtaaaattatatctacacatgatcttatgggtataaagctccaaacaaaacacaaaaccatttataactaataaaagaggcaggatgcaaaacaaacataggcaaatgagctatatttctatttagttgtaaataactatgaaaacattttaaaaattccatttataatagcatcaaagaataagttattcaggcataaatgtaaccatggtggtatacacaaaactttgctgaaaaaaaataaagagagtggaaataactggaaagacattctgtgttcacgggttgtaagacaatattgttaagatgacaatac

SEQ ID NO: 301243 - DNA, 635 bp, Homo sapiens
ctaaaatgaataagcatgttattgtttcaattgatgcagaaaaaacattgatgaaatacaacatccttctataataaaaatactcagtaaactaggcatagaagggatcttctgcaacatgacaatgggatgtacaaaaacccaacagttaatatcatgatcaatgatgaaacactgaaagctgttttcctaacatctagaacaagacaaggatggtgcatttgccacttstattcaatgtagcactggcagttctagccagagcaattaggcaagacaaagaagtaaaaggcatctacattagaaataaaaaataggtgtaaaattatatctacacatgatcttatgggtataaagctccaaacaaaacacaaaaccatttataactaataaaagaggcaggatgcaaaacaaacataggcaaatgagctatatttctatttagttgtaaataactatgaaaacattttaaaaattccatttataatagcatcaaagaataagttattcaggcataaatgtaaccatggtggtatacacaaaactttgctgaaaaaaaataaagagagtggaaataactggaaagacattctgtgttcacgggttgtaagacaatattgttaagatgacaatac

SEQ ID NO: 301244 - DNA, 635 bp, Homo sapiens
ctaaaatgaataagcatgttattgtttcaattgatgcagaaaaaacattgatgaaatacaacatccttctataataaaaatactcagtaaactaggcatagaagggatcttctgcaacatgacaatgggatgtacaaaaacccaacagttaatatcatgatcaatgatgaaacactgaaagctgttttcctaacatctagaacaagacaaggatggtgcatttgccacttctattcaatgtagcactggcagttctagccagagcaattaggcaagacaaagaartaaaaggcatctacattagaaataaaaaataggtgtaaaattatatctacacatgatcttatgggtataaagctccaaacaaaacacaaaaccatttataactaataaaagaggcaggatgcaaaacaaacataggcaaatgagctatatttctatttagttgtaaataactatgaaaacattttaaaaattccatttataatagcatcaaagaataagttattcaggcataaatgtaaccatggtggtatacacaaaactttgctgaaaaaaaataaagagagtggaaataactggaaagacattctgtgttcacgggttgtaagacaatattgttaagatgacaatac

SEQ ID NO: 301245 - DNA, 635 bp, Homo sapiens
ctaaaatgaataagcatgttattgtttcaattgatgcagaaaaaacattgatgaaatacaacatccttctataataaaaatactcagtaaactaggcatagaagggatcttctgcaacatgacaatgggatgtacaaaaacccaacagttaatatcatgatcaatgatgaaacactgaaagctgttttcctaacatctagaacaagacaaggatggtgcatttgccacttctattcaatgtagcactggcagttctagccagagcaattaggcaagacaaagaagtaaaaggcatctacattagaaataaaaaataggtgtaaaattatatctacacatgatcttatgggtataaagctccaaacaaaacacaaaaccatttataactaataaaagaggcaggatgcaaaacaaacataggcaaatgagctatatttctatttagttgtaaataactatgaaaacattttaaaaattccatttataatagcatcaaagaataagttattcaggcataaatgtaaccatggtggtatacacaaaactttgctgaaaaaaamtaaagagagtggaaataactggaaagacattctgtgttcacgggttgtaagacaatattgttaagatgacaatac

SEQ ID NO: 301246 - DNA, 576 bp, Homo sapiens
tcaaattcagcccttactccttgctcagggatcagattcagcccctactccttgcccagggattgcctttgctctgatttacagacgtggccccagcagtttgatggcagccctctgtcccctcagctctgggcgtccatctgctgtggacactggggtggctgaccggggccagaagcccaatacacccgcagcctgtttggcccatccrcacccagagttgctgggacaaagcttcttcaaacccaaagcctatcgtggtggaaaagcagactttagtgcctggccagtctgagcaggacacttcctggtcctccgaccaggctgcagccctgaggaacggtggcggcggcgaggacaaagtgtggacgctcctgtcagtcagacaagatgaggggaagcctcaaaaaagaaacaacgactgaaggatgaaaggagaggcgaggcgcccctcttcaaccaggggtcccgtgctgcactccgcgcccctcccagtgccccccatatctccgggatcttcctggtcacgggcaccctcctggcacatggtgttcagtgtgatcgggccctgcggcc

SEQ ID NO: 301247 - DNA, 576 bp, Homo sapiens
tcaaattcagcccttactccttgctcagggatcagattcagcccctactccttgcccagggattgcctttgctctgatttacagacgtggccccagcagtttgatggcagccctctgtcccctcagctctgggcgtccatctgctgtggacactggggtggctgaccggggccagaagcccaatacacccgcagcctgtttggcccatccgcacccagagttgctgggacaaagcttcttcaaacccaaagcctatcgtggtggaaaagcagactttagtgcctggccagtctgagcaggacacttcctggtcctccgaccaggctgcagccctgaggaacggtggcggcggcgaggacaaagtgtggacgctcctgtcrgtcagacaagatgaggggaagcctcaaaaaagaaacaacgactgaaggatgaaaggagaggcgaggcgcccctcttcaaccaggggtcccgtgctgcactccgcgcccctcccagtgccccccatatctccgggatcttcctggtcacgggcaccctcctggcacatggtgttcagtgtgatcgggccctgcggcc

SEQ ID NO: 301248 - DNA, 584 bp, Homo sapiens
tgatatataaacatgctaaatctacctacatacacagatttattaaaatatataggcctacagggcatattggacaaaattaaatatctacatgcagatatagaaattattggtaaatatgatagaaaaatgttgatatagtaaatttctgtgccaaatatttgaacaattctctgagtaatgctcagtgcattcaataatgtttttcctgcttttgtattttcttaccaagctcatagtgattcagaaggagaaacgcagcaaatgacaaaaacataaacattatgaaaatcatagatatgatttcttcagcaaaaaaaamcccacatctcacagaattactcatttgggccacattttaaaggttatcctaaatgtatcttgtgcattacatattgtaattctaacattatcaacaccatagttttgcctcctctgcttaaataattctgcaactgtagttttaatttactgtgacttgtgcttacctgaggaagggatgccaaggacgatgagaaccagcataaaatctgggagcatcgtgatgtcagtttcagaaagacagtttcttcctttttaacaac

SEQ ID NO: 301249 - DNA, 517 bp, Homo sapiens
gcatgagccatcacaaccagcctcactgcaatttttaaaagaaatgcattatttccagagccaactccatgtatacatacacacatactcttctaatcaattttaattttaatcaattagctttaaggagcaaagtacaccaaactcccttcatggcctcatctgctcgctgtgtagcataaatgttgatggtgttcattgtgtgacttcagagcaaaacagcatgccttctgcaaactggtgccagtcacaattaaaaatcaattttctgtgggctgcagatagatctctgtaataaatatcagtacacatatccagagattgaaaaaaatgtatcttcaggaacaaagattttagaatmgaaaaatactatcagattctagtcctgagtatttagcaagggtaataagcacacatgtccaccaaaagacatgcagaagaactctcatagcagctttagtcacaataaccccaaatggcaaacaacccaaatatccaccaacaagagaatagataa

SEQ ID NO: 301250 - DNA, 517 bp, Homo sapiens
gcatgagccatcacaaccagcctcactgcaatttttaaaagaaatgcattatttccagagccaactccatgtatacatacacacatactcttctaatcaattttaattttaatcaattagctttaaggagcaaagtacaccaaactcccttcatggcctcatctgctcgctgtgtagcataaatgttgatggtgttcattgtgtgacttcagagcaaaacagcatgccttctgcaaactggtgccagtcacaattaaaaatcaattttctgtgggctgcagatagatctctgtaataaatatcagtacacatatccagagattgaaaaaaatgtatcttcaggaacaaagattttagaatcraaaaatactatcagattctagtcctgagtatttagcaagggtaataagcacacatgtccaccaaaagacatgcagaagaactctcatagcagctttagtcacaataaccccaaatggcaaacaacccaaatatccaccaacaagagaatagataa

SEQ ID NO: 301251 - DNA, 596 bp, Homo sapiens
ggaccagtggctcacgcctgtaatcccagcactttgggaggctgaggcgggcggatcacgaggtcaggagaccgacaccatcctggataacacggtgaaaccccgtctctactaaaaatacaaaaaattagccgggcgtggtggcaggtgcctgcagtcccagctactcgggaggctgaggcaggagaatggcgtgaacccaggaggtggagcttgcagtgagccaaratggtgccactgcactccagtgtgggcgacagagcgagactccatctcaaaaaaaaaaaaaattaccctgttctaagcactttacatacattaactcaattattactcaccataatcctgtgaggtaggtattattacagtcatcctacagatgagcagaactgaggcaccaccaagttattaacttgcccacagtctcaatcagtaaatggtgggagccagagaattctgaccctagctgtctgattccagagccaatatttaaatcaactatactattcatttactcaacaagttttactgacagcctactatgtaccaggcacagttctaagcactggggataaagctgtgtacaagtcagacaa

SEQ ID NO: 301252 - DNA, 562 bp, Homo sapiens
gttctaattttgaacaaaactataattaaaatgaaataaaagagaawaaccaggttaaaaaattccatccttcatctatctggctccatgggaagaaaaccagaaccacagactagaagtaatataagcaaataatcagatcttacatcaaccaaggaagcacatgaacaattttggcaatacaaaactatcctttgagattgagctacctggaaattgcccaaagaaaggtctcaaactgggatgctgaggagtggttcctggaagataaaattctaacaaaagtgatcctgacaatcctaaagaaaacttgaactgtctttactattagctaaaagaaggaaaacacagacacaaaatgacagtttgatacactgtaccttgccaatgtttcatacaatgtttgtgcgacttccttatatgcatgaaaatcgtatggaacagcttgaagattaggacatagttgtttagcatgcccaaaaaacattccgttcttaatgccaagttgcctagagcgagaacaaaacacaatggaggttattctaggaagttttcaactcaa

SEQ ID NO: 301253 - DNA, 554 bp, Homo sapiens
catgccattgactttgacttcattttccgtttcaatcttcttaacgatgtgatttctaaagcaggaaaaaatttttgagttaataatatctgacttttaggttaaaacaattttttcatttcatcattttcttagtggtacacagtttggtatttccccctttaaaaacagaaaattyttatattgaatattgacaatgaaaaaaaaaaaccctgaaacttaaaccacaaactttatattctgatttgacaaaagatcattctttgcaaaagtagcaagataactagaaaaattctagaatattaacagccctttaggtgttttttgtttgttttttattttcacttcagatagtcccaaagaagaaataaaatagaacatttctcatggctgaagaaaaacccaaaaaacttttcagttatttttcccataaaaaattaattggaatctataagctgtaaatacccagttctgaagcacagtgcttggcatttactacatggtcaataaatatctgctgaattaatatactacaaataactttcataaaaatg

SEQ ID NO: 301254 - DNA, 541 bp, Homo sapiens
tcttacatctagttttgtgtcaaaaacattcagaccctttacatgcattatagcaacacatgcaacagaaagccatatattggcaggaaaatacattgttaacatacattcttgctgtactatagtttctcagcctagacaaatggacatttgcaaagtagctgtactggaaatatcacgggtagagatacattttttaggcaatggcataaatgtattaagaagtaaaatctaaaargtaatttcttcctaaagtgtcacaaagaagattttgaaaaaacatatctattttctacttttattaatgtgggtaagaaaagaaagctaaagctacgtattctgtgaaaaggttttctggtattatttgctatataccttgatagcacattaaaaaaaattaaaagctacaggtaacatgaaaaatatttgaatatgcttgtgagtacaagttaaattaacaaatgacaacaaaaattacagaaggcagtgatactggatcctctcagattaattagactcctggtgttttcgaaaaaaaata

SEQ ID NO: 301255 - DNA, 549 bp, Homo sapiens
tagccttctttcacaaatgaggaaacaaggtcctgagtgactgcataaagttttttttttttttctttttcctgagacggagtctttctctgttgcccaggctggtgcagtggcgccatctcagctcactggagcytcccatctcctgggttcacgcgattctcctgcctcagcctcccaagtaaccgggattacaggcacaagccaccactcccagctaattgtatttttagtacagacagggtttcaccatgttggccaagctggtctctgcccacctcggcctcccaaagtgctgggattacaggcatgagccaccatgcccggccaagcataaagtttctaaaattataccaggttatatggatactgaactgccgagtttggaagttctgaagccaagtatgtctccagagcccaggcccagccttttccaccacgctgcttctccgtgaatttatgcggctaaatacactatacaaaggaactgagttaatacttaatttgtggaacagttaatggagggtgttataattagtaaaagcaaga

SEQ ID NO: 301256 - DNA, 549 bp, Homo sapiens
tagccttctttcacaaatgaggaaacaaggtcctgagtgactgcataaagttttttttttttttctttttcctgagacggagtctttctctgttgcccaggctggtgcagtggcgccatctcagctcactggagcctcccatctcctgggttcamgcgattctcctgcctcagcctcccaagtaaccgggattacaggcacaagccaccactcccagctaattgtatttttagtacagacagggtttcaccatgttggccaagctggtctctgcccacctcggcctcccaaagtgctgggattacaggcatgagccaccatgcccggccaagcataaagtttctaaaattataccaggttatatggatactgaactgccgagtttggaagttctgaagccaagtatgtctccagagcccaggcccagccttttccaccacgctgcttctccgtgaatttatgcggctaaatacactatacaaaggaactgagttaatacttaatttgtggaacagttaatggagggtgttataattagtaaaagcaaga

SEQ ID NO: 301257 - DNA, 520 bp, Homo sapiens
tccacctccagactcctctttgtaaaaacccacattcccggttcacacacgagtccctggcacctccatgacatcccatcactctgtcttctttttaattgacagaaggagaccactgccccagcacttgccccctaacaagccattaacctccagttgtttggctggaaaatgggaccttgatcccagagagaactgactttgtgtgaatactcctggtctgtcctccttatgcaggcagcgctgggatcgaagtggagacccccgcagtgggtgaacatcgcagcatccctgggagggttcagcatgtttatcttgggctgaaggttgtaattatgatttaggggaatgccactttataatgactttttcttcgtttcatgtaaattaagttcctwgtgtgcgtgggaatgcatatgtcactattcctaaggggagttggagaattcattagttactgtctgggaagtgttctgcaaataaaaagctctccaaaaatgcgaggtattattattaggtg

SEQ ID NO: 301258 - DNA, 418 bp, Homo sapiens
ctatgatcttgccactgcactccagcctggacaacagagcaagaccctgtcacaaggatgctagaatttgtccataaatacatttttatttatgtattccccatctctctttttatcctattttatgtagacagcaacgtgattttttttcgtcctttacagaggctgcctactagtttgcagttaataccattttactgtattctataaaggtattgccaaggtcagttggctcaaggtttgtgtttcttccttgagaaaaatacaaaaagaagaaaaaaaaagatcttcggtttgaataygagagtggaaaagaaaattgaaatacaatcgtgcaggaatgctgccatttagacatttaaaacaagcaaaagaacaacaaccaaaacaaaactcacccataacaaggggttaccac

SEQ ID NO: 301259 - DNA, 648 bp, Homo sapiens
acttcttttcatacttttcagcagagcattgacccctgtgtagttttaattttcacctcaccactgtcaggcgatgctctcttccttgcacagttcagagaaagacgctttaaaagaggtggggcagttcgttgtagctcagccactggacgtgggcggagtgagacagacagacgggacagggmgctgcaattttgcaattgtcgacgcagggctgcagttgccaagagtatgctggcctgtgtgagatgaatatttgtgtaggcattatgtggtccattcagctttgtgttggacctatgtgtgcagtgttaccttatcagtgaagcaaaaggctctagagatgtgcctatttttccagtcaccaggaaataaaagtgtgcttatcacaagtatctttaaagtcttaataaaagaccccacagtaagtattgtttttagggtattgggatagtaaacgattttagatttaaaattatagaactgaccagatcatttgcaggtttttcaaagaactaataaaacatagttaatgttagaactgagtaattctgtccccccaaaaaaagtctgcttcatccacaggaatttatttctcctgcattcttttaatgcctctatcatttaaaaagtactgaaagatttcat

SEQ ID NO: 301260 - DNA, 607 bp, Homo sapiens
gattaatataattgtaaaaatgckgggtaaaaatcccaacaaattgaattcaatgaaatatgtttaaaagaatgatttttttttaatttgtaaaaaaaaaaacctttcctgcaaaccaattcatttcctgggttcctagaaaacacacagaagtgtttttatcattgcaaaataatggaaagcatctaaatgtccaacaagaagggagtcattgaaattatgctatattcttattgtgatatgataacagtttaaaataaaaagataaacttatgtataataatatagaaatgtctccaaggttaagtatttccttaaaataaagttgcagagtgtatgtgcaggacattgcattttacatcaacacatacacgcaattatattgatatattcacatgtttacttctacccacagcccattagccaaaacaagtcacatgacccccacctaattaccaggaaatggggaagtttggagaacatgggatagtccctgagcagtgggcatttttctctgccgtgttaatccaaggcttaggttctcggagcataacagccagaaggcgttgcagacgcagctgctttccattgtgctgaacacaacccc

SEQ ID NO: 301261 - DNA, 488 bp, Homo sapiens
gggacaagccagcatatcacacaagcagaaaactatttttccagatgactcgaaacttggaacagcacctaagggagaatgagctactcaggggtggacacaaaggaggggtgaggaactgtgaagctgaggaggcactggtgtctggagctggctgtgcacatctcccaactccatgctgggcgatggccgcttggtaggatgaaagagaccatggtgggagtatttatggaatctggaaatcagcacatrctacacatcggggcttttttcattcccgggagtgggttgttaaacatttgcacaccactggaaggaaggcagaaaggaccctgagattttggccccactgggaccacgggagccctacgaagacgcagaaggggttcctggcagggaaatgtttttttctaacatgaactatcacgtaggatgtccaccagcgctatagagttttgtttaactccacttacattaatggctctcaa

SEQ ID NO: 301262 - DNA, 589 bp, Homo sapiens
tatttaaggtttccaatacaatgtacacccctcagaaaaaaaagaatggtgtactgaagaccccaaccataagactctacctattttatctattacaactctattataaagtagataaaaatagatttatctatttttcttttcatctccatcaaattttgcttcatgtgttttgaagctctgttgtttgatgtatacacatttagggtcattgtcttcttggtggatagagaattttatcatcctaatgtccctttttgtccttagtaaattttctttgtgttaaagtctactttatataatattaatatacttatttttgctttttaaaawtaaatatttgcgtaatacgttttttccatccttttacctttaacctatctacgttgttatgcctgaagtgagtttcctgtagacagcataaatcgggtcatgtttttgttcactcttcaatctctgtcatgtaattggtatatgtaggtgatttatatgtaaagtaattattcatatttaaggattaagtgtctcattttatttatttattatttttgtgtgtctcctctgtttctcatttttctcttttgtcttg

SEQ ID NO: 301263 - DNA, 498 bp, Homo sapiens
aacttttttcaactacagaatttctatttgcttcttaaataaaatttctctcattattgatatctctaattggtaagacagtgttcttatacttcctatgttctttagacatagtttcctgtagttctttgacatatttaaaatcgcttatttaatatctttatctagtaaggtcaatgtctgggcttcctcctggacatggacagtttcctcatggacaattccctcatggacagttcctatggattgctttttttcctttgtatggtccatactttatttctttgcatgcctcatttttgttgttgttgacaactggacattttaaataataaaatgcagcaactctggaaatcagattctcccacctgcccagagtttgttgtgatttggtggttgtttgtttatcactcctgaattctgtaaaatctgcattctttrtcatttgtagccactggagtctctgctcagttaactcagtggtcagctaataattga

SEQ ID NO: 301264 - DNA, 617 bp, Homo sapiens
tctactcaaaacacctgtctccctgccaaggtgaaggctagatggtaaaaaagaaagttcccttttttctgataaactaggctgtctccataggaagtaccctgaaggcccccagctccgactccgagagcagagcccagactctcctactttgaacggacatgagctctatgcctcttggggtttctctgcctgcccagtcaccctggataacgtgcttgccctagattgtctcctaggccaagtcctctccaagttcttggccctttgtcctaaggttggatctcttcctctcgcttcccttgctccgagctgtgtctctggatacaccccctgcaaactacgcttcctgagctcggctggcatctggctgtgttcagcaaatgggaagcccagacaggggactggagagcaggaagacgggagaacaaggagatttctcctccttcagcagccacagcagcaayggcgtgtcctccacagttaactggaagaaaaagcctgagtccttgtctcctcctggattgccaaagggtcttctccttagacatgtaaatacacaaatattcgcattttttagtaacccttgaaagatttaactgcctgaatttaacacc

SEQ ID NO: 301265 - DNA, 573 bp, Homo sapiens
aaatagctgtctgtgcatgacacctcatctttttttcatctttaagatgaagtcctgaaatttcaggacacttccaacttcaaaacgttcattccatgcaacagaaaggcaacacgttgatgactcctgtcccgaatcatattctatcttgtaccttkctatcagtcggtaaaactgcagatgctgacttagacaacaagctttatatcattgactaccaaacaatgtcaggttgaactttgtacgaaggggtaggttggtaaacacctggccagtgtggtgaagtgtggctggtgttggagggaaaggaagaggagatgacagtcacattaggaagctgctctgccctgagatgagctcagtgattcacaaaacgccatcgccaaacctggcacctactgccagtccccagtgactccctgggtaataaagaaattccggggctcttaagagtcgtcgtctgtttgaggggtagctctaatgtgcctagatctaaacagaaccacttaaaatgccgacagaatagagaaacctgtagtggaatcccctgacttcccagctttctagggcctg

SEQ ID NO: 301266 - DNA, 573 bp, Homo sapiens
aaatagctgtctgtgcatgacacctcatctttttttcatctttaagatgaagtcctgaaatttcaggacacttccaacttcaaaacgttcattccatgcaacagaaaggcaacacgttgatgactcctgtcccgaatcatattctatcttgtaccttgctatcagtcggtaaaactgcagatgctgacttagacaacaagctttatatcattgactaccaaacaatgtcaggttgaactttgtacgaaggggtaggttggtaaacacctggccagtgtggtgaagtgtggctggtgttggagggaaaggaagaggagatgacagtcacattaggaagctgctctgccctgagatgagctcagtgattcacaaaacgccatcgccaaacctggcacctactgccagtccccagtgactccctgggtaataaagaaattccggggctcttaagagtcgtcgtctgtttgaggggtagctctaatgtgcctagatctaaacagaaccacttaaaawgccgacagaatagagaaacctgtagtggaatcccctgacttcccagctttctagggcctg

SEQ ID NO: 301267 - DNA, 487 bp, Homo sapiens
caagcctaggtatatgactatctctatattttctaagctttccagatgcatacttgttttcccactggttgcataagaataccaaacattaattgagggttgttatatcaaaaagagtaagaacaactcctgagattcgaaagccatgggaagttgctgagctcaagtmttcatctcatactagtcaaagttagggatagtagaagaggaggggttggattgaagtgtaggaacccatgttgctgcaatgattggaagctcctaattaacaggaactatggagtggaataaagtgaacttatcatggggaccctagtgttccctgtagtgctttctcctcctctctactggacactctttttcttctttgtctttttccattcaataaaagcaagccatttatatgattcaatagactgtggattgagaatcagaattttggagttgttagtaattaacaaagtaattatccaagcatttaatttca

SEQ ID NO: 301268 - DNA, 582 bp, Homo sapiens
aagccatgggaagttgctgagctcaagtattcatctcatactagtcaaagttagggatagtagaagaggaggggttggattgaagtgtaggaacccatgttgctgcaatgattggaagctcctaattaacaggaactatggagtggaataaagtgaacttatcatggggaccctagtgttccctgtagtgctttctcctcctctctactggacactctttttcttctttgtctttttccattcaataaaagcaagccatttatatgattcaatagactgtggattgagaatcagaattttggagttgttagtaattaacaaagtaattatccaagcatttaatttcactggacatgatagcagttgaaatgatgatttcttgttaytccttgattctacatttaaaacacattattgtcccattttatttcaaggaggaataaaataggagagagaaatataaagcaaagggaaatgaagaaagaagcttaaaatgaaatgtgagacataatcccaggattatcttcagaaaaattcttaaatcttagtttggttgtgtacaggttaatctatgtaggccct

SEQ ID NO: 301269 - DNA, 620 bp, Homo sapiens
ctcctaattaacaggaactatggagtggaataaagtgaacttatcatggggaccctagtgttccctgtagtgctttctcctcctctctactggacactctttttcttctttgtctttttccattcaataaaagcaagccatttatatgattcaatagactgtggattgagaatcagaattttggagttgttagtaattaacaaagtaattatccaagcatttaatttcactggacatgatagcagttgaaatgatgatttcttgttattccttgattctacatttaaaacacattattgtcccattttatttcaaggaggaataaaataggagagagaaatataaagcaaagggaaatgaagaaagaagcttaaaatgaaatgtgagacataatcccaggattatcttcagaaaaattcttaaatcttagtttggttgtgtacaggttaatctatgtaggccctccttctgggattttcttatctgtaatagaaatattgattccactatgacctctgtctctcttggytgttagaactccagatgccaataatgcaggaaaaggcacaaagtgaacatctttgtcaagagccatggatacagcaaccgctcactatatg

SEQ ID NO: 301270 - DNA, 506 bp, Homo sapiens
aaaatagctactgaagagccacacatgttttggaaagcaggtgtatagwttgcaacagttttctttccagagatacgatttcttttttatatcagagtttacaaatttcagacccagtgttgacttcacttgttattagcttctgtgtgccttttcctcattcataaagtgaagataacagtacctgcctcgcatacctaacagaatcttggcaagcattaaatgagatggtatatatgcaagcacttcgataagtacaaagtgtctttacaaacatgacacagtcatttaaaaatcatccttaagttaggcacccactgcaaagtgaggccttatttgaggatgttgttataaaattcataactgaggcctccaatttcaaggcaaagtggtgacagaaacctgtggtgtacagaatcccatcgaggcaagggacaggtatgggacagaaggcttcatgcaccccttcgggcatgtcctctgcaagcctccggagcaggcccaga

SEQ ID NO: 301271 - DNA, 506 bp, Homo sapiens
aaaatagctactgaagagccacacatgttttggaaagcaggtgtatagattgcaacagttttctttccagagataygatttcttttttatatcagagtttacaaatttcagacccagtgttgacttcacttgttattagcttctgtgtgccttttcctcattcataaagtgaagataacagtacctgcctcgcatacctaacagaatcttggcaagcattaaatgagatggtatatatgcaagcacttcgataagtacaaagtgtctttacaaacatgacacagtcatttaaaaatcatccttaagttaggcacccactgcaaagtgaggccttatttgaggatgttgttataaaattcataactgaggcctccaatttcaaggcaaagtggtgacagaaacctgtggtgtacagaatcccatcgaggcaagggacaggtatgggacagaaggcttcatgcaccccttcgggcatgtcctctgcaagcctccggagcaggcccaga

SEQ ID NO: 301272 - DNA, 468 bp, Homo sapiens
cactgccaggaagaagcaaccttttctgggccgtgagcacttttgttagtctgaggaagtcaatagaatctttcttagagcaatttttatcagtgtgtaaaataaataaaataaaatacataggattacaattaaaacctattacctgaaagtacagttctatccctgggcttagctgtggtccatggccccaggtgagctactcctaacgagggcctaagggcaaattacaagygtcaacttccaggctgaggaagaaaatggtggagacaacacaggaatgaggggcagcttagaatcaggagcccactgtggttactcacccaacccataggaagaggagccttcccctaggaagactgcagctggtggctaagagtggggttagtgggtggctaagagtggggttagcgggtggctaacactggtgttagagttgagcaaaataaaggctcagagaactaaaaa

SEQ ID NO: 301273 - DNA, 574 bp, Homo sapiens
tgggttgaggacaatattcttaatcctccctagaaagatcaaattaaatcagcagcaggctctgcctgacacagctctgtgtcactgactgttccgaggagaaacctagagamgtctgcagctcttgactttgtaactcgtgtctttctatagatattcagtgagcagtgataagacatccctgcataaggattagctcaagacagggaaacgctgttagaggagagaggtggagaacagacacacattttgcctgccatttaattcagctaaaagccatcaaatttcatggctaaacttcaaacatgactcagtctgagctttgattttccttcccttttcagcaaggcaacacatctgtatatttcagcccaagcagctatgtattttagtgagtgtatagtaaaagcagattctattaatcattaataattcagaaattaggggtgcatccattaaaagttctacttaatgtcaattaaaactcgagagcagtggtttgcaaacttgactgtgcataagaaacatctggaaagcataaaaaatgcagattctaggggcacacctgcagagt

SEQ ID NO: 301274 - DNA, 574 bp, Homo sapiens
tgggttgaggacaatattcttaatcctccctagaaagatcaaattaaatcagcagcaggctctgcctgacacagctctgtgtcactgactgttccgaggagaaacctagagacgtctgcagctcttgactttgtaactcgtgtctttctatagatattcagtgagcagtgataagacatccctgcataaggattagctcaagacagggaaacgctgttagaggagagaggtggagaacagacacacattttgcctgccatttaattcagctaaaagccatcaaatttcatggctaaacttcaaacatgactcagtctgagctttgattttccttcccttttcagcaaggcaacacatctgtatatttcagcccaagcagctatgtattttagtgagtgtatagtaaaagcagattctattaatcattaataattcagaaattaggggtgcatccattaaaagttctacttaatgtcaattaaaactcgagagcagtggtttgcaaacttgactrtgcataagaaacatctggaaagcataaaaaatgcagattctaggggcacacctgcagagt

SEQ ID NO: 301275 - DNA, 569 bp, Homo sapiens
gtaaaaatgaaactaatgtaattgagtatccaacaccttaaatatttgtctgtttcttatgctagaaacacctgaatgattatcttctaactattctgaactgtacagtagcttgttgtaaactattatttctgggcaaggccagctccacggctacacgatcagtgtggctgcagagacaggcacttggttttatgctctacttcaaagtcttagaattcttaataatttttgaacaaggtacctcacattttcatcgagccttgtaaacagtgtatccagttagtttccttrataatatcgaggtgtgatatttaatgtttctttcaataaacattaccagtgtgaatacgctgctcggtgtggccataatgcactaacgcatttttgctttgtacctatgttattgccaaccactgaactaaagaagggaataaagatataatccttgcccccaaagcattgcaaacatattggaggaacttagtgtctctgtatcagatggcatgcactaaatattcgccatgaatactcttcctgaatgcaaagtcacaattttatatgacttt

SEQ ID NO: 301276 - DNA, 589 bp, Homo sapiens
aattttctctccctccatttgatacggacacaggtttatccattaacaggattccagagctaatcagaattacctctgatttgggttttactcacacacctgctggaaatccatgcatgagctttgtgagaaagggcacaaaggaaaccagcctgaagtctgcaggggccacacagtgcaagccaacagcagagctgacacagatgccagaatggtcaaaaacgaacatttacaaagcaattattgctatatcccacatcttcaaaaggttaagtagaggcatgagagattaaaaaggcccaaactgaacttttagggaagaaaactacagtttcctgaggtcaaaaaatacacaaagtggaaattacagcagattagacattgcaggaaaaaaattgtaaatttgraagtgtggcaataaaaactccataatgtaacatagaaaaaataatagttaaaaaaactgagagcattagtggggctaatcacagaatgtgagactactcccagtagtccaatatacatggaattaaaatcctcaaagatggaaaaagcagaagtattaaacccacagatcccagaagtttag

SEQ ID NO: 301277 - DNA, 589 bp, Homo sapiens
aattttctctccctccatttgatacggacacaggtttatccattaacaggattccagagctaatcagaattacctctgatttgggttttactcacacacctgctggaaatccatgcatgagctttgtgagaaagggcacaaaggaaaccagcctgaagtctgcaggggccacacagtgcaagccaacagcagagctgacacagatgccagaatggtcaaaaacgaacatttacaaagcaattattgctatatcccacatcttcaaaaggttaagtagaggcatgagagattaaaaaggcccaaactgaacttttagggaagaaaactacagtttcctgaggtcaaaaaatacacaaagtggaaattacagcagattagacattgcaggaaaaaaattgtaaatttgaaagtgtggcaataaaaactccataatgtaacatagaaaaaataatagttaaaaaaactgagagcattagtggggctaatcacagaatgtgagactactccmagtagtccaatatacatggaattaaaatcctcaaagatggaaaaagcagaagtattaaacccacagatcccagaagtttag

SEQ ID NO: 301278 - DNA, 456 bp, Homo sapiens
taccactctccttttctgtaacagtccctcttttctgtcctaatttgctgcttctaatmagtggccctagaaaccagataagaacatgtattcgaaatgcgaataagttaaaatagccccataaattgtaccatagattttgtgtgatatacttagtcactcagaagctttttcccaatctatattgtgaaaaatatgatataacaattattataaggaaaactattacatactgaatggccactgtgtgttagtcgttattctaaatattttatttattatttgtaatcttttttatggactctagattctacttccagagtatataatgtgtatataaagagacagaatgataaagtgctttttttttctttttttgttttttgagatggagtctcgctctgccaccaggctggagtgtagcggcatgatctcagctcactgcaacctccacct

SEQ ID NO: 301279 - DNA, 456 bp, Homo sapiens
taccactctccttttctgtaacagtccctcttttctgtcctaatttgctgcttctaataagtggccctagaaaccagataagaacatgtattcgaaatgcgaataagttaaaatagccccataaattgtaccatagattttrtgtgatatacttagtcactcagaagctttttcccaatctatattgtgaaaaatatgatataacaattattataaggaaaactattacatactgaatggccactgtgtgttagtcgttattctaaatattttatttattatttgtaatcttttttatggactctagattctacttccagagtatataatgtgtatataaagagacagaatgataaagtgctttttttttctttttttgttttttgagatggagtctcgctctgccaccaggctggagtgtagcggcatgatctcagctcactgcaacctccacct

SEQ ID NO: 301280 - DNA, 456 bp, Homo sapiens
taccactctccttttctgtaacagtccctcttttctgtcctaatttgctgcttctaataagtggccctagaaaccagataagaacatgtattcgaaatgcgaataagttaaaatagccccataaattgtaccatagattttgtgtgatatacttagtcactcagaagctttttcccaatctatattgtgaaaaatatgatataacaattattataaggaaaactattacatactgaatggccactgtgtgttagtcgttattctaaatatttyatttattatttgtaatcttttttatggactctagattctacttccagagtatataatgtgtatataaagagacagaatgataaagtgctttttttttctttttttgttttttgagatggagtctcgctctgccaccaggctggagtgtagcggcatgatctcagctcactgcaacctccacct

SEQ ID NO: 301281 - DNA, 456 bp, Homo sapiens
taccactctccttttctgtaacagtccctcttttctgtcctaatttgctgcttctaataagtggccctagaaaccagataagaacatgtattcgaaatgcgaataagttaaaatagccccataaattgtaccatagattttgtgtgatatacttagtcactcagaagctttttcccaatctatattgtgaaaaatatgatataacaattattataaggaaaactattacatactgaatggccactgtgtgttagtcgttattctaaatattttatttattatttgtaatcttttttatggactctagattctacttccagagtatataatgtgtatataaagagacagaatgataaagtgctttttttttctttttttgttttttgagatggagtctygctctgccaccaggctggagtgtagcggcatgatctcagctcactgcaacctccacct

SEQ ID NO: 301282 - DNA, 567 bp, Homo sapiens
agttgtattagtccattctcatgctgctaataaacatgtactagagacagggtaatttagaaagtaaagagatttaatagactcatagttcctcaggactggggaggattctggaaacttactatcatgacaaaaggggaagcaaacacttccttcttcacatggtggcaggaaggggaagtgctgagcaaaaggggaaaagccccttacaaaaccatcagatctcatgaaaacgtactcactgtcacaagaagagtagcatgggggtaacmacgcccatgattcaattacctccaaccaggtcacttccacaacacctggggattgtgggaactacaattcaagatgagatttggatggggacacagagccaaaccatatcactaatcttagtctcaattttcccgtcatcagaatattgtcagcacttactttaataccccatgcgttcatgtcccttttgtaattcactctttctaaagaacattcttctctttggctacacagcttatctttccatcttttttttttttaagtataacttatgtaaaaactttaaggcttctg

SEQ ID NO: 301283 - DNA, 610 bp, Homo sapiens
atgtaaaaactttaaggcttctgtgtcttttctacattttcactggctctctgaggggtcatctcaggtgccaacgaaggcagtcttcagtctggattcctttcaaggatgtgaaattatctcttcaaaatacattaggtaatgtctgcctactttggattttgtgacggcttgaaacaatgcagtccacattttaactgacaagtttagaggtgtcagtggtatttgagctttctgtgcctcaaaaactcaccatctcacactgttcattgtcaccagatctaattgtgtctcaggtgacttcataatgttctcaaggccaggtgctgaggcaggaggaaaggacacaccccagaggcaggactgtgagtttgaagtcaccgccagcgtctgcccattgcactgtgcccaggactcctgtttccatggmctgggctggaccatgctgtagccctgggcgctgcctgcacctgagaattatccaaagcacttgcaaaatgtgtgaatcccttgcccttagcctaaggaatttcaatttataaattatttctgcctgtgggtctcgaacatggataattttaaaatcttcttaagaaatgctgatgtgcaa

SEQ ID NO: 301284 - DNA, 409 bp, Homo sapiens
tagcatagacctaggggaagtattagaccatagagctaaagtcatcttctttggcatgattagaattttcaaaatacataacaaatattttaaaattttgatctccatttatctgtcttctgggtmctctctcaatatattgtgaatgcgagatggaaaaaattagtgttacatgtcagctttctaaaaccccaacataatcctatctcttttcaaatggtttcacttcttggccctttgaaagcaatataaacaatttcactgacttagtaagcagggctctaagaactgaagagaaaacacgccaatgctggatggcatcaattctttgaaagaggaaggaggcaaatagacatgacacatccacaataaacagtcgctaaaatgtatgggaatgctccgtgctgca

SEQ ID NO: 301285 - DNA, 409 bp, Homo sapiens
tagcatagacctaggggaagtattagaccatagagctaaagtcatcttctttggcatgattagaattttcaaaatacataacaaatattttaaaattttgatctccatttatctgtcttctgggtactctctcaatatattgtgaatgcgagatggaaaaaattagtgttacatgtcagctttctaaaaccccaacataatcctatctcttttcaaatggtttcacttcttggccctttgaaagcaatataaacaatttyactgacttagtaagcagggctctaagaactgaagagaaaacacgccaatgctggatggcatcaattctttgaaagaggaaggaggcaaatagacatgacacatccacaataaacagtcgctaaaatgtatgggaatgctccgtgctgca

SEQ ID NO: 301286 - DNA, 547 bp, Homo sapiens
aaatgtggttgatcccacagaatccagtctgcttcaggaaatacttttcctaattggagcctctgagagactgaaatccattctgcgaagtgtattctagctcttccatagtctcccagtgactcttgcctcagaaggctctgttaatttggttgatcgcttctggtttttctctatatttcatatattgatcaaattttgtaatacaatcttcagatccacactacycaaaagaaaaacacgcttcctgctatcatttttttttatttccctctaaataagtaggagcatggtactttgatcaataagaatgaaaaaaattattagggaacttgccatcatattccaggagaaatggagtatggcatgcacccagcactgaccttcaatcagaatgaaagcacgtcagagaaaaggaattgtatagaattgctgggatcaaatgtaacacaaaaacatcggaactataataggatcacgaagcacaatcaccactaaagtccatctcatgattcagcagcaggagcaggggagcacagcagaaaga

SEQ ID NO: 301287 - DNA, 563 bp, Homo sapiens
cactacccaaaagaaaaacacgcttcctgctatcatttttttttatttccctctaaataagtaggagcatggtactttgatcaataagaatgaaaaaaattattagggaacttgccatcatattccaggagaaatggagtatggcatgcacccagcactgaccttcaatcagaatkaaagcacgtcagagaaaaggaattgtatagaattgctgggatcaaatgtaacacaaaaacatcggaactataataggatcacgaagcacaatcaccactaaagtccatctcatgattcagcagcaggagcaggggagcacagcagaaagaagcatgggtgaagggatccgagagtcaatcctacctggcaaacaggagtgtgatcctggcatccagtttatatctcagagtctttgttcccaggtagaactgggagactgagctagatcaggggttcttagaaatcagttgaggggaccgtgaacttaatgaaagaatgaatctttatttcctataatctttaactaaaatgtatagcacttcctccaattatgaatgtaagtcata

SEQ ID NO: 301288 - DNA, 533 bp, Homo sapiens
caaacaggagtgtgatcctggcatccagtttatatctcagagtctttgttcccaggtagaactgggagactgagctagatcaggggttcttagaaatcagttgaggggaycgtgaacttaatgaaagaatgaatctttatttcctataatctttaactaaaatgtatagcacttcctccaattatgaatgtaagtcataacccacaatactactaaccgtacatgtgatattgttccaatacaaattacagatattttcacattaatataatttttagttatctcaaaatatcatttatgatcactagctcttcaaatttacaaagatcatctcagtcacagctgtttccctttacttaatgcattgggaaagaagcacatgcataactgcatcataacatccttaaaaatgaattcattagtgtttgagcataattggcttcctctataatcaaaggtgtgctagctgacgctttctgaaatgtttttcttagatgtgactttatcagactgcctatatggtccccttagac

SEQ ID NO: 301289 - DNA, 533 bp, Homo sapiens
caaacaggagtgtgatcctggcatccagtttatatctcagagtctttgttcccaggtagaactgggagactgagctagatcaggggttcttagaaatcagttgaggggaccgtgaacttaatgaaagaatgaatctttatttcctataatctttaactaaaatgtatagcacttcctccaattatgaatgtaagtcataacccacaatactactaaccgtacatgtgatattgttccaatacaaattacagatattttcacattaatataatttttagttatctcaaaatatcatttatgatcactagctcttcaaatttacaaagatcatctcagtcacagctgtttccctttacttaatgcattgggaaagaagcacatgcataactgyatcataacatccttaaaaatgaattcattagtgtttgagcataattggcttcctctataatcaaaggtgtgctagctgacgctttctgaaatgtttttcttagatgtgactttatcagactgcctatatggtccccttagac

SEQ ID NO: 301290 - DNA, 533 bp, Homo sapiens
caaacaggagtgtgatcctggcatccagtttatatctcagagtctttgttcccaggtagaactgggagactgagctagatcaggggttcttagaaatcagttgaggggaccgtgaacttaatgaaagaatgaatctttatttcctataatctttaactaaaatgtatagcacttcctccaattatgaatgtaagtcataacccacaatactactaaccgtacatgtgatattgttccaatacaaattacagatattttcacattaatataatttttagttatctcaaaatatcatttatgatcactagctcttcaaatttacaaagatcatctcagtcacagctgtttccctttacttaatgcattgggaaagaagcacatgcataactgcatcataacatccttaaaaatgaattcattagtgtttgagcataattggcttcctctataatcaaaggtgtgctagctgaygctttctgaaatgtttttcttagatgtgactttatcagactgcctatatggtccccttagac

SEQ ID NO: 301291 - DNA, 533 bp, Homo sapiens
caaacaggagtgtgatcctggcatccagtttatatctcagagtctttgttcccaggtagaactgggagactgagctagatcaggggttcttagaaatcagttgaggggaccgtgaacttaatgaaagaatgaatctttatttcctataatctttaactaaaatgtatagcacttcctccaattatgaatgtaagtcataacccacaatactactaaccgtacatgtgatattgttccaatacaaattacagatattttcacattaatataatttttagttatctcaaaatatcatttatgatcactagctcttcaaatttacaaagatcatctcagtcacagctgtttccctttacttaatgcattgggaaagaagcacatgcataactgcatcataacatccttaaaaatgaattcattagtgtttgagcataattggcttcctctataatcaaaggtgtgctagctgacgctttctgaaatgtttttcttagatgtgactttaycagactgcctatatggtccccttagac

SEQ ID NO: 301292 - DNA, 417 bp, Homo sapiens
tggtgcaataaagggtgataggatcctctctcagccatcacacgatttgctttcttcagccagctctgtcaaaagtatcccctattagaaacgctgtccccttagagagtagtttgttgaaggtttctaacagaaaaagacaaggctcggacactagcagccctgcaggaaacagttgtattcaaagcagacgtgaaaaccctgtatcatgtgatgcactgccaatgcaacagcaccttcaagcactaacttcgatagaccctcagcctctgggatgacctggcatttccctctatctacgtgaactcgctgaggccccctttaacaatttagtaactccttttggcatggtgcactggcccaatggactaagtgtcytattgaagaatgcaatagaagcagacagcgagattggcc

SEQ ID NO: 301293 - DNA, 580 bp, Homo sapiens
tagaattcctccttcaaatgacttcctaatgaatatcagaaggcaatgtgtggagtcacaagtcattggaatggcacccactgtgtaatttcaacaaaacacttcatccctctgagcctctggtggctcatctgtaaattaaggcaaattctatcttcaaatttcttcactctttgatcaacaacttttattcaactttgttgaaaagaacaaaaaaattgcatctctggttgaatttggtggctctttttctggttaatataaaacgtgactgtcagaatcccatctctaaatctytgtcaaattcgtgtggcctcctttgtgtgcagtttactagtacagccccataatactggataagattttccctaaacttctgtgatttaaatgagatggtggttgcctgcactcagactggtaaatgggttggtcccgagaacacttacagaagcaccttgccttgttatttggctttagcattgtattaaaaagttagtagatatttgtaagcattctagagatcatttattacctattcactctttaagttaaattcttgtctatgtaacagtgacctaaa

SEQ ID NO: 301294 - DNA, 477 bp, Homo sapiens
tccctgctgctcctctaagttttctatctgtaggctgttaaggagtggaaggcctgataaagcatgtgcatgcatgcatggatatagatatgcatgggtgtacagctgtcatctatatgtgcatatctctacatgcaggatgtcaattcagatgttagaggcaggtcacagtggctcatgcctgtaaccccagcaatttgtgaggctgaggtggaagaatcccttatgcaggagttcaagaccagcctgggcaacatagtaatagtaagccctcgtctctacaagaaataaaaaataaaaaatttagcctggtacagtggtgtgcacctgcagtcctagtgacttgggaggctgaggagggaggattgcttgagcccaaaagttggaggttacagwgagctatgataatgccagtgcactctagcctgggcaacagagctacatcttgtcttaaaaaagattaaaaagtgttattgt

SEQ ID NO: 301295 - DNA, 557 bp, Homo sapiens
cctatgaagaaagaacaagtaataatcttcattctacagcaatggtaatttccccaagatcgttaactcttccaaacctgttttccctggatctcaaattggagcctagagaaggcatttttgctaaaggttagtttgccgcaagggctcagatcaatgaaatttttatcagcttgagtttggctgaaaggctggttttgggggtgtgtgggttggtgagagggcaaagtcttagcctgtactcataaataaataaataaatatatatatatttacataaatacattacacacgtatatattaacaaatatatattatttctgtacaatattttacatatatatgtaacttgataaacttttggtatgcatgggagtgggttacctaaaagcatattatacagaattgttctctattaatattggagtattctttctaccagtgtgaggtcatactgtgcacactgctttagagtctctcctttgtactgtgawcacttccaatgacatcaaatatttgtataaataacaagtctaaagttgcctaacagatatatc

SEQ ID NO: 301296 - DNA, 287 bp, Homo sapiens
tcctctaacacagcatagtcatttagagtcaggcagacctgggttcaaatcccagttccaactccctagcttgatggcctttatacaacgtggtctctaaactttagttccttcatatggaaaatggggtaaygaccacctttcacagctgttgtgggaactacatgagaccatgtgcagaagcttctgagcacagttcctttactatacctcaagagtcaagagctatttcaccaagaatttgcttgaggtgaaggctataaatctaaatgattcaaatttttaaa

SEQ ID NO: 301297 - DNA, 545 bp, Homo sapiens
ctagcttgatggcctttatacaacgtggtctctaaactttagttccttcatatggaaaatggggtaacgaccacctttcacagctgttgtgggaactacatgagaccatgtgcagaagcttctgagcacagttcctttactatacctcaagagtcaagagctatttcaccaagaatttgcttgaggtgaaggctataaatctaaatgattcaaatktttaaagttggggttctttcctgacattttagtaaaacttaccacatgtgagtacatgtcttccaggagtagaacagctcactttgacctgagagattgtcaatgaggtattcaggctctgtagttacaagcataatcttcggtgtggtcaatggaatggctgactccaattcatcctgccttcctcatcctgactcagattacctatgggtgaacgcacctcctccctcactgactctgagcttagccttctgacttgctttgggcaatgacacatgagcagacttccagtacaccgtgtccaaccagtggctcccaaagagctcatc

SEQ ID NO: 301298 - DNA, 545 bp, Homo sapiens
ctagcttgatggcctttatacaacgtggtctctaaactttagttccttcatatggaaaatggggtaacgaccacctttcacagctgttgtgggaactacatgagaccatgtgcagaagcttctgagcacagttcctttactatacctcaagagtcaagagctatttcaccaagaatttgcttgaggtgaaggctataaatctaaatgattcaaatttttaaagttggggttctttcctgacattttagtaaaacttaccacatgtgagtacatgtcttccaggagtagaacagctcactttgacctgagagattgtyaatgaggtattcaggctctgtagttacaagcataatcttcggtgtggtcaatggaatggctgactccaattcatcctgccttcctcatcctgactcagattacctatgggtgaacgcacctcctccctcactgactctgagcttagccttctgacttgctttgggcaatgacacatgagcagacttccagtacaccgtgtccaaccagtggctcccaaagagctcatc

SEQ ID NO: 301299 - DNA, 460 bp, Homo sapiens
atcccagttccaactccctagcttgatggcctttatacaacgtggtctctaaactttagttccttcatatggaaaatggggtaacgaccacctttcacagctgttgtgggaactacatgagaccatgtgcagaagcttctgagcacagttcctttactatacctcaagagtcaagagctatttcaccaagaatttgcttgaggtgaaggctataaatctaaatgattcaaatttttaaagttggggttctttcctgacattttagtaaaacttaccacatgtgagtacatgtcttccaggagtagaacagctcactttgacctgagagattgtcaatgaggtattcaggctctgtagttacaagcataatsttcggtgtggtcaatggaatggctgactccaattcatcctgccttcctcatcctgactcagattacctatgggtgaacgcacctcctcc

SEQ ID NO: 301300 - DNA, 545 bp, Homo sapiens
ctagcttgatggcctttatacaacgtggtctctaaactttagttccttcatatggaaaatggggtaacgaccacctttcacagctgttgtgggaactacatgagaccatgtgcagaagcttctgagcacagttcctttactatacctcaagagtcaagagctatttcaccaagaatttgcttgaggtgaaggctataaatctaaatgattcaaatttttaaagttggggttctttcctgacattttagtaaaacttaccacatgtgagtacatgtcttccaggagtagaacagctcactttgacctgagagattgtcaatgaggtattcaggctctgtagttacaagcataatcttcggtgtggtcaatggaatgrctgactccaattcatcctgccttcctcatcctgactcagattacctatgggtgaacgcacctcctccctcactgactctgagcttagccttctgacttgctttgggcaatgacacatgagcagacttccagtacaccgtgtccaaccagtggctcccaaagagctcatc

SEQ ID NO: 301301 - DNA, 590 bp, Homo sapiens
tttagtaaaacttaccacatgtgagtacatgtcttccaggagtagaacagctcactttgacctgagagattgtcaatgaggtattcaggctctgtagttacaagcataatcttcggtgtggtcaatggaatggctgactccaattcatcctgccttcctcatcctgactcagattacctatgggtgaacgcacctcctccmtcactgactctgagcttagccttctgacttgctttgggcaatgacacatgagcagacttccagtacaccgtgtccaaccagtggctcccaaagagctcatcaggtgcagcttgccttccatgccatgagaggaacatgcccctgggcctgctctccaatctgggtctggatatgaaaggcacatggaagagtcctaactcaaccacaggcagcccgcacagcaacctgggagaacagaacgtttgttattgtaagtcacaagatgcggagccctagcaggctgacaccctggctgttaaattccacccacagaggcatgctggactgcagaacagaacagagacagtgaaggaaaggaaaatgcctttggagggggcgtatttgtccag

SEQ ID NO: 301302 - DNA, 545 bp, Homo sapiens
ctagcttgatggcctttatacaacgtggtctctaaactttagttccttcatatggaaaatggggtaacgaccacctttcacagctgttgtgggaactacatgagaccatgtgcagaagcttctgagcacagttcctttactatacctcaagagtcaagagctatttcaccaagaatttgcttgaggtgaaggctataaatctaaatgattcaaatttttaaagttggggttctttcctgacattttagtaaaacttaccacatgtgagtacatgtcttccaggagtagaacagctcactttgacctgagagattgtcaatgaggtattcaggctctgtagttacaagcataatcttcggtgtggtcaatggaatggctgactccaattcatcctgccttcctcatcctgactcagattacctatgggtgaacgcacctcctccctcactgactctgagcttagccttctgacttgctttgggcaatgacmcatgagcagacttccagtacaccgtgtccaaccagtggctcccaaagagctcatc

SEQ ID NO: 301303 - DNA, 569 bp, Homo sapiens
cccttctttccccataataaaggcacgacaccacagggtgctagccaggacaatatacttgagaatctagagccaaggtggacaggctggtaatggaagtctgccttgtcactgcggttatttctctccagrggtgatttacaaggtgataaaagacttcaagatgcaaaaagtacttaggctgttaaaaaccagccttttatgatcccttgttccttatagtacatgttttttcattaatcaaatgcttattctattagaagtcccaaacctttaagatggtgggacatttcatttttattttcctgaagtggcattaaaatccacatggtcctcagcaggccactggtgaattcctcatgttcgaactcattccaccctctgtcttctctgatcctatctattttgtattactcttttagaagaattttttttgtgtgtgtgttcttgctgggatagatgctgaactgttagccaaaagcctgtttttttcttcccctgcctgtatttgaagtctggagccagtcgctgatgtcattctcaagcccatgtttttgcactgtggacct

SEQ ID NO: 301304 - DNA, 569 bp, Homo sapiens
cccttctttccccataataaaggcacgacaccacagggtgctagccaggacaatatacttgagaatctagagccaaggtggacaggctggtaatggaagtctgccttgtcactgcggttatttctctccaggggtgatttacaaggtgataaaagacttcaagatgcaaaaagtacttaggctgttaaaaaccagccttttatgatcccttgttccttatagtacatgttttttcattaatcaaatgcttattctattagaagtcccaaacctttaagatggtgggacatttcatttttattktcctgaagtggcattaaaatccacatggtcctcagcaggccactggtgaattcctcatgttcgaactcattccaccctctgtcttctctgatcctatctattttgtattactcttttagaagaattttttttgtgtgtgtgttcttgctgggatagatgctgaactgttagccaaaagcctgtttttttcttcccctgcctgtatttgaagtctggagccagtcgctgatgtcattctcaagcccatgtttttgcactgtggacct

SEQ ID NO: 301305 - DNA, 617 bp, Homo sapiens
gccagtcgctgatgtcattctcaagcccatgtttttgcactgtggacctcatctcttctggcctcttctgctggctctgtcktaccatcagtgggaaaaattccatgttcccatttgcttagccgagagcaaagcctgtccttgtcctctcccttgtctatggtgggtttcatcaaggaatctcttactgtatattttaatgaccaaaatgatgaaaatttgtcatttagattgatattttctagtttttaagactattcagagtaaattaatgattatttgtaaatatcaatagtacaatttgtaatcattatataacagcatctcaaatcaagttttagaaataaatggagtatgtattcagtagatagacaaaccgatagagcacagatcaactaatagagatagcattgccattaaattataatagatcaactaatagagataacattgccattaaattataactcataaatgcttttagaaaaagtttccagacaactgccatctctaccttattaatgcctagcctgtaaaagcaaggaattaaagaatttctaaagaaacggcagactccatgtctgtttttagaagtaaagttttcttagagcccagcc

SEQ ID NO: 301306 - DNA, 617 bp, Homo sapiens
gccagtcgctgatgtcattctcaagcccatgtttttgcactgtggacctcatctcttctggcctcttctgctggctctgtcttaccatcagtgggmaaaattccatgttcccatttgcttagccgagagcaaagcctgtccttgtcctctcccttgtctatggtgggtttcatcaaggaatctcttactgtatattttaatgaccaaaatgatgaaaatttgtcatttagattgatattttctagtttttaagactattcagagtaaattaatgattatttgtaaatatcaatagtacaatttgtaatcattatataacagcatctcaaatcaagttttagaaataaatggagtatgtattcagtagatagacaaaccgatagagcacagatcaactaatagagatagcattgccattaaattataatagatcaactaatagagataacattgccattaaattataactcataaatgcttttagaaaaagtttccagacaactgccatctctaccttattaatgcctagcctgtaaaagcaaggaattaaagaatttctaaagaaacggcagactccatgtctgtttttagaagtaaagttttcttagagcccagcc

SEQ ID NO: 301307 - DNA, 617 bp, Homo sapiens
gccagtcgctgatgtcattctcaagcccatgtttttgcactgtggacctcatctcttctggcctcttctgctggctctgtcttaccatcagtgggaaaaattccatgttcccatttgsttagccgagagcaaagcctgtccttgtcctctcccttgtctatggtgggtttcatcaaggaatctcttactgtatattttaatgaccaaaatgatgaaaatttgtcatttagattgatattttctagtttttaagactattcagagtaaattaatgattatttgtaaatatcaatagtacaatttgtaatcattatataacagcatctcaaatcaagttttagaaataaatggagtatgtattcagtagatagacaaaccgatagagcacagatcaactaatagagatagcattgccattaaattataatagatcaactaatagagataacattgccattaaattataactcataaatgcttttagaaaaagtttccagacaactgccatctctaccttattaatgcctagcctgtaaaagcaaggaattaaagaatttctaaagaaacggcagactccatgtctgtttttagaagtaaagttttcttagagcccagcc

SEQ ID NO: 301308 - DNA, 617 bp, Homo sapiens
gccagtcgctgatgtcattctcaagcccatgtttttgcactgtggacctcatctcttctggcctcttctgctggctctgtcttaccatcagtgggaaaaattccatgttcccatttgcttagccgagagcaaagcctgtccttgtcctctcccttgtctrtggtgggtttcatcaaggaatctcttactgtatattttaatgaccaaaatgatgaaaatttgtcatttagattgatattttctagtttttaagactattcagagtaaattaatgattatttgtaaatatcaatagtacaatttgtaatcattatataacagcatctcaaatcaagttttagaaataaatggagtatgtattcagtagatagacaaaccgatagagcacagatcaactaatagagatagcattgccattaaattataatagatcaactaatagagataacattgccattaaattataactcataaatgcttttagaaaaagtttccagacaactgccatctctaccttattaatgcctagcctgtaaaagcaaggaattaaagaatttctaaagaaacggcagactccatgtctgtttttagaagtaaagttttcttagagcccagcc

SEQ ID NO: 301309 - DNA, 599 bp, Homo sapiens
ttaaagaatttctaaagaaacggcagactccatgtctgtttttagaagtaaagttttcttagagcccagccacatctattcrattatgtgtttgtctgtggctgctttcacaacacaaaagcagagtgaagtagttgcaacaacttaactatatggcctttaaagccaaaaatgtgagcaataaattattttttaatttttctactgttaattttatgtgtaggaaatggtctgctttgcttaaaacttgtggctcctctattcactgatcatatctttaattagctcacttttcccaaaatgtttttccatcttttgttttttatgctttcttatcctgcctaagccacaccctatctgtttttctgaacaagcttaagccctacttgctggatgacagctgtaaccaacggtgtgacttcctttcaaatctctaactgtgcttcactatctgtcccatgcacatgggctcttgactcctcactaagtatttgcacagcacctactgagtactgagccttattctagatcctaggaatacgaaagcaagcatctagatgtgagccctgccctcagtgcgtggatgtttgttggaggaa

SEQ ID NO: 301310 - DNA, 599 bp, Homo sapiens
ttaaagaatttctaaagaaacggcagactccatgtctgtttttagaagtaaagttttcttagagcccagccacatctattcaattatgtgtttgtctgtggctgctttcacaacacaaaagcagagtgaagtagttgcaacaacttaactatatggccttyaaagccaaaaatgtgagcaataaattattttttaatttttctactgttaattttatgtgtaggaaatggtctgctttgcttaaaacttgtggctcctctattcactgatcatatctttaattagctcacttttcccaaaatgtttttccatcttttgttttttatgctttcttatcctgcctaagccacaccctatctgtttttctgaacaagcttaagccctacttgctggatgacagctgtaaccaacggtgtgacttcctttcaaatctctaactgtgcttcactatctgtcccatgcacatgggctcttgactcctcactaagtatttgcacagcacctactgagtactgagccttattctagatcctaggaatacgaaagcaagcatctagatgtgagccctgccctcagtgcgtggatgtttgttggaggaa

SEQ ID NO: 301311 - DNA, 599 bp, Homo sapiens
ttaaagaatttctaaagaaacggcagactccatgtctgtttttagaagtaaagttttcttagagcccagccacatctattcaattatgtgtttgtctgtggctgctttcacaacacaaaagcagagtgaagtagttgcaacaacttaactatatggcctttaaagccaaaaatgtgagcaataaattattttttaatttttctactgttaattttatgtgtaggaaatggtctgctttgcttaaaacttgyggctcctctattcactgatcatatctttaattagctcacttttcccaaaatgtttttccatcttttgttttttatgctttcttatcctgcctaagccacaccctatctgtttttctgaacaagcttaagccctacttgctggatgacagctgtaaccaacggtgtgacttcctttcaaatctctaactgtgcttcactatctgtcccatgcacatgggctcttgactcctcactaagtatttgcacagcacctactgagtactgagccttattctagatcctaggaatacgaaagcaagcatctagatgtgagccctgccctcagtgcgtggatgtttgttggaggaa

SEQ ID NO: 301312 - DNA, 599 bp, Homo sapiens
ttaaagaatttctaaagaaacggcagactccatgtctgtttttagaagtaaagttttcttagagcccagccacatctattcaattatgtgtttgtctgtggctgctttcacaacacaaaagcagagtgaagtagttgcaacaacttaactatatggcctttaaagccaaaaatgtgagcaataaattattttttaatttttctactgttaattttatgtgtaggaaatggtctgctttgcttaaaacttgtggctcctctaytcactgatcatatctttaattagctcacttttcccaaaatgtttttccatcttttgttttttatgctttcttatcctgcctaagccacaccctatctgtttttctgaacaagcttaagccctacttgctggatgacagctgtaaccaacggtgtgacttcctttcaaatctctaactgtgcttcactatctgtcccatgcacatgggctcttgactcctcactaagtatttgcacagcacctactgagtactgagccttattctagatcctaggaatacgaaagcaagcatctagatgtgagccctgccctcagtgcgtggatgtttgttggaggaa

SEQ ID NO: 301313 - DNA, 602 bp, Homo sapiens
catagaatgtattcatctttatttattcagaaattagctccatacctagcacataaacattcccatctcaggtctcagttcgcttgtgcttctgtaacaaaatagctgagactgataagaacagaaacttgtttctcacagtccaggaggctgaaaagttcaaaaccatgrttctggcagttttggcaccaagtgaggtcccagtttctgcttctaaaatggtaacttgaatgttgtgtccttacattagctagttcccttcagcccttttgtaatgcactaatcccatctatgagtacagagtcctcatggcctaattactcctaaaggcctgacttcttaatactattgcattgaggattaagtttcaaaatggcttttagaggggagacaaacatttaagctaaagtataataatccataatttttgaatgaatgaacaaaaagtcacttgcatttaaatgtgaaaatgtagatacttttggtgtcagttattttctgtacaattgcgattattcctcataaaaattcagagcaatcagttggctttcaattaaatttacatattagttataaacattttaaatgttaactctgtttct

SEQ ID NO: 301314 - DNA, 602 bp, Homo sapiens
catagaatgtattcatctttatttattcagaaattagctccatacctagcacataaacattcccatctcaggtctcagttcgcttgtgcttctgtaacaaaatagctgagactgataagaacagaaacttgtttctcacagtccaggaggctgaaaagttcaaaaccatggttctggcagttttggcaccaagtgaggtcccagtttctgcttctaaaatggtaacttgaatgytgtgtccttacattagctagttcccttcagcccttttgtaatgcactaatcccatctatgagtacagagtcctcatggcctaattactcctaaaggcctgacttcttaatactattgcattgaggattaagtttcaaaatggcttttagaggggagacaaacatttaagctaaagtataataatccataatttttgaatgaatgaacaaaaagtcacttgcatttaaatgtgaaaatgtagatacttttggtgtcagttattttctgtacaattgcgattattcctcataaaaattcagagcaatcagttggctttcaattaaatttacatattagttataaacattttaaatgttaactctgtttct

SEQ ID NO: 301315 - DNA, 556 bp, Homo sapiens
attcagtgatatgaaagacagaatgaaaatgactatcatatattaaactggagtctaatatattcattagtgagatttactgacatccctaatgaaagacatcaaattctcagattcaggagaaataagacattacactcaagatacataagatgaattcattcctcggcacacctaagttttyatcataaccgtaccttcaatcatcttcattcttcctgacctgatctatttttctcatcgtatttaccaccttcaaacatatggtacacatcctatttactttgggtatcttatattacaatataatctcaaaacagattttgttgattttatttacaagacgtaaccaaagggcctagattatctttatagcatagtatatgttcaaaatttattaccaaataaatataaagtacatttatgaaaggtgaaggagaatataaaacagagggaagatcttcagaactaccacaacaaaatgacacataacttaaatgtcaaaataccaacactgacttcttatcaacagcaataaaaagtaggaaaaaatttg

SEQ ID NO: 301316 - DNA, 556 bp, Homo sapiens
attcagtgatatgaaagacagaatgaaaatgactatcatatattaaactggagtctaatatattcattagtgagatttactgacatccctaatgaaagacatcaaattctcagattcaggagaaataagacattacactcaagatacataagatgaattcattcctcggcacacctaagtttttatcataaccgtaccttcaatcatcttcattcttcctgacctgatctatttttctcatcgtatttaccaccttcaaacatatggtacacatcctakttactttgggtatcttatattacaatataatctcaaaacagattttgttgattttatttacaagacgtaaccaaagggcctagattatctttatagcatagtatatgttcaaaatttattaccaaataaatataaagtacatttatgaaaggtgaaggagaatataaaacagagggaagatcttcagaactaccacaacaaaatgacacataacttaaatgtcaaaataccaacactgacttcttatcaacagcaataaaaagtaggaaaaaatttg

SEQ ID NO: 301317 - DNA, 556 bp, Homo sapiens
attcagtgatatgaaagacagaatgaaaatgactatcatatattaaactggagtctaatatattcattagtgagatttactgacatccctaatgaaagacatcaaattctcagattcaggagaaataagacattacactcaagatacataagatgaattcattcctcggcacacctaagtttttatcataaccgtaccttcaatcatcttcattcttcctgacctgatctatttttctcatcgtatttaccaccttcaaacatatggtacacatcctatttactttgggtatcttatattacaatataatctcaaaacagattttgttgattttatttacaagaygtaaccaaagggcctagattatctttatagcatagtatatgttcaaaatttattaccaaataaatataaagtacatttatgaaaggtgaaggagaatataaaacagagggaagatcttcagaactaccacaacaaaatgacacataacttaaatgtcaaaataccaacactgacttcttatcaacagcaataaaaagtaggaaaaaatttg

SEQ ID NO: 301318 - DNA, 501 bp, Homo sapiens
ttcacccagattacattctgaagaggctttaactcaatatctaatacatttgattatcaatataagcattatataacttctctacataagatagttgaatcttaccaacaatgctagtgtaatgtcatattgcagtatgatcatgttacaattcagttttattacagaaaaagttattatgaatgatagagctatttgttacagctactcaacataattggttcttgtctttataccgtatagtattataaataagtgttattactactcaccatgatttgattatttctgggtttctaatgggttgtggacttagccagtcaccctgtctyagttcacaggccctaattgacagtggtctctactatatgctgtcatacaccaggatacactcccttcctatagacaagacacaagaataagaatagtttatatctctgctacctgtactacgggatgtcttagccttatctattcttggggcaatggcaataacaatga

SEQ ID NO: 301319 - DNA, 611 bp, Homo sapiens
ctataataaaagccaatgccggcatgctgatatataatctctatagatcaaaaaatattcatgccttattctcagatttttaatagtggctctaagcagtcttaaaaatttattatttagacaccttatcctatattttaaaaatattttcttagtatactgtggatgttatacaagtcatataatggatagagaatttcttwcataaatttacaatataatttttttaaataaaacttttgtgaaattattttcaaatgttataaatgttaatgagttttgttatattggttccaatatttctcatatatggaaaatgtcattttccctgggaattaatatttggagctggtgtttaagaaaaaccatgtttgatgttggaaaatgctatgtccggtataactatagatgtttggaaagcagctcagttatgctaaagataaagaaaggagagaaaaatgacagaaggggaggtttgaacaaaacaaaataatacctgaaaatgttgaatggatatgtaatatttgtgaatgtttatgttctctatttcaccattatttaaacatttatattttcaaagggagacaataattatattttgaaatcatttt

SEQ ID NO: 301320 - DNA, 589 bp, Homo sapiens
catgctgatatataatctctatagatcaaaaaatattcatgccttattctcagatttttaatagtggctctaagcagtcttaaaaatttattatttagacaccttatcctatattttaaaaatattttcttagtatactgtggatgttatacaagtcatataatggatagagaatttcttacataaatttacaatataatttttttaaataaaacttttgtgaaattattttcaaatgttatmaatgttaatgagttttgttatattggttccaatatttctcatatatggaaaatgtcattttccctgggaattaatatttggagctggtgtttaagaaaaaccatgtttgatgttggaaaatgctatgtccggtataactatagatgtttggaaagcagctcagttatgctaaagataaagaaaggagagaaaaatgacagaaggggaggtttgaacaaaacaaaataatacctgaaaatgttgaatggatatgtaatatttgtgaatgtttatgttctctatttcaccattatttaaacatttatattttcaaagggagacaataattatattttgaaatcatttt

SEQ ID NO: 301321 - DNA, 570 bp, Homo sapiens
tctataataaaagccaatgccggcatgctgatatataatctctatagatcaaaaaatattcatgccttattctcagatttttaatagtggctctaagcagtcttaaaaatttattatttagacaccttatcctatattttaaaaatattttcttagtatactgtggatgttatacaagtcatataatggatagagaatttcttacataaatttacaatataatttttttaaataaaacttttgtgaaattattttcaaatgttataaatgttaatgagttttgttatattggttccaatatttctcatatatggaaaatgtcattttccctgggaattaatatttggagctggtgtttaagaaaaaccatgtttgawgttggaaaatgctatgtccggtataactatagatgtttggaaagcagctcagttatgctaaagataaagaaaggagagaaaaatgacagaaggggaggtttgaacaaaacaaaataatacctgaaaatgttgaatggatatgtaatatttgtgaatgtttatgttctctatttcaccattatttaaacattta

SEQ ID NO: 301322 - DNA, 570 bp, Homo sapiens
tctataataaaagccaatgccggcatgctgatatataatctctatagatcaaaaaatattcatgccttattctcagatttttaatagtggctctaagcagtcttaaaaatttattatttagacaccttatcctatattttaaaaatattttcttagtatactgtggatgttatacaagtcatataatggatagagaatttcttacataaatttacaatataatttttttaaataaaacttttgtgaaattattttcaaatgttataaatgttaatgagttttgttatattggttccaatatttctcatatatggaaaatgtcattttccctgggaattaatatttggagctggtgtttaagaaaaaccatgtttgatgttggaaaatgctatgtccrgtataactatagatgtttggaaagcagctcagttatgctaaagataaagaaaggagagaaaaatgacagaaggggaggtttgaacaaaacaaaataatacctgaaaatgttgaatggatatgtaatatttgtgaatgtttatgttctctatttcaccattatttaaacattta

SEQ ID NO: 301323 - DNA, 570 bp, Homo sapiens
tctataataaaagccaatgccggcatgctgatatataatctctatagatcaaaaaatattcatgccttattctcagatttttaatagtggctctaagcagtcttaaaaatttattatttagacaccttatcctatattttaaaaatattttcttagtatactgtggatgttatacaagtcatataatggatagagaatttcttacataaatttacaatataatttttttaaataaaacttttgtgaaattattttcaaatgttataaatgttaatgagttttgttatattggttccaatatttctcatatatggaaaatgtcattttccctgggaattaatatttggagctggtgtttaagaaaaaccatgtttgatgttggaaaatgctatgtccggtataactatagatgtttggaaagcagctcagttatgctaaagataragaaaggagagaaaaatgacagaaggggaggtttgaacaaaacaaaataatacctgaaaatgttgaatggatatgtaatatttgtgaatgtttatgttctctatttcaccattatttaaacattta

SEQ ID NO: 301324 - DNA, 601 bp, Homo sapiens
tgactctcagcagggaatcgttactgcatgtcgttttcatcaaagggagcttagtttatttgcctrtctgaatattgacattatattactaatttacacattggggaaagggtcaagagaactccaaatttttgttgacttgatattaacctgaaaggggaatgttaataactgacaaaatatatccacagtagttagacatcaagttgtgtttgtttttttaatctacttcatattattgaattatttagatagatgatagatagatagatagatagatagatagatagatagatagatgatagatagatagatttattagatgtacaggaaataaaattcactggtgggcatgtgtaaagagggggcagctcttttctaatgcagggctagctgcttgtccaggggcccatgattccagggctatatttggccccacagccatccaggatgagttgtttctcagccaccaagtcttaaaatgtatatgcattaaacttagtaaaatcgcacttctttgagatgtggctttttgggcattcactgaacttgaatttggccctaaataaggcctcaatcacatgctccagggtttgcagct

SEQ ID NO: 301325 - DNA, 589 bp, Homo sapiens
tggcctttaatataatgaagtttattgataaaaattaaaataaaataatgtggttttgtagtgctcttgtatgttaactaaaacaaattaataaaacctattgaaacccataatcatttagactatctacttacaytttgggaggccaaggtgggcagatcacctgaggtcaggagttcaagacgagcctggccaacataatgacatcccatctttactaaaaacacaaaaattaaacaggcatggtggtgcatgcctgtaatttcagctactcaggaggctgaggcagggagaactgcttgaacttgggaaggggaggttacagtgagccaagactgggccactgaactccaacctgggcgacagagggagactccatctcaaaaacaaacaaacaaacaaaaacacaacaaaaaaactatctacttaaataccattctagtaaaataaatatttttctgtgatcttaggtttgttttgtctcaataatataaatagtgtattggttgtctcaaagtgttaaatggaagcatattttatggcattgctgaaatatctaccaacttttcttactctaagttatgcaatg

SEQ ID NO: 301326 - DNA, 588 bp, Homo sapiens
agaaaacacttttcaaaaaaaaaaaaaaagtaaggtcattaggaaggcattgtaargttaatcttttccagcaaagctattacatttatttttctggagttctttagttataaaaagtagaatgtagttataggatctagtcagcgttaaattgattgaaaaaatgaaaaacactgtttcatttttaaatagattaacaattaagcaagttgtttatgttgtcccactgatatactagaatatgctacattcttttgggcatcttttagaccatagggctaaaatgttgagaatgacagagagacaattaggagctcagcacaaagcaaaatgttatgaatcaggaaaataaatagaacagagatcaaaattagatagatgcagaattggaatgatactgaaaacaagagatggaactgcagaaaatactatggcagatcattcattcctttgaatggtgaaagtagttaatacaatggctaacaattgaaatgaaaaaccagacccagatgaaaaaatgcaaaccagtaaacttacctagtcctattattttactcaattgtaggaaatacatgaaaaaaaagttgt

SEQ ID NO: 301327 - DNA, 588 bp, Homo sapiens
agaaaacacttttcaaaaaaaaaaaaaaagtaaggtcattaggaaggcattgtaaagttaatcttttccagcaaagctattacatttatttttctggagttctttagttataaaaagtagaatgtagttataggatctagtcagcrttaaattgattgaaaaaatgaaaaacactgtttcatttttaaatagattaacaattaagcaagttgtttatgttgtcccactgatatactagaatatgctacattcttttgggcatcttttagaccatagggctaaaatgttgagaatgacagagagacaattaggagctcagcacaaagcaaaatgttatgaatcaggaaaataaatagaacagagatcaaaattagatagatgcagaattggaatgatactgaaaacaagagatggaactgcagaaaatactatggcagatcattcattcctttgaatggtgaaagtagttaatacaatggctaacaattgaaatgaaaaaccagacccagatgaaaaaatgcaaaccagtaaacttacctagtcctattattttactcaattgtaggaaatacatgaaaaaaaagttgt

SEQ ID NO: 301328 - DNA, 588 bp, Homo sapiens
agaaaacacttttcaaaaaaaaaaaaaaagtaaggtcattaggaaggcattgtaaagttaatcttttccagcaaagctattacatttatttttctggagttctttagttataaaaagtagaatgtagttataggatctagtcagcgttaaattgattgaaaaaatgaaaaacactgtttcatttttaaatagattaacaattaagcaagttgtttatgttgtcccactgatatactagaatatgctacattcttttgggcatcttttagaccatagggctaaaatgttgagaatgacagagagacaattaggagctcagcacaaagcaaaatgttatgaatcaggaaaataaatagaacagagatcaaaattagatagatgcagaattggaatgatactgaaaacaagagatggaactgcagaaaatactatggcagatcattcattcctttgaatggtgaaagtagttaatacaatggctaacaattgaaatgraaaaccagacccagatgaaaaaatgcaaaccagtaaacttacctagtcctattattttactcaattgtaggaaatacatgaaaaaaaagttgt

SEQ ID NO: 301329 - DNA, 595 bp, Homo sapiens
atgtttcccatacagtctagttagattcatagttgcaatgtttcatgtggtatatttgctccctatggaatagaacataacattaatctttagatgtgtcactagagagatttgtatatatccacataaatctacagttgcaactagaaaaattatcctgtgaaaattttgtgatatgaatgtctttcaactttttaaaaagtaaagagaaaatgatgaacaaatatgagttggaaatcagaatgaasaaatcatgaaaatatagtgtaccccttcaaaaattttgaaaattaagagaaatcggtagaacagctgtattatcatttacaaaaatgtttctctacctatagaacaaacaattactttgtcctctaatttccaaataacttacagaacatttattttctactgtcactggaatggcaggctggcaggctgagttggtagcccaattggttcctcacatcaaaagattccctttattatttccttattttctctttaattctggcactccttcatgattgaacttacagatgttcttttgtctgctaattttcgagtaagcctgtgctctctataactttcagtctca

SEQ ID NO: 301330 - DNA, 595 bp, Homo sapiens
atatccacataaatctacagttgcaactagaaaaattatcctgtgaaaattttgtgatatgaatgtctttcaactttttaaaaagtaaagagaaaatgatgaacaaatatgagttggaaatcagaatgaagaaatcatgaaaatatagtgtaccccttcaaaaattttgaaaattaagagaaatcggtagaacagctgtattatcatttacaaaaatgtttctctacctatagaacaaacaattactttgtcctctaatttccaaataacttacagaacatttatttyctactgtcactggaatggcaggctggcaggctgagttggtagcccaattggttcctcacatcaaaagattccctttattatttccttattttctctttaattctggcactccttcatgattgaacttacagatgttcttttgtctgctaattttcgagtaagcctgtgctctctataactttcagtctcaatatccttctaccatcagccttttgtctaaacattcttattctggtttgtttccctgaactcttgacatcaatctctgttccttcaatattctgtttcttctactggaagcactctt

SEQ ID NO: 301331 - DNA, 595 bp, Homo sapiens
atgtttcccatacagtctagttagattcatagttgcaatgtttcatgtggtatatttgctccctatggaatagaacataacattaatctttagatgtgtcactagagagatttgtatatatccacataaatctacagttgcaactagaaaaattatcctgtgaaaattttgtgatatgaatgtctttcaactttttaaaaagtaaagagaaaatgatgaacaaatatgagttggaaatcagaatgaagaaatcatgaaaatatagtgtaccccttcaaaaattttgaaaattaagagaaatcggtagaacagctgtattatcatttacaaaaatgtttctctacctatagaacaaacaattactttgtcctctaatttccaaataacttacagaacatttattttctactgtcactggaatggcaggctggcaggctgagttggtagcccaattggttcctcacatcaaaagaytccctttattatttccttattttctctttaattctggcactccttcatgattgaacttacagatgttcttttgtctgctaattttcgagtaagcctgtgctctctataactttcagtctca

SEQ ID NO: 301332 - DNA, 595 bp, Homo sapiens
atatccacataaatctacagttgcaactagaaaaattatcctgtgaaaattttgtgatatgaatgtctttcaactttttaaaaagtaaagagaaaatgatgaacaaatatgagttggaaatcagaatgaagaaatcatgaaaatatagtgtaccccttcaaaaattttgaaaattaagagaaatcggtagaacagctgtattatcatttacaaaaatgtttctctacctatagaacaaacaattactttgtcctctaatttccaaataacttacagaacatttattttctactgtcactggaatggcaggctggcaggctgagttggtagcccaattggttcctcacatcaaaagattccctttattatttccttattttctctttaattctggcactccttcatgattgaacttacagatgttcttttgtctrctaattttcgagtaagcctgtgctctctataactttcagtctcaatatccttctaccatcagccttttgtctaaacattcttattctggtttgtttccctgaactcttgacatcaatctctgttccttcaatattctgtttcttctactggaagcactctt

SEQ ID NO: 301333 - DNA, 619 bp, Homo sapiens
taagtatgatatttggatattaatatctaccacttaatacagaaactattctagcacttgtataggcagtataagacataattttagaactctaaaataaaaactcataaactgaagttaaatatccatttcccactgctatctccttttccttttaacacattgatatcatttggatctgtgtccccacccaaatctcatgtcaaactgtaagtcccactgttggaggtggggcctgttgggaggcaattggatcatcgggcagtttctcttaaatggtttagcaccatctccttggwgctgttcttgtgacagtgagtgagttattgtgagtctggttgttaaaagtgtatagcacctccccacctctcactcttcttcctgcttccagccatgtgaagtgctggctcccccttcaccttctgccatgattgttagcttactgaggcccctgcagaagcccagcagatgcatcatgctttctgtataacgtgcagaaccatgagccaattaaactgcttttctttataaattacccagtctcaggtatttctttagagcaatgtaagaaaggactaatatagaaaattggtagaggaatatgatattgttgtaaaca

SEQ ID NO: 301334 - DNA, 518 bp, Homo sapiens
accttttcaaatccactaaggaaaagtgtctatgccttatagattgaaaagctcatctttaccagttaatttacattttactttttcctaaaacaaaaggctytccatatctgtaggtacacagtttgacttaattatcctatgttatatattgtacataattatatgagaggtagtggcaatttaaacaaataaaatgatggctatttctttttattaacttcatcatatttcactgaggttttccttactttaggcttccttgatggctgcaatgtatgctaaaagtaaatttttatgtgaaatgtttaaaatatttgaaaatgatgcttattgtttgtcaggttttgccactattagcatgactcagtacccatagagtctgtctcttaggcatgtgaagcaaatgatttctctgacccaaaacatttcatatgccttaaaagtcaaacaatgcaaagatgtgatatttagaatactagttacataataatggataatgacttagcttttaaaac

SEQ ID NO: 301335 - DNA, 518 bp, Homo sapiens
accttttcaaatccactaaggaaaagtgtctatgccttatagattgaaaagctcatctttaccagttaatttacattttactttttcctaaaacaaaaggctctccatatctgtaggtacacagtttgacttaattatcctatgttatatattgtacataattatatgagaggtagtggcaatttaaacaaataaaatgatggctatttctttttattaacttcatcatatttcactgaggttttccttactttaggcttccttgatggctgcaatgtatgctaaaagtaaatttttatgtgaaatgtttaaaatatttgaaaatgatgcttattgtttgtcaggttttgccactattagcatgactcagtacccatagwgtctgtctcttaggcatgtgaagcaaatgatttctctgacccaaaacatttcatatgccttaaaagtcaaacaatgcaaagatgtgatatttagaatactagttacataataatggataatgacttagcttttaaaac

SEQ ID NO: 301336 - DNA, 639 bp, Homo sapiens
tagaaaaaagaaagaaaagcaaaaagaaaagaaaaagaaagcaacactgctatatagaacatttttttttctaaatggaatccagcagcaaaaaaaagataattgaagatactattaaaagatacaatttaatattaatattgaccacatttataaattcacatacttttataaaacatatgcacttctgagtataaagcacacataatacaaaaaagattattacattttaaattgttaaaatttccttgtttttccacacctgatgattactctcaatytcaacaatataattacaaataatgtttattattcaaaatagattattttgtgtgtgtgtgttttattcaattaggtggtaaattataagattttgccaggtgattcagagaagtagcctggaaaagtttatatagatggtactaaatgaaagatagaaaattaaaaatttatagttaaatttattagaaacttaaaattctttaaaaaattatagctaggtaaataaatcaactaaatttttcctttttccttcatattgcagagtgtattattccagccggtttacaatgcaggcttcccattttgatactaattttaacctgattttatatatcaatattaaggagacaaaaaata

SEQ ID NO: 301337 - DNA, 639 bp, Homo sapiens
tagaaaaaagaaagaaaagcaaaaagaaaagaaaaagaaagcaacactgctatatagaacatttttttttctaaatggaatccagcagcaaaaaaaagataattgaagatactattaaaagatacaatttaatattaatattgaccacatttataaattcacatacttttataaaacatatgcacttctgagtataaagcacacataatacaaaaaagattattacattttaaattgttaaaatttccttgtttttccacacctgatgattactctcaatctcaacaatataattacaaataatgtttattattcaaaatagattattttgtgtgtgtgtgttttattcaattaggtggtaaattataagattttgccaggtgattcagagaagtagcctggaaaagtttatatagatggtactaaatgaaagatagaaaattaaaaatttatagttaaatttattagaaacttaaaattctttaaaaaattatagytaggtaaataaatcaactaaatttttcctttttccttcatattgcagagtgtattattccagccggtttacaatgcaggcttcccattttgatactaattttaacctgattttatatatcaatattaaggagacaaaaaata

SEQ ID NO: 301338 - DNA, 501 bp, Homo sapiens
tagctcttgatgccaagcatgatgatgtttggtttcagaagttgccacattaacttctgattgaagttaactacagattgattcaatctgtagcatgattgaagctacaatcatgctaaccaattttgacaattttatattttatagggcctagttctaacattccactgttatttaattttataaatattttttaaaatcttgttactaaattaaaaatagacctctggaaaataaatcgaaaggtttttttgttttttgttttttgagacagagtctcactcactctatcactcaggccagagtgcagcagcctgatcttggctcactgyaacctctgcttcctgggttcaagcgattctgctgcctcagtctcccaagtacctgagaatacaggtgcccacaaccatgcctggataatttttgtagttttagtagagatggggttttgccatgttggccaggctggtctcaactcctgacctaggtgatccgctcgtc

SEQ ID NO: 301339 - DNA, 580 bp, Homo sapiens
ttcatgtgtgttactttaaatcwaaagctggaaatacttaagcctagcaaggaagacatgtcaaaagccaacttagatctaaagctagaactcttgtttttaacagttagccaagttgtgaatgcaaagaaaaaattcttgaaggaaatcaaaacttctactccagtgaacacaggaatagtaagaaagagaaacagccttattgctgagatttggaatgttttagtggttcggccagaaagtcaaatcagccacaacattatcttcagccaaaacgcaatctagaccaaagctctaatgctcttcaattctgtgaaggctgagagaggtaagagaaaactgcagaagaaaagttggaagctgacaaatgttggttcttaaggtggaaggaaaggagccatcttaacaacataaaagtggaaagtgaaacagtaactgctgatgaaaaagcttcagaaaattattcagaaaatttagctaaaataattgatgaatgtgactaccctaaacaacagattttcaatgtagacagaacagttttatattgaaagaagatttcatctaagcctttcatagctag

SEQ ID NO: 301340 - DNA, 580 bp, Homo sapiens
ttcatgtgtgttactttaaatcaaaagctggaaatacttaagcctagcaaggaagacatgtcaaaagccaacttagatctaaagctagaactcttgtttttaacagttagccaagttgtgaatgcaaagaaaaaattcttgaaggaaatcaaaacttctactccagtgaacacaggaatagtaagaaagagaaacagccttattgctgagayttggaatgttttagtggttcggccagaaagtcaaatcagccacaacattatcttcagccaaaacgcaatctagaccaaagctctaatgctcttcaattctgtgaaggctgagagaggtaagagaaaactgcagaagaaaagttggaagctgacaaatgttggttcttaaggtggaaggaaaggagccatcttaacaacataaaagtggaaagtgaaacagtaactgctgatgaaaaagcttcagaaaattattcagaaaatttagctaaaataattgatgaatgtgactaccctaaacaacagattttcaatgtagacagaacagttttatattgaaagaagatttcatctaagcctttcatagctag

SEQ ID NO: 301341 - DNA, 580 bp, Homo sapiens
ttcatgtgtgttactttaaatcaaaagctggaaatacttaagcctagcaaggaagacatgtcaaaagccaacttagatctaaagctagaactcttgtttttaacagttagccaagttgtgaatgcaaagaaaaaattcttgaaggaaatcaaaacttctactccagtgaacacaggaatagtaagaaagagaaacagccttattgctgagatttggaatgttttagtggttcggccagaaagtcaaatcagccacaacattatcttcagccaaaacgcaatctagaccaaagctctaatgctcttcaattctgtgaaggctgagagaggtaagagaaaactgcagaagaaaagttggaagctgacaaakgttggttcttaaggtggaaggaaaggagccatcttaacaacataaaagtggaaagtgaaacagtaactgctgatgaaaaagcttcagaaaattattcagaaaatttagctaaaataattgatgaatgtgactaccctaaacaacagattttcaatgtagacagaacagttttatattgaaagaagatttcatctaagcctttcatagctag

SEQ ID NO: 301342 - DNA, 160 bp, Homo sapiens
tcactgaattgctgcaatcttgtaatataacyaacagatgaggagttgtttcttatagatgaacaaagaaagtggtttcttgagatggaatctattcctggtgaagatactgtgaacattattgaaataacaatgaggatttagaatagtccctaaatgt

SEQ ID NO: 301343 - DNA, 160 bp, Homo sapiens
tcactgaattgctgcaatcttgtaatataaccaacagatgagsagttgtttcttatagatgaacaaagaaagtggtttcttgagatggaatctattcctggtgaagatactgtgaacattattgaaataacaatgaggatttagaatagtccctaaatgt

SEQ ID NO: 301344 - DNA, 160 bp, Homo sapiens
tcactgaattgctgcaatcttgtaatataaccaacagatgaggagttgyttcttatagatgaacaaagaaagtggtttcttgagatggaatctattcctggtgaagatactgtgaacattattgaaataacaatgaggatttagaatagtccctaaatgt

SEQ ID NO: 301345 - DNA, 631 bp, Homo sapiens
atatactattatagaatgctttagatttatacaattaactaatatatttggcacatttttatttatggctcacatcaagttacatactcaatacatgtctgamttagcttctttatctgtaatctgagaatactccttttcctgaatacatatcatgatgacaaggatcttacaaaacaaatcatgtcaaagactaggcatgtgctagttagttttaaacattctttaacaaataatctccagggacactaccttcaacactgaatctttgagaaaatctagtttttaaatggtccacattttgcattaattttttaaaacatattgaagaccataggaaagaactggaaagatttctgagacatctgaaaataatagaaaataatctactttatatcaagaaacattgaacaaaaatgaaataaataaaaaaattctgtggaagaagaaattaattcaacctcatatatttctcagtcaatttattcaataatgaggtcacttgatttacttcatgtgtacatttcaatgaatgactgcatgtctaaaatatattttatacttttttactgagattattcacacttcagtcttcctgttttggtacaaaatattttagacaaactattat

SEQ ID NO: 301346 - DNA, 454 bp, Homo sapiens
ccaaatcgcaccaattatttcttctatactgttggttcatgagtttgtgactgtacatagttagtaattacttaaaatcagattttttttttacattttactgaaacatagtttaattcacctttgcttttctcccactagcttgatatattattgaactataataattttaaaaagaaaaatcacactatgctaaagataaggaagcatttaaatgacagaactattttgtctgaataaagacacaagatcatatatagagaagagaaaatgagctaattcatatatttggatgatatgaagtagattaaatattttatgtttttaaataagtaacatgttaagcaagacagaaaattatttttaataaaataaaaaatatacaaaagctttaaaattcatgcaaatatctaaatgaaagaagaaatcaracaatgtatatcttggcattgtt

SEQ ID NO: 301347 - DNA, 621 bp, Homo sapiens
aacgagtaaaataacatcattatgggctgacatacttttggtgtgttaaggtgtattactaatatgatacatattgtaaaaaccatcaataataatttaaarttataatatttaacaataaaattactgcattttgtaattaactatgctaactatatcattaactatattaatgacactgatattgcataaaaatatatttgtatagcagataaaaagatgagggagggatagcattaagagaaatacctaatgtaaatgacgagttaatgggtgcgcaaaccaacacaacacatgtatacatatgtaacaaacctgcacgttgtgcacatgtgccctagaacttagagtataataaaaaaagttgtaaagataaattttgtctagaattcaactaacaggcacctagaaatgtttaaggataattaaaattcgaagatgaaatttgaatgttaacataaagcaaaataaaagaaatgccaaatacatacaattttaaaactataacaacttcaaacttcaaaaagaaacttttatattattatgttatataatatttttatttttaaaggcatttttttcttgtgattaaaggtatgttttctcttaaaaacatgtatt

SEQ ID NO: 301348 - DNA, 621 bp, Homo sapiens
aacgagtaaaataacatcattatgggctgacatacttttggtgtgttaaggtgtattactaatatgatacatattgtaaaaaccatcaataataatttaaagttataatatttaacaataaaattactgcattttgtaattaactatgctaactatatcattaactatattaatgacactgatattgcataaaaatatatttgtatagcagataaaaagatgagggagggatagcattaagagaaatacctaatgtaaatgacgagttaatgggtgcgcaaaccaacacaacacatgtatayatatgtaacaaacctgcacgttgtgcacatgtgccctagaacttagagtataataaaaaaagttgtaaagataaattttgtctagaattcaactaacaggcacctagaaatgtttaaggataattaaaattcgaagatgaaatttgaatgttaacataaagcaaaataaaagaaatgccaaatacatacaattttaaaactataacaacttcaaacttcaaaaagaaacttttatattattatgttatataatatttttatttttaaaggcatttttttcttgtgattaaaggtatgttttctcttaaaaacatgtatt

SEQ ID NO: 301349 - DNA, 595 bp, Homo sapiens
tgaaatttgaatgttaacataaagcaaaataaaagaaatgccaaatacatacaattttaaaactataacaacttcaaacttcaaaaagaaacttttatattattatgttatataatatttttatttttaaaggcatttttttcttgtgattaaaggtatgttttctcttaaaaacatgtatttctctacatttaaaaaaagattttttaacttaaaaaataaattttcttcctttttmtattcctattttattttttttaatttttttagacttttggccatttttcttaactttatatagcactaaaatgacttataaaatactataattatataaattttgataggatgttagtggaaatttatatgctattctgttagtttattaaattaatgtttatttttatacaaacattaattattttcaaagtggctactaaaatgaataataagcaatcataaaataattatactaaattatatagataaataagggcagaaattgtatatttttatataattatttattttattttatttttttgagagggaatctctctctgtcaccctgtctggagtgcagtggcacgatttt

SEQ ID NO: 301350 - DNA, 595 bp, Homo sapiens
tgaaatttgaatgttaacataaagcaaaataaaagaaatgccaaatacatacaattttaaaactataacaacttcaaacttcaaaaagaaacttttatattattatgttatataatatttttatttttaaaggcatttttttcttgtgattaaaggtatgttttctcttaaaaacatgtatttctctacatttaaaaaaagattttttaacttaaaaaataaattttcttcctttttctattcctattttattttttttaatttttttagacttttggccatttttcttaactttatatagcactaaaatgacttataaaatactataattatataaattttgataggatgttagtggaaatttatatgctattctgttagtttattaaattaatgtttatttttatacaaacattaattattttcaaagtggctactaaaakgaataataagcaatcataaaataattatactaaattatatagataaataagggcagaaattgtatatttttatataattatttattttattttatttttttgagagggaatctctctctgtcaccctgtctggagtgcagtggcacgatttt

SEQ ID NO: 301351 - DNA, 595 bp, Homo sapiens
tgaaatttgaatgttaacataaagcaaaataaaagaaatgccaaatacatacaattttaaaactataacaacttcaaacttcaaaaagaaacttttatattattatgttatataatatttttatttttaaaggcatttttttcttgtgattaaaggtatgttttctcttaaaaacatgtatttctctacatttaaaaaaagattttttaacttaaaaaataaattttcttcctttttctattcctattttattttttttaatttttttagacttttggccatttttcttaactttatatagcactaaaatgacttataaaatactataattatataaattttgataggatgttagtggaaatttatatgctattctgttagtttattaaattaatgtttatttttatacaaacattaattattttcaaagtggctactaaaatgaataataagcaatcataaaataattatacwaaattatatagataaataagggcagaaattgtatatttttatataattatttattttattttatttttttgagagggaatctctctctgtcaccctgtctggagtgcagtggcacgatttt

SEQ ID NO: 301352 - DNA, 548 bp, Homo sapiens
catggccccttctactcctcactggtcagggcctcctggcttgagcctccagcacagccacctacctcagcctgacaacttgggccagaagcagcattgcatttccctgggacagagctctcataggtataagacaggcctgccatttttgcctgctatagcccctgcccataatgccctcagatcaagagatagcaaagaggcttaaggactrtagcaggtcttcagctcagcacagctgccttatggaggtgttgtcagacttttttccatgcctgtctttgctcctgctacttctcactgggtagggcctcccgacctgggccccagcacagctaccctgctcccacttgaacacttcagacagtggcacctgtgcatttctctgagatagaattcccagcgacaacccacagcccctctgccattacatacagtggtaccacccttgctgcctgatatggtttggctctgtgtccccattcaaatctcatcctgtagatcccacaattcctatgttttgtgggaggtacctggtgggaaatgac

SEQ ID NO: 301353 - DNA, 548 bp, Homo sapiens
catggccccttctactcctcactggtcagggcctcctggcttgagcctccagcacagccacctacctcagcctgacaacttgggccagaagcagcattgcatttccctgggacagagctctcataggtataagacaggcctgccatttttgcctgctatagcccctgcccataatgccctcagatcaagagatagcaaagaggcttaaggactatagcaggtcttcagctcagcacagctgccttatggaggtgttgtcagacttttttccatgcctgtctttgctcctgctacttctyactgggtagggcctcccgacctgggccccagcacagctaccctgctcccacttgaacacttcagacagtggcacctgtgcatttctctgagatagaattcccagcgacaacccacagcccctctgccattacatacagtggtaccacccttgctgcctgatatggtttggctctgtgtccccattcaaatctcatcctgtagatcccacaattcctatgttttgtgggaggtacctggtgggaaatgac

SEQ ID NO: 301354 - DNA, 468 bp, Homo sapiens
gattccgttaattaatattttgttcctttgatgactgaatagtatttcatggtttcttgtataaattcaccacaaattaaacattcayctgggcttattgaccttttcaactgtaacaaattaagctgttgtagacattcatgaacaagtttttgtgggaacacaagtttcattactccaaattaaacacccacaactgcaattgctgggatctatggtctatgcacatctggtttttattttactttgaaaaatttttaattattttcttaaaattttgtgggtacattgagtgcccacagaagctagtaaggatactggggcattggagaggaggtagagaaggttaatcagcagaaaaaaaaatgtggaaagaatgaataacatgtctgtatttttaaaaaactgtcaactatttttcagagtggctctattattttacttttccactagcaacgtatgagtgat

SEQ ID NO: 301355 - DNA, 468 bp, Homo sapiens
gattccgttaattaatattttgttcctttgatgactgaatagtatttcatggtttcttgtataaattcaccacaaattaaacattcacctgrgcttattgaccttttcaactgtaacaaattaagctgttgtagacattcatgaacaagtttttgtgggaacacaagtttcattactccaaattaaacacccacaactgcaattgctgggatctatggtctatgcacatctggtttttattttactttgaaaaatttttaattattttcttaaaattttgtgggtacattgagtgcccacagaagctagtaaggatactggggcattggagaggaggtagagaaggttaatcagcagaaaaaaaaatgtggaaagaatgaataacatgtctgtatttttaaaaaactgtcaactatttttcagagtggctctattattttacttttccactagcaacgtatgagtgat

SEQ ID NO: 301356 - DNA, 468 bp, Homo sapiens
gattccgttaattaatattttgttcctttgatgactgaatagtatttcatggtttcttgtataaattcaccacaaattaaacattcacctgggcttattgaccttttcaactgtaacaaattaagctgttgtagacattcatgaacaagtttttgtgggaacacaagtttcattactccaaattaaacacccacaactgcaattgctgggatctatggtctatgcacatctggtttttattttactttgaaaaatttttaattattttcttaaaattttgtgggtacattgagtgcccacagaagctagtaaggatactggggcattggagaggaggtagagaaggttaatcagcagaaaaaaaaatgtggaaagaatgaataacatgtctgtatttttaaaaaactgtcaactatttttcagagtgrctctattattttacttttccactagcaacgtatgagtgat

SEQ ID NO: 301357 - DNA, 587 bp, Homo sapiens
tgttttcaatttcatgaatttttgttattgtcatgattatttttcttcttctgcctgctttcagtttactctgttctttttctagttttttgagatacaagtgtatgttattgatttgagatcttttctcatttttaatgaagcatttagtactataaatttctttcccaccacagccttagctgtatttcctatattttgatatgttgtatttttctttcatttgtttaaatatatttttggattttaatttaagactttatattgtatccatagatcatttggaactgtgttgtatagttgaaatgcatttctattaatatattaattatattaatatatcttccttctttsttgatgttcaaaattccttttttttctttattttgtttgaataacagttttagtaaacatttaatggtaagcttgctaacaacaaatttttaaacaattcaaaaaatataattttcctttactccagaagcatagttacaacatctgtagcattcagagttggcagctcttttctttcactacctgaaaaatattatgtaacttgtttctgacctccattgtttcagatgaaa

SEQ ID NO: 301358 - DNA, 512 bp, Homo sapiens
agactcaaaatggattaaaaatttaagtgtaagacatgaaaaattagactaccatacactgttggtggtaagttaaattatttcacttattatgaaaaactgtatggtggttcctcaaaacaaaaatagagacaccatatgatctagtgatcccactactaggtgtttatccaaaggaaagtaaatcattacacttaagaggcatctgcacctccatatttattgcagctgtcttcacaataacmaagatatggaattaagctaaatatccatcaatggatggatagataaaacatgtggtatatacacataccaaatttgtatatacattcatatatatatattatatatatgaatactattctgccataaaaagaatgaaattctgtcatttgcagaatcatggataagactagtgaacattacgttaagtggaataagtcagacacagaaaaattaatactgtctgtccttacccatatgcaggagctaaacaaatttgagctcattaa

SEQ ID NO: 301359 - DNA, 566 bp, Homo sapiens
atttcttctcggtgtgcccatgttgtttcatgattgcaaagcgttcttttaagtgcttgtaaartattgttttcatgcttcttaaaattgcttccagaagtaatgtcaaactcattcacctatagtttatgagctctatcttcctttaaaaaactagtacactgcccatttcttgtcttctaaaacttttactattctccataatcctcaaagatatatagagaaacttaaaaatctctttcctaaactttcttattgttttggagtgagttctactccaatactagggcccagagctcatagtgcctcttcgttcatcttgagatttaattaaaagcaatgttgagtcttctcttttggatctaaagatctatttgatgagaaagactgaagaaaaataaggataagggtatttcctccatgttttcatggcacaaaatctttgtttgctaactgtgataagcagaataatgcccccccaccccccacaagactgtctctgtcctattctccatgtcaggaaggatatgctatgttatataagaatatatgatgttacaatgcaa

SEQ ID NO: 301360 - DNA, 566 bp, Homo sapiens
atttcttctcggtgtgcccatgttgtttcatgattgcaaagcgttcttttaagtgcttgtaaaatattgttttcatgcttcttaaaattgcttccagaagtaatgtcaaactcattcacctatagtttatgagctctatcttcctttaaaaaactagtacactgcccatttcttgtcttctaaaacttttactattctccataatcctcaaagatatatagagaaacttaaaaatctctttcctaaactttcttattgttttggagtgagttctactccaatactagggcccagagctcatagtgcctcttcgttcatcttgagatttaattaaaagcaatgttgagtcttctcttttggatctaaagatctatttgatgagaaagactgaagaaaaataaggataagggtatttcctccatgttttcatggcacaaaatctttgtttgctaactgtgataagcagaataatgcccccccaccccccacaagactgtcyctgtcctattctccatgtcaggaaggatatgctatgttatataagaatatatgatgttacaatgcaa

SEQ ID NO: 301361 - DNA, 610 bp, Homo sapiens
ataagaatatatgatgttacaatgcaagaaagtattaaggttgcacatgacattaagcttactaaacagcagaacttaaaataagagatcatacttgattatctagggggggccaatttaatcacaaggatcctttaaatgtggaagagtgtggtagaaaatatttaaagatactacattgttaattgtactggaggraagaaccaagagacaaggaatggggaaagcagacaagagacaagaaatgaagacagcccctagaagctggaaaaggcaagaacatgtattctcctttagagtccccagaaggaaagcagcgctgctgacaccttgattttagcctaatgaaaaccatttaagacttctgacctttataattttaaaatgatagatttatgtttctaaactaccaaataaaaatattttgtctttagtttttaaaagtttaatcaaaatgtttcttgaaatgtgtttattccgtgtagggtatcttaggcttcttgaatctatacatttgtgtcttctgcaaatttgaggtttttttgaagcactatttcttcaagtattctttcagcctcattttacttcttttctggtacacgtaataaaa

SEQ ID NO: 301362 - DNA, 610 bp, Homo sapiens
ataagaatatatgatgttacaatgcaagaaagtattaaggttgcacatgacattaagcttactaaacagcagaacttaaaataagagatcatacttgattatctagggggggccaatttaatcacaaggatcctttaaatgtggaagagtgtggtagaaaatatttaaagatactacattgttaattgtactggaggaaagaaccaagagacaaggaatggggaaagcagacaagagacaagaaatgaagacagcccctagaagctggaaaaggcaagaacatgtattctcctttagagtccccagaaggaaagcagygctgctgacaccttgattttagcctaatgaaaaccatttaagacttctgacctttataattttaaaatgatagatttatgtttctaaactaccaaataaaaatattttgtctttagtttttaaaagtttaatcaaaatgtttcttgaaatgtgtttattccgtgtagggtatcttaggcttcttgaatctatacatttgtgtcttctgcaaatttgaggtttttttgaagcactatttcttcaagtattctttcagcctcattttacttcttttctggtacacgtaataaaa

SEQ ID NO: 301363 - DNA, 607 bp, Homo sapiens
ctacatctgtgttcattttatgtatcagtctattttatttatgttgttcaaattggttaaattctactattctgccctcacattcactgattttaccttctcgcatctcaatggcgctattgactccatccaacacatttttcatttctgttaccgtgtttgtttgcttttataatttacatttagttctttttgttgttgtttttttacaactcaagtttggttaatattttgtgattttgttatatattttaagataatttctatttgatgttgaaacatttttgctagatattttaaaatcatattcagatgattccaacatctgatgcgttttggtgttggtgtcagttaactgtcttttttcactcaaattgttattttcttggttctttgtatgatyggtgatttgtaattatattctggacattttgtctatcatggcagacaattgtgagctctatttaaactgttccttttggcaggcagtcacactgtttagctttagcatgtacatcctgggtgtggggcaggtacactgtgtactatttactagcttgtctgagttcagttaaacagaacacactcatatgcaacaaattacata

SEQ ID NO: 301364 - DNA, 607 bp, Homo sapiens
ctacatctgtgttcattttatgtatcagtctattttatttatgttgttcaaattggttaaattctactattctgccctcacattcactgattttaccttctcgcatctcaatggcgctattgactccatccaacacatttttcatttctgttaccgtgtttgtttgcttttataatttacatttagttctttttgttgttgtttttttacaactcaagtttggttaatattttgtgattttgttatatattttaagataatttctatttgatgttgaaacatttttgctagatattttaaaatcatattcagatgattccaacatctgatgcgttttggtgttggtgtcagttaactgtcttttttcactcaaattgttattttcttggttctttgtatgattggtgatttgtaattatattctggacattttgtctatcatggcagacaattgtgagctctatttaaactgttccttttggcaggcagtcacactgtttagctttagcatrtacatcctgggtgtggggcaggtacactgtgtactatttactagcttgtctgagttcagttaaacagaacacactcatatgcaacaaattacata

SEQ ID NO: 301365 - DNA, 369 bp, Homo sapiens
ttgcccaccccgtatttgagtcaccccagattgcccacagataaagatgtagccctctggcacacacagaccccctgtgctagtattatttatgaggatgaaggtattggcactcactagctaagtctcattgatggcagtagttgcctgagttttcctcatacagtttaccccatacaatcctaaagccyctacgcagagggctagcactctccgatacttgttatcttcatcatcatgaacacacatctttgtaattaaaggagcctggtgcatcaaagcacctgcccaccaaagattcgttagttgtggtcatgacatttttccacaaagttatttaagttaaaagatagcaccttgaaatcttcc

SEQ ID NO: 301366 - DNA, 369 bp, Homo sapiens
ttgcccaccccgtatttgagtcaccccagattgcccacagataaagatgtagccctctggcacacacagaccccctgtgctagtattatttatgaggatgaaggtattggcactcactagctaagtctcattgatggcagtagttgcctgagttttcctcatacagtttaccccatacaatcctaaagcctctacgcagagggctagcactctccgatacttgttatcttcatcatcatgaacacacatcyttgtaattaaaggagcctggtgcatcaaagcacctgcccaccaaagattcgttagttgtggtcatgacatttttccacaaagttatttaagttaaaagatagcaccttgaaatcttcc

SEQ ID NO: 301367 - DNA, 369 bp, Homo sapiens
ttgcccaccccgtatttgagtcaccccagattgcccacagataaagatgtagccctctggcacacacagaccccctgtgctagtattatttatgaggatgaaggtattggcactcactagctaagtctcattgatggcagtagttgcctgagttttcctcatacagtttaccccatacaatcctaaagcctctacgcagagggctagcactctccgatacttgttatcttcatcatcatgaacacacatctttgtaattaaaggagmctggtgcatcaaagcacctgcccaccaaagattcgttagttgtggtcatgacatttttccacaaagttatttaagttaaaagatagcaccttgaaatcttcc

SEQ ID NO: 301368 - DNA, 616 bp, Homo sapiens
tttggaagaggccactaaggcattatgctcacaggcctataatgccccatccttgtggaaaagcagactgacagtttaatgcccacctctcaccctttccagggtctcagatgttctctacctattggataagaattaggctgagttggtatagcaacccggtctctctgttttagtcccaagctacttctgcagacacccattgcccttgttgcttgactcaaacctttctgcctcaatcatccactccagtacaaagttggcatatctcataacatcatccacccaaatggaaggatcagaggtatccagcatcattagagggattctagcagtctgtcattccttagtcctgtactccacccctgtggaatccccttataggggaggtacccaagggaagtataaactccagattagagacagcgtggcctctctggagtactatggcaccctgaactgcaattcatccccaggacatgtactctataggggaaaaggaaaaagaattgttgagaaagactgagactttacaggcacagacagcctagtcaggtgggtttctcatccacctccaccccaaccaagcycagtgtccctcaatatgcactgcagt

SEQ ID NO: 301369 - DNA, 359 bp, Homo sapiens
ctgtttttcttagtccttgtcctcacatggatatcctctaacagtccaatccttccattgccactgtcctgatcagatggctaggcttttggcaatggcccataagtcactgaaaatatagcaagatatgcgayagaggtagcctgcatggccatcaccactgcatttagtttggcccattgggtagaatgcccatgtccagtctcagtcaaaagatagccatccagtggctgaatggtggtccagtgcatgttgtctggcagagctatcagtaaaccatgcctgtcaggcttctgagcccaagctaaaccatcatatcccctgtgacctgcacgtatacatccaggtggcctgaagca

SEQ ID NO: 301370 - DNA, 599 bp, Homo sapiens
aagtcactgaaaatatagcaagatatgcgacagaggtagcctgcatggccatcaccactgcatttagtttggcccattgggtagaatgcccatgtccagtctcagtcaraagatagccatccagtggctgaatggtggtccagtgcatgttgtctggcagagctatcagtaaaccatgcctgtcaggcttctgagcccaagctaaaccatcatatcccctgtgacctgcacgtatacatccaggtggcctgaagcaagtgaagaatcacaaaagaagtgaaaatggctggttcctgccttaactgatgacattactttgtgaaattccttctcctggctcagaagctcccccactgagcaccttgtgacccccgcccctgcccgccggagaacaatcctctttgactataattttccactacctacccaaatcctataaaacggccccaccccatctcccttcactgactctcttttcagactcagcccgcctgcacccaggtgaaataagcagccttattgctcatgcagtgtctgtttggtggtctcttcacatggacgtgtgtgacatttggtgcctgttatcacccccctgctac

SEQ ID NO: 301371 - DNA, 359 bp, Homo sapiens
ctgtttttcttagtccttgtcctcacatggatatcctctaacagtccaatccttccattgccactgtcctgatcagatggctaggcttttggcaatggcccataagtcactgaaaatatagcaagatatgcgacagaggtagcctgcatggccatcaccactgcatttagtttggcccattgggtagaatgcccatgtccagtctcagtcaaaagatagccawccagtggctgaatggtggtccagtgcatgttgtctggcagagctatcagtaaaccatgcctgtcaggcttctgagcccaagctaaaccatcatatcccctgtgacctgcacgtatacatccaggtggcctgaagca

SEQ ID NO: 301372 - DNA, 359 bp, Homo sapiens
ctgtttttcttagtccttgtcctcacatggatatcctctaacagtccaatccttccattgccactgtcctgatcagatggctaggcttttggcaatggcccataagtcactgaaaatatagcaagatatgcgacagaggtagcctgcatggccatcaccactgcatttagtttggcccattgggtagaatgcccatgtccagtctcagtcaaaagatagccatccastggctgaatggtggtccagtgcatgttgtctggcagagctatcagtaaaccatgcctgtcaggcttctgagcccaagctaaaccatcatatcccctgtgacctgcacgtatacatccaggtggcctgaagca

SEQ ID NO: 301373 - DNA, 599 bp, Homo sapiens
aagtcactgaaaatatagcaagatatgcgacagaggtagcctgcatggccatcaccactgcatttagtttggcccattgggtagaatgcccatgtccagtctcagtcaaaagatagccatccagtggctgaatggtggtccagkgcatgttgtctggcagagctatcagtaaaccatgcctgtcaggcttctgagcccaagctaaaccatcatatcccctgtgacctgcacgtatacatccaggtggcctgaagcaagtgaagaatcacaaaagaagtgaaaatggctggttcctgccttaactgatgacattactttgtgaaattccttctcctggctcagaagctcccccactgagcaccttgtgacccccgcccctgcccgccggagaacaatcctctttgactataattttccactacctacccaaatcctataaaacggccccaccccatctcccttcactgactctcttttcagactcagcccgcctgcacccaggtgaaataagcagccttattgctcatgcagtgtctgtttggtggtctcttcacatggacgtgtgtgacatttggtgcctgttatcacccccctgctac

SEQ ID NO: 301374 - DNA, 582 bp, Homo sapiens
caggcttctgagcccaagctaaaccatcatatcccctgtgacctgcacgtatacatccaggtggcctgaagcaagtgaagaatcacaaaagaagtgaaaatggctggttcctgccttaactgatgacattactttgtgaaattccttctcctggctcagaagctcccccactgagcaccttgtgacccccgcccctgcccgccggagaacaatcctctttgactataattttccactacctacccaaatcctataaaacggccccaccccatctcccttcactgactctcttttcagactcagcccgcctgcacccaggtgaaataarcagccttattgctcatgcagtgtctgtttggtggtctcttcacatggacgtgtgtgacatttggtgcctgttatcacccccctgctacagcatgggcttgtaaaacctataaactctccttacaattctcccattttacctattcaaacaccagacaagtcttacaggttagttcaggatctgctctggccatcatgtctccgtgcagcagttgccatcaccctaatgcttttagaggccctaaaaatcacaaa

SEQ ID NO: 301375 - DNA, 548 bp, Homo sapiens
aaaacctataaactctccttacaattctcccattttacctattcaaacaccagacaagtcttacaggttagttcaggatctgctctggccatcatgtctccgtgcagcagttgccatcaccctaatgcttttagaggccctaaaaatcacaaactgtgctcaactcactctctacagttctcataacttccaaaatctattttcttcctcacacctgatgcatatactttctgctccccrgctccttcaattgtactcactctttgttgagtctcccacaattaccgttgttcctggcccggacttcaatctggcctcccacattattccggatatcacacctgacccccatggctgtatctctctgatccacctgacattcactccgtttccccatatttcattctttcctgttcctcaccctgatcacacttggtttatcaatgacagttccaccaggcctaattgccactcaccagcaaaggcaggctatgctatagtgtcttccacatctatcattgaggctaccgctctgccccactcctcta

SEQ ID NO: 301376 - DNA, 519 bp, Homo sapiens
atagagccccaaaactcaccaaccagacaagtaattatgctgaacccccttgagcactctctaatggatgtcctkggtcctcccaattcttagtcatttaatacctgtgtttctccttcacttattcacaccttgtgtcttccgtttagtttctcaattcatacaaaaccgcatccaggccattaccaatcattccatatgacaaatgctcctcttaacaaccccgcaattcttaccacaaaatcttccttcagcttaatctctcccactctaggttcccatgcctcccctaatcccactcgaagcagccctgagaaacatcacccattatctctccatagcaccccccaaaattttcaccaccccaacacttcaacactattttgttttatttttcttattaatataagaagacaggaatgtcaggcctctgagcccaagctaagccatcgtatctcctgtgacctgcacgtatacatccagatggcctgaaacaagtgaagaatcaaaagaagtgaa

SEQ ID NO: 301377 - DNA, 519 bp, Homo sapiens
atagagccccaaaactcaccaaccagacaagtaattatgctgaacccccttgagcactctctaatggatgtcctgggtcctcccaattcttagtcatttaatacctgtktttctccttcacttattcacaccttgtgtcttccgtttagtttctcaattcatacaaaaccgcatccaggccattaccaatcattccatatgacaaatgctcctcttaacaaccccgcaattcttaccacaaaatcttccttcagcttaatctctcccactctaggttcccatgcctcccctaatcccactcgaagcagccctgagaaacatcacccattatctctccatagcaccccccaaaattttcaccaccccaacacttcaacactattttgttttatttttcttattaatataagaagacaggaatgtcaggcctctgagcccaagctaagccatcgtatctcctgtgacctgcacgtatacatccagatggcctgaaacaagtgaagaatcaaaagaagtgaa

SEQ ID NO: 301378 - DNA, 519 bp, Homo sapiens
atagagccccaaaactcaccaaccagacaagtaattatgctgaacccccttgagcactctctaatggatgtcctgggtcctcccaattcttagtcatttaatacctgtgtttctccttcacttattcacaccttgtgtcttccgtttagtttctcaattcatacaaaacygcatccaggccattaccaatcattccatatgacaaatgctcctcttaacaaccccgcaattcttaccacaaaatcttccttcagcttaatctctcccactctaggttcccatgcctcccctaatcccactcgaagcagccctgagaaacatcacccattatctctccatagcaccccccaaaattttcaccaccccaacacttcaacactattttgttttatttttcttattaatataagaagacaggaatgtcaggcctctgagcccaagctaagccatcgtatctcctgtgacctgcacgtatacatccagatggcctgaaacaagtgaagaatcaaaagaagtgaa

SEQ ID NO: 301379 - DNA, 394 bp, Homo sapiens
ccaggctgccgtctttcccctgggctgggtactaggaagtatcacccctcctgcttctcaaataagctatgattacattagatggggccctgcttgctggacgcattttgtggattaggtttactgtgtgctgcttaccagcttgtctgagtgcaggagacagaatacactcatatgcaacaagttacacaaagcagatttgtgacttacaggtaggcagcwagggacaaaagaatgctaggatctatgatgagctggttcctgaagactcgagaaagctgtctagggcacattgagtctcagctgtgcattccccacttgcaccacagctgaggggctcttattattttttttttttttgaggtggagcttggttcttgttgcccaggctgga

SEQ ID NO: 301380 - DNA, 604 bp, Homo sapiens
actctgtgtccccacccaagtctcatcttgtagttcccataatttctacatgttgtgggagggacccagtgggaaatgattgaatcatgagagtgagtcttccccatgctgttctcatgatagtgaatgggtctcatgaaatctgatggctttaaaaatgggartttccccaaacgaggtctctatttggctgcagtcatccatgtaagatgtgacttgctcctcttcttgacttctgccatgagtttgaggcctccccagccatgtagaactacaaattgattaaacctctttcttttgtaaattgtccagtgtcaggtatgtctttatcagcagtgtaaaaaagcactaagaaactccccttgggctggggaaagaacaaaatgctggttgcttcactagcaccttcatcatgacacagctgccatatagcgtagagcccagtctctcttccttgtgagctcccaactcctatccttcactaagcagaactccttgcttgggcctgcagagtagctacctcacccaagctgaacatttctattgccagtggctctgtgttatcctgtgatggagctcccagaggcaaatgacagccaactgc

SEQ ID NO: 301381 - DNA, 599 bp, Homo sapiens
tcatccatgtaagatgtgacttgctcctcttcttgacttctgccatgagtttgaggcctccycagccatgtagaactacaaattgattaaacctctttcttttgtaaattgtccagtgtcaggtatgtctttatcagcagtgtaaaaaagcactaagaaactccccttgggctggggaaagaacaaaatgctggttgcttcactagcaccttcatcatgacacagctgccatatagcgtagagcccagtctctcttccttgtgagctcccaactcctatccttcactaagcagaactccttgcttgggcctgcagagtagctacctcacccaagctgaacatttctattgccagtggctctgtgttatcctgtgatggagctcccagaggcaaatgacagccaactgccactgccaatgcagtggtacctgcccttgctgtcttagactgggaaagaaataaaagagcctgaatgctttactcatgcttccagcacactatgattaccatatgatcaccatatggcatggagcccaatctctattctctgtgagcccctgatcccctgctcttcaccaggcaggggccccagcaaaggc

SEQ ID NO: 301382 - DNA, 587 bp, Homo sapiens
ttgtgggagggacccagtgggaaatgattgaatcatgagagtgagtcttccccatgctgttctcatgatagtgaatgggtctcatgaaatctgatggctttaaaaatgggagtttccccaaacgaggtctctatttggctgcagtcatccatgtaagatgtgacttgctcctcttcttgacttctgccatgagtttgaggcctccccagccatgtagaactacaaattgattaaacctctttcttttgtaaattgtccagtgtcaggtatgtctttatcagcagtgtaaaaaagcactaagaaactccccttgggctggggaaagaacaaaatsctggttgcttcactagcaccttcatcatgacacagctgccatatagcgtagagcccagtctctcttccttgtgagctcccaactcctatccttcactaagcagaactccttgcttgggcctgcagagtagctacctcacccaagctgaacatttctattgccagtggctctgtgttatcctgtgatggagctcccagaggcaaatgacagccaactgccactgccaatgcagtggtacctgcccttgctgtct

SEQ ID NO: 301383 - DNA, 491 bp, Homo sapiens
actgccactgccaatgcagtggtacctgcccttgctgtcttagactgggaaagaaataaaagagcctgaatgctttactcatgcttccagcacactatgattaccatatgatcaccatatggcatggagcccaatctctattctctgtgagcccctgatcccctgctcttcaccaggcaggggycccagcaaaggctcatagtgcagcagccccactcctggctgaaaatgcccagtggcagtggttctgcatttctctggggtggagatcccagaagcaactgaaagtttctctgcaaccgctattcagcagtactgcccttgctgccctccaactggggagggagcaagaccccaagtgctttactcacacctccagcacactgcagctaccctacagagaagagatgaatctatcttctcacaagccctgacaccctctgctcatcaccagtagtgtcccccagattggttccaaaatgcacaggccc

SEQ ID NO: 301384 - DNA, 491 bp, Homo sapiens
actgccactgccaatgcagtggtacctgcccttgctgtcttagactgggaaagaaataaaagagcctgaatgctttactcatgcttccagcacactatgattaccatatgatcaccatatggcatggagcccaatctctattctctgtgagcccctgatcccctgctcttcaccaggcaggggccccagcaaaggctcatagtgcagcagccccactccwggctgaaaatgcccagtggcagtggttctgcatttctctggggtggagatcccagaagcaactgaaagtttctctgcaaccgctattcagcagtactgcccttgctgccctccaactggggagggagcaagaccccaagtgctttactcacacctccagcacactgcagctaccctacagagaagagatgaatctatcttctcacaagccctgacaccctctgctcatcaccagtagtgtcccccagattggttccaaaatgcacaggccc

SEQ ID NO: 301385 - DNA, 477 bp, Homo sapiens
tctgtgagcccctgatcccctgctcttcaccaggcaggggccccagcaaaggctcatagtgcagcagccccactcctggctgaaaatgcccagtggcagtggttctgcatttctctggggtggagatcccagaagcaactgaaagtttytctgcaaccgctattcagcagtactgcccttgctgccctccaactggggagggagcaagaccccaagtgctttactcacacctccagcacactgcagctaccctacagagaagagatgaatctatcttctcacaagccctgacaccctctgctcatcaccagtagtgtcccccagattggttccaaaatgcacaggccccatcaaaggttgaccactccatttggcagcatctctgcatttctgtatggtggagctgcaaaagacaagtgatagacctccagacattaccactgccaaggtcctcacctcttttgtccccaagcttgt

SEQ ID NO: 301386 - DNA, 491 bp, Homo sapiens
actgccactgccaatgcagtggtacctgcccttgctgtcttagactgggaaagaaataaaagagcctgaatgctttactcatgcttccagcacactatgattaccatatgatcaccatatggcatggagcccaatctctattctctgtgagcccctgatcccctgctcttcaccaggcaggggccccagcaaaggctcatagtgcagcagccccactcctggctgaaaatgcccagtggcagtggttctgcatttctctggggtggagatcccagaagcaactgaaagtttctctgcaaccgctattcagcagtactgcccttgctgccctccaactggggagggarcaagaccccaagtgctttactcacacctccagcacactgcagctaccctacagagaagagatgaatctatcttctcacaagccctgacaccctctgctcatcaccagtagtgtcccccagattggttccaaaatgcacaggccc

SEQ ID NO: 301387 - DNA, 477 bp, Homo sapiens
tctgtgagcccctgatcccctgctcttcaccaggcaggggccccagcaaaggctcatagtgcagcagccccactcctggctgaaaatgcccagtggcagtggttctgcatttctctggggtggagatcccagaagcaactgaaagtttctctgcaaccgctattcagcagtactgcccttgctgccctccaactggggagggagcaagaccccaagtgctttactcacacctccagcacactgcagctaccctacagagaagagatgaatctatcttctcacaagccctgacaccctctgctcatcaccagtagtgtcccccagmttggttccaaaatgcacaggccccatcaaaggttgaccactccatttggcagcatctctgcatttctgtatggtggagctgcaaaagacaagtgatagacctccagacattaccactgccaaggtcctcacctcttttgtccccaagcttgt

SEQ ID NO: 301388 - DNA, 477 bp, Homo sapiens
tctgtgagcccctgatcccctgctcttcaccaggcaggggccccagcaaaggctcatagtgcagcagccccactcctggctgaaaatgcccagtggcagtggttctgcatttctctggggtggagatcccagaagcaactgaaagtttctctgcaaccgctattcagcagtactgcccttgctgccctccaactggggagggagcaagaccccaagtgctttactcacacctccagcacactgcagctaccctacagagaagagatgaatctatcttctcacaagccctgacaccctctgctcatcaccagtagtgtcccccagattggttccaaaatgcacaggccccatcaaaggttgaccactccatttggcagcatctctgcatttctgtatggtggagctgcaaaagacaagtgatagacctccasacattaccactgccaaggtcctcacctcttttgtccccaagcttgt

SEQ ID NO: 301389 - DNA, 528 bp, Homo sapiens
ggccccatcaaaggttgaccactccatttggcagcatctctgcatttctgtatggtggagctgcaaaagacaagtgatagacctccagacattaccactgccaaggtcctcacctcttttgtccccaagcttgtgaggaaacaaaaaccttgagctcaccacagggctgtgatgtgcagcactgcagtgamaagccaagctatgcagccagcatttcagtaggagggaagcctacacacacagaatactgacacggagcatggctgcaaatgtgagaaaatacacatttgtgtatgaacaagagcctacctatcagccattataggtaggtaggctgaacaagagcctacctatcagccattatacctaagtgtcatcagccagcttgcagcagaaacttcaacactaaaattactttgctaatataagcctctgtgaaacccaggacaataattcagctactaataaagatcgtgcaaaaaggtgctttgaaaacatccagaaacaaagtcaactgactatgctcaa

SEQ ID NO: 301390 - DNA, 625 bp, Homo sapiens
ttggttccaaaatgcacaggccccatcaaaggttgaccactccatttggcagcatctctgcatttctgtatggtggagctgcaaaagacaagtgatagacctccagacattaccactgccaaggtcctcacctcttttgtccccaagcttgtgaggaaacaaaaaccttgagctcaccacagggctgtgatgtgcagcactgcagtgacaagccaagctatgcagccagcatttcagtaggagggaagcctacacacacagaatactgacacggagcatggctgcaaatgtgagaaaatacacatttgtgtatgaacaagagcctacctatcagccattataggtaggtaggctgaacaagagcctacctatcagccattatacctaagtgtcatcagccagcttgcagcagaaacttcaacactaaaattactttgctaatataagcctctgtgaaacccaggacaataattcagctactaataaagatcrtgcaaaaaggtgctttgaaaacatccagaaacaaagtcaactgactatgctcaaattataccacagttaaagaaacaccagcccacacaggtgagaaaaaagccaacataagaactctagcaactcaaaaagt

SEQ ID NO: 301391 - DNA, 616 bp, Homo sapiens
ggtaggctgaacaagagcctacctatcagccattatacctaagtgtcatcagccagcttgcagcagaaacttcaacactaaaattactttgctaatataagcctctgtgaaacccaggacaataattcagctactaataaagatcgtgcaaaaaggtgctttgaaaacatccagaaacaaagtcaactgactatgctcaaattataccacagttaaagaaacaccagcccacacaggtgagaaaaaagccaacataagaactctagcaactcaaaaagtcagactgtcactttacctccaaatgactgcactagttctacagcaatrgttgttaaatagaaggaaatggctgaaatgacagatatagaactgagaggtagaagaaaatgaagatcattgaaattcaatagaaagttgaacactatttccaagaatctgaggaatccagtaaaatgattaaagagaaaaaaattagccatttgaaaaaacaaaacaagacaaacaaacaaaaaccaaacctagcaggtagagttacaaaatacactacaagaatttcataaaatgattggaaatattcacagcagaatggactaagccaagaaaagaatctcagaga

SEQ ID NO: 301392 - DNA, 616 bp, Homo sapiens
ggtaggctgaacaagagcctacctatcagccattatacctaagtgtcatcagccagcttgcagcagaaacttcaacactaaaattactttgctaatataagcctctgtgaaacccaggacaataattcagctactaataaagatcgtgcaaaaaggtgctttgaaaacatccagaaacaaagtcaactgactatgctcaaattataccacagttaaagaaacaccagcccacacaggtgagaaaaaagccaacataagaactctagcaactcaaaaagtcagactgtcactttacctccaaatgactgcactagttctacagcaatggttgttaaatagaaggaaatggctgaaatgacagatatagaactgagaggtagaagaaaatgaagatcattgaaattcaatagaaagttgaacactatttccaagaatctgaggaatccaktaaaatgattaaagagaaaaaaattagccatttgaaaaaacaaaacaagacaaacaaacaaaaaccaaacctagcaggtagagttacaaaatacactacaagaatttcataaaatgattggaaatattcacagcagaatggactaagccaagaaaagaatctcagaga

SEQ ID NO: 301393 - DNA, 490 bp, Homo sapiens
ataaagaaaagaagaattttaaaaaatgaaaggtcaggcatggtggctcatgcctgtacctgtaatcccagcactttgggaggatactgagaccatcctggctaacatggtgaaaccctgtctctactaaaaatacaaaaaaaaaaaattcactgggcatggtggcaggtgcctgtagccccagctattcaggagtctgaggcaggagattggtaggaacctgggaggtggagyttgcattgagccgagatcatgccactgcactccagcctgggctacagagcaagactccatctcaaaaaaaaaaaaaaaagaaaaaaaaaagaaaaagaaaaaaaccttggagaaataagggattctataaaaaatttccccaatttcactagagagattgacatataaatttagaaaattcagataacccatgtaagatgctatgtaagacaaccattgcagagacacaaagtaatcagattcttgaaggtcaatg

SEQ ID NO: 301394 - DNA, 563 bp, Homo sapiens
catggtggctcatgcctgtacctgtaatcccagcactttgggaggatactgagaccatcctggctaacatggtgaaaccctgtctctactaaaaatacaaaaaaaaaaaattcactgggcatggtggcaggtgcctgtagccccagctattcaggagtctgaggcaggagattggtaggaacctgggaggtggagcttgcattgagccgagatcatgccactgcactccagcctgggctacagagcaagactccatctcaaaaaaaaaaaaaaaagaaaaaaaaaagaaaaagaaaaaaaccttggagaaataagrgattctataaaaaatttccccaatttcactagagagattgacatataaatttagaaaattcagataacccatgtaagatgctatgtaagacaaccattgcagagacacaaagtaatcagattcttgaaggtcaatgcaaaagaaaaaaatattaaaggcagttaacgacaaggggcaggtcacataaagtggaaactacatcaaattcacaggggaactctcagcaatatcccacagtcagaagaca

SEQ ID NO: 301395 - DNA, 563 bp, Homo sapiens
catggtggctcatgcctgtacctgtaatcccagcactttgggaggatactgagaccatcctggctaacatggtgaaaccctgtctctactaaaaatacaaaaaaaaaaaattcactgggcatggtggcaggtgcctgtagccccagctattcaggagtctgaggcaggagattggtaggaacctgggaggtggagcttgcattgagccgagatcatgccactgcactccagcctgggctacagagcaagactccatctcaaaaaaaaaaaaaaaagaaaaaaaaaagaaaaagaaaaaaaccttggagaaataagggattctataaaaaatttccccaatttcactagagagattgacatataaatttagaaaattcagataaccyatgtaagatgctatgtaagacaaccattgcagagacacaaagtaatcagattcttgaaggtcaatgcaaaagaaaaaaatattaaaggcagttaacgacaaggggcaggtcacataaagtggaaactacatcaaattcacaggggaactctcagcaatatcccacagtcagaagaca

SEQ ID NO: 301396 - DNA, 564 bp, Homo sapiens
atcccagcactttgggaggatactgagaccatcctggctaacatggtgaaaccctgtctctactaaaaatacaaaaaaaaaaaattcactgggcatggtggcaggtgcctgtagccccagctattcaggagtctgaggcaggagattggtaggaacctgggaggtggagcttgcattgagccgagatcatgccactgcactccagcctgggctacagagcaagactccatctcaaaaaaaaaaaaaaaagaaaaaaaaaagaaaaagaaaaaaaccttggagaaataagggattctataaaaaatttccccaatttcactagagagattgacatataaatttagaaaattcagataacccatgtaagatgctatgtaagacaaccattgcagagacacaaagtaatcagattcttgaaggtcaatgcaaaagaaaaaaatattaaaggcagttaacracaaggggcaggtcacataaagtggaaactacatcaaattcacaggggaactctcagcaatatcccacagtcagaagacattaagaatccatattcagcatttttga

SEQ ID NO: 301397 - DNA, 563 bp, Homo sapiens
catggtggctcatgcctgtacctgtaatcccagcactttgggaggatactgagaccatcctggctaacatggtgaaaccctgtctctactaaaaatacaaaaaaaaaaaattcactgggcatggtggcaggtgcctgtagccccagctattcaggagtctgaggcaggagattggtaggaacctgggaggtggagcttgcattgagccgagatcatgccactgcactccagcctgggctacagagcaagactccatctcaaaaaaaaaaaaaaaagaaaaaaaaaagaaaaagaaaaaaaccttggagaaataagggattctataaaaaatttccccaatttcactagagagattgacatataaatttagaaaattcagataacccatgtaagatgctatgtaagacaaccattgcagagacacaaagtaatcagattcttgaaggtcaatgcaaaagaaaaaaatattaaaggcagttaacgacaaggggcaggtcacataaagtggaaactacatcaaaytcacaggggaactctcagcaatatcccacagtcagaagaca

SEQ ID NO: 301398 - DNA, 522 bp, Homo sapiens
aggaagaaaacgaaactttgaacagactaataggaagttccaaactgaattggcaatacaatgcctatcaatcagaaaaagtgttgacctcaaaggattcactgccaaattctaccagctgtataaagaagagctgataccacacctactgacactatctaaaataattgaggaggagggactcatacctaactcattctatgaggacaacatcattstgataccaaatcctggcagagatgcaatgaaaaaaaaaacttcagacaaatatttctaatgaacatagatacagaaatattcaacaaaatactagcaaaccaaatctagctgtacatcaagaagctaatccaccacaatcaagtaggttttatttcttgcaaaatattttcagaatggtacttccaaggttttcttctagagattttatagtttgaggttttacatttatgtctttaatccatcctgggttgatttttgtgtatggtgaaaggtaggggtccagttcaaatcttctgtgtatgg

SEQ ID NO: 301399 - DNA, 546 bp, Homo sapiens
ggaagaaaacgaaactttgaacagactaataggaagttccaaactgaattggcaatacaatgcctatcaatcagaaaaagtgttgacctcaaaggattcactgccaaattctaccagctgtataaagaagagctgataccacacctactgacactatctaaaataattgaggaggagggactcatacctaactcattctatgaggacaacatcattctgataccaaatcctggcagagatgcaatgaaaaaaaaaacttcagacmaatatttctaatgaacatagatacagaaatattcaacaaaatactagcaaaccaaatctagctgtacatcaagaagctaatccaccacaatcaagtaggttttatttcttgcaaaatattttcagaatggtacttccaaggttttcttctagagattttatagtttgaggttttacatttatgtctttaatccatcctgggttgatttttgtgtatggtgaaaggtaggggtccagttcaaatcttctgtgtatggtcagcaggttatcctggcaccattt

SEQ ID NO: 301400 - DNA, 553 bp, Homo sapiens
aatccaccacaatcaagtaggttttatttcttgcaaaatattttcagaatggtacttccaaggttttcttctagagattttatagtttgaggttttacatttatgtctttaatccatcctgggttgatttttgtgtatggtgaaaggtaggggtccagttcaaatcttctgtgtatggtsagcaggttatcctggcaccatttgttgaataagatgtcctttccacattgtttgtctttgtcagctttgttaaaaatcagatgattgtttatgtatgtctttatttctgtgctctcaaaactgttccattacactatgtgtctgttttagttactgtagccttgtagtatagtttgaagccagggagtgtgatgcccccagctttgttctttttgcttagaattactttggctattcaggcacttttttggttccaaattaattctaagaattttttttctagttcagtgaaaaacgttgttggtagtatgataggaatagcattgaatctgtaacttgggttgggcagaatgagcattttaataatactgca

SEQ ID NO: 301401 - DNA, 601 bp, Homo sapiens
tggatgtgagacatggagtcaaaggacatcattttgaaactttaaggtttaatgactgctctgttggatttcagacttgcatggggcctatagctcctttgttttggtcaatttctccyatctccaatgggtgtatttacccagtacctgcactcccattgtatctaggaaataactaacttgcttttgatgttacaggctcataggtggaagggacttgccttttctcagatgagattttgaacttgaacttttggggttaatgctgaaatgagttaagactttaggggattcttggaaaggcataattgtgttttgaaatgtgaggacatgagatttgcgaggggccatggacagaataatatagtttggctttgtgtccctacccaaaatctcatcttgaattgtaatgcaaattgtaatccccacatgttgggggaaggacatcgtgggaggtgattagacatggggatcatactgttctcatgataatgagtgagttcttatgagagctgaaggttttataggggctttcccccactttactttgcacttctctctcctgcagccatatcaacaaggacatgtttgctgccccttc

SEQ ID NO: 301402 - DNA, 601 bp, Homo sapiens
tggatgtgagacatggagtcaaaggacatcattttgaaactttaaggtttaatgactgctctgttggatttcagacttgcatggggcctatagctcctttgttttggtcaatttctcccatctccaatgggtgtatttacccagtacctgcactcccattgtatctaggaaataactaacttgcttttgatgttacaggctcataggtggaagggacttgccttttctcagatgagattttgaacttgaacttttggggttaatgctgaaatgagttaagactttrggggattcttggaaaggcataattgtgttttgaaatgtgaggacatgagatttgcgaggggccatggacagaataatatagtttggctttgtgtccctacccaaaatctcatcttgaattgtaatgcaaattgtaatccccacatgttgggggaaggacatcgtgggaggtgattagacatggggatcatactgttctcatgataatgagtgagttcttatgagagctgaaggttttataggggctttcccccactttactttgcacttctctctcctgcagccatatcaacaaggacatgtttgctgccccttc

SEQ ID NO: 301403 - DNA, 516 bp, Homo sapiens
acacacacatcagtggggcccatgcagttgcagtgaggactctgcatatgtgcacactggcgaaacagtgagtggagactgtgcacagtgcawgccggcaatgcagtgaggggggactgtaagtaggtgtgcactgttggaggtatatttgcagaagctctccagtgagagcagagtcgagtctgctgctatggtgatggccactgagaagcaccctcgttgggcatgcaaagctgccctccaagagggtatggcctggcggggaccccaggagaggccagtcgacaggagagcatctaatcacattggcatatcccacgggcaagacagcccttctctgtgcaggtctgacaatcaataatgaccaaagtcactcagaggcgtgtggtaagccttaggaaatgggtgtccctggctgtgcttcaccggaaccattcttatgtcaaactatctgggctctacacgtactggaatcctgtctttgctacttctccaagcaactctccttgctagctc

SEQ ID NO: 301404 - DNA, 516 bp, Homo sapiens
acacacacatcagtggggcccatgcagttgcagtgaggactctgcatatgtgcacactggcgaaacagtgagtggagactgtgcacagtgcaagccggcaatgcagtgaggggggactgtaagtaggtgtgcactgttggaggtatatttgcrgaagctctccagtgagagcagagtcgagtctgctgctatggtgatggccactgagaagcaccctcgttgggcatgcaaagctgccctccaagagggtatggcctggcggggaccccaggagaggccagtcgacaggagagcatctaatcacattggcatatcccacgggcaagacagcccttctctgtgcaggtctgacaatcaataatgaccaaagtcactcagaggcgtgtggtaagccttaggaaatgggtgtccctggctgtgcttcaccggaaccattcttatgtcaaactatctgggctctacacgtactggaatcctgtctttgctacttctccaagcaactctccttgctagctc

SEQ ID NO: 301405 - DNA, 411 bp, Homo sapiens
ttggcatatcccacgggcaagacagcccttctctgtgcaggtctgacaatcaataatgaccaaagtcactcagaggcgtgtggtaagccttaggaaatgggtgtccctggctgtgcttcaccggaaccattcttatgtcaaactwtctgggctctacacgtactggaatcctgtctttgctacttctccaagcaactctccttgctagctcgaatgtccatggggattgtgaagtctcgtaaagctaggattctggagctctttggaaagagtaagccactccatcgtatttaactcacccctcccctcacctctcagggtcaggaatgagtccttgtgctccacaatcccatgctgggttcccagctttctgatcctttagcccagtgtctccatcctctctccttccac

SEQ ID NO: 301406 - DNA, 516 bp, Homo sapiens
ctgatcctttagcccagtgtctccatcctctctccttccactctcaatgctttccttttgaagatctgctcagagtgtgctggttttcttgagagtcagctctttcagtggaggatcttcctggctctgtcttgmtggccattttggctcttctgtcttttagggtttccttggtgagtatcaggtgttcataaattaaggatttatatgttgggtttaaaaatcaagattgtaaatcaagatatctttagtgtgatgaaaggaagtaaattataaaatgtatttaggttactatgttgctcttaataagtagtccagctgccacattttaaagtgtcttttttttttcccctatggttgttttaaggatttctttttctctgtctctctctgtctttccggctcttgttttctctctttctctcacatcagatttattgttaagtgttaattcagtggttattttttccttgaaatttactgtgtttcttgaatggacacatgtatctttcatca

SEQ ID NO: 301407 - DNA, 516 bp, Homo sapiens
ctgatcctttagcccagtgtctccatcctctctccttccactctcaatgctttccttttgaagatctgctcagagtgtgctggttttcttgagagtcagctctttcagtggaggatcttcctggctctgtcttgctggccattttggctcttctgtcttttagggtttccttggtgagtatcaggtgttcataaattaaggatttatatrttgggtttaaaaatcaagattgtaaatcaagatatctttagtgtgatgaaaggaagtaaattataaaatgtatttaggttactatgttgctcttaataagtagtccagctgccacattttaaagtgtcttttttttttcccctatggttgttttaaggatttctttttctctgtctctctctgtctttccggctcttgttttctctctttctctcacatcagatttattgttaagtgttaattcagtggttattttttccttgaaatttactgtgtttcttgaatggacacatgtatctttcatca

SEQ ID NO: 301408 - DNA, 516 bp, Homo sapiens
ctgatcctttagcccagtgtctccatcctctctccttccactctcaatgctttccttttgaagatctgctcagagtgtgctggttttcttgagagtcagctctttcagtggaggatcttcctggctctgtcttgctggccattttggctcttctgtcttttagggtttccttggtgagtatcaggtgttcataaattaaggatttatatgttgggtttaaaaatcaagattgtaaatcaagatatctttagtgtgatgaaaggaagtaaattataaaaygtatttaggttactatgttgctcttaataagtagtccagctgccacattttaaagtgtcttttttttttcccctatggttgttttaaggatttctttttctctgtctctctctgtctttccggctcttgttttctctctttctctcacatcagatttattgttaagtgttaattcagtggttattttttccttgaaatttactgtgtttcttgaatggacacatgtatctttcatca

SEQ ID NO: 301409 - DNA, 376 bp, Homo sapiens
attaagtattcacatatttatctgctccatttattttattctagctctctrtttaaatatatcacctcacacaactcattatttgtgataaccactcttctacatttccattttttcatctcactgtattgaaatgtgctcatttgcttttctgatttagcttccagtgatctagttcttttgctgtgtccaaaatattatcatactcatgctcctaatgtttaattttagtcataatatcatttatctttaaaatttgttattagtttcatgttaaaactgaaagattacattgtatttttttcatttggcagatattttcaaatttacttcttagaacataatacaaatacatgtttttcaatgtgtctgtaat

SEQ ID NO: 301410 - DNA, 376 bp, Homo sapiens
attaagtattcacatatttatctgctccatttattttattctagctctctatttaaatatatcacctcacacaactcattatttgtgataaccactcttctacatttccattttttcatctcactgtattgaaatgtgctcatttgcttttctgatttagcttccagtgatctagttcttttgctgtgtccaaaatattrtcatactcatgctcctaatgtttaattttagtcataatatcatttatctttaaaatttgttattagtttcatgttaaaactgaaagattacattgtatttttttcatttggcagatattttcaaatttacttcttagaacataatacaaatacatgtttttcaatgtgtctgtaat

SEQ ID NO: 301411 - DNA, 592 bp, Homo sapiens
tctctctttctctcacatcagatttattgttaagtgttaattcagtggttattttttccttgaaatttactgtgtttcttgaatggacacatgtatctttcatcattttggaaagtttaaaccattaagtattcacatatttatctgctccatttattttattctagctctctatttaaatatatcacctcacacaactcattatttgtgataaccactcttctacatttccattttttcatctcactgtattgaaatgtgctcatttgcttttctgatttagcttccagtgatctagttcttttgctgtgtccaaaatattatcatactcatgctcctaatgtttaattttagtsataatatcatttatctttaaaatttgttattagtttcatgttaaaactgaaagattacattgtatttttttcatttggcagatattttcaaatttacttcttagaacataatacaaatacatgtttttcaatgtgtctgtaataataccagaacagcaatttttgtgacttttttctgttatttttcctgctacttattgcaaaatgtgtcctgtttccttgcattctttattagc

SEQ ID NO: 301412 - DNA, 612 bp, Homo sapiens
tccttacatacttaccattttcttcctttaagaagattttataaaatatttatatatctattaatattatttgcctttacctgacagaagtagatatgcatcattttttgatgcaagtggagacttaataattgagaaaaataatataatctataagcctktagtaaagattaaaccaaaaaatcaagagtttgatcacctctgtagataaaggaaataaattgataaagttcaaaatttgtgctacatttgaaggaagtaatttgaaatcatttatcttataaaggctttagaatccaagaattaaaaatactcacttttttccattttaggtattcacatcaaaaatctattacctaacatataaaactatcaagtatgttgattatgtttttagtatagtggtattgtttatcctgatttaatcttgaagattaaaaataaaaataatgttaacttcagttaactgttcaggcaaattattttcttttttgataaaatgtatttgtgttgctacacacagacatggagctgcagattttctcattcaagttattaaaatgtcaaccacctttgtaatgttagtagtcactgccaaatcaattttcatta

SEQ ID NO: 301413 - DNA, 574 bp, Homo sapiens
attttttgatgcaagtggagacttaataattgagaaaaataatataatctataagcctgtagtaaagattaaaccaaaaaatcaagagtttgatcacctctgtagataaaggaaataaattgataaagttcaaaatttgtgctacatttgaaggaagtaatttgaaatcatttatcttataaaggctttagaatccaagaattaaaaatactcacttttttccattttaggtattcacatcaaaaatctattacctaacatataaaactatcaagtatgttgattatgtttttagtatagtggtattgtttatcctgatttaatcttgaagattaaaaataaaaataatgttaacttcagttaactgttcaggcaaattattttcttttttgataaaatgtatttgtgttgctacacacagacatggagctgcagattttctcattcaagttattaaaatgtcaaccacctttgtaatgytagtagtcactgccaaatcaattttcattatatcgggaggaaaatacaaatcttcttaaaaactgatttaactgaaactgtatgtacattgtat

SEQ ID NO: 301414 - DNA, 574 bp, Homo sapiens
attttttgatgcaagtggagacttaataattgagaaaaataatataatctataagcctgtagtaaagattaaaccaaaaaatcaagagtttgatcacctctgtagataaaggaaataaattgataaagttcaaaatttgtgctacatttgaaggaagtaatttgaaatcatttatcttataaaggctttagaatccaagaattaaaaatactcacttttttccattttaggtattcacatcaaaaatctattacctaacatataaaactatcaagtatgttgattatgtttttagtatagtggtattgtttatcctgatttaatcttgaagattaaaaataaaaataatgttaacttcagttaactgttcaggcaaattattttcttttttgataaaatgtatttgtgttgctacacacagacatggagctgcagattttctcattcaagttattaaaatgtcaaccacctttgtaatgttagtagtcactgccaaatcaattttcattatatcgggaggaaaatacaaatcttcttaaaaactgatwtaactgaaactgtatgtacattgtat

SEQ ID NO: 301415 - DNA, 596 bp, Homo sapiens
taatggaaaaaaaatgtacatatcactataaattgttctctctgctaacatataatattttaaattttgaaaatagaaagttaatgttawtaatcattttattaaataaagaaaagatagatcaaccctaattataataattacttcatgatatgtttggataaacatgtttattaaaacagaattctatatttgaaagatactatacaacattttatttacatattttaattgaagtctactgaaaatacaccagaaaacctaacagatacacttaacataagggaaacattatcctacactgcttcactttttcaaagatgttattcctcctagttaatgacttactctaaaaagagtattagaagtagctgaaaagaaaggctatgtttaaatatgtgaagagggcaagtttgaacatttaatatttattgcccacctcttagctttgttatgctctcaagtgactcttaagagaatttcacacttcgacaatattcagagaataagagacatgacattgttaaataccatcaacatgcctgctgctccgttttgaaatgttcctgaattcaaaataccctaaaataattcag

SEQ ID NO: 301416 - DNA, 596 bp, Homo sapiens
taatggaaaaaaaatgtacatatcactataaattgttctctctgctaacatataatattttaaattttgaaaatagaaagttaatgttaataatcattttattaaataaagaaaagatagatcaaccctaattataataattacttcatgatatgtttggataaacatgtttattaaaacagaattctatatttgaaagatactatacaacattttatttacatattttaattgaagtctactgaaaatacaccagaaaacctaacagatacacttaacataagggaaacattatcctacactgcttcactttttcaaagatgttattcctcctagttaatgacttactctaaaaagagtattagaagtagctgaaaagaaaggctatgtttaaatatgtgaagagggcaagtttgaacatttaatatttattgcccacctcttagctttgttatgctctcaagtgactcttaagagaatttcacacttcgacaatattcagagaatawgagacatgacattgttaaataccatcaacatgcctgctgctccgttttgaaatgttcctgaattcaaaataccctaaaataattcag

SEQ ID NO: 301417 - DNA, 523 bp, Homo sapiens
atgtaaaatgttttaaaaacttctgaaaactctttggaaatgtcttattttctcataatgttaagcatacacctatactatgacaaagaaytccattataaggtgtttacaggccctcgatcagaaaaaacataaccaaaacataagttgtataaacatgtatatggaaactttatttaagatagtcaaaaatttgaaaaattctaaatgtctatcaaagaaaagcggataaacattgtgtgacataatcacacaagagagattacctttcaccaattaacaattaatgagcttttgatacgcacaatgacacaattaatctcaaacacatgttgaaccaaaagatgccaggcagaaattagtgcacactgttttaattccaaaaacagatataactacggtgcagatatgagaaaagtgattgcttcattaatgagaggtattaactagaaagagatattaggaaaatttattgggtcatatttgtgcacttgaatgaaagcagaatttatttttgtaaaaa

SEQ ID NO: 301418 - DNA, 523 bp, Homo sapiens
atgtaaaatgttttaaaaacttctgaaaactctttggaaatgtcttattttctcataatgttaagcatacacctatactatgacaaagaactccattataaggtgtttacaggccctcgatcagaaaaaacataaccaaaacataagttgtataaacatgtatatggaaactttatttaagatagtcaaaaatttgaaaaattctaaatgtctatcaaagaaaagcggataaacattgtgtgacataatcacacaagagagattacctttcaccaattaacaattaatgagcttttgatacgcacaatgacacaattaatctcaaacacatgttgaaccaaaagatgccaggcagaaattagtgcacactgttttaattccaaaaacagatayaactacggtgcagatatgagaaaagtgattgcttcattaatgagaggtattaactagaaagagatattaggaaaatttattgggtcatatttgtgcacttgaatgaaagcagaatttatttttgtaaaaa

SEQ ID NO: 301419 - DNA, 563 bp, Homo sapiens
ctaaatgtctatcaaagaaaagcggataaacattgtgtgacataatcacacaagagagattacctttcaccaattaacaattaatgagcttttgatacgcacaatgacacaattaatctcaaacacatgttgaaccaaaagatgccaggcagaaattagtgcacactgttttaattccaaaaacagatataactacggtgcagatatgagaaaagtgattgcttcattaatgagaggtattaactagaaagagatattaggaaaatttattgggtcatatttgtgcacttgaatgaaagcagaatttatttttgtaaaaatatagatgtcagcagatattcaactactatacatgtactgtcacttgtaacctaccaaagaaaaatatgtttaaaaatacttttacaaaatgacaatttaaattaaataaattttcaactatttgaaaaccaatttggctgttttytataaaattaattattcatccacccaacttccctataatcaagtcactcctaagcacttattcaaaaggagtaaaaactcttctccacagaaagact

SEQ ID NO: 301420 - DNA, 617 bp, Homo sapiens
aactatcatatttagccatgtggtcagtaatataatgtaaattatatgtagatatatatttttaaagttgaggacamctaaataaaacatgtaaattattttaattacttgacaatctattatatacaaagtatttaagtatattttaaacatattcaatttaactaattttttgagtgatttgggcaaaattctgttttagttcatttatagacatgcttatatttgagttactgaaaatacaaacatttaagtagtctactcttagcatattaatatgtcctgtattcattacaacattaattgcattaaattcaactactatgaataaataatctatcacatatacattttaaagatagaagcatttcagttttatacaaggatgtctttttgagctgacacaggtttccaagatttgagacaatatcagaagatttattaaaattgatatgagacagcaactgcccacatctccccacatcactttgctggcatatatctgcatgggtgggctttacttgcttcaacagcacatgggaatgcagtgtgaccccccataagccccaccaaccaccactgcagatggatccttgttgggcacagagtcatcaagc

SEQ ID NO: 301421 - DNA, 617 bp, Homo sapiens
aactatcatatttagccatgtggtcagtaatataatgtaaattatatgtagatatatatttttaaagttgaggacacctaaataaaacatgtaaattattttaattacttgacaatctattatatacaaagtatttaagtatattttaaacatattcaatttaactaattttttgagtgatttgggcaaaattctgttttagttcatttatagacatgcttatatttgagttactgaaaatacaaacatttaagtagtctactcttagcatattaatatgtcctgtattcattacaacattaattgcattaaattcaactactatgaataaataatctatcacatatacattttaaagrtagaagcatttcagttttatacaaggatgtctttttgagctgacacaggtttccaagatttgagacaatatcagaagatttattaaaattgatatgagacagcaactgcccacatctccccacatcactttgctggcatatatctgcatgggtgggctttacttgcttcaacagcacatgggaatgcagtgtgaccccccataagccccaccaaccaccactgcagatggatccttgttgggcacagagtcatcaagc

SEQ ID NO: 301422 - DNA, 574 bp, Homo sapiens
taaaacatgtaaattattttaattacttgacaatctattatatacaaagtatttaagtatattttaaacatattcaatttaactaattttttgagtgatttgggcaaaattctgttttagttcatttatagacatgcttatatttgagttactgaaaatacaaacatttaagtagtctactcttagcatattaatatgtcctgtattcattacaacattaattgcattaaattcaactactatgaataaataatctatcacatatacattttaaagatagaagcatttcagttttatacaaggawgtctttttgagctgacacaggtttccaagatttgagacaatatcagaagatttattaaaattgatatgagacagcaactgcccacatctccccacatcactttgctggcatatatctgcatgggtgggctttacttgcttcaacagcacatgggaatgcagtgtgaccccccataagccccaccaaccaccactgcagatggatccttgttgggcacagagtcatcaagccccatctacaccagtgccctgcccttgtgctgtgctgca

SEQ ID NO: 301423 - DNA, 603 bp, Homo sapiens
ctttgctggcatatatctgcatgggtgggctttacttgcttcaacagcacatgggaatgcagtgtgaccccccataagccccaccaaccaccactgcagatggatccttgttgggcacagagtcatcaagccccatctacaccagtgccctgcccttgtgctgtgctgcacacagagcaggggwtccccccacaacctgagcaattgctcctgcttgcagaccacagataaggctccaagacctccactggccagcaccccaccccaagccatcaccacctacagtgcagcagtgcactctgtctccagcagaaggcccttgctcccccaacagctgccttgcctccaatactgtggtgaacacctgcagagaggcagacacccctatatccactaatactttgctgcaggtactgcagtttgctatccccagcacagtggactccaaatctcgaggagccacagtgtaagagatcgatcaggttgttgtgggaatcaggagactggagagattggtaggtgaaacagaaggatatttattgagtgcactcagaaccagcagattaatatccaaagactggaccctgaacaaagacagcactt

SEQ ID NO: 301424 - DNA, 602 bp, Homo sapiens
ctgggtctgggctttgcctgttactgcctttgggatgattcagcctaatacagaaagatcgtttctttctctttttaattttacttttctttctttaatttccagcctcaagggtgatgggagaagatgtaagaaaaattatagggaaagatgcaaacctttttggaaggccaaaaactttggagaataatttagctgaaggcagctaaattctcttaagggcaaaggttagataacaagggaatgtaaagaaacatatctagaaaaattggtttacttatgtctcaggaaaccaacctytgatcattcatgtgcaagactgctctctactcaggggtcaacaatgttaatttcccacaaattatgtttgctccaggcatttgtcttcaaatctgtactaaattaatacaaagttttctggcttagtgggactgtactctcattggcgatgctaagcagtgcagtcccctagctgcattctcaggcaaaataactgtgtctgaatacttttttcatgtgtcgctcagccagagtgtgcaggatggacccaacacaagagaacaaagctggggcctaatacaagtcccccagagttagagcac

SEQ ID NO: 301425 - DNA, 602 bp, Homo sapiens
ctgggtctgggctttgcctgttactgcctttgggatgattcagcctaatacagaaagatcgtttctttctctttttaattttacttttctttctttaatttccagcctcaagggtgatgggagaagatgtaagaaaaattatagggaaagatgcaaacctttttggaaggccaaaaactttggagaataatttagctgaaggcagctaaattctcttaagggcaaaggttagataacaagggaatgtaaagaaacatatctagaaaaattggtttacttatgtctcaggaaaccaacctttgatcattcatgtgcaagactgctctctactcaggggtcaacaatgttaatttcccacaaattatgtttgctccaggcmtttgtcttcaaatctgtactaaattaatacaaagttttctggcttagtgggactgtactctcattggcgatgctaagcagtgcagtcccctagctgcattctcaggcaaaataactgtgtctgaatacttttttcatgtgtcgctcagccagagtgtgcaggatggacccaacacaagagaacaaagctggggcctaatacaagtcccccagagttagagcac

SEQ ID NO: 301426 - DNA, 551 bp, Homo sapiens
gtgtcgctcagccagagtgtgcaggatggacccaacacaagagaacaaagctggggcctaatacaagtcccccagagttagagcacacagtccagaagttgggagctgagtgttgtgccataaaatctcccagaaatgaagccagtcagctgaatctaccttataacacaaacaaatcttcgacatcatcaaataggatgaaagaaaacaaaataccgtccaaaggtaagcaatctcaaagactgaagttagataagtgcacaaagatgagaaagaatcagtgcaagaatactgaaaactcaaaaagccagagtaacttcctacctccacataactgcrtcacctctccagccagggttcagaacagggctgaggctgcaatggcagaaatagcattcagaatataaacagtaatgaaattcatagagctataggagtatgttgtaagccaatacaacagagctaaaaatcacaataaaacattgcatgacctggcagacaaaatgccagtatagagaacataaccaacctgatagagctgaaaaacacta

SEQ ID NO: 301427 - DNA, 551 bp, Homo sapiens
gtgtcgctcagccagagtgtgcaggatggacccaacacaagagaacaaagctggggcctaatacaagtcccccagagttagagcacacagtccagaagttgggagctgagtgttgtgccataaaatctcccagaaatgaagccagtcagctgaatctaccttataacacaaacaaatcttcgacatcatcaaataggatgaaagaaaacaaaataccgtccaaaggtaagcaatctcaaagactgaagttagataagtgcacaaagatgagaaagaatcagtgcaagaatactgaaaactcaaaaagccagagtaacttcctacctccacataactgcgtcacctctccagccagggttcagaacagggctgaggctgcaatggcagaaatagcattcagaatataaacagtaatsaaattcatagagctataggagtatgttgtaagccaatacaacagagctaaaaatcacaataaaacattgcatgacctggcagacaaaatgccagtatagagaacataaccaacctgatagagctgaaaaacacta

SEQ ID NO: 301428 - DNA, 551 bp, Homo sapiens
gtgtcgctcagccagagtgtgcaggatggacccaacacaagagaacaaagctggggcctaatacaagtcccccagagttagagcacacagtccagaagttgggagctgagtgttgtgccataaaatctcccagaaatgaagccagtcagctgaatctaccttataacacaaacaaatcttcgacatcatcaaataggatgaaagaaaacaaaataccgtccaaaggtaagcaatctcaaagactgaagttagataagtgcacaaagatgagaaagaatcagtgcaagaatactgaaaactcaaaaagccagagtaacttcctacctccacataactgcgtcacctctccagccagggttcagaacagggctgaggctgcaatggcagaaatagcattcagaatataaacagtaatgaaattcatwgagctataggagtatgttgtaagccaatacaacagagctaaaaatcacaataaaacattgcatgacctggcagacaaaatgccagtatagagaacataaccaacctgatagagctgaaaaacacta

SEQ ID NO: 301429 - DNA, 527 bp, Homo sapiens
atggccttgggcagctctgccctgtggctttgaaaggtacggttcccacctagctgctttcacaggctggtgttgagcatctgaggttttttttaggtgcatatgcaagctgtgagtggatttaccattctggggtstggaagatggtggtcctcttctcacacaggcagcgcctcagatggggactctatgtggggctccaaccccacatttcccttccccacttccttagcagaggctctccatgatcaccccctctcccccacagtaaacttcttcctggacatccaggcatttccatacatcctctgaaatctaggctgaggctcccaagccttgcttcttgacttctgtgcacatgcaggctcaactccacatggatgctgccaaggcttggggcttgcaacctctgacaccatggcccaagctgcaccttggtcccttttagtcacagctggagtggctgggatgtagagcaccaagtccctagactgcacacagagaggggccctgggcctgtccccaga

SEQ ID NO: 301430 - DNA, 527 bp, Homo sapiens
atggccttgggcagctctgccctgtggctttgaaaggtacggttcccacctagctgctttcacaggctggtgttgagcatctgaggttttttttaggtgcatatgcaagctgtgagtggatttaccattctggggtgtkgaagatggtggtcctcttctcacacaggcagcgcctcagatggggactctatgtggggctccaaccccacatttcccttccccacttccttagcagaggctctccatgatcaccccctctcccccacagtaaacttcttcctggacatccaggcatttccatacatcctctgaaatctaggctgaggctcccaagccttgcttcttgacttctgtgcacatgcaggctcaactccacatggatgctgccaaggcttggggcttgcaacctctgacaccatggcccaagctgcaccttggtcccttttagtcacagctggagtggctgggatgtagagcaccaagtccctagactgcacacagagaggggccctgggcctgtccccaga

SEQ ID NO: 301431 - DNA, 527 bp, Homo sapiens
atggccttgggcagctctgccctgtggctttgaaaggtacggttcccacctagctgctttcacaggctggtgttgagcatctgaggttttttttaggtgcatatgcaagctgtgagtggatttaccattctggggtgtggaagatggtggtcctcttctcacacaggcagcgcctcagatggggactctrtgtggggctccaaccccacatttcccttccccacttccttagcagaggctctccatgatcaccccctctcccccacagtaaacttcttcctggacatccaggcatttccatacatcctctgaaatctaggctgaggctcccaagccttgcttcttgacttctgtgcacatgcaggctcaactccacatggatgctgccaaggcttggggcttgcaacctctgacaccatggcccaagctgcaccttggtcccttttagtcacagctggagtggctgggatgtagagcaccaagtccctagactgcacacagagaggggccctgggcctgtccccaga

SEQ ID NO: 301432 - DNA, 580 bp, Homo sapiens
gacaatcatacagtttctgttgcaaccactcaactctgacataatagcctgaaaacatctatagaccacatgtaagtgaatgatcttgtgtccaaaaaaaaaaccttgttatttatgaaaacactgcagtttttactttatgcaatcattatatgctacaaaatgttattttaaaaaattgtttcaatcatttaaatctctaaaaaccattattaccttgcaggctgtaccaaaaccataggccacaggctgccaatgctcacactgaagaaacaaaattgtgatatcagtgcagccttcacacagaaaatagagtttgaaactagaatatcaactacaactggagagttaaatgaaaagtcttattagttagttggagtgggttttgcaagacactggtgagaagtacagaatttggggtaattggagtaattacgtgggcttaaatatwtatgtgtgggtagaagagggagatgtcaagcgatgagagtagagatgagtttaggataaattacaaatgtcttcaggccatccaaagtgtttataatttattctaatggaagtgacaagacattaatga

SEQ ID NO: 301433 - DNA, 580 bp, Homo sapiens
gacaatcatacagtttctgttgcaaccactcaactctgacataatagcctgaaaacatctatagaccacatgtaagtgaatgatcttgtgtccaaaaaaaaaaccttgttatttatgaaaacactgcagtttttactttatgcaatcattatatgctacaaaatgttattttaaaaaattgtttcaatcatttaaatctctaaaaaccattattaccttgcaggctgtaccaaaaccataggccacaggctgccaatgctcacactgaagaaacaaaattgtgatatcagtgcagccttcacacagaaaatagagtttgaaactagaatatcaactacaactggagagttaaatgaaaagtcttattagttagttggagtgggttttgcaagacactggtgagaagtacagaatttggggtaattggagtaattacgtgggcttaaatatatatgtgtgggtagaagagggagatgtcaagcgatgagagtagagatgagtttaggataaattacaaatgtcttcagrccatccaaagtgtttataatttattctaatggaagtgacaagacattaatga

SEQ ID NO: 301434 - DNA, 605 bp, Homo sapiens
ccatttttcccatcatttttagggtaggctggtttgaataacttcataatttgttatcttatttcaggatattaagacatagttgagactgaagctgaagaggagtgaatatcatggatacctattttggatargaccactgcattttaatttgtgcaacatatatttgaattatatttgacaggatcatgtacttgttactgttactcttttgaagtttaagctttagaaaaggcaggtgcatggatattgaatagtcttaagctggaccatcggctatttcagactggcttactcaggcatattccaaaactctggtagtttgactaagtacttgctcaatttggaacagctaaaaatgatatccccaggcttactcacaattcaggttttacattaaacctaccttctttaaggaaaagagcctgagatagaaggtgccttcctattctttttttctgacaagcaatgtaacaaaaccatttactttcctgtaacaacagtcacaaaggaccaaatgtccagtccttagttctgtggccgacattctgtgttattcaaatatgaaccatggctgagatcctatgatcaagaagcaagcagct

SEQ ID NO: 301435 - DNA, 596 bp, Homo sapiens
agttgagactgaagctgaagaggagtgaatatcatggatacctattttggataggaccactgcattttaatttgtgcaacatatatttgaattatatttgacaggatcatgtacttgttactgttactcttttgaagtttaagctttagaaaaggcaggtgcatggatattgaatagtcttaagctggaccatcggctatttcagactggcttactcaggcatattccaaaactctggtagtttgactaagtacttgctcaatttggaacagctaaaaatgatatccccaggcttactcacaattcaggttttacattaaacctaccttctttaaggaaaagagcctgagatagaaggtgccttcctattctttttttctgacaagcartgtaacaaaaccatttactttcctgtaacaacagtcacaaaggaccaaatgtccagtccttagttctgtggccgacattctgtgttattcaaatatgaaccatggctgagatcctatgatcaagaagcaagcagctatgacagaagtattttaatgcttagaggaaaaaaaaaaacaaaggtagcaactcactgttaggttagggtt

SEQ ID NO: 301436 - DNA, 596 bp, Homo sapiens
agttgagactgaagctgaagaggagtgaatatcatggatacctattttggataggaccactgcattttaatttgtgcaacatatatttgaattatatttgacaggatcatgtacttgttactgttactcttttgaagtttaagctttagaaaaggcaggtgcatggatattgaatagtcttaagctggaccatcggctatttcagactggcttactcaggcatattccaaaactctggtagtttgactaagtacttgctcaatttggaacagctaaaaatgatatccccaggcttactcacaattcaggttttacattaaacctaccttctttaaggaaaagagcctgagatagaaggtgccttcctattctttttttctgacaagcaatgtaacaaaaccatttactttcctgtaacracagtcacaaaggaccaaatgtccagtccttagttctgtggccgacattctgtgttattcaaatatgaaccatggctgagatcctatgatcaagaagcaagcagctatgacagaagtattttaatgcttagaggaaaaaaaaaaacaaaggtagcaactcactgttaggttagggtt

SEQ ID NO: 301437 - DNA, 596 bp, Homo sapiens
agttgagactgaagctgaagaggagtgaatatcatggatacctattttggataggaccactgcattttaatttgtgcaacatatatttgaattatatttgacaggatcatgtacttgttactgttactcttttgaagtttaagctttagaaaaggcaggtgcatggatattgaatagtcttaagctggaccatcggctatttcagactggcttactcaggcatattccaaaactctggtagtttgactaagtacttgctcaatttggaacagctaaaaatgatatccccaggcttactcacaattcaggttttacattaaacctaccttctttaaggaaaagagcctgagatagaaggtgccttcctattctttttttctgacaagcaatgtaacaaaaccatttactttcctgtaacaacagtcacaaaggaccaaatgtccagtccttagttctgtggccracattctgtgttattcaaatatgaaccatggctgagatcctatgatcaagaagcaagcagctatgacagaagtattttaatgcttagaggaaaaaaaaaaacaaaggtagcaactcactgttaggttagggtt

SEQ ID NO: 301438 - DNA, 596 bp, Homo sapiens
agttgagactgaagctgaagaggagtgaatatcatggatacctattttggataggaccactgcattttaatttgtgcaacatatatttgaattatatttgacaggatcatgtacttgttactgttactcttttgaagtttaagctttagaaaaggcaggtgcatggatattgaatagtcttaagctggaccatcggctatttcagactggcttactcaggcatattccaaaactctggtagtttgactaagtacttgctcaatttggaacagctaaaaatgatatccccaggcttactcacaattcaggttttacattaaacctaccttctttaaggaaaagagcctgagatagaaggtgccttcctattctttttttctgacaagcaatgtaacaaaaccatttactttcctgtaacaacagtcacaaaggaccaaatgtccagtccttagttctgtggccgacattctgtgttattcaaatatgaaccwtggctgagatcctatgatcaagaagcaagcagctatgacagaagtattttaatgcttagaggaaaaaaaaaaacaaaggtagcaactcactgttaggttagggtt

SEQ ID NO: 301439 - DNA, 596 bp, Homo sapiens
tagaaggtgccttcctattctttttttctgacaagcaatgtaacaaaaccatttactttcctgtaacaacagtcacaaaggaccaaatgtccagtccttagttctgtggccgacattctgtgttattcaaatatgaaccatggctgagatcctatgatcaagaagcaagcagctatgacagaagtattttaatgcttagaggaaaaaaaaaaacaaaggtagcaactcactgttaggttagggttagtctgcagatacctggattaagatatyttaagccactgtgtggtccctggctgaccagtgtgagttcatttatatctatctcctctatttggataacagtaaaaacataacagagggagatggattccataaatatgactgttgaaaatgttatagctacagaggatctaagatgtatgtttggtagttggactaatgtattgtttggatcaaataaaatatgtgttagagaatgcaactgtttattcacagtataggggcacagtttaggcccagatcagtcaggaaggtggcaaactgtttcacacatttcctgccatgtaaatcagaaatgttgtgtagaacagaac

SEQ ID NO: 301440 - DNA, 574 bp, Homo sapiens
cagaaaaaattattgtttctcaaagcagtttttctaaaagtacatttgtaaaatggacaatgtgcctcaagttacaaaaaattattttattattctctatgtaaatatgtttcccatgagtacatttaatgatgtttagactaacaattttgtttaaattttaagcgaataagataaactttgaaactgggaaaaaaacaaatagcaaagctagcataattttagtgccagtggtgcacaggagatcctgattctccagcttctcagtcatggcaaaaggaacaacagtcycagctctgtcgtttttctggaggagttctagcaatcatttagaagatcagcccaagacctgctccaccaactctccaatcgtgtaagaaactaattctatatattaaattttgtttgcctatattacctaaagatttattcttataatctataatggaaaattgaaatattgagtatgctgatgaaaaagattacattttcttaaacaaatgttcactcctaaatgacaaattcaattataggaacaaatttaggtaggcataaaaagagaaaagtgaaaata

SEQ ID NO: 301441 - DNA, 574 bp, Homo sapiens
cagaaaaaattattgtttctcaaagcagtttttctaaaagtacatttgtaaaatggacaatgtgcctcaagttacaaaaaattattttattattctctatgtaaatatgtttcccatgagtacatttaatgatgtttagactaacaattttgtttaaattttaagcgaataagataaactttgaaactgggaaaaaaacaaatagcaaagctagcataattttagtgccagtggtgcacaggagatcctgattctccagcttctcagtcatggcaaaaggaacaacagtcccagctctgtcgtttttctggaggagttctagcaatcatttagaagatcagcccaagacctgctccaccaactctccaatcgtgtaagaaactaattctatatattaaattttgtttgcctatattacctaaagatttattcttataatctataatggaaaattgaaatattgagtatgctgatgaaaaagattacattttcttaaacaaatgttcactcctaaatgacaaattcaattatagkaacaaatttaggtaggcataaaaagagaaaagtgaaaata

SEQ ID NO: 301442 - DNA, 589 bp, Homo sapiens
aataaattagtaaattttgcataagtaaattatacctcagtaaatctggctaaaatacaatgtaaatatgtgtatcaaccaccattaatttaaaaattctagggccaggcatgatggcttatacctgtaatcctatcactttgggaggctgaggtgggaggatcccttgagcccaggagttcaagacaagcctgggtaacagggagagcctcatctctatagaaaatttaaaaatttaattagcctatcatkgtggctcacacctgtaatcccagatacttgggaggcttttttgaggttatagtgagttatgatccagctactgtactccagcctggtgacagaatggcatcttctctctataaaaataaaaataaaaataaaatctatgacatttaactgattacttatttaatcaattaattggaataaatgatatcctgattatgacatttcaatagacatattattatttattttaatatttgaatagagtaaataaagacctatttttctttcaatttgtcatttattttatgttgctttgaataaaaaactaatgctgcaattgtgtacaccattaaatcat

SEQ ID NO: 301443 - DNA, 630 bp, Homo sapiens
tttttcccgcctctttttgttatgcacaactatatattttgaaaatgacacatgtgactaacatgaaaaagctctaagagatggaggtaaacagaagagttagtttgatatgcaaggaatggtgaaacagcacaacagcaaggcatcttgtgtatcctcactggacagaagaaggccttcagacttatttttcctaatcccccaatctagcaacagaagatacctcaagtaagctccttcctcccttggrtcaatcaggagccgctagcttgagacacccaccaccatccaggagaagcagctaggagaaacgctaagagaggtgctctccttcccagtacagcttgaggcttcctttgctaccaggaagcacaaaggtggaaaaatagaaccaggaagagggacctagtagagaaagtggcctggcctaagaagctgctttgtccctgcaggcctaagacgctcttcccaatgaccccagagtagccaggggacattggttgggggattctaccacacccctcaccacatacctcagacacctggtagcctaacctggagaaactgcttccactgccataggcagcactaacagggagcagtggaattcccagcagcaccatattaatc

SEQ ID NO: 301444 - DNA, 577 bp, Homo sapiens
atcgtgtcccccttgagactcacaaaatgaagccccagccccagtatctgagagtgtgactgtatttggaaacagcagctttaaagacgtgattgaggtaacatgaggccatcaggggccgcaatctggcctgtgccctgataggaagaggagactggaacaggacacacatactgcaggaggcacagagcraagacgccacctgcaagccagggccagaagccttggaagaagcacctgcacacctgaatcttggactccagttttcaacaccgtgagagagtaaatttccattgccagccagtctgtggccatctgcaatgactctagcacgttaatatacccatctaagggttgcctccccgagtttttattctcttcccagtctgtctgcttttgtggatgtctggagctcttgagcagttgctttctgattttgcccagagctttcagttgcaatcagcgagaaagaagctgcaggaacttgtttcatcttgaccattcatacatattgaactgatgtgtttgttacattctaccgtctcttgagtgtaatcaaataaaagagcatctgatg

SEQ ID NO: 301445 - DNA, 442 bp, Homo sapiens
gaatgccttgtggaattaattatttttatgactgtgttatgatatgaaaatgttatgatagggaaaaatgcaagaaactgttacccctgtaggaatattgactttgtagccttggttagaagacaggctctgatggaaaaatttgctatgatggattgtgccatggagacttgactctctctacatttatggcactgaagccacctctgtggtgygcagtgtggacgcatgccacgtctctcagacgaagcacacctggcagtgggcaggccctggctgtgccctgctgctgtggcctgccccttcttcctctagtaaggcggggaccctctaaccaggcagctttggactagaccagtgctattcgaagaatgatctggagacagtgaccaggagtcctttgtggacctggggacctaacattaggaatgataagtccaga

SEQ ID NO: 301446 - DNA, 442 bp, Homo sapiens
gaatgccttgtggaattaattatttttatgactgtgttatgatatgaaaatgttatgatagggaaaaatgcaagaaactgttacccctgtaggaatattgactttgtagccttggttagaagacaggctctgatggaaaaatttgctatgatggattgtgccatggagacttgactctctctacatttatggcactgaagccacctctgtggtgtgcagtgtggacgcatgccacgtctctcagacgaagcacacctggcagtgggcaggccctggctgtgccctgctgctgtggcctgccccttcttcctctagtaaggyggggaccctctaaccaggcagctttggactagaccagtgctattcgaagaatgatctggagacagtgaccaggagtcctttgtggacctggggacctaacattaggaatgataagtccaga

SEQ ID NO: 301447 - DNA, 508 bp, Homo sapiens
gcagtttgtaagctggaaaaacactcgaagttaatggaaaacatgtaccctccccctctgggatgatatttccaggggaagatggtaaaggcccgttgttcttatgtttgagggagcgaaaatattttgcatattaccaagtgactagtgtcacacccagtgggtcaccctgctggccctttggttgccccctttcctttggcgcccttgactttcatccttgtagcatgtaccccttgcccatgcagtttcttcatgtctcctaagtcagtggctgctcgggccactggagacactggctgtcctgcctaagggttcaggagagacactagcacwccataccactgactggatgctggctctaatctttcatgctgccagtgaacaaaagctgatttttggaaactagatagtgctcagcgtagatagcatgcttccttcttaattcccagaggatgtctggcactttcgtcagtctggcgttgcagaggagatgtggggatgtctg

SEQ ID NO: 301448 - DNA, 508 bp, Homo sapiens
gcagtttgtaagctggaaaaacactcgaagttaatggaaaacatgtaccctccccctctgggatgatatttccaggggaagatggtaaaggcccgttgttcttatgtttgagggagcgaaaatattttgcatattaccaagtgactagtgtcacacccagtgggtcaccctgctggccctttggttgccccctttcctttggcgcccttgactttcatccttgtagcatgtaccccttgcccatgcagtttcttcatgtctcctaagtcagtggctgctcgggccactggagacactggctgtcctgcctaagggttcaggagagacactagcactccataccactgactggatgctggctctaatctttcatgcygccagtgaacaaaagctgatttttggaaactagatagtgctcagcgtagatagcatgcttccttcttaattcccagaggatgtctggcactttcgtcagtctggcgttgcagaggagatgtggggatgtctg

SEQ ID NO: 301449 - DNA, 420 bp, Homo sapiens
cttaaccctgagccaggcagagtccggggactaaggttccatgcaggaatggagtggggtagcccatctcatggaggaggagatgagacataggcaacaagatgtggttaaagacggacagggggtcagaaatcaaagaaaaagagaaaatcaagtatcatcatctctcaagggtcggggtaccagaaagaaagccaacttgaagcaatgagtatttattgccagttataactacagatagctgagtggggagagaagcgttggaagcaaaatagaagaagaaacccagaaatgtccaggtgtgcgaaaacaagtgccggcagtcgcattaagagkttactggggccttgaccgtggtcagggagagaaatggcatcaaggcagcttagagacgcgctgctgggaatttcagtttggctt

SEQ ID NO: 301450 - DNA, 623 bp, Homo sapiens
gtgtgcacttggcactgggctgatatttattcaagggccttaattgatgctaagaaacataattttaaaaaccactgttttctttatatttaatgattttagtagtagttatgataccagtaaaatattaatgttyattcagctctcctttgtgctggcatatccaggttttcatccactgtggctgactgaaaagcatggccatgctattttgtagctttcctatcgggacatgatctatttctccaccccttcactctgggctgaacttgtgatttgcggtgactaacagaatgcggtgaaagacccccaagaggccttgcctcttctgccttcactttcctgggacgttgctgccttcatgagaggaagtcaatgatcctctttgagactgaaagacgacctggaaaggaggagctcttgcggttcacccagctgagctcagcctaatccaacacagctgaacccatgcaagatcagcaaaagcacctcttggcccacccagagagctgtgagaaatgtaagtcagtccgatttggggtaccttgtctggcagtattgaataactaatgaaccttcaattttaacaagcctgccctttggcacacacactcacccgcaca

SEQ ID NO: 301451 - DNA, 623 bp, Homo sapiens
gtgtgcacttggcactgggctgatatttattcaagggccttaattgatgctaagaaacataattttaaaaaccactgttttctttatatttaatgattttagtagtagttatgataccagtaaaatattaatgttcattcagctctcctttgtgctggcatatccaggttttcatccactgtggctgactgaaaagcatggccatgctattttgtagctttcctatcrggacatgatctatttctccaccccttcactctgggctgaacttgtgatttgcggtgactaacagaatgcggtgaaagacccccaagaggccttgcctcttctgccttcactttcctgggacgttgctgccttcatgagaggaagtcaatgatcctctttgagactgaaagacgacctggaaaggaggagctcttgcggttcacccagctgagctcagcctaatccaacacagctgaacccatgcaagatcagcaaaagcacctcttggcccacccagagagctgtgagaaatgtaagtcagtccgatttggggtaccttgtctggcagtattgaataactaatgaaccttcaattttaacaagcctgccctttggcacacacactcacccgcaca

SEQ ID NO: 301452 - DNA, 623 bp, Homo sapiens
gtgtgcacttggcactgggctgatatttattcaagggccttaattgatgctaagaaacataattttaaaaaccactgttttctttatatttaatgattttagtagtagttatgataccagtaaaatattaatgttcattcagctctcctttgtgctggcatatccaggttttcatccactgtggctgactgaaaagcatggccatgctattttgtagctttcctatcgggrcatgatctatttctccaccccttcactctgggctgaacttgtgatttgcggtgactaacagaatgcggtgaaagacccccaagaggccttgcctcttctgccttcactttcctgggacgttgctgccttcatgagaggaagtcaatgatcctctttgagactgaaagacgacctggaaaggaggagctcttgcggttcacccagctgagctcagcctaatccaacacagctgaacccatgcaagatcagcaaaagcacctcttggcccacccagagagctgtgagaaatgtaagtcagtccgatttggggtaccttgtctggcagtattgaataactaatgaaccttcaattttaacaagcctgccctttggcacacacactcacccgcaca

SEQ ID NO: 301453 - DNA, 623 bp, Homo sapiens
gtgtgcacttggcactgggctgatatttattcaagggccttaattgatgctaagaaacataattttaaaaaccactgttttctttatatttaatgattttagtagtagttatgataccagtaaaatattaatgttcattcagctctcctttgtgctggcatatccaggttttcatccactgtggctgactgaaaagcatggccatgctattttgtagctttcctatcgggacatgatctatttctccaccccttcactctgggctgaacttgtgatttgcggtgactaacagaatgcggtgaaagacccccaagaggccttgcctcttctgccttcactttcctgggacgttgctgccttcatgagaggaagtcaatgatcctctttgagaytgaaagacgacctggaaaggaggagctcttgcggttcacccagctgagctcagcctaatccaacacagctgaacccatgcaagatcagcaaaagcacctcttggcccacccagagagctgtgagaaatgtaagtcagtccgatttggggtaccttgtctggcagtattgaataactaatgaaccttcaattttaacaagcctgccctttggcacacacactcacccgcaca

SEQ ID NO: 301454 - DNA, 639 bp, Homo sapiens
ggattccacacccaagacatggctgctcagaaacaattgcgctgaagagattgattgcctcttggttgttgtaggctcaggggaggaaagatctgggtttgaatcactggccctacaattaacaagatgtgtggcatgggaaaaatgcctgactttctraatcttcattgcacctctgtaaatggaggcaaataacattaatcaatttaggttattttgaaatacatagtaaaatcactcaatctagtgcctaccacataccaattttcaaaaactgtagttttcctcccctggtacagtgcttctgtaactgttgtaccattacaatctgcaccaaaagcaattggagtttgtttaaaatgtgggtatccaggcccaccacacagtgtcagttatattacttttatctcttataatccatttttcttgattatattattttaaaatatatgtgacaccaactagaatggctaagatggaaaatacagacagtattaattgttggctaggatgtggagcagttgggactctcctactctgctcctgggggtgtgcactgctgtatttactaaagctgggcataactgaacccaagaattccaatcctaggcatattcccaatggaaatgtgtgcatgtg

SEQ ID NO: 301455 - DNA, 639 bp, Homo sapiens
ggattccacacccaagacatggctgctcagaaacaattgcgctgaagagattgattgcctcttggttgttgtaggctcaggggaggaaagatctgggtttgaatcactggccctacaattaacaagatgtgtggcatgggaaaaatgcctgactttctaaatcttcattgcacctctgtaaatggwggcaaataacattaatcaatttaggttattttgaaatacatagtaaaatcactcaatctagtgcctaccacataccaattttcaaaaactgtagttttcctcccctggtacagtgcttctgtaactgttgtaccattacaatctgcaccaaaagcaattggagtttgtttaaaatgtgggtatccaggcccaccacacagtgtcagttatattacttttatctcttataatccatttttcttgattatattattttaaaatatatgtgacaccaactagaatggctaagatggaaaatacagacagtattaattgttggctaggatgtggagcagttgggactctcctactctgctcctgggggtgtgcactgctgtatttactaaagctgggcataactgaacccaagaattccaatcctaggcatattcccaatggaaatgtgtgcatgtg

SEQ ID NO: 301456 - DNA, 639 bp, Homo sapiens
ggattccacacccaagacatggctgctcagaaacaattgcgctgaagagattgattgcctcttggttgttgtaggctcaggggaggaaagatctgggtttgaatcactggccctacaattaacaagatgtgtggcatgggaaaaatgcctgactttctaaatcttcattgcacctctgtaaatggaggcaaataacattaatcaatytaggttattttgaaatacatagtaaaatcactcaatctagtgcctaccacataccaattttcaaaaactgtagttttcctcccctggtacagtgcttctgtaactgttgtaccattacaatctgcaccaaaagcaattggagtttgtttaaaatgtgggtatccaggcccaccacacagtgtcagttatattacttttatctcttataatccatttttcttgattatattattttaaaatatatgtgacaccaactagaatggctaagatggaaaatacagacagtattaattgttggctaggatgtggagcagttgggactctcctactctgctcctgggggtgtgcactgctgtatttactaaagctgggcataactgaacccaagaattccaatcctaggcatattcccaatggaaatgtgtgcatgtg

SEQ ID NO: 301457 - DNA, 639 bp, Homo sapiens
ggattccacacccaagacatggctgctcagaaacaattgcgctgaagagattgattgcctcttggttgttgtaggctcaggggaggaaagatctgggtttgaatcactggccctacaattaacaagatgtgtggcatgggaaaaatgcctgactttctaaatcttcattgcacctctgtaaatggaggcaaataacattaatcaatttaggttattttgaaatacatagtaaaatcactcaatctagtgcctascacataccaattttcaaaaactgtagttttcctcccctggtacagtgcttctgtaactgttgtaccattacaatctgcaccaaaagcaattggagtttgtttaaaatgtgggtatccaggcccaccacacagtgtcagttatattacttttatctcttataatccatttttcttgattatattattttaaaatatatgtgacaccaactagaatggctaagatggaaaatacagacagtattaattgttggctaggatgtggagcagttgggactctcctactctgctcctgggggtgtgcactgctgtatttactaaagctgggcataactgaacccaagaattccaatcctaggcatattcccaatggaaatgtgtgcatgtg

SEQ ID NO: 301458 - DNA, 570 bp, Homo sapiens
gagcggtgactggcgtgcctgagtctgtggagggagagcacactcccaggcatcaactcacatgacgcagatttgatrcttgtggataggcagcaaggaacaacaggagtttgtgggagctgcttcctcgagactcagaaagctgccggggtggatggagctttgactgtgtgtgcccccgttgtgctgtagatgagggaccctgaaaagcagcccaccctgggttttacaccacgggggaacatgatgcaaggagctccagaattgaaggacgtcccgtttctaggggagggtgggaacagagcctgagaattccagcctgctcacccttatctcagagtgttgcattcccaggacatcttccaaggccacctggagagctgtcctgcagtgacacacctcagcttacccagcgtagaagtgaggggctcagattcagcatccgcagctatccccaaatgccgtgattattattccaccatccaaggctcacagtgagttaactgttttctttctcctgtcattcaggagcccaagggtggtggcttcagcaccctaggaaatgtgcca

SEQ ID NO: 301459 - DNA, 570 bp, Homo sapiens
gagcggtgactggcgtgcctgagtctgtggagggagagcacactcccaggcatcaactcacatgacgcagatttgatacttgtggataggcagcaargaacaacaggagtttgtgggagctgcttcctcgagactcagaaagctgccggggtggatggagctttgactgtgtgtgcccccgttgtgctgtagatgagggaccctgaaaagcagcccaccctgggttttacaccacgggggaacatgatgcaaggagctccagaattgaaggacgtcccgtttctaggggagggtgggaacagagcctgagaattccagcctgctcacccttatctcagagtgttgcattcccaggacatcttccaaggccacctggagagctgtcctgcagtgacacacctcagcttacccagcgtagaagtgaggggctcagattcagcatccgcagctatccccaaatgccgtgattattattccaccatccaaggctcacagtgagttaactgttttctttctcctgtcattcaggagcccaagggtggtggcttcagcaccctaggaaatgtgcca

SEQ ID NO: 301460 - DNA, 567 bp, Homo sapiens
ttttgcctcattctctttggaacagtggacacacagggacttacacaaatatctgttgaatgaatgaatgtacgcttcacatttgatgacttactaatgtaatgatgtctgaccaatagataaatctttttccgtattaactgattggacatgttccttgaagccatcactgggggtctgctctgaagtttatggatcactcaggatggtgggctcagggctcaggtgggtcctaggttgccttgttagtatcagtccaaggtgtctatcagagttgctaccaaaaagacgattttccaagtcttcaaaaatgaactgttagggaggattatgctggatatttatatcaatttctggacactttaaagctatgaagacagatatgaaaataaaggttttwttcattttagggggctgagacaaaaatagacaatttgaggaaaatataaatgtatccatagaggtcattgttagcacctttcaaaaacttgttttggtcgcctaaaagcataaagaatctactgtatatggtaaaccagtattcagggtccagccaagaaaacagaa

SEQ ID NO: 301461 - DNA, 595 bp, Homo sapiens
aatagaataaaaagggggaactgaggtattgcagagagtgaaactgcaggggcagccaccagctgtctagggctgaggaacaaaggaaagaagttggggttactagaatccagaagctggaggaggggtccccagagctggggctcagtcccccaagaaggggcactgcccagctkgtgctcaggcctttgagaggctcatggggagggtgtctccgggagcacaaaaagaagccaggcatgggaactgatgttatggctactgaccgctgctgccagggtgaagggcattgctgagcagcctgggtagatgacaacgccagtaggaaccggtcccttctcccaccacctgcctcccaggctccctccggtgctcctgaccctggcaggaccaacctggatgccgttgacaaggagggaagcttgtcaagtcctaatttcagcatctgaccgtgacaaattcaaagctgagaaacaataaccaaagaaccagaatatatggtaatccatttgtagcaacgtaactataggttcctaaaaatctttaggatgtaactatcataactgaggaactaagtctttttggggacaagtag

SEQ ID NO: 301462 - DNA, 549 bp, Homo sapiens
tttcttgattctctattctatcccatcccattggccttttcatacactaattccacactaatttagttttacaggctttacagtgtattttgatgaggcaaaatctagtttctattcaaaacatctccttttctcctatttttattctgagtttaatcaacaaaattaaatacagatatactacatatatataaatatttatcttttttctgttcttatttttgtatttatggctcacagtggcctttgtctttccaaatgcttctttgaggatatttawttcactttggagtgttgtgttacagatttattgtttgtgtgcatgtattttttaaattgggtaacagcaaaaatggtttgctttaccttaattgttttagggtagttccatttgggtgtggtttgtttttcctctttgtatccattttgcatggatttcagtatgaacttttctattggttctgccccctgaatgcgctgttttcttattggacaattgtggagaaggattagtgcttttgttttgcttttgtctctgcaggatactca

SEQ ID NO: 301463 - DNA, 533 bp, Homo sapiens
tggtcaatatcgtggggactacctaagcagcatgtgagcacacacacacacacacacacacaccacacacacaacagaaaagtgagtgataatcgattttaaggactaactctggagccagactaactgggctctgattacagctatgattacagctctggtggtaactagctttaygatcttgggcacattatttaacctcttgtccctcagttgcttcatctgtaaaaccgagataacaattgcaattatctcataaaattattggaaggagttaatgaattagtatcagtaaagtgattggaacaattcctggcatataataagccccacatatatgctatataaatgctagttaaatgactagttaaacacacaatgaaatgtaataaaagaaaataaaattaaagataatatattaccagttgggtagatggcaacagagagaatgaagacagagatgaataatcagagatctcttcaacctggagagatattccattatacgacatggtggcaacttgagtggatta

SEQ ID NO: 301464 - DNA, 584 bp, Homo sapiens
tataccaaactactaacagtggttatgcttggaaagaggaatggggttaggggtaggatgatgggcttttaaatctcacttaaactcttctgtcatgatcacgtttgtattttattttacaatgagcacttttgggttttgaaatttaaaaataatgttttaaattatgagacttttttcttaagtgtgtcagacatctagcttccaatcccagctgtgctacttatttcrttttgtgacctgggaaagttaatcttcctaagcctatgctccctcaactgtcaagtgggcataatagttacctagcccacatggttattaagtgacaaagcccagcatgaagtaggaactcagaatacataacttcaatggaaagtagatgttgtctatttttcacaatcatcaaagacatccaaaatagaacttaattaaaacataatatggctgagcgcagtggctcacacctgtaatcccagcactttcggaggccaaggcaggtagatcacttgaagtcaggagttcaagaccagcctggccaacatggtgaaaccctgtctctataaaaatacaaaaattagctgggc

SEQ ID NO: 301465 - DNA, 563 bp, Homo sapiens
tgttcctaggcagcaaggaaccaacacgtggaaaatatggggtttctggagcagtgttaatgcaagccagttcctgtaatgtacatagtgacacctactgccaatgacacgtgctggagcccttccactgttgatttcctatattcacttacccttgtctttaagtggatgttggtggaaacttgaggatacatctttgtgcagcagacagcatttgtaagtaaatctgtgtaggcttagggccacattgataaaaatatatgagagtaaacatatacagaagctgttttaagaacttctgatgtcctagatgctctgatttctggaagctccatcccacatcgtagcaaatatattaaaacactctcatattctctaaatactcttaaataatgtgagtgttaaaacartagtttcatttgaaattatttgatgttgcggaactcactttctaatgactatgacttcccggcaatcacggcattagggaattcataccaagtgatgtctaagttatagtttcaaaatataatgaaacatttatccatcaatacattacaatt

SEQ ID NO: 301466 - DNA, 520 bp, Homo sapiens
tatgaaattaacatgttttggggaccttcatttaaacatttattaatctcagatttgcagtatactttttgtattgtgcagtcaataaaattttcagtctcaaacattttcataggtccctgaaaagctcaacgcaaaaaacagcccccatgtgtgattctctactgggcaataaaagccaatcgcgaccctcattttccccccattccagggcttccccaggatagaacgcggaaacgcttctttttccgtttccagggatttctttctttttccagtgtcgttctccctctcccccacttcatttttacaataaatgtcagtgcacacccaggagcgggtggtcccacaggggacatcttaacgcccacccaggagcggctggtcccacagaggacctcttaacgctgacgctttctggagaaaaggatttgtgatgaaaatttccccaaggggaccttctagcgcctagcacsttcgatgctcctgtttcagtcgcggtctcagcgggcagtggcct

SEQ ID NO: 301467 - DNA, 635 bp, Homo sapiens
ctcctgtttcagtcgcggtctcagcgggcagtggcctcctttgaagctgggattctcctgcccctcccgggcagcgcaggccaccggtgacccgggacggtctgtaaacgaccttcgcgtccccgtccccgtggaataacgcgcggcggcatcactgcccaatatccagcgctcgtgaaggcggagaccggcggggcagctagtttctggytgtggattctgattaatgggccgcaggcgcacgtctgcaccgtccggctcgttgctagtggctcgctcgggagccgccgcactcccggggctgtccgcccgagccggcctggaaggcagaggacgcctccaggtcgctccgcggggcctccggaattcctgggaaagcccccctgcagcgccgcccctggaccccaggtgtgaggagcggggctcggccagcggctccagaagaggcccggaccccactgccgtggctgccgggggcgggaaagtgatttctcggaaagcagagcacttcgaagaaggcgggccgcgcgagccaagctgacgctattggtcggtgtggccgtcgctctgcgcaccgcccgtcccccccacgaccctttttaaggccgcgcgaccgctggcgcatcgcctggagc

SEQ ID NO: 301468 - DNA, 635 bp, Homo sapiens
ctcctgtttcagtcgcggtctcagcgggcagtggcctcctttgaagctgggattctcctgcccctcccgggcagcgcaggccaccggtgacccgggacggtctgtaaacgaccttcgcgtccccgtccccgtggaataacgcgcggcggcatcactgcccaatatccagcgctcgtgaaggcggagaccggcggggcagctagtttctggttgtggattctgattaatgggccgcaggcgcacgtctgcaccgtccggctcgttgctagtggctcgctcgggagccgccgcactcccggggctgtccgcccgagccggcctggaaggcrgaggacgcctccaggtcgctccgcggggcctccggaattcctgggaaagcccccctgcagcgccgcccctggaccccaggtgtgaggagcggggctcggccagcggctccagaagaggcccggaccccactgccgtggctgccgggggcgggaaagtgatttctcggaaagcagagcacttcgaagaaggcgggccgcgcgagccaagctgacgctattggtcggtgtggccgtcgctctgcgcaccgcccgtcccccccacgaccctttttaaggccgcgcgaccgctggcgcatcgcctggagc

SEQ ID NO: 301469 - DNA, 585 bp, Homo sapiens
actagtataaatttcactttgtcatagtgtataattcttgtatatgttgctagatctgatttgttagtagtttttaaggaattttgcatttatacttatagtagttttatttttctatgctatttggactaatttttgtatcaaggtaacactggccccatagaataaattgggaagtgaatatttctcttttttawaaaagtcagtcaagaattaatattaattagtcaatactaacaaatatgattaatattataaattattaatttctctaatttttattttcttccttctgcttgctttaggtttagtttgctattctttccagtgccttaatgtggaaggttatcttatctcatcctttcctttgtcttttcattttcgaaatagtgtctttttagcatcaggtgagctccccaggttggtagtactccatgtttattgctgtacaacaatgacaggtaatatgtcctgaagacaatggaaatttaacattcaaaatcctcctagattccaccttatgtgatatgtctcttcctttgattggtcctaatttctaccctttctctattataaaccatgagt

SEQ ID NO: 301470 - DNA, 585 bp, Homo sapiens
actagtataaatttcactttgtcatagtgtataattcttgtatatgttgctagatctgatttgttagtagtttttaaggaattttgcatttatacttatagtagttttatttttctatgctatttggactaatttttgtatcaaggtaacactggccccatagaataaattgggaagtgaatatttctcttttttaaaaaagtcagtcaagaattaatattaattagtcaatactaacaaatatgattaatattataaattattaatttctctaatttttattttcttccttctgcwtgctttaggtttagtttgctattctttccagtgccttaatgtggaaggttatcttatctcatcctttcctttgtcttttcattttcgaaatagtgtctttttagcatcaggtgagctccccaggttggtagtactccatgtttattgctgtacaacaatgacaggtaatatgtcctgaagacaatggaaatttaacattcaaaatcctcctagattccaccttatgtgatatgtctcttcctttgattggtcctaatttctaccctttctctattataaaccatgagt

SEQ ID NO: 301471 - DNA, 583 bp, Homo sapiens
ttgctgtacaacaatgacaggtaatatgtcctgaagacaatggaaatttaacattcaaaatcctcctagattccaccttatgtgatatgtctcttcctttgattggtcctaatttctaccctttctctattataaaccatgagtacaatggcattcaatgacttttgtgagtctttttagtaaattcttgaaactgagggtgttcttgggaaacccctgaactggcaattggtgacaaaagtgcaaatcatcttatatggcctcttcctttgaactttgcagctggacccaaactctgcacaatttggggcagaagtctcgtgttgactttgcagcctaaattatcttgtagtttgtctaaccctcaataaatttgttttcatcaaatattgtatttgttaccccamaattaccatcatggttttttctccaaataactaacattgggagaaatagccagctgaatctgtaactcaacagaaacaagtgatccatataccatataagtggccatttcattttgcctccttccaccagatcttagcaacctcaaccattgccatgagccactgtaggcctacca

SEQ ID NO: 301472 - DNA, 571 bp, Homo sapiens
ggcctaccatctacaaacaaacaagtatcttttaaaaagacttcatactcccatttgataaatttcccagcaaagagatgyttactttaactctatgcaagtggctcatattctcaaagtctggagatattattcatgaagtgtgagaaaatcatcccagcgatgccagcacattctccttcccatgatctgcttactttgcaaagatattcaggccataggtgagagatttgtatttcaaagtacaacgattttatggaggtcattgaaacttagatttagcattttagcacagtcacgcatcactgaatgacagggatacgttctaacagatgcatccataggcaatttcatcattttgccaacgtcagagagaatattacaaacacctagtttgtacagcctaccacgtttaggttatatggtatagcctctctcccctaggctacaaacctgtgtactacattactatactgaatactgcaggcaataagaacacagtggtaagagtttatgtatctaaacatacttaaacatagaaaagaatgtaaaaatatgtattataatctca

SEQ ID NO: 301473 - DNA, 571 bp, Homo sapiens
ggcctaccatctacaaacaaacaagtatcttttaaaaagacttcatactcccatttgataaatttcccagcaaagagatgtttactttaactctatgcaagtggctcatattctcaaagtctggagatattattcatgwagtgtgagaaaatcatcccagcgatgccagcacattctccttcccatgatctgcttactttgcaaagatattcaggccataggtgagagatttgtatttcaaagtacaacgattttatggaggtcattgaaacttagatttagcattttagcacagtcacgcatcactgaatgacagggatacgttctaacagatgcatccataggcaatttcatcattttgccaacgtcagagagaatattacaaacacctagtttgtacagcctaccacgtttaggttatatggtatagcctctctcccctaggctacaaacctgtgtactacattactatactgaatactgcaggcaataagaacacagtggtaagagtttatgtatctaaacatacttaaacatagaaaagaatgtaaaaatatgtattataatctca

SEQ ID NO: 301474 - DNA, 571 bp, Homo sapiens
ggcctaccatctacaaacaaacaagtatcttttaaaaagacttcatactcccatttgataaatttcccagcaaagagatgtttactttaactctatgcaagtggctcatattctcaaagtctggagatattattcatgaagtgtgagaaaatcatcccagcgatgccagcacattctccttcccatgatctgcttactttgcaaagatattcaggccataggtgagagatttgtatttcaaagtacaacrattttatggaggtcattgaaacttagatttagcattttagcacagtcacgcatcactgaatgacagggatacgttctaacagatgcatccataggcaatttcatcattttgccaacgtcagagagaatattacaaacacctagtttgtacagcctaccacgtttaggttatatggtatagcctctctcccctaggctacaaacctgtgtactacattactatactgaatactgcaggcaataagaacacagtggtaagagtttatgtatctaaacatacttaaacatagaaaagaatgtaaaaatatgtattataatctca

SEQ ID NO: 301475 - DNA, 571 bp, Homo sapiens
ggcctaccatctacaaacaaacaagtatcttttaaaaagacttcatactcccatttgataaatttcccagcaaagagatgtttactttaactctatgcaagtggctcatattctcaaagtctggagatattattcatgaagtgtgagaaaatcatcccagcgatgccagcacattctccttcccatgatctgcttactttgcaaagatattcaggccataggtgagagatttgtatttcaaagtacaacgattttatggaggtcattgaaacttagatttagcattttagcacagtcacgcatcactgaatgacagggatacgttctaacagatgcatccataggcaatttcatcattttgccaacgtcagagagaatattacaaacacctagtttgtacagcctaccacgtttaggttatatggtatarcctctctcccctaggctacaaacctgtgtactacattactatactgaatactgcaggcaataagaacacagtggtaagagtttatgtatctaaacatacttaaacatagaaaagaatgtaaaaatatgtattataatctca

SEQ ID NO: 301476 - DNA, 598 bp, Homo sapiens
atcttgtgcacataattgtttctataattttawgtttcttgcaaaacttgcagtaatgctcatgcacaaaataatttcctaaataaaaaaaaaaggttttctcagtcattaattcttaaaattatttctccccaataattaatgtgaattaattcttaattcttaatgatagaataatgttgcccttcagagttcggaaacttttacatgttgtacacatttcacaaaccagaacaacttctgaaatattggcattaattaatgtcactcagcaattattgatttcaaaggcattaaatatcattcctattctgaatcacaagggtactttggcatcttatttaatcaagctctttgtatcatcatctacaatttaattacttaacaaacatttctctgtgtgagaaagattgagcaggttattgtgcttttttaagatgcaacttttgcttaatctagagataggcaatgctccctataagggacaaggagaaaaataaatgagcaatagagatgtgacaggcatggaaaaagacactacatttatcaaacaaatagggccacggatgacgataatggggatcaaatcttgagatac

SEQ ID NO: 301477 - DNA, 598 bp, Homo sapiens
atcttgtgcacataattgtttctataattttaagtttcttgcaaaacttgcagtaatgctcatgcacaaaataatttyctaaataaaaaaaaaaggttttctcagtcattaattcttaaaattatttctccccaataattaatgtgaattaattcttaattcttaatgatagaataatgttgcccttcagagttcggaaacttttacatgttgtacacatttcacaaaccagaacaacttctgaaatattggcattaattaatgtcactcagcaattattgatttcaaaggcattaaatatcattcctattctgaatcacaagggtactttggcatcttatttaatcaagctctttgtatcatcatctacaatttaattacttaacaaacatttctctgtgtgagaaagattgagcaggttattgtgcttttttaagatgcaacttttgcttaatctagagataggcaatgctccctataagggacaaggagaaaaataaatgagcaatagagatgtgacaggcatggaaaaagacactacatttatcaaacaaatagggccacggatgacgataatggggatcaaatcttgagatac

SEQ ID NO: 301478 - DNA, 598 bp, Homo sapiens
atcttgtgcacataattgtttctataattttaagtttcttgcaaaacttgcagtaatgctcatgcacaaaataatttcctaaataaaaaaaaaaggttttctcagtcattaattcttaaaattatttctccccaataattaatgtgaattaattcttaattcttaatgatagaataatgttgcccttcagagttcggaaacttttacatgttgtacacatttcacaaaccagaacaacttctgaaatattggcattarttaatgtcactcagcaattattgatttcaaaggcattaaatatcattcctattctgaatcacaagggtactttggcatcttatttaatcaagctctttgtatcatcatctacaatttaattacttaacaaacatttctctgtgtgagaaagattgagcaggttattgtgcttttttaagatgcaacttttgcttaatctagagataggcaatgctccctataagggacaaggagaaaaataaatgagcaatagagatgtgacaggcatggaaaaagacactacatttatcaaacaaatagggccacggatgacgataatggggatcaaatcttgagatac

SEQ ID NO: 301479 - DNA, 604 bp, Homo sapiens
ttgcagtaatgctcatgcacaaaataatttcctaaataaaaaaaaaaggttttctcagtcattaattcttaaaattatttctccccaataattaatgtgaattaattcttaattcttaatgatagaataatgttgcccttcagagttcggaaacttttacatgttgtacacatttcacaaaccagaacaacttctgaaatattggcattaattaatgtcactcagcaattattgatttcaaaggcattaaataycattcctattctgaatcacaagggtactttggcatcttatttaatcaagctctttgtatcatcatctacaatttaattacttaacaaacatttctctgtgtgagaaagattgagcaggttattgtgcttttttaagatgcaacttttgcttaatctagagataggcaatgctccctataagggacaaggagaaaaataaatgagcaatagagatgtgacaggcatggaaaaagacactacatttatcaaacaaatagggccacggatgacgataatggggatcaaatcttgagatactgactcagtttataacctcactgtataatagagcaaatcatttgttaattttt

SEQ ID NO: 301480 - DNA, 606 bp, Homo sapiens
cctcactgtataatagagcaaatcatttgttaatttttttacaaatggaatttaatttaattaagatgaatacagtgttttaaacaaggcaggtcatcttaaaataaaatagtggaataaagtgataaaaccaatgtaaaaatcgtaaacattttataaagaatttttgtcatgtaatttaatatttttgttcatttaaaatcacccaaatcaaaataattttatcttaattaacaaataatcatcagaagtttaactaatttttactttataatactaggtttaaaaattctgaactatagttttaatcacatatgcttatatataaaatagacaggatatatatttacatrttcacaatattatattgtaattgctcctatggatgtggtttttcaatagaattaataagtactttaaaaaagtttcaatttcaatgatgtatatgattgatttttcttagaaaaagcatacatatattgataggtaataatatgaaaatcttctaaaggcattacaggaacacgaaaatgtaattaaatactcactaatttgtaatgttttatgtaagtggaacacatttaactgaaaattgcttttatataa

SEQ ID NO: 301481 - DNA, 593 bp, Homo sapiens
gagtacaaatatgtgctttgagacagcattaaagaaagagcaccttgtaaaaattcaatgccaagagacaagatattcttgattctgaagtcttgttcttttatacagcaatgtaattaataagaagaaaaggaggacatagatgtggagcctattttaataaaaaattgtctrtagattttcatgataacatttaaaaatctactatatttagttagttacaagaaactaggttgtgggaacatatttggtcaacaaaacacccctaccaagggctgacaagaaaaaaagttaggtatcacctttcttctctgcagatggcctgagatgggttaatttgaaagaatgcttccaaagctgaggtgacccctgagaacagcataatccactgctgtctcccgcattcagtttctcagtctgtgctcttttaattttgtgggaagggaagccagccctttaaaccaatcttcagcatgatggcagaaccaaggagtgtggacaggtggcacggtgtctgactttgttcccgcagccacttgtgctttctctggatcttctctgccctagggatagcaccactattgaaaacatat

SEQ ID NO: 301482 - DNA, 593 bp, Homo sapiens
gagtacaaatatgtgctttgagacagcattaaagaaagagcaccttgtaaaaattcaatgccaagagacaagatattcttgattctgaagtcttgttcttttatacagcaatgtaattaataagaagaaaaggaggacatagatgtggagcctattttaataaaaaattgtctgtagattttsatgataacatttaaaaatctactatatttagttagttacaagaaactaggttgtgggaacatatttggtcaacaaaacacccctaccaagggctgacaagaaaaaaagttaggtatcacctttcttctctgcagatggcctgagatgggttaatttgaaagaatgcttccaaagctgaggtgacccctgagaacagcataatccactgctgtctcccgcattcagtttctcagtctgtgctcttttaattttgtgggaagggaagccagccctttaaaccaatcttcagcatgatggcagaaccaaggagtgtggacaggtggcacggtgtctgactttgttcccgcagccacttgtgctttctctggatcttctctgccctagggatagcaccactattgaaaacatat

SEQ ID NO: 301483 - DNA, 593 bp, Homo sapiens
gagtacaaatatgtgctttgagacagcattaaagaaagagcaccttgtaaaaattcaatgccaagagacaagatattcttgattctgaagtcttgttcttttatacagcaatgtaattaataagaagaaaaggaggacatagatgtggagcctattttaataaaaaattgtctgtagattttcatgataacatttaaaaatctactatatttagttagttacaagaaactaggttgtgggaacatatttggtcaacaaaacacccctaccaagkgctgacaagaaaaaaagttaggtatcacctttcttctctgcagatggcctgagatgggttaatttgaaagaatgcttccaaagctgaggtgacccctgagaacagcataatccactgctgtctcccgcattcagtttctcagtctgtgctcttttaattttgtgggaagggaagccagccctttaaaccaatcttcagcatgatggcagaaccaaggagtgtggacaggtggcacggtgtctgactttgttcccgcagccacttgtgctttctctggatcttctctgccctagggatagcaccactattgaaaacatat

SEQ ID NO: 301484 - DNA, 593 bp, Homo sapiens
gagtacaaatatgtgctttgagacagcattaaagaaagagcaccttgtaaaaattcaatgccaagagacaagatattcttgattctgaagtcttgttcttttatacagcaatgtaattaataagaagaaaaggaggacatagatgtggagcctattttaataaaaaattgtctgtagattttcatgataacatttaaaaatctactatatttagttagttacaagaaactaggttgtgggaacatatttggtcaacaaaacacccctaccaagggctgacaagaaaaaaagttaggtatcacctttcttctctgcagatggcctgagatgggttaatttgaaagaatgcttccaaagctgaggtgacccctgagaacagcataatccactgctgtctcccrcattcagtttctcagtctgtgctcttttaattttgtgggaagggaagccagccctttaaaccaatcttcagcatgatggcagaaccaaggagtgtggacaggtggcacggtgtctgactttgttcccgcagccacttgtgctttctctggatcttctctgccctagggatagcaccactattgaaaacatat

SEQ ID NO: 301485 - DNA, 602 bp, Homo sapiens
ttcatgtcaaaagatttaaaaaacctaagtggcagtgtcacaatttcttctttttagtttacatggtttcttaaacgcctacaattattttaaaggaagccttgaatctaggaaaaattgagacatatggaataaattactaacccatttctccttgaaatccattagatgcttgatgatttctcacatatatttctgaattgaaaagctagctgtgaattatttttatatgcatatccttaggtaatattttgtttttaacagtgaattgaaggtttaaagattaaattattctatccagagaataaaaagcaattatttcacaaggagaacatgtgtacgttgacacgacattttaaagtctagaatttaaaaaaggacccatatacttttgtgtcaaatagaatatgtttgtatcagtctgtctacagttttacacctgtcaaaatgtacttgaactacaacaacaaccttgaacaattttgaaattkatgattcctctgaaactgattaaaagaattatggtagagtgaaattctgattgacataatttgggagagaaattattccttggacatcaacctctgccaagatagtttata

SEQ ID NO: 301486 - DNA, 577 bp, Homo sapiens
tttgtgtcaaatagaatatgtttgtatcagtctgtctacagttttacacctgtcaaaatgtacttgaactacaacaacaaccttgaacaattttgaaattgatgattcctctgaaactgattaaaagaattatggtagagtgaaattctgattgacataatttgggagagaaattattccttggacatcaacctctgccaagatagtttataatgacattgaggctttttgatttacacaatttgttatatraaaaatactaagacgatggcagataatacacagactttaattaaaattgtactacaattaaatgtctaaataaattagaagggtacatggtacatctaattgtatgtttatatattttatttgtgcatttttttcctagggtttcttttgctttagtttgtaaaacgttcttatgtttataataatgtagcatatactaaataaagaaaaatcaggaaatagaaaatgaagaagaaaacattagctattgtcaaccaaacaaaaattgtgcaatctctaagcacatgaactatgtaatatttgtacagcatagtacaatgtttat

SEQ ID NO: 301487 - DNA, 498 bp, Homo sapiens
tgtcattgcactgaggaaccagataaaaatcaaaaaaggttaagtagctggaatgtgtagtagaagagaacgtttacagaaaaaggaaccaagaatcagcctaaggattctcccaagtccctaagccaaatgtacataggatgaaattctaaggagctcagcaaaagactctaccagggagttggaagaagaacacttccctggcatcacatgacaggaagacacgttagttgtgaccagccagagatgggaatcccctctgtacctccaggatattcagtaaagacmactggaggttcatgccctagtgacagtgctcatttagctccaaattacagatggctctagactaactcaacaaattttaaagaggagatttaaagcaacaacagaaaaatactcatcctgaagttactgaactgcctgccacaacattgttcaaaggtagccaatcaaatctagatattcaatagcataacaccaaaataccccccccaa

SEQ ID NO: 301488 - DNA, 498 bp, Homo sapiens
tgtcattgcactgaggaaccagataaaaatcaaaaaaggttaagtagctggaatgtgtagtagaagagaacgtttacagaaaaaggaaccaagaatcagcctaaggattctcccaagtccctaagccaaatgtacataggatgaaattctaaggagctcagcaaaagactctaccagggagttggaagaagaacacttccctggcatcacatgacaggaagacacgttagttgtgaccagccagagatgggaatcccctctgtacctccaggatattcagtaaagacaactggaggttcatgccctagtgacagtgctcatttagctccaaattacagatggctctagactaactcaacaaaktttaaagaggagatttaaagcaacaacagaaaaatactcatcctgaagttactgaactgcctgccacaacattgttcaaaggtagccaatcaaatctagatattcaatagcataacaccaaaataccccccccaa

SEQ ID NO: 301489 - DNA, 493 bp, Homo sapiens
atcaccagttcacccatctcacccggcmagctgggccctagtttggcgacaggcatcttccacccacctgggaggcagggttcaatactctgcctcagaccttgtttccttcttctgccatctgcttaggcagccagaaggggttgtccagccagcacctgggctttggcgctcaagaaggtggaggaagtttcaggcacctggctcctcaggtgtctgccatccaggtgctcttcaggcctgcccagaagagctctcttgatccagctagaactggccagaactgactcactcaggaatgtgtagactttgacatcaggggctgctttaatttgcacaatttccaaatacctcttttttcttctttttctgatgagtcatctccctagacttgcattttaaagagatagatagttatcagattccagagaagacatggtagaacatttatatgtcaaagacacagagctgagactttagttttagatactat

SEQ ID NO: 301490 - DNA, 493 bp, Homo sapiens
atcaccagttcacccatctcacccggcaagctgggcyctagtttggcgacaggcatcttccacccacctgggaggcagggttcaatactctgcctcagaccttgtttccttcttctgccatctgcttaggcagccagaaggggttgtccagccagcacctgggctttggcgctcaagaaggtggaggaagtttcaggcacctggctcctcaggtgtctgccatccaggtgctcttcaggcctgcccagaagagctctcttgatccagctagaactggccagaactgactcactcaggaatgtgtagactttgacatcaggggctgctttaatttgcacaatttccaaatacctcttttttcttctttttctgatgagtcatctccctagacttgcattttaaagagatagatagttatcagattccagagaagacatggtagaacatttatatgtcaaagacacagagctgagactttagttttagatactat

SEQ ID NO: 301491 - DNA, 566 bp, Homo sapiens
atttatatgtcaaagacacagagctgagactttagttttagatactataatttgcctaaaccaaaaaggaaggtgtaggtaaagttctagtcaagacaggatggccaggaaaaacaccttaaaccaagggacggcttgctytgctgatttaagccaatggcttctttatcataagacttcccagtgatttagtcctccctctcttccagtgcacagagacatacccctccttacaaataaaaatgttctttatagatgtaaatttattttacaaaaatgtttcaaaataaccagatgaaaatcatccttatgccagaaagacttgttttttttttttttttcattactagaaatgaaacagtaagtatttgttgtattgacatacttaggcttagacctatgtttaacaagaaagcctaataatagcactgtggttagactgtagcctatttttccaaaccatcattttattattaaggaaacgaaggatcaaatacctttcattcatccgatatgatcctttaaaacacattccactaataagtcccatttggaacagctgaaaa

SEQ ID NO: 301492 - DNA, 566 bp, Homo sapiens
atttatatgtcaaagacacagagctgagactttagttttagatactataatttgcctaaaccaaaaaggaaggtgtaggtaaagttctagtcaagacaggatggccaggaaaaacaccttaaaccaagggacggcttgctctgctgatttaagccaatggcttctttatcataagacttcccagtgatttagtcctccctctcttccagtgcacagagacatacccctccttacaaataaaaatgttctttatagatgtaaatttattttacaaaaatgtttcaaaataaccagatgaaaatcatccttatgccagaaagacttgttttttttttttttttcattactagaaatgaaacagtaagtatttgttgtattgacatacttaggcttagacctatgtttaacaagaaagcctaataatagcactgtggttagactgtagcctatttttccaaaccatcattttattattaaggaaacgaaggatcaaatacctttcattcatcygatatgatcctttaaaacacattccactaataagtcccatttggaacagctgaaaa

SEQ ID NO: 301493 - DNA, 536 bp, Homo sapiens
agtagttgcccaatcagagcccattatttgtaagtcatcagacccctccgtgaccttaaaactccactctgacctaattattgcaaacctatatacaaaaaagtgaaaggattaattttcattcatcaacctctcaatcccagattttcaaagaaaaaacctatgtaaggaatacttgccaaaaccagrcaggaaaattagagcctgcatacttaagagtcaaatttgttccactacagccaggtggcatacaattacatcatttggttcttcatacactctagaactgactaggacagagtttagcatagaaaaactgtaagaaataggttctgaaacatagaaattgcaaagtttaaaaggctatgaaaaaaactaatgcaaatgagagactcccctccctttgttttaaagaaatagacccatcagagaaatgcaaatcaaaaccacaatgagataccatctcacaccagttagaatggcgatcattaaaaagtcaggaaacaacaggtgctggagaggatgtggagaaatag

SEQ ID NO: 301494 - DNA, 536 bp, Homo sapiens
agtagttgcccaatcagagcccattatttgtaagtcatcagacccctccgtgaccttaaaactccactctgacctaattattgcaaacctatatacaaaaaagtgaaaggattaattttcattcatcaacctctcaatcccagattttcaaagaaaaaacctatgtaaggaatacttgccaaaaccagacaggaaaattagagcctgcatacttaagagtcaaatttgttccactacagccaggtggcatacaattacatcatttggttcttcatacactctagaactgactaggacagagtttagcatagaaaaactgtaagaaataggttctgaaacatagaaattgcaaagtttaaaaggctatgaaaaaaactaatgcaaatgagagactcccctccctttgttttaaagaaatagacccatcagagaartgcaaatcaaaaccacaatgagataccatctcacaccagttagaatggcgatcattaaaaagtcaggaaacaacaggtgctggagaggatgtggagaaatag

SEQ ID NO: 301495 - DNA, 561 bp, Homo sapiens
gctaacaaactacgaatcatgtaaactaagccaaagtagaatagacataaaagtcctgaacacttcaacttcctatccttcaagaagtatacctcgcaaagctcatttgagagaggaaragctttcctccaccctctgttttacagcgctgaggcttctcatcacatttctatgacttgtagcttaaatccatgttacatggtaactggcattgttagtgcttctcttttaacacagtaggaattaatcaatttggtggtgtatttaattaattctatcactagaggattgtaaaatttacatatatgaatacctcactttagaggccacttaatttttttccaaggggatatttgactacatttcacttgtgtcttatttaatgattttataatttaaaccctaaattataaatctagaatttagaaagtatatttccccactggattacatttttggaaatattattttatatgtgcacaaatattacaaaatcactgtagacacctgaaaactatattatcttttaaaggcaatatttacattaaactggtataacaa

SEQ ID NO: 301496 - DNA, 500 bp, Homo sapiens
taggctaacaaactacgaatcatgtaaactaagccaaagtagaatagacataaaagtcctgaacacttcaacttcctatccttcaagaagtatacctcgcaaagctcatttgagagaggaaaagctttcctccaccctctgttttacagcgctgaggcttctcatcacatttctatgacttgtagcttaaatccatgttacatggtaactggcattgttagtgcttctcttttaacacagtaggaattaatcaatttggtggtgtatttaattaattctatcactagaggattgtaaaatttacatatatgaatayctcactttagaggccacttaatttttttccaaggggatatttgactacatttcacttgtgtcttatttaatgattttataatttaaaccctaaattataaatctagaatttagaaagtatatttccccactggattacatttttggaaatattattttatatgtgcacaaatattacaaaatca

SEQ ID NO: 301497 - DNA, 659 bp, Homo sapiens
tacatttcacttgtgtcttatttaatgattttataatttaaaccctaaattataaatctagaatttagaaagtatatttccccactggattacatttttggaaatattattttatatgtgcacaaatattacaaaatcactgtagacacctgaaaactatattatcttttaaaggcaatatttacattaaactggtataacaaaattgtttggtgcatttttttccagtacattttgtatatattacatgtttaacctttttttattcagcaaataatttttgagtatctactaagtgctaggttctgcattactaactgaatttaaagagtgaaataacagacatggtctcagacaataaaaattaacattaggtcacctatttatatattktaaaatggtaattatgaaaactttttgagatttttaactagataacattataataatacacttgatgttgttaatatttgccagtgagcaaaaaagaaaataaaaagatggttttattcaatatacactttaaaattgcagaaaatagtcaagtttctctgctttgcggttgaatgtctatgtgtttttctccgcaacttgccttttgtggagtgaaacaattattcttccagcacaataaaggcagaagagtaacaataaatcta

SEQ ID NO: 301498 - DNA, 552 bp, Homo sapiens
acccagggataatgatatgactatcaaaaattaaaaattaaaggacattttgagtattawaagaatgagaacttattacccaatgaacaggggttaattcattatgctccatatccattgaattaaaagacaggcccattacctggataatttgaaagtttaattttatttaaaagtcttgtttcattcatcaagctaaaggattagctcccagaaatattctagaattgcatatccccaactctgtaggaagtatagaaagaatgttataagggccaccatctaaacattattatgtaaataatttagtaccattccatttgcctttgtagatttaaaactgtaaatgactgtctcatattaggaaacatcacttttcaaaacccagataaacatagtacattgcaagagaataattattttctttattaaaaaagaaatactggatgctaagtccaaaagacataaattattttatactaataactactaatattttattcattaaaatataaaggtcaaagatttcaaaatgatctttaaatgattaat

SEQ ID NO: 301499 - DNA, 552 bp, Homo sapiens
acccagggataatgatatgactatcaaaaattaaaaattaaaggacattttgagtattaaaagaatgagaacttattacccaatgaacaggggttaattcattatgctccatatccattgaattaaaagacaggcccattacctggataatttgaaagtttaattttatttaaaagtcttgtttcattcatcaagctaaaggattagctcccagaaatattctagrattgcatatccccaactctgtaggaagtatagaaagaatgttataagggccaccatctaaacattattatgtaaataatttagtaccattccatttgcctttgtagatttaaaactgtaaatgactgtctcatattaggaaacatcacttttcaaaacccagataaacatagtacattgcaagagaataattattttctttattaaaaaagaaatactggatgctaagtccaaaagacataaattattttatactaataactactaatattttattcattaaaatataaaggtcaaagatttcaaaatgatctttaaatgattaat

SEQ ID NO: 301500 - DNA, 552 bp, Homo sapiens
acccagggataatgatatgactatcaaaaattaaaaattaaaggacattttgagtattaaaagaatgagaacttattacccaatgaacaggggttaattcattatgctccatatccattgaattaaaagacaggcccattacctggataatttgaaagtttaattttatttaaaagtcttgtttcattcatcaagctaaaggattagctcccagaaatattctagaattgcatatccccaactctgtaggaagtatagaaagaatgttataagggccaccatctaaacattattatgtaaataatttagtaccattccatttgcctttgtagatttaaaactgtaaatgrctgtctcatattaggaaacatcacttttcaaaacccagataaacatagtacattgcaagagaataattattttctttattaaaaaagaaatactggatgctaagtccaaaagacataaattattttatactaataactactaatattttattcattaaaatataaaggtcaaagatttcaaaatgatctttaaatgattaat

SEQ ID NO: 301501 - DNA, 552 bp, Homo sapiens
acccagggataatgatatgactatcaaaaattaaaaattaaaggacattttgagtattaaaagaatgagaacttattacccaatgaacaggggttaattcattatgctccatatccattgaattaaaagacaggcccattacctggataatttgaaagtttaattttatttaaaagtcttgtttcattcatcaagctaaaggattagctcccagaaatattctagaattgcatatccccaactctgtaggaagtatagaaagaatgttataagggccaccatctaaacattattatgtaaataatttagtaccattccatttgcctttgtagatttaaaactgtaaatgactktctcatattaggaaacatcacttttcaaaacccagataaacatagtacattgcaagagaataattattttctttattaaaaaagaaatactggatgctaagtccaaaagacataaattattttatactaataactactaatattttattcattaaaatataaaggtcaaagatttcaaaatgatctttaaatgattaat

SEQ ID NO: 301502 - DNA, 513 bp, Homo sapiens
ttgattttttttattttagaaaactaataaattgactcttcttggtactgactcgggttttatagaagaaaaagtaattaaattatgtatatttacctttacctcattttttctcttttaaatttactttaattgacatataataaatgtacatgttatggggtacagagtgatattttgatatatttatgcaatacgtaaagatcaagtcagagtcattatcatatccattacctaaatcatgtattatttctttgcagygagaatattcaaaatcttttattttagttatttgaaaacacacaataaattcccgttaactacagtcacccaacagtgctgtagagaactagaacttcttccttctctccagctgtaattttgtatgtattaaccacatttttcttatactcttctttctcctactctttccaggatatggtaaccaaaactctactatctacttctacgagattaaaaattttagcttccatacataagtgagaacacgta

SEQ ID NO: 301503 - DNA, 436 bp, Homo sapiens
cacctaaaaatcctaatttaagaggtaataacattttttatttgatatacaatttatcaacacaataaaaatctaacaattatcatgtgcagagtgtgaaaatctcatcagatyaaggaacacaaagacatctttttcatatttcgaatgtaaaactgttttggaaactgttatttttagaaacagttaaaaacattttttcattagtttttcatgtaaaattgtgacaaccagcatgaaataactgtcatcacagaagcatggtatattcgattccaaaacatattctttgtaagttttaatatatttatgtattatttatacttagattgtaacccataatgtacagatattatttttccttcaactcttaagaatattcttaaataataaaattaaaattaatgaattataatttttgttgcttgggaaaaag

SEQ ID NO: 301504 - DNA, 573 bp, Homo sapiens
tttttgttgcttgggaaaaagaatagacacacacgtgacagtgcatcacttcaccccatcatttcatctcatcatttcatctcatcattttatctcatttcatctcatcccatctcatctcatcatttcatatcatctcatcatttcatctcatcatttcaccaaatctcatctcatctcatttccatttcattttcattatttcatttcatcatttcatttcactatttcatttcatttcatctaatttcatttatttcattatgtcatttcatataatctcatttcatctcatctcatatttttgatatcatttttcatatcatttttcatctcatttcatctcaattcatctcatcatttcatctcctcatctcatcatttcctcctttcattacaacatttcatctcatttcttctcatctcatttcaatttcattatttcatctcatttcattatttcacctaatttcattatttcatctcatctcatctcagttcatctgatctcatttcatctcagcatttcatctcatcakttttcatctcatcatttaatctcatttcatttca

SEQ ID NO: 301505 - DNA, 656 bp, Homo sapiens
tttcacctaatttcattatttcatctcatctcatctcagttcatctgatctcatttcatctcagcatttcatctcatcatttttcatctcatcatttaatctcatttcatttcatttgatctcatcatttcagctcatttcatgtcacatctattcatttcatcatttcatttcaacatttcaccatttcatctcatcatttcatctcatctttcaatttcatttcaatatcatttcatcatttcttttcatttcatctcatttcattatttcattatttcatttcatttcawttcatctcatcatttcatctcatcatttttcatctcatcatttttcatctcatcatctcatctcatcatttcatctcatttcttctcatcatttcatctcatcattttatctcatttcatctcatctcatttcaatttcattatttcatttcatttcacttcatttcatttcatctcattttatctcatctcatttcatctcatcatttcttctcgtctcatctcatcatttcatcatttcatctcgtttcatctcatttcatctcatctcacctcatatcatcatttcatctcatcctttcatttcatctcatcgtttcatctcctcatttcatctcatctcacctcagcatttcatttcac

SEQ ID NO: 301506 - DNA, 656 bp, Homo sapiens
tttcacctaatttcattatttcatctcatctcatctcagttcatctgatctcatttcatctcagcatttcatctcatcatttttcatctcatcatttaatctcatttcatttcatttgatctcatcatttcagctcatttcatgtcacatctattcatttcatcatttcatttcaacatttcaccatttcatctcatcatttcatctcatctttcaatttcatttcaatatcatttcatcatttcttttcatttcatctcatttcattatttcattatttcatttcatttcaaytcatctcatcatttcatctcatcatttttcatctcatcatttttcatctcatcatctcatctcatcatttcatctcatttcttctcatcatttcatctcatcattttatctcatttcatctcatctcatttcaatttcattatttcatttcatttcacttcatttcatttcatctcattttatctcatctcatttcatctcatcatttcttctcgtctcatctcatcatttcatcatttcatctcgtttcatctcatttcatctcatctcacctcatatcatcatttcatctcatcctttcatttcatctcatcgtttcatctcctcatttcatctcatctcacctcagcatttcatttcac

SEQ ID NO: 301507 - DNA, 543 bp, Homo sapiens
ggagcaggaccaggttcatctaagaaccagggacaaagccaggcccagagctgggccaggacaggtacctggcagggctagggtctgagacagggccacggcaggaccagggccacaaccaggtctgtgctatggccaggtccaacacagtgcccaggtaaggctagggtgaaggccaaggtagggccagggcagggtcaaagccaggctagggccaaggcagggccagggccggcaaggcagggccagaaaagcatagggccagggcagggcggggccaggacagtgccaagacctgggcagggccagggccagggccatggccacggcctggggaagaccaggttcggggcaggagcaaaacaatggcaaggacagtgcaggttcttggcacagccagggtccaggacagtgtcagggcagggccaaggcagggtctgggccatggtaagaycagcaacagggctggggctaggccagtgacaggaccagagtcagggcaagggccagagcagtgcaaggccagggtagggccaggcattt

SEQ ID NO: 301508 - DNA, 582 bp, Homo sapiens
actcttaatattttaaacaaatagttcactcttccatttaagggatatcagttccttgtataaaatgactggatatgtataaagcaattatgttgtcatgtgcctttaaccagctttagtaattactataatctcatatttatgatagttttgttaggtgacaggaccaaatgaaaatattttatgttttcccatcactttagattttatcattgtgtaaattaytgggtttttagcattttctaatgtgaagttttaatcatttttaagtatacatattttttttctgtaccatttaaataaaatatttttataactttcttgtgagttttgttcatgcaaactttggaatgacttctggtttttagctattagcactttgaattaaccatagaaataacaagggctaactctgttcttcaaagactttataaagacagtatttgcactttcaaatgcaaatatatctacattaaatctaaacagcataagcattgtgacagaatgtacctcatgttgattgttttctctgtaaggtgacttctagtaatgatttgacttaatcaccacttgtgtctggtt

SEQ ID NO: 301509 - DNA, 605 bp, Homo sapiens
ttatatttcacttgcatattcttaaattattaaaattttcagaagtcagtgatacagaaatactattttgcaatgttaatctgtttgagtctttggagaaagtggtttcattgtaggtacatgatgcactcttaatattttaaacaaatagttcactcttccatttaagggatatcagttccttgtataaaatgactggatatgtataaagcaattatgttgtcatgtgcctttaaccagctttagtaattactataatctcatatttatgatagttttgttaggtgacaggaccaaatgaaaatattttatgttttcccatcactttagattttatcattgtgtaaattattgggtttttagcatttyctaatgtgaagttttaatcatttttaagtatacatattttttttctgtaccatttaaataaaatatttttataactttcttgtgagttttgttcatgcaaactttggaatgacttctggtttttagctattagcactttgaattaaccatagaaataacaagggctaactctgttcttcaaagactttataaagacagtatttgcactttcaaatgcaaatatatctacattaaat

SEQ ID NO: 301510 - DNA, 611 bp, Homo sapiens
caatgcaaatattccaaaatccaaaacacttctggtcccaagcatttcagagaaggggtagtcaacctgtaatcttttttcagctgtgaagtgggaacaatatctgtcttgtagggttgtgggtaatagtaataatgtttgtaaaacaccaattacagtgcctgacacagtaggtgtccactcaataaatggtaatggagagggaaagaaagggaaagsagaatctaggatcaggaatatcacatcctgtcatgatgtttgcaaaggggaaagtcaggcatgatgagtagacagaagtaaacccagtttgttgtcatgggtatgtgaaggtgtggcgagagtgtcatttaaaatagggagcaaggccaggcaaaggccacaatcaggcagccgaatcaggcagtgatgaatcagacagtgatgtgagggtccggcacaaccgaggcagcagcccgggaagggagggcatttggatcacactccctggagggagcttgggtggagagtaccccagtgtcagccttcacacattttatatcttttttttttcttgaagagtatgtttacaacctggatagaaatctaaggctggcatgtgtttaaaacaatta

SEQ ID NO: 301511 - DNA, 600 bp, Homo sapiens
cctgtaatcttttttcagctgtgaagtgggaacaatatctgtcttgtagggttgtgggtaatagtaataatgtttgtaaaacaccaattacagtgcctgacacagtaggtgtccactcaataaatggtaatggagagggaaagaaagggaaaggagaatctaggatcaggaatatcacatccygtcatgatgtttgcaaaggggaaagtcaggcatgatgagtagacagaagtaaacccagtttgttgtcatgggtatgtgaaggtgtggcgagagtgtcatttaaaatagggagcaaggccaggcaaaggccacaatcaggcagccgaatcaggcagtgatgaatcagacagtgatgtgagggtccggcacaaccgaggcagcagcccgggaagggagggcatttggatcacactccctggagggagcttgggtggagagtaccccagtgtcagccttcacacattttatatcttttttttttcttgaagagtatgtttacaacctggatagaaatctaaggctggcatgtgtttaaaacaattagttaaaacccagtttcccaagagctaataactggccaattaggatggtatgaag

SEQ ID NO: 301512 - DNA, 600 bp, Homo sapiens
cctgtaatcttttttcagctgtgaagtgggaacaatatctgtcttgtagggttgtgggtaatagtaataatgtttgtaaaacaccaattacagtgcctgacacagtaggtgtccactcaataaatggtaatggagagggaaagaaagggaaaggagaatctaggatcaggaatatcacatcctgtcatgatgtttgcaaaggggaaagtcaggcatgatgagtagacagaagtaaacccagtttgttgtcatgggtatgtgaaggtgtggcgagagtgtcatttaaaatagggagcaaggccaggcaaaggccacaatcaggcagccgaatcaggcagtgatgaatcagrcagtgatgtgagggtccggcacaaccgaggcagcagcccgggaagggagggcatttggatcacactccctggagggagcttgggtggagagtaccccagtgtcagccttcacacattttatatcttttttttttcttgaagagtatgtttacaacctggatagaaatctaaggctggcatgtgtttaaaacaattagttaaaacccagtttcccaagagctaataactggccaattaggatggtatgaag

SEQ ID NO: 301513 - DNA, 443 bp, Homo sapiens
acatctcccaacccccaaattccacctgctgcccagcccctggtagccactattctactctctacctatatgacctcagcttttwtagatctacatataaatgagatcatgtgacatttgtctttctgtgcttggcttatgtcacttaacatagtatcttccaggttcatagccatactgttacaaatgtcaggatttccttttttttttcttttttgagacagggtctggctctgtcaccaaggctggagtgcagtggcacaatctcagctcactgaaacctggacctcccaggctcaaatgatcctcctacctcagcctcccaagtagctgggactacaggtgcacaccactgggtttagctaatttttttttttgagagagagtttcactcttgttgcccaggctggagtgcaatggtgtgatcttgtctcacccacaac

SEQ ID NO: 301514 - DNA, 443 bp, Homo sapiens
acatctcccaacccccaaattccacctgctgcccagcccctggtagccactattctactctctacctatatgacctcagcttttatagatctacatataaatgagatcatgtgacatttgtctttctgtgcttggcttatgtcacttaacatagtatcttccaggttcatakccatactgttacaaatgtcaggatttccttttttttttcttttttgagacagggtctggctctgtcaccaaggctggagtgcagtggcacaatctcagctcactgaaacctggacctcccaggctcaaatgatcctcctacctcagcctcccaagtagctgggactacaggtgcacaccactgggtttagctaatttttttttttgagagagagtttcactcttgttgcccaggctggagtgcaatggtgtgatcttgtctcacccacaac

SEQ ID NO: 301515 - DNA, 596 bp, Homo sapiens
tccttttttttttcttttttgagacagggtctggctctgtcaccaaggctggagtgcagtggcacaatctcagctcactgaaacctggacctcccaggctcaaatgatcctcctacctcagcctcccaagtagctgggactacaggtgcacaccactgggtttagctaatttttttttttgagagagagtttcactcttgttgcccaggctggagtgcaatggtgtgatcttgtctcacccacaacctctgcctcctgggttcaagtgattatcctgcctcagcctcctgagtagttgggattacaggcatttttagtagagaaggggtttctccatgttggtcaggctggtctcaaattcctgacctcaggtgatccacctgcctcagtctcccaaagtgctgggattacaggcatgagccaccacactcagmctttttttttttttttttttgtagagttgaggttttgccatgttgcccagttggtcttgaactcctgggcataagcagtccacccaccatggcctcccaaagtgttgggtttacaagcgtgagccatcgtgcccggccatttccttctttttaaggttgaat

SEQ ID NO: 301516 - DNA, 596 bp, Homo sapiens
tccttttttttttcttttttgagacagggtctggctctgtcaccaaggctggagtgcagtggcacaatctcagctcactgaaacctggacctcccaggctcaaatgatcctcctacctcagcctcccaagtagctgggactacaggtgcacaccactgggtttagctaatttttttttttgagagagagtttcactcttgttgcccaggctggagtgcaatggtgtgatcttgtctcacccacaacctctgcctcctgggttcaagtgattatcctgcctcagcctcctgagtagttgggattacaggcatttttagtagagaaggggtttctccatgttggtcaggctggtctcaaattcctgacctcaggtgatccacctgcctcagtctcccaaagtgctgggattacaggcatgagccaccacactcagactttttttttttttttttttgtagagttgaggttttgccatgttgcccagttggtcttgaactcctgggcataagcagtccacccaccatggcctcccaaagtgttgggtttacaagcgtgagccatygtgcccggccatttccttctttttaaggttgaat

SEQ ID NO: 301517 - DNA, 564 bp, Homo sapiens
tccttggttaaagtcctttgtcagacaagttatgtggatgacagttttctctgttctctgttcaacaatcacctcctttcctgcccatgtaccttcaacctcagtccccttttctgctttacttttcttcatgcacttagcacttcctgacattctttatgtgtttactatttaccggtttattttttgccttccccactagatgtgaaactcctcaagggcagatactctattttattgacctttatatcttcagtgcctgggacaatgcctggcccatggttgctgctcaataaatagctgttgaaaaaattacattttgtatacttcaaacatcattctgccttttgccctgacacatgggcgacatcttagctgagaataaggtttttgaggtgcagtcctttccttgtggcacattcctccactgtcttctggtttcccaggctgcacagaggaagtctgttgccagctcatctctctgatattttgtgcacacccyaatttatgcaatattatactcgcatatttttgtttctacagcaatctcctatgtctgtcttt

SEQ ID NO: 301518 - DNA, 518 bp, Homo sapiens
cccgccttggcctcccaaagtgctggaattacaggcatgagccaccatgcctgggctagaatttattttattaatatatttttaattatggtaaaacatgcatttatatacataaaatttaccaacttagcagttttcaagtgcacagctcagtggtgttaagcacatatgcactgttgtgcaaccaacctccagaactttttcatctcgcaaaactgaaactctgtcctcattaaayactaactcttcattcttccctccctctagcacctggcaaccaccattctatttctgtctatgaatttgcttacgtttgatacctcatataatgaaatcctacagtattgtcctttggtggttgagtttattttacttagcataatgtcctcatggctcatccatactgtatcgtgtgtcagaatttccttcctttttaagctgaataatattctgttgtatgtctatacctcattgtgtttatccatccatctgttgatggatgttgggttgcttccacc

SEQ ID NO: 301519 - DNA, 653 bp, Homo sapiens
ttggttttatcacatattgtagaacatgtcatttcagttttgaacatcttgagttaaattgtcctaacatatcttatgaatttgattttcttccctgggaagctaatatttcaaaaactgaaagagtatatagatttccaacttgtatccaatttataaaactatctctaggctgctgatttcaggaggaggctcatgaatattctcttttcagagaatatatcaggagttaacaacagcttcaatatttgtggacgaccagttaactaagccacctcttaagtgtatttagatgggaaatcttagctgaagrtattcaataatgaaccaacagtgactaaaaaaatcaacatttaagtatatttcattgtaattaatttgaattgaagtagcagctagtatttactacattgaacaatgcaaataagaggaaaaaattaataactatctctaataccacatgccaaaatcctcatcaatttattctagctaaaggagttgatcagaagcagcagttgaaagcaccaactaaaccagctggggttggttcactgtcgttctctcagaaccatctcttctctgaacaaaacaagtacaggagctcattgtgaatctgcattctccttgcctattttaaggttttgatgttgaca

SEQ ID NO: 301520 - DNA, 653 bp, Homo sapiens
ttggttttatcacatattgtagaacatgtcatttcagttttgaacatcttgagttaaattgtcctaacatatcttatgaatttgattttcttccctgggaagctaatatttcaaaaactgaaagagtatatagatttccaacttgtatccaatttataaaactatctctaggctgctgatttcaggaggaggctcatgaatattctcttttcagagaatatatcaggagttaacaacagcttcaatatttgtggacgaccagttaactaagccacctcttaagtgtatttagatgggaaatcttagctgaaggtattcaataatgaaccaacagtgactaaaaaawtcaacatttaagtatatttcattgtaattaatttgaattgaagtagcagctagtatttactacattgaacaatgcaaataagaggaaaaaattaataactatctctaataccacatgccaaaatcctcatcaatttattctagctaaaggagttgatcagaagcagcagttgaaagcaccaactaaaccagctggggttggttcactgtcgttctctcagaaccatctcttctctgaacaaaacaagtacaggagctcattgtgaatctgcattctccttgcctattttaaggttttgatgttgaca

SEQ ID NO: 301521 - DNA, 653 bp, Homo sapiens
ttggttttatcacatattgtagaacatgtcatttcagttttgaacatcttgagttaaattgtcctaacatatcttatgaatttgattttcttccctgggaagctaatatttcaaaaactgaaagagtatatagatttccaacttgtatccaatttataaaactatctctaggctgctgatttcaggaggaggctcatgaatattctcttttcagagaatatatcaggagttaacaacagcttcaatatttgtggacgaccagttaactaagccacctcttaagtgtatttagatgggaaatcttagctgaaggtattcaataatgaaccaacagtgactaaaaaaatcaacatttaagtatatttcattgtaattaatttgaattgaagtagcagctagtatttactacattgaacaatgcaaataagaggaaaaaattaataactatctctaataccacawgccaaaatcctcatcaatttattctagctaaaggagttgatcagaagcagcagttgaaagcaccaactaaaccagctggggttggttcactgtcgttctctcagaaccatctcttctctgaacaaaacaagtacaggagctcattgtgaatctgcattctccttgcctattttaaggttttgatgttgaca

SEQ ID NO: 301522 - DNA, 653 bp, Homo sapiens
ttggttttatcacatattgtagaacatgtcatttcagttttgaacatcttgagttaaattgtcctaacatatcttatgaatttgattttcttccctgggaagctaatatttcaaaaactgaaagagtatatagatttccaacttgtatccaatttataaaactatctctaggctgctgatttcaggaggaggctcatgaatattctcttttcagagaatatatcaggagttaacaacagcttcaatatttgtggacgaccagttaactaagccacctcttaagtgtatttagatgggaaatcttagctgaaggtattcaataatgaaccaacagtgactaaaaaaatcaacatttaagtatatttcattgtaattaatttgaattgaagtagcagctagtatttactacattgaacaatgcaaataagaggaaaaaattaataactatctctaataccacatgccaaaatcctcatcaatttattctagctaaaggagttgatcagaagcagcagttgaaagcaccaactaaaccagctggggttggttcactgtcgttctctcagaaccatctcttctctgaacaaaacaagtacaggagytcattgtgaatctgcattctccttgcctattttaaggttttgatgttgaca

SEQ ID NO: 301523 - DNA, 680 bp, Homo sapiens
tctccttgcctattttaaggttttgatgttgacactaatttgtgaaatccctcctgtggtgtgatatttcgttttccttgctttstgttaggacaagaatgcttcagctcttaatttaaaattatgtttctccctcctaggttgagtgaacttagaatgcattctctgacatatccaagtttttgttaatatgaatttcaggaaaaaagcatacttaattagctaagacttcttattctaggcttgaccctatgttcgacatcttttgaatttctagttgcatgggctgctctctgacactggttagtgacctggaagctgtattaatgttaggggaggtggtgtatgagcattagaggtatccttgcaaggaaagacttgtcttatctcaatacgtctttttttttttgcacacaagaaagtcaatgtttgagtcttctaaaatcttcctatttccaagttgcagagtaccattgattcctaaacaaaaacctaatttttgactcagagacgtggcgaggtagtgaatcaccattataatttaacaatcttcaagataaaattatctctgatatttagattttgcccaattattaagatatttgggtgttttgttaagaatggaagactcttgtctcttgagcagagactataaaggcctcagatgatcatttttaatt

SEQ ID NO: 301524 - DNA, 680 bp, Homo sapiens
tctccttgcctattttaaggttttgatgttgacactaatttgtgaaatccctcctgtggtgtgatatttcgttttccttgctttctgttaggacaagaatgcttcagctcttaatttaaaattatgtttctccctcctaggttgagtgaacttagaatgcattctctgacatrtccaagtttttgttaatatgaatttcaggaaaaaagcatacttaattagctaagacttcttattctaggcttgaccctatgttcgacatcttttgaatttctagttgcatgggctgctctctgacactggttagtgacctggaagctgtattaatgttaggggaggtggtgtatgagcattagaggtatccttgcaaggaaagacttgtcttatctcaatacgtctttttttttttgcacacaagaaagtcaatgtttgagtcttctaaaatcttcctatttccaagttgcagagtaccattgattcctaaacaaaaacctaatttttgactcagagacgtggcgaggtagtgaatcaccattataatttaacaatcttcaagataaaattatctctgatatttagattttgcccaattattaagatatttgggtgttttgttaagaatggaagactcttgtctcttgagcagagactataaaggcctcagatgatcatttttaatt

SEQ ID NO: 301525 - DNA, 533 bp, Homo sapiens
gtgtgatatttcgttttccttgctttctgttaggacaagaatgcttcagctcttaatttaaaattatgtttctccctcctaggttgagtgaacttagaatgcattctctgacatatccaagtttttgttaatatgaatttcaggaaaaaagcatacttaattagctaagacttcttattctaggcttgaccctatgttcgacatcttttgaatttctagttgcatgggctgctctctgacactggttagtgacctggaagctgtattaatgttaggggaggtggtgtatgagcattagaggtatccttgcaaggaaagacttgtcttatctcaatacgtctttttttttttgcacacaagaaagtcaatgtttgagtcttctaaaatcttcctatttccaagttgcagagtaccattgattcytaaacaaaaacctaatttttgactcagagacgtggcgaggtagtgaatcaccattataatttaacaatcttcaagataaaattatctctgatatttagattttgcccaat

SEQ ID NO: 301526 - DNA, 533 bp, Homo sapiens
gtgtgatatttcgttttccttgctttctgttaggacaagaatgcttcagctcttaatttaaaattatgtttctccctcctaggttgagtgaacttagaatgcattctctgacatatccaagtttttgttaatatgaatttcaggaaaaaagcatacttaattagctaagacttcttattctaggcttgaccctatgttcgacatcttttgaatttctagttgcatgggctgctctctgacactggttagtgacctggaagctgtattaatgttaggggaggtggtgtatgagcattagaggtatccttgcaaggaaagacttgtcttatctcaatacgtctttttttttttgcacacaagaaagtcaatgtttgagtcttctaaaatcttcctatttccaagttgcagagtaccattgattcctaaacaaaaacctaatttttgactcagagacrtggcgaggtagtgaatcaccattataatttaacaatcttcaagataaaattatctctgatatttagattttgcccaat

SEQ ID NO: 301527 - DNA, 544 bp, Homo sapiens
cttaaacatctcttagtaattgagaaaattgaaagaaaagaaaaaagagaaagggagaaagagaaacagcgaaagggataatgaaggagagaaagaagaagacaaaggaagaggaagaaaagtaaagaggagggggaaggaggaaggaagaaaggtgaaaagaaagaagggtaaactttttaataacataatttatccttctagaatatgaatgttggtctatttgatgatgtcccacagattcattagtctctgctcattgkttattttttattctttctgtttctcagagtcagtattttccattatcttctcttcaagttcatggcttcttctgtgtgtgcaaatagactcttaaatccctctggtgattttgaaatttttatcattgtagttttccattccagaatttctgttatctctttgctgatattcctgctttttaatatttttttctgattcctttatttctttgattatgttttccttttgacatttgagtataatgaagagagttgttttaaagtctttgtctagtaagttt

SEQ ID NO: 301528 - DNA, 531 bp, Homo sapiens
ctttgagaaattcttccctctactgcatctgtgaatgggcatagcatggttacgtacatactgtcactccatagaacatttgttaaattaaagccaaagtttaaagcaagagctttaacttactggttttactaatgttttcctccccaatagccacaacaatattgataccctcacaccttttaacataaagcttggtgttgtctatttttcaggtgctgtcatctatatgatctcagtattttaaaaatcagcttccagcccatrtggtggttcatgcttgtaataccagcagttgaagaggcttaaatgagaggattcctggagcccaggagttcaaaagcaacctgggcaacctagcaagacccagtctctatcaaaagttaaaaaaaaaagtgggcatggtgatgtgcacctgttgtcctaactattttggaggccaaggtggaaggatcgcttgagcttgggaggctgaggctgcagtgagcagtgattgcaccactgcattccagcctgggcaacaaagcaaga

SEQ ID NO: 301529 - DNA, 531 bp, Homo sapiens
ctttgagaaattcttccctctactgcatctgtgaatgggcatagcatggttacgtacatactgtcactccatagaacatttgttaaattaaagccaaagtttaaagcaagagctttaacttactggttttactaatgttttcctccccaatagccacaacaatattgataccctcacaccttttaacataaagcttggtgttgtctatttttcaggtgctgtcatctatatgatctcagtattttaaaaatcagcttccagcccatgtggtggytcatgcttgtaataccagcagttgaagaggcttaaatgagaggattcctggagcccaggagttcaaaagcaacctgggcaacctagcaagacccagtctctatcaaaagttaaaaaaaaaagtgggcatggtgatgtgcacctgttgtcctaactattttggaggccaaggtggaaggatcgcttgagcttgggaggctgaggctgcagtgagcagtgattgcaccactgcattccagcctgggcaacaaagcaaga

SEQ ID NO: 301530 - DNA, 531 bp, Homo sapiens
ctttgagaaattcttccctctactgcatctgtgaatgggcatagcatggttacgtacatactgtcactccatagaacatttgttaaattaaagccaaagtttaaagcaagagctttaacttactggttttactaatgttttcctccccaatagccacaacaatattgataccctcacaccttttaacataaagcttggtgttgtctatttttcaggtgctgtcatctatatgatctcagtattttaaaaatcagcttccagcccatgtggtggtwcatgcttgtaataccagcagttgaagaggcttaaatgagaggattcctggagcccaggagttcaaaagcaacctgggcaacctagcaagacccagtctctatcaaaagttaaaaaaaaaagtgggcatggtgatgtgcacctgttgtcctaactattttggaggccaaggtggaaggatcgcttgagcttgggaggctgaggctgcagtgagcagtgattgcaccactgcattccagcctgggcaacaaagcaaga

SEQ ID NO: 301531 - DNA, 631 bp, Homo sapiens
cttactggttttactaatgttttcctccccaatagccacaacaatattgataccctcacaccttttaacataaagcttggtgttgtctatttttcaggtgctgtcatctatatgatctcagtattttaaaaatcagcttccagcccatgtggtggttcatgcttgtaataccagcagttgaagaggcttaaatgagaggattcctggagcccaggagttcaaaagcaacctgggcaacctagcaagacccagtctctatcaaaagttaaaaaaaaaagtgggcatggtgatgtgcacctgttgtcctarctattttggaggccaaggtggaaggatcgcttgagcttgggaggctgaggctgcagtgagcagtgattgcaccactgcattccagcctgggcaacaaagcaagaccctatctcaaaaaatatataataaaaatgaacatcagttctcattgatttctatgtaaatatgcacagatgatgtccatatagacataaataataatatttctgacaatgggtccatatgatcttcaaaatctaaagtgcctatctgtgtaattgactggttagtctcattaatgaatatagattcaattctactttcttgttctagataaattata

SEQ ID NO: 301532 - DNA, 568 bp, Homo sapiens
ctgcattccagcctgggcaacaaagcaagaccctatctcaaaaaatatataataaaaatgaacatcagttctcattgatttctatgtaaatatgcacagatgatgtccatatagacataaataataatatttctgacaatgggtccatatgatcttcaaaatctaaagtgcctatctgtgtaattgactggttagtctcattaatgaatatagattcaattctactttcttgttctagataaattatataatctagcttttcatttcacttatttactgataacaacaggaagaatgacaagatatctattttggaaaattactctggtaggagtaaagatgaaacaatgatagaattgcatggaaaactagaaaaaagtawggtcttctgatattctatcacatcacatactaaaggcctcataaaactcagacatattatctaaaaatgttattttcatcataggaatgatcaaagcatgagactataattgtattacattgtgcttgtatcacaatgtgcttgtatcacaagcacaggtgctaaaaaggaggggaaaacatcatt

SEQ ID NO: 301533 - DNA, 568 bp, Homo sapiens
ctgcattccagcctgggcaacaaagcaagaccctatctcaaaaaatatataataaaaatgaacatcagttctcattgatttctatgtaaatatgcacagatgatgtccatatagacataaataataatatttctgacaatgggtccatatgatcttcaaaatctaaagtgcctatctgtgtaattgactggttagtctcattaatgaatatagattcaattctactttcttgttctagataaattatataatctagcttttcatttcacttatttactgataacaacaggaagaatgacaagatatctattttggaaaattactctggtaggagtaaagatgaaacaatgatagaattgcatggaaaactagaaaaaagtaaggtcttctgatattctatcacatcacatactaaaggcctcataaaactcagacatattatctaaaaatgttattttcatcataggaatgatcaaagcatgagactayaattgtattacattgtgcttgtatcacaatgtgcttgtatcacaagcacaggtgctaaaaaggaggggaaaacatcatt

SEQ ID NO: 301534 - DNA, 369 bp, Homo sapiens
aataggagaaacctagaatttatgtaaacagtgagaagattggatgcgttttccgtcwcatattttaatactagcagcatattatatatgtcaatccatcaggcattcagaaatacatgcttatgaaaattttttgcaccatcagacaaaagacaagggtagaagacatttgtaaccctataaacactagtaaattaaaaacagaaagacctttatgtcctaacatatctgtgttgtgaaaggctgccctgtgaaatacgggatttcttaaacatattttaaaaatcataggtgtcaatattttttagaaatccatttaaattttctcttgctattttacaatgcctatttatttatttagtggctctg

SEQ ID NO: 301535 - DNA, 369 bp, Homo sapiens
aataggagaaacctagaatttatgtaaacagtgagaagattggatgcgttttccgtcacatattttaatactagcagcatattatatatgtcaawccatcaggcattcagaaatacatgcttatgaaaattttttgcaccatcagacaaaagacaagggtagaagacatttgtaaccctataaacactagtaaattaaaaacagaaagacctttatgtcctaacatatctgtgttgtgaaaggctgccctgtgaaatacgggatttcttaaacatattttaaaaatcataggtgtcaatattttttagaaatccatttaaattttctcttgctattttacaatgcctatttatttatttagtggctctg

SEQ ID NO: 301536 - DNA, 369 bp, Homo sapiens
aataggagaaacctagaatttatgtaaacagtgagaagattggatgcgttttccgtcacatattttaatactagcagcatattatatatgtcaatccatcaggcattcagaaatacatgcttatgaaaattttttgcaccatcagacaaaagacaagggtagaagacatttgtaaccctataaacactagtaaattaaaaacagaaagaccttwatgtcctaacatatctgtgttgtgaaaggctgccctgtgaaatacgggatttcttaaacatattttaaaaatcataggtgtcaatattttttagaaatccatttaaattttctcttgctattttacaatgcctatttatttatttagtggctctg

SEQ ID NO: 301537 - DNA, 369 bp, Homo sapiens
aataggagaaacctagaatttatgtaaacagtgagaagattggatgcgttttccgtcacatattttaatactagcagcatattatatatgtcaatccatcaggcattcagaaatacatgcttatgaaaattttttgcaccatcagacaaaagacaagggtagaagacatttgtaaccctataaacactagtaaattaaaaacagaaagacctttatgtcctaacatayctgtgttgtgaaaggctgccctgtgaaatacgggatttcttaaacatattttaaaaatcataggtgtcaatattttttagaaatccatttaaattttctcttgctattttacaatgcctatttatttatttagtggctctg

SEQ ID NO: 301538 - DNA, 590 bp, Homo sapiens
cccatatacctaaattccagtactccaaatcagtactgctcagttttagttgctaagtttaaaagtgtattttaaaagcaagttagtttagtgcactcttgcttctttcttgactgcttgtatatatgtatattcctttaaatgaatcttggaatttatttaaaaattttaaattatactaatgaaactgtatattgttgtgaattcataggtgaatttggaaagaatttgtctttatgatactaaatccttttaatccaagaatcatatgtgcctttatatttattccagtcaatatttatatcagartaaatatatagaaatgtagatacatacagctgtagttacagatacaaatatagatataacatgttaaatctatatctatcccatataacatatatacatgttatatgtgtgtgtgtatatatatatgtttatgttattaaagagctcccttaaaatttttcttttctttcctatataattttaggtcaagcttgaattttccttgtataaacaagcaaatatttatactagttttaatactggtgtttagacatactatcttattttagcattgaatattt

SEQ ID NO: 301539 - DNA, 618 bp, Homo sapiens
taaccaagattttgcctctactgcatatttccctttgctgattgtccctcccttttgacagaagatggcccagggcattcactactaagtctcaacctcttacccaaagccctcagtctagtgttgctctttccttcatgctatttttgtttctttcttttcttgtaatcatcttggcaataaaataatcagttttttctttctacctattaaagatgttaccttagttaattacaggggtttccttcagaatgataagtggtctttcaaaatgatgtaaagagatctaaatccgtgtgctccagaagttgaatgaagctctgtctagcacgggtgccagtgactctcccagagtgctccatgcagctggacccacagagtccctctgtgctgtcataycacccactgccttctgtgaatgagatattctgattagaatcctggtggatgctatttgagccagtgcccccacaactcctatgaaagccgaggaccacaggcccctgaagacaatcacaggtctctagactcacagctcatgaccgtcctctgcagacacagcttctcctcggatggctgagggttgtcattggctgtgttcttccttgtgcatgacaa

SEQ ID NO: 301540 - DNA, 523 bp, Homo sapiens
ctccagaagttgaatgaagctctgtctagcacgggtgccagtgactctcccagagtgctccatgcagctggacccacagagtccctctgtgctgtcatatcacccactgccttctgtgaatgagatattctgattagaatcctggtggatgctatttgagccagtgcccccacaactcctatgaaagccgaggaccacaggcccctgaagacaatcacaggtctctagactcacagctcatgaccgtcctctgcagacacagcttctcctcggatggctgagggttgtcattggctgtgtycttccttgtgcatgacaacaggagacatagaaggtctgtaagcagccctgcaagccaggttctgagcaagccctcctgtgtggggccctcttacctggacataggtgtgtaaaccaaaaatgaaactctaagctccctaaccaactgaatgaactcctcctctcagccaagcacacaccaaaatcaacctgaaatacaatgcagcccatgatcggaacggat

SEQ ID NO: 301541 - DNA, 459 bp, Homo sapiens
caactgaatgaactcctcctctcagccaagcacacaccaaaatcaacctgaaatacaatgcagcccatgatcggaacggatgattggatatgccttaacttaccctcttccctttaaaattcaggcacaactgaccagcttttaatatgaagacagagaccttgagactgacaaagaaaactctttatagcaataagttaccaatgtgacagataccacgtcctaagagaaatcaaagtattttccycaagatattgttatttaatgtatttaaaaatgcctctgcaaagctggttcttgtgggaaaaatctacattctgtagagactcctttttaagtctctttcctgacccagagagatttaactaagagtttggcaccttttaagtctgctaagaaacaattacaatctattctctctgaagcctgctacctggaggctccatctgcgtgatgcaa

SEQ ID NO: 301542 - DNA, 566 bp, Homo sapiens
gacaaaaaaccaatcactgcatgttctcactcataggtgggaattgaacartgagaacacgtggacacaggaaggggaatatcacacaccggggactgttgtggggtgtggggaggggggagggatagcattaggagatatacctaatgtaaatgacgagttaatgggtgcagcgcaccaacatggcacatgtatacatatgtaacaaacctgcatgttgtgcacatgtaacctagaacttaacaataataataataataaaaagaatgggtcttgtacatccaatttgccctatgaatgttaaaacagcaaacccgcatccccttcctcttctcatgtgctgtgagagatgacctccaggctctcagataccaaaattgtacaagacctaacccagagaattactcaagacactttctacgtaagaagaattgtggtactagctctcctcatagaaaaatgttttctgtctcttgttgaaattgacagcaaacacaaaaacacagaactatttgggagaacagaggacagtgatacactagggaagtaaaacacaccccttcccc

SEQ ID NO: 301543 - DNA, 566 bp, Homo sapiens
gacaaaaaaccaatcactgcatgttctcactcataggtgggaattgaacagtgagaacacgtggacacaggaaggggaatatcacacaccggggactgttgtggggtgtggggaggggggagggatagcattaggagatatacctaatgtaaatgacgagttaatgggtgcagcgcaccaacatggcacatgtatacatatgtaacaaacctgcatgttgtgcacatgtaacctagaacttaacaataataataataataaaaagaatgggtcttgtacatccaatttgccctatgaatgttaaaacagcaaacccgcatccccttcctcttctcatgtgctgtgagagatgacctccaggctctcagataccaarattgtacaagacctaacccagagaattactcaagacactttctacgtaagaagaattgtggtactagctctcctcatagaaaaatgttttctgtctcttgttgaaattgacagcaaacacaaaaacacagaactatttgggagaacagaggacagtgatacactagggaagtaaaacacaccccttcccc

SEQ ID NO: 301544 - DNA, 547 bp, Homo sapiens
gagcattccatctttctgatgttcccacattcctagcagcatggccccttcctccatcactccagtttccctgtccrttgtcccaggtcctctctggctgttaccttcctccctccctattgtaaggacccttgtgattatgatggtctcacccagataattcaggatactctcctgacctcaaaattctcaaccacgtctgccaagttatttttgacttgttcataagtaatgatcatagattccagatattaggacaatgatgtctttagtgggtgtattattcattccacaaacaactctcatcatccacacaatggccttcccctaaggtagaataaaaatatcacaaggcagatttatgaggcgatcgacctagaaaaaacctgagactctaggactgtctgatgtgtggatgtcaaatcctgggagattctgagcctctgctctatgtggactctatgttgtgtagccatttgtggaaggcttctgtgattttgtgacctagagaaaatgaatctctgctaaaatcaaatctaagaaagat

SEQ ID NO: 301545 - DNA, 513 bp, Homo sapiens
tattaaagatgcttctgataaattctttttatattcatttcaaacaagaagcaatttcacactgacattgttattatagcactaaatacttttacactcatcaaattcctttgagactaactgaaatttctgacagccccacattctacaactttattgtaaattttctgccaaaaatgatgctttcctatacactcctaatacaagtataaatatattatttaatctagtcttaggttgatttaaaattttgaaaattcactccaaaaatatgttctgtaaccatatggccaccaatgagaaatgcattctttcaaggtaaatctgtgctgccctggtttgacctgggactctggggatactgcgcccctgtgctgagttactgagwtgagccagccctgcagctgtgctcagcctgccccatcccctgctgatttgcctgttcctagagcacagccccctgccctgaagactttttataggctggtcacacccggagcaggagtcagtccc

SEQ ID NO: 301546 - DNA, 594 bp, Homo sapiens
cggtcagtgtgctcagtactgtctggaacttcagggaagtcctctgataacatgattaattgcaacaatatttgtttttatgtttccaacttcaggtgccagatgtgacatccagatgacccagtctccatcctccctgtctgcatctgtaggagacagagtcaccatcacttgccgggcgagtcagggcattagcaataatttaaattggtatcagcagaaaccagggaaaactcctaagctcctgatctatgctgcatccagtctgcaaagtgggattccctctcggttcagtgacagtggatctggggcagattacactctcaccatccgcagcctgcagcctgaagattttgcaamttattactgtcaacagagtgacagtacccctcccacagcgttacaagtcataacataatccccaaggaagcagatgtgtgaggctgggctgccccaatgctccttctggtgcctctatctgctgagggaagttctcaaactcagtcaggtttggaaagtcattgggagattttcctagaggaggccagggaggttcctctgaaccctaagcctctttcaccctcatccccagca

SEQ ID NO: 301547 - DNA, 442 bp, Homo sapiens
agggaggttcctctgaaccctaagcctctttcaccctcatccccagcagaaaagatgtgacaatgcctgtcctgactgaataaagaagagagataagtccaactgaggagtctgtgttatgggataatcggaatttgtacagcaaaagagaagctattctcagtatttcaaggagaaattattcaagttgaataaattagagcctaaaccacagtctttccgaagcctatggaatgttattcatgaagcaggtaytagacacaggggattctcaggtgctacttcagaagccagggtgcacctgcccctggtggtatgtgctgaacaccgtgtgatgatcctcaggcctgtctgggaagcccaggtcttcccagacagggatgctttgataaatccactgctaggtaggtaattcttctgtaacattaataattcggtttta

SEQ ID NO: 301548 - DNA, 442 bp, Homo sapiens
agggaggttcctctgaaccctaagcctctttcaccctcatccccagcagaaaagatgtgacaatgcctgtcctgactgaataaagaagagagataagtccaactgaggagtctgtgttatgggataatcggaatttgtacagcaaaagagaagctattctcagtatttcaaggagaaattattcaagttgaataaattagagcctaaaccacagtctttccgaagcctatggaatgttattcatgaagcaggtattagacacaggggattctcaggtgctacttcagaagccagggtgcacctgcccctggtggtatgtgctgaacaccgtgtgatgatcctcagkcctgtctgggaagcccaggtcttcccagacagggatgctttgataaatccactgctaggtaggtaattcttctgtaacattaataattcggtttta

SEQ ID NO: 301549 - DNA, 442 bp, Homo sapiens
agggaggttcctctgaaccctaagcctctttcaccctcatccccagcagaaaagatgtgacaatgcctgtcctgactgaataaagaagagagataagtccaactgaggagtctgtgttatgggataatcggaatttgtacagcaaaagagaagctattctcagtatttcaaggagaaattattcaagttgaataaattagagcctaaaccacagtctttccgaagcctatggaatgttattcatgaagcaggtattagacacaggggattctcaggtgctacttcagaagccagggtgcacctgcccctggtggtatgtgctgaacaccgtgtgatgatcctcaggcctgtctgggaagcccaggtcttcccagacaggratgctttgataaatccactgctaggtaggtaattcttctgtaacattaataattcggtttta

SEQ ID NO: 301550 - DNA, 577 bp, Homo sapiens
aaacttggggctatatatcaaagacattagtttctctatgagtatatttcaaactttcctcaataaattttttaaaaattcaatttaaaattcaagccacaaataaatgctttttaaaaatttcttagattatacaaatagtgccataacatcaagaataatcccaaatcattccatatacttcaaaagatacaaaaccaggctgggtgcggtggctcacgtctgtaatcccaacactttgggaggccgaggtgggcggatcacctgaggttgtgagtttgaaaccagtctgaccaacatggagaaaccccgtctctaccaaaaatacaaaattagctgggtgtggtggtgcatgcctgtaatcccagctactggggaggctgaggcaggagaatcacttgaactcgggaagtggaggttgcagtgagccgagattgtgccattgcactccagcctgggygacaagagcaaaactccatctcaaaaaaaaaaaaaaaaaaaaaaaaaaaaaaaaaaaaaaaaagacacaaaagcaggaactcttttccaggagcaatcccatttagttaagaaaaag

SEQ ID NO: 301551 - DNA, 446 bp, Homo sapiens
aaaaattattccaacatttaagagaccaccattttggccaggcccagtggctcacacctgtaatcccagcactttgggaggcygaggtgggcagatcacctgagatcaggagttcaagaccagcctgaccaacatggagaaaccccgtctctactaaaaatacaaaattagttgggtgtggtggtgcatgcctataatcccagctactggggaggctgaggcgggagaattgcttgaaccaggtggtggaggttgcggtgagccaagatcgcaccattgcaccccagcctgggcaacgagaatgaaactccatctcaaaacaaacaaaaaagaacaccacttttcattttactgaattacctttcctgttcaagagcatactccaacattttgatcctcctcacaagatccttcttcaaattttcttggcccttcctttctccctg

SEQ ID NO: 301552 - DNA, 446 bp, Homo sapiens
aaaaattattccaacatttaagagaccaccattttggccaggcccagtggctcacacctgtaatcccagcactttgggaggctgaggtgggcagatcacctgagrtcaggagttcaagaccagcctgaccaacatggagaaaccccgtctctactaaaaatacaaaattagttgggtgtggtggtgcatgcctataatcccagctactggggaggctgaggcgggagaattgcttgaaccaggtggtggaggttgcggtgagccaagatcgcaccattgcaccccagcctgggcaacgagaatgaaactccatctcaaaacaaacaaaaaagaacaccacttttcattttactgaattacctttcctgttcaagagcatactccaacattttgatcctcctcacaagatccttcttcaaattttcttggcccttcctttctccctg

SEQ ID NO: 301553 - DNA, 446 bp, Homo sapiens
aaaaattattccaacatttaagagaccaccattttggccaggcccagtggctcacacctgtaatcccagcactttgggaggctgaggtgggcagatcacctgagatcaggagttcragaccagcctgaccaacatggagaaaccccgtctctactaaaaatacaaaattagttgggtgtggtggtgcatgcctataatcccagctactggggaggctgaggcgggagaattgcttgaaccaggtggtggaggttgcggtgagccaagatcgcaccattgcaccccagcctgggcaacgagaatgaaactccatctcaaaacaaacaaaaaagaacaccacttttcattttactgaattacctttcctgttcaagagcatactccaacattttgatcctcctcacaagatccttcttcaaattttcttggcccttcctttctccctg

SEQ ID NO: 301554 - DNA, 446 bp, Homo sapiens
aaaaattattccaacatttaagagaccaccattttggccaggcccagtggctcacacctgtaatcccagcactttgggaggctgaggtgggcagatcacctgagatcaggagttcaagaccagcctgaccaacatggagaaaccccgtctctactaaaaatacaaaattagttgggtgtggtggtgcatgcctataatcccagctactgrggaggctgaggcgggagaattgcttgaaccaggtggtggaggttgcggtgagccaagatcgcaccattgcaccccagcctgggcaacgagaatgaaactccatctcaaaacaaacaaaaaagaacaccacttttcattttactgaattacctttcctgttcaagagcatactccaacattttgatcctcctcacaagatccttcttcaaattttcttggcccttcctttctccctg

SEQ ID NO: 301555 - DNA, 578 bp, Homo sapiens
  misc_feature (1)...(578): n = A,T,C or G
gacgaggatggagtggctcaccctcagtcaacaggccagactcaaggtgttataatgtcttaaccaagggtgcgggcctccaggtctgactcccaactcagtgytcctttaataaccactctttgttaattctccttaacaggggttcctggcaagtcatttctccctcaggccttcggtttcctcacctacaagatgagagggctggaccagatggcaattccgggggtaaggggatgtccgcgtgcagcccaccccgcccatgggcccctcgagcatccatcacagttcccaacacgcaaccgctccacaaatcctgcccaaggtgagggctggtcccaggtcctccggctgccgcatcagcgagtgcaggagggaggagaagcctccaaaggggcgacgtgggctcaaggatgcaactcggccaggagtgaactggggcccagatggaggtgtccagtctggtgctggagcccagccctggtccctgacccccttacctccaggtccgtatctcctgctgggtgaggtccttggacacagcgcacttggtggnacccgcgcaggctgccaacgga

SEQ ID NO: 301556 - DNA, 578 bp, Homo sapiens
  misc_feature (1)...(578): n = A,T,C or G
gacgaggatggagtggctcaccctcagtcaacaggccagactcaaggtgttataatgtcttaaccaagggtgcgggcctccaggtctgactcccaactcagtgttcctttaataaccactctttgttaattctccttaacaggggttcctggcaagtcatttctccctcaggccttcggtttcctcacctacaagatgagagggctggaccagatggcaattcmgggggtaaggggatgtccgcgtgcagcccaccccgcccatgggcccctcgagcatccatcacagttcccaacacgcaaccgctccacaaatcctgcccaaggtgagggctggtcccaggtcctccggctgccgcatcagcgagtgcaggagggaggagaagcctccaaaggggcgacgtgggctcaaggatgcaactcggccaggagtgaactggggcccagatggaggtgtccagtctggtgctggagcccagccctggtccctgacccccttacctccaggtccgtatctcctgctgggtgaggtccttggacacagcgcacttggtggnacccgcgcaggctgccaacgga

SEQ ID NO: 301557 - DNA, 578 bp, Homo sapiens
  misc_feature (1)...(578): n = A,T,C or G
gacgaggatggagtggctcaccctcagtcaacaggccagactcaaggtgttataatgtcttaaccaagggtgcgggcctccaggtctgactcccaactcagtgttcctttaataaccactctttgttaattctccttaacaggggttcctggcaagtcatttctccctcaggccttcggtttcctcacctacaagatgagagggctggaccagatggcaattccgggggtaaggggatgtccgcgtgcagcccaccccgcccatgggcccctygagcatccatcacagttcccaacacgcaaccgctccacaaatcctgcccaaggtgagggctggtcccaggtcctccggctgccgcatcagcgagtgcaggagggaggagaagcctccaaaggggcgacgtgggctcaaggatgcaactcggccaggagtgaactggggcccagatggaggtgtccagtctggtgctggagcccagccctggtccctgacccccttacctccaggtccgtatctcctgctgggtgaggtccttggacacagcgcacttggtggnacccgcgcaggctgccaacgga

SEQ ID NO: 301558 - DNA, 591 bp, Homo sapiens
gcaaaaatccatggcggcaaaaagccgcgtcggcgggggcaaagtagtggaaatggggtagaaggccagcacagcttggcattcctggagtgtgatgtggaaggaaaagtgcagaggaagacaaacaaagatgtaagttggcttgactcagtgcagctaagaacccagatgttatcttgatgttatctatcagctaattttttgtagtttagtagagaaggggttttascacattggccaggattgtctggatctcctgacctcatgatccacgcacctcagcctcccaaagtgatgggattagaggcatgagccacaaagtgctcaaaaaatctattaattaaaaaatgtgtatgtagccgtctttaatctaccatgtccattagcagataaatactataagcaaaatagcaacaatgagagaaacatagacttagagtagatactctgatttatttaataaaaatttgaaaatagaccaaattatgattaaaaaaaatctgttgctattgaggatgagggttagtgtttggaaaggggcaggagaagtatcactatttttagtaatgttctattttcatacatggttat

SEQ ID NO: 301559 - DNA, 579 bp, Homo sapiens
ttatctatcagctaattttttgtagtttagtagagaaggggttttagcacattggccaggattgtctggatctcctgacctcatgatccacgcacctcagcctcccaaagtgatgggattagaggcatgagccacaaagtgctcaaaaaatctattaattaaaaaatgtgtatgtagccgtctttaatctaccatgtccattagcagataaatactataagcaaaatagcaacaatgagagaaacatagacttagagtagatactctgatttatttaataaaaatttgaaaatagaccaaattatgatwaaaaaaaatctgttgctattgaggatgagggttagtgtttggaaaggggcaggagaagtatcactatttttagtaatgttctattttcatacatggttataagcaaatacatgtgtttcattaatgaagctatccatatttaatcattgtacttttctgcatgtatgatatatgtcaataaatgtcttatatacagcaaaaatagacaaaaccacaagaagacatacacaaatgttaaacctagagagaaatttgaatataagtaagtct

SEQ ID NO: 301560 - DNA, 415 bp, Homo sapiens
atctgttgctattgaggatgagggttagtgtttggaaaggggcaggagaagtatcactatttttagtaatgttctattttcatacatggttataagcaaatacatgtgtttcattaatgaagctatccatatttaatcattgtacttttctgcatgtatgatatatgtcaataaatgtcttatatacagcaaaaatagacaaaaccacaagaagacatacacaaatgttaaacctagagagaaatttgaatataagtaagtctctgaatgactgctagaacaaaccgaaaaataggatggagaggtttggaacagcatgattagcaaaatkgacatatctgtcttttaatataggcagaaacatagttagataaaaaaaggacttgtctcagagcatgatttctgaaaatagtgg

SEQ ID NO: 301561 - DNA, 487 bp, Homo sapiens
actgctagaacaaaccgaaaaataggatggagaggtttggaacagcatgattagcaaaatggacatatctgtcttttaatataggcagaaacatagttagataaaaaaaggacttgtctcagagcatgatttctgaaaatagtggaatcgagtttgaatctagtaagtacatataaataaatgtcttaaaactcctcttatgttagctaattaagaaacattattgtaatagacattagaaaatattttaataaattgagtggatttaacacgctaaggaaatgatcttacttgcatttgatagttcaattagatacatatacacctataggtagtttaaaatatttctaataaccttatatacttttaaaaagcattgatatctgtttgcactatctggtctatagagtacrcataccaaacatgattatagctcttctgctataaacttcaaatgtctaagtaatacaaaaatctagaatgagaa

SEQ ID NO: 301562 - DNA, 605 bp, Homo sapiens
agactagcttcatgagaacagactgtgacagccaaggctgtctgttattttgtgcagcattaattgagaaattctagcacctgaagacctctgggccatttgagggtaggtgcaggggaggaaagggaagtttgcatccctcatgctgtggagagaaccygtggggagcacagaccttgtcctaactgaaggcagacccccttgctaaccagattctcatcagccaaccctggatgagtttctatgtctatttattaaataatcctcattgcttttcttcacatgggcaaagtatggtttgcagggaatattgttcctttgaacacccatcaaggaaaacccttcctgttgtgggaaaacaggcttccatatgtgtcttattgggaaacacataggcaatttctatgtttttactgcatctatttcagggatatgggaactgaatagtgcccatcaaaggctcacctgatgttggaaattgatctgagagcgcggaaggacataattctttctttgttcctgggcagcggtggttgagggttcaccttgtggcagctacagtggcaatgatggaggcagaatggagggctcagtaccaagacaag

SEQ ID NO: 301563 - DNA, 605 bp, Homo sapiens
agactagcttcatgagaacagactgtgacagccaaggctgtctgttattttgtgcagcattaattgagaaattctagcacctgaagacctctgggccatttgagggtaggtgcaggggaggaaagggaagtttgcatccctcatgctgtggagagaacccgtggggagcacagaccttgtcctaactgaaggcagacccccttgctaaccagattctcatcagccaaccctggatgagtttctatgtctatttaytaaataatcctcattgcttttcttcacatgggcaaagtatggtttgcagggaatattgttcctttgaacacccatcaaggaaaacccttcctgttgtgggaaaacaggcttccatatgtgtcttattgggaaacacataggcaatttctatgtttttactgcatctatttcagggatatgggaactgaatagtgcccatcaaaggctcacctgatgttggaaattgatctgagagcgcggaaggacataattctttctttgttcctgggcagcggtggttgagggttcaccttgtggcagctacagtggcaatgatggaggcagaatggagggctcagtaccaagacaag

SEQ ID NO: 301564 - DNA, 605 bp, Homo sapiens
agactagcttcatgagaacagactgtgacagccaaggctgtctgttattttgtgcagcattaattgagaaattctagcacctgaagacctctgggccatttgagggtaggtgcaggggaggaaagggaagtttgcatccctcatgctgtggagagaacccgtggggagcacagaccttgtcctaactgaaggcagacccccttgctaaccagattctcatcagccaaccctggatgagtttctatgtctatttattaaataatcctcattgcttttcttcacatgggcaaagtatggtttgcagggaatattgttcctttgaacacccatcawggaaaacccttcctgttgtgggaaaacaggcttccatatgtgtcttattgggaaacacataggcaatttctatgtttttactgcatctatttcagggatatgggaactgaatagtgcccatcaaaggctcacctgatgttggaaattgatctgagagcgcggaaggacataattctttctttgttcctgggcagcggtggttgagggttcaccttgtggcagctacagtggcaatgatggaggcagaatggagggctcagtaccaagacaag

SEQ ID NO: 301565 - DNA, 552 bp, Homo sapiens
tggtttgcagggaatattgttcctttgaacacccatcaaggaaaacccttcctgttgtgggaaaacaggcttccatatgtgtcttattgggaaacacataggcaatttctatgtttttactgcatctatttcagggatatgggaactgaatagtgcccatcaaaggctcacctgatgttggaaattgatctgagagcgcggaaggacataattctttctttgttcctgggcagcggtggttgagggttcacyttgtggcagctacagtggcaatgatggaggcagaatggagggctcagtaccaagacaaggagagacttggcctcacaatggcagcattgcaggggtgcgctctacagagcatttgctcacatggttttgggcattgtctctaactacattgcttccccaataggttgacccattctaactaactccttttctctttaaaaaagcaaacttcatttgtatgacttgcaattgtaaacgacaccaattggccagttatcattcaaattctctgttacttaatcctgccttttcctgacgtat

SEQ ID NO: 301566 - DNA, 526 bp, Homo sapiens
aaacaggcttccatatgtgtcttattgggaaacacataggcaatttctatgtttttactgcatctatttcagggatatgggaactgaatagtgcccatcaaaggctcacctgatgttggaaattgatctgagagcgcggaaggacataattctttctttgttcctgggcagcggtggttgagggttcaccttgtggcagctacagtggcaatgatggagrcagaatggagggctcagtaccaagacaaggagagacttggcctcacaatggcagcattgcaggggtgcgctctacagagcatttgctcacatggttttgggcattgtctctaactacattgcttccccaataggttgacccattctaactaactccttttctctttaaaaaagcaaacttcatttgtatgacttgcaattgtaaacgacaccaattggccagttatcattcaaattctctgttacttaatcctgccttttcctgacgtatgcaaatttgccctaaaaaattggacactttgttgct

SEQ ID NO: 301567 - DNA, 595 bp, Homo sapiens
gctcacctgatgttggaaattgatctgagagcgcggaaggacataattctttctttgttcctgggcagcggtggttgagggttcaccttgtggcagctacagtggcaatgatggaggcagaatggagggctcagtaccaagacaaggagagacttggcctcacaatggcagcattgcaggggtgcgctctacagagcatttgctcacatggttttgggcattgtctctaactacattgcttccccaataggttgacccattctaactaactccttttctctttaaaaaagcaaacttcatttgtatgwcttgcaattgtaaacgacaccaattggccagttatcattcaaattctctgttacttaatcctgccttttcctgacgtatgcaaatttgccctaaaaaattggacactttgttgcttactcattgtctttacacattttaaaatgttgctttaggccccaatccctaactacattttcaatgttttgcaagtggagtccatgtgttcttgatttacatgaagctcaaaataatggttatagtaactagtacttcataattaagcaaaaagctcttattgaaaaatgac

SEQ ID NO: 301568 - DNA, 595 bp, Homo sapiens
gctcacctgatgttggaaattgatctgagagcgcggaaggacataattctttctttgttcctgggcagcggtggttgagggttcaccttgtggcagctacagtggcaatgatggaggcagaatggagggctcagtaccaagacaaggagagacttggcctcacaatggcagcattgcaggggtgcgctctacagagcatttgctcacatggttttgggcattgtctctaactacattgcttccccaataggttgacccattctaactaactccttttctctttaaaaaagcaaacttcatttgtatgacttgcaattgtaaacgacaccaaytggccagttatcattcaaattctctgttacttaatcctgccttttcctgacgtatgcaaatttgccctaaaaaattggacactttgttgcttactcattgtctttacacattttaaaatgttgctttaggccccaatccctaactacattttcaatgttttgcaagtggagtccatgtgttcttgatttacatgaagctcaaaataatggttatagtaactagtacttcataattaagcaaaaagctcttattgaaaaatgac

SEQ ID NO: 301569 - DNA, 526 bp, Homo sapiens
aaacaggcttccatatgtgtcttattgggaaacacataggcaatttctatgtttttactgcatctatttcagggatatgggaactgaatagtgcccatcaaaggctcacctgatgttggaaattgatctgagagcgcggaaggacataattctttctttgttcctgggcagcggtggttgagggttcaccttgtggcagctacagtggcaatgatggaggcagaatggagggctcagtaccaagacaaggagagacttggcctcacaatggcagcattgcaggggtgcgctctacagagcatttgctcacatggttttgggcattgtctctaactacattgcttccccaataggttgacccattctaactaactccttttctctttaaaaaagcaaacttcatttgtatgacttgcaattgtaaacgacaccaattggccagttatcrttcaaattctctgttacttaatcctgccttttcctgacgtatgcaaatttgccctaaaaaattggacactttgttgct

SEQ ID NO: 301570 - DNA, 526 bp, Homo sapiens
aaacaggcttccatatgtgtcttattgggaaacacataggcaatttctatgtttttactgcatctatttcagggatatgggaactgaatagtgcccatcaaaggctcacctgatgttggaaattgatctgagagcgcggaaggacataattctttctttgttcctgggcagcggtggttgagggttcaccttgtggcagctacagtggcaatgatggaggcagaatggagggctcagtaccaagacaaggagagacttggcctcacaatggcagcattgcaggggtgcgctctacagagcatttgctcacatggttttgggcattgtctctaactacattgcttccccaataggttgacccattctaactaactccttttctctttaaaaaagcaaacttcatttgtatgacttgcaattgtaaacgacaccaattggccagttatcattcaaattctctgttacttaatcctgscttttcctgacgtatgcaaatttgccctaaaaaattggacactttgttgct

SEQ ID NO: 301571 - DNA, 539 bp, Homo sapiens
gaagctcaaaataatggttatagtaactagtacttcataattaagcaaaaagctcttattgaaaaatgacagaactatacatagggatgacaacatggagagatatttcgtgagatcacaaacttatggtatagcagaagtagaacgctgagtagagactctgtgttcccaatcattatttctaccaccagctttctattttgatggtaataatgttcttatgtgggaaaccctacatatttgccaatgtttagttcattgacaaagaaatagaaagagcttcaagaacactcgaatctttaaaaaataaaatacctataattggccatacgaaataattggtacttgacatatactgagatcgttttattttgtgctagataaatgaagtcatagaacagaatgtgctttaaatattatgaatagtgcctgcgtgtgtgtgtgtgtgtgtgtgtgtgtgtgtgtctatagatgcatattaggccrctgaaaagttttattattctttccaggagagagactgccaacttttgaaccta

SEQ ID NO: 301572 - DNA, 593 bp, Homo sapiens
aatggcagatcaggattattccttctcatctgctgcaatggctcaatgtgttaaggagaggagcgagacagcaagaaccgcattcattcagtcatacagaccaaaaggaggaatgtcgcccagccctctaaactgacccagaacccagctcatgtctcaactgctacctctcctacttagaaagaagtaactccaccaaagcagggttctggacaaatatatttttattgatcatatacaaatagatgaagatggacttggatgttaagaaaaataatactatacaaaatcaagagtagacagtcrcccctagacttaaattaagggtgtgtacattagataatttaatccaatgtatcaggtaaaaacttgaacgaaccttttagcctcttccttaaaattcaggaaagcatgtcctccacaaaacaaaatcaaaatataaataaaagactggcttaagatgaaaggaaaccttacaaatgaaaagaagccagatgagaggcccttaactgagaatgaaaagaaattgagtggacaaaataactatgagatgaaccttcaaatcagaaagagggaaaaaagcttatttgata

SEQ ID NO: 301573 - DNA, 593 bp, Homo sapiens
aatggcagatcaggattattccttctcatctgctgcaatggctcaatgtgttaaggagaggagcgagacagcaagaaccgcattcattcagtcatacagaccaaaaggaggaatgtcgcccagccctctaaactgacccagaacccagctcatgtctcaactgctacctctcctacttagaaagaagtaactccaccaaagcagggttctggacaaatatatttttattgatcatatacaaatagatgaagatggacttggatgttaagaaaaataatactatacaaaatcaagagtagacagtcacccctagacttaaattaagggtgtgtmcattagataatttaatccaatgtatcaggtaaaaacttgaacgaaccttttagcctcttccttaaaattcaggaaagcatgtcctccacaaaacaaaatcaaaatataaataaaagactggcttaagatgaaaggaaaccttacaaatgaaaagaagccagatgagaggcccttaactgagaatgaaaagaaattgagtggacaaaataactatgagatgaaccttcaaatcagaaagagggaaaaaagcttatttgata

SEQ ID NO: 301574 - DNA, 593 bp, Homo sapiens
aatggcagatcaggattattccttctcatctgctgcaatggctcaatgtgttaaggagaggagcgagacagcaagaaccgcattcattcagtcatacagaccaaaaggaggaatgtcgcccagccctctaaactgacccagaacccagctcatgtctcaactgctacctctcctacttagaaagaagtaactccaccaaagcagggttctggacaaatatatttttattgatcatatacaaatagatgaagatggacttggatgttaagaaaaataatactatacaaaatcaagagtagacagtcacccctagacttaaattaagggtgtgtacattagataatttaatccaatgtatcaggtaaaaacttgaacgaaccttttagcctcttccttaaaattcaggaaagcatgtcctccacaaaacaaaatcaaaatataaataaaagactggcttaagatgaaaggaaaccttacaaatgaaaagaagccagatgagaggcccttaactgagaatgaaaagaaattgagtggacaaaataaytatgagatgaaccttcaaatcagaaagagggaaaaaagcttatttgata

SEQ ID NO: 301575 - DNA, 586 bp, Homo sapiens
actgtaatatattttaattacagatggaggaacagacagatgttagataaatagatatataatatatagatcatccaaaattcttattcttatggttttatgtagtcagtatttacctctatttttctacatgtttatccttccaatttagttcattatttcctgcacctttgatttcatatatataaacaggaaataacacatggtggccgttatgtagagagagccacaggacttgtgaataaaatccacaggcaaggacgtggcgattcsttttgcaatattggagggaatgccaaaccctatgtttgctgtggaaaagagtatggtagttcctcaaaacatcaaaatggtattgccttacgattcagcagccccacatctcaagacagcaaaagaattgaaagcagagtcttgaaaaaatatttgcacatccatgtttgcagcagcattattggcaatagctaaaacgtagaagcaattgaagtgtccaacaacagatgaatggatatgcaaaacatgatatatacatacaatggtaaatcattcagccttaaacatgagggaaatattcagacatatgttg

SEQ ID NO: 301576 - DNA, 586 bp, Homo sapiens
actgtaatatattttaattacagatggaggaacagacagatgttagataaatagatatataatatatagatcatccaaaattcttattcttatggttttatgtagtcagtatttacctctatttttctacatgtttatccttccaatttagttcattatttcctgcacctttgatttcatatatataaacaggaaataacacatggtggccgttatgtagagagagccacaggacttgtgaataaaatccacaggcaaggacgtggcgattccttttgcaatattggagggaatgccaaaccctatgtttgctgtggaaaagagtatggtagttcctcaaaacatcaaaatggtattgccttacgattcagcagccccacatctcaagacagcaaaagaattgaaagcagagtcttgaaaaaatatttgcacatccatgtttgcagcagcattattggcaatagctaaaacgtagaagcaattgaagtgtccaacaacagatgaatggatatgcaaaacatgatatatacatacaatggwaaatcattcagccttaaacatgagggaaatattcagacatatgttg

SEQ ID NO: 301577 - DNA, 619 bp, Homo sapiens
aaactactaattaatgtcacatctatttattttctgctttataccaagcttgtgggattctcttaaatacaacatttttatacttacacctatgaaatacccattaacatcgccttcctaaatcagtggaaattgagtctctgtaaggtgcagtaacttactaagatacaaaactcagcatttaagtctgtatacttcaatatcctgccctcttctcatttgtctttactgccttttatgtatgtgttagatgttcaataaattctcttttttaaactgaatttaagccgtggagcagtgttttgttgaacaataaatatgatattggacactcttcctccctttcatttacgatcctgttcaagaaaaagagaaawtctttcattgtgctagaagcttaaaataatgaaaatgccactttctacattaaacagaaactgaagggaatcaaggtgaattggatgagacatagaaaacaagtgggaaataaatctagtataatttcccctttgtgtacctttgttatttagcatttgagaaaatttttcccccaaatatcttcccatcttaattcatgtctataaagtagacatttatgcctcaccttgtcaagaagggc

SEQ ID NO: 301578 - DNA, 507 bp, Homo sapiens
caattaatctcaattagctgatcacaattaaaattaatagcttattattgctgataaaaaatcatgactctcctgttctcaaatgtgcaagtaattcttgtaattttaatacaaatgtgcatattattactaattgatttaatctcattgtatttggttcatggatccaatttattaaaatattgatagtgtggtaatgatttgtctccccatttcatttacactaaaagacacaattcgtacaatggtctgcaagcccatcatgatctgccgcatgttaaccgccaaaattcttttatgtcttcacccttgaycttaccagtggtcctgtccacctcactgtcctctggacatgccaacatgctgctgtcttatgaccaagactctagttaatttcttggctttgaaagaaatccccccatatatccattgatcagctcattcgactcctcaaatctttactgaaacctcacattctcgatgagacctattcagtatttcaaactg

SEQ ID NO: 301579 - DNA, 575 bp, Homo sapiens
tccaggactagggtgaagtaagccaggtacctagggtacaaatttaaggaatcaatcattctcaaggtgatggacatgcagggtcactagcctcacctgtgttttaagtcattaagtaatttgtactaagctatagataagtgrtacagtcggtcttcttctcctcttcctcctccttcttcttctttctttgcccctttgttgtattgcattcatctaggctcattctgacctcctagagttttgtcaattatttctcttcaggcttcctgctaccagaagctgtgctgtaactaacctcctagagatacctcatttgatttagggtccaatagtgtagtcttttatgttaaccaattaatttagaaaacaaaagagccacaaccatcatgcagtctctacgtttctagtattgatacatactaatggcatctttatcaggtgttatcatatcaagaagatattaatgcctctctcctaccacaagtcgtgatagtagagaacatttttcatgatgtgaaacaatgggtttgtggtttagaacacagcctggagtcactggggggatgaagtaa

SEQ ID NO: 301580 - DNA, 575 bp, Homo sapiens
tccaggactagggtgaagtaagccaggtacctagggtacaaatttaaggaatcaatcattctcaaggtgatggacatgcagggtcactagcctcacctgtgttttaagtcattaagtaatttgtactaagctatagataagtgatacagtcggtcttcttctcctcttcctcctccttcttcttctttctttgcccctttgttgtattgyattcatctaggctcattctgacctcctagagttttgtcaattatttctcttcaggcttcctgctaccagaagctgtgctgtaactaacctcctagagatacctcatttgatttagggtccaatagtgtagtcttttatgttaaccaattaatttagaaaacaaaagagccacaaccatcatgcagtctctacgtttctagtattgatacatactaatggcatctttatcaggtgttatcatatcaagaagatattaatgcctctctcctaccacaagtcgtgatagtagagaacatttttcatgatgtgaaacaatgggtttgtggtttagaacacagcctggagtcactggggggatgaagtaa

SEQ ID NO: 301581 - DNA, 587 bp, Homo sapiens
agcgggcatggagtgacataaaaggaatagcaataggcccaaggaaaattaggagggccttaggagycttccagccccacaaaaagcaggaggccttcgacactgttcataacacgctcctgagggaaaaggagtgagaagggaccccagatcatacttcccagagactaagtgagaaggggaatttctgaagttaatttgggaatttgagaaggggtgttgattctgactgttagacaacgagctatttgggtgcgttcaatttcaagggtagacaggacttagatatcctggaagcaagagaataaatggaaccccccaaaagaccaggagtccaagtaacagaaataagtaaggaacttgctctgaagcagggcaaagctgaaactgtaaggatgaatgggtctttctggtcatggctactcaattgaggcatttgagaagcagcacagttgattatgtttccttaaaataagaaaagagaaagtaaagctgcttcaggaaagaactaaaatgtgttctaagcagtaaaaccatgaacaggaaattctccacaggagcatttccaaatgaataggcaggaatac

SEQ ID NO: 301582 - DNA, 587 bp, Homo sapiens
agcgggcatggagtgacataaaaggaatagcaataggcccaaggaaaattaggagggccttaggagccttccagccccacaaaaagcaggaggccttcgacactgttcataacaygctcctgagggaaaaggagtgagaagggaccccagatcatacttcccagagactaagtgagaaggggaatttctgaagttaatttgggaatttgagaaggggtgttgattctgactgttagacaacgagctatttgggtgcgttcaatttcaagggtagacaggacttagatatcctggaagcaagagaataaatggaaccccccaaaagaccaggagtccaagtaacagaaataagtaaggaacttgctctgaagcagggcaaagctgaaactgtaaggatgaatgggtctttctggtcatggctactcaattgaggcatttgagaagcagcacagttgattatgtttccttaaaataagaaaagagaaagtaaagctgcttcaggaaagaactaaaatgtgttctaagcagtaaaaccatgaacaggaaattctccacaggagcatttccaaatgaataggcaggaatac

SEQ ID NO: 301583 - DNA, 587 bp, Homo sapiens
agcgggcatggagtgacataaaaggaatagcaataggcccaaggaaaattaggagggccttaggagccttccagccccacaaaaagcaggaggccttcgacactgttcataacacgctcctgagggaaaaggagtgagaagggaccccakatcatacttcccagagactaagtgagaaggggaatttctgaagttaatttgggaatttgagaaggggtgttgattctgactgttagacaacgagctatttgggtgcgttcaatttcaagggtagacaggacttagatatcctggaagcaagagaataaatggaaccccccaaaagaccaggagtccaagtaacagaaataagtaaggaacttgctctgaagcagggcaaagctgaaactgtaaggatgaatgggtctttctggtcatggctactcaattgaggcatttgagaagcagcacagttgattatgtttccttaaaataagaaaagagaaagtaaagctgcttcaggaaagaactaaaatgtgttctaagcagtaaaaccatgaacaggaaattctccacaggagcatttccaaatgaataggcaggaatac

SEQ ID NO: 301584 - DNA, 587 bp, Homo sapiens
agcgggcatggagtgacataaaaggaatagcaataggcccaaggaaaattaggagggccttaggagccttccagccccacaaaaagcaggaggccttcgacactgttcataacacgctcctgagggaaaaggagtgagaagggaccccagatcatacttcccagagactaagtgagaaggggaatttctgaagttaatttgggaatttgagaaggggtgttgattctgactgttagacaacgagctatttgggtgcgttcaatttcaagggtagacaggacttagatatcctggaagcaagagaataaatggaaccccccaaaagaccaggagtccaagtaacagaaataagtaaggaacttgctctgaagcagggcaaagctgaaactgtaaggatgaatgggtctttctggtcatggctactcrattgaggcatttgagaagcagcacagttgattatgtttccttaaaataagaaaagagaaagtaaagctgcttcaggaaagaactaaaatgtgttctaagcagtaaaaccatgaacaggaaattctccacaggagcatttccaaatgaataggcaggaatac

SEQ ID NO: 301585 - DNA, 568 bp, Homo sapiens
gagagcaagggggagagattccaaacttttttttttttttttttttttgagacagagtctcactctatcacccaggctggagtgcagtggcgtgatcttggctcactgcaacctccacttcctgggttcaagtgattctcctgcctcagcctcctgagtagctgggaytacaggcacacaccaccacgcccggccaattttttgtatttttagtagagatggggtttcaccatgttagccaggatggtctctatctcctgaccttgtgatccacccacttcagcctcccaaagtgctaggattagaggtgtgagccaccgcacccggcccagacttttaaacaaccagatctcacatgaaccagctgagcaagaactcacttatcaccaaagggatggagctaaaccatttgtgagggatcttcccccatgatccaaccaccttctaccaggccccacccccaatattggaaatcacatttcaacatgagctttggcagagaaaaacatccaaaccacatcattcatctcctcttacctctgagaaaccttagattagcacttcttat

SEQ ID NO: 301586 - DNA, 584 bp, Homo sapiens
ctacatggtaagacggcactactcacttgccaagagccaaacagatattttggaatcatttcccagatagtgataaaaaatgggcacagaccatttgtaatctttcatcccatcttccttttgactagtgtcatccctgtaaaccatgagtgatcaggattacatctctacattcagcaggagtagaatagaatttccatttgcacacaaaactgactcactgagagcaatttagtgatctcagtagatgggcctgctgcatggaaaggcagccaacagatggggagtgtccctatcttagccagaggaggggaaagtatgggattcaatctgtttctttaaaagctgaaggataaactgaagatgatgttcataaaaactgtatttccatygttaaggagaaaaatagataggtaagctcagccctcttttgataaaagttgaacagagaggtgaaaaagggaatccatttgtttatgcacttatcctaaagagaacattgaaagtcaagggggtatgtccagtggtttgcaaagtggtgtctccaggggacatttacagtcaatgtcatctacagaaagttg

SEQ ID NO: 301587 - DNA, 589 bp, Homo sapiens
ggaggaggaggaggaggtttttcttcctctccacaaagtctgaagcccccacttttattatgtgcactagcatattggcttggcaactgatgtgtttcttttatagcattgctctgcataaaactgcatgattccaacttatggtacaccagagtttgattatatttaaaagtcaaacatgcaagatgtccattgtccacatcagggaggaaggataagcagcaccatgaatcactattctttgtacacttttattccccaaactaattgctcatttgcttaaataagaggctccactatgagtgtctgtcattagcaaatgaaagctgattatatttcrtaagaacgtcggaacttcttaaaccttatatttcataccagaaacctaagctgaaatatttccatgtagtgacacttctgatggaggaaaaataatttaaacaaataattagtcttgagaataaaagtgtacacaaaagtacaattaatgaattcactaattgttcttccctgctgtggacatagctcaaagttgaattttaagctcttgcataaatataaactactgtacaagccacaaaacgggatg

SEQ ID NO: 301588 - DNA, 494 bp, Homo sapiens
actataaatgaatgaaaggattgttgaagtctgtcaaggacccagatgacactgtaaaagaaactttgcaatggcaccaccccttgtatttgggtgaatttcctctatgatattcagtacccctgctrttgttttggctgtacagttctccctcccatcctccaattttccaagtattgcagtgatcactatcccttctgttcatgtaggtatagcagccatgactgtgccacaattgactgatcctgcagcatgaaactgatcccatcttggtatatcagaacccttccctcaggaatttaaaactggatctaaaagcttccatctcagtctaccttctctgaaactgtaaattcagaaattactggtggaagccattcttaccacgaggataaaaagaaaaaagaatgcagcaagaaaagagacaggggcagaagcacaaagagaaatggaaatgatgatacagataatttcctagacttcctgtagtactc

SEQ ID NO: 301589 - DNA, 528 bp, Homo sapiens
caggcacaaaataccacaaattgaatgattcaatttgtttgaaatgcccaaaataggaaaatccatagagacagaaagtagattgctgactgtgatgggcaggggagaagggaaaatggtgaatgactgctaatgggtatgaggtttcttctggggagatggtaaygttctggaaataggtagtggtgatggttgtaccactgggtgcatatactaaaagccacggaattgtgcactttaaatgagtggattttatggtatgtgaatcatatctcaattaaaaaatcaaaaattaaaaagccattgcagtacaagaaagagtaagcaaggaatgaaggaatgaagaatgactgggactgggtaagagggttacatggatcactcattcattcagcacagtgttatgagcacctactacacctggccttgttgcaaacagagctgacttagagtgaatgaaacagatgtggctcctgtagtcttgaagtatcccatctggtaagtgaaatagacattaattcaacaacg

SEQ ID NO: 301590 - DNA, 590 bp, Homo sapiens
cacctcatttaatcagtctttattgagcatgtgttgaaattagcaatggggaacagagaaaaaaaaatctctgccctggaaggtcatatagtttagttaaaacacatacatatcaaattatktactataatcttatgtgttggtttagtttttgtttacttttcataaaactcttttaaacaaattttaattctactgtattgtaggaactacaggctttttctgacaagttggtgagtgtctagttgaaatagtttgtatccatggtcagggagccataaatgttgctaaagattcaacagttgatgggagggaataggcatgtgcactgttaagaaggaaacaacaaaagataaaaactgataagatgaaaaagcaatctgggaactcttctaaatgggcagaatcctcatgtgggacattgatgtcacaagtggtcttttctcctttgattgtgtagtaaagggttaccaggaaaccaaagagaatggcacaacctgtttgctgattaaggaggcaagttcagagtgtcatgtgaagcggactacagcccaagttgggtgtgccaaccatttattcctgggatgtaa

SEQ ID NO: 301591 - DNA, 590 bp, Homo sapiens
cacctcatttaatcagtctttattgagcatgtgttgaaattagcaatggggaacagagaaaaaaaaatctctgccctggaaggtcatatagtttagttaaaacacatacatatcaaattatttactataatcttatgtgttggtttagtttttgtttacttttcataaaactcttttaaacaaattttaattctactgtattgtaggaactacaggctttttctgacaagttggtgagtgtctagttgaaatagtttgtatccatggtcagggagcyataaatgttgctaaagattcaacagttgatgggagggaataggcatgtgcactgttaagaaggaaacaacaaaagataaaaactgataagatgaaaaagcaatctgggaactcttctaaatgggcagaatcctcatgtgggacattgatgtcacaagtggtcttttctcctttgattgtgtagtaaagggttaccaggaaaccaaagagaatggcacaacctgtttgctgattaaggaggcaagttcagagtgtcatgtgaagcggactacagcccaagttgggtgtgccaaccatttattcctgggatgtaa

SEQ ID NO: 301592 - DNA, 617 bp, Homo sapiens
cacatatactaggcatgatgataaaatgaaatgagtggctataaayaaagatcatgaatgtattaattagaaattagttgaggggatgcctagccatggtgaccctggttgacctcttctatcatttttcccccattgaacaatattttttattatttttcatcataagtccatcagtgattatcagcaagactgcatttgtgtgcagcaggggtggtctcctcttcaataactgccttgggttctgatgagaatcttcccatcatcttgagacttggcagcgtattaatatgtaacactctttaaactgtcccagggccggtcaagtaatgcaatttacctcatttggcttttgcattgcactttccattggaagggcttgtgcactttgcatgttttcagttaatgaaggattgcagtgtgcctgcaagctttgtttgaaagtgccatgaaatggaggaaaaaattagcacccagaaggaaataattgttgctctggataagtttgatcaatgagggaaaggaataaagagattgtaaatgacatttaaagtctttagtatgagatgctcttgagtaagcacaacactgcagctaaggttagcaatgaattagtt

SEQ ID NO: 301593 - DNA, 636 bp, Homo sapiens
tccttctgggtgttgggcaagactccctctggaatgggggttttatgacctacaatcaaacaaggtaggccagatcatttctttatggccagtttttacacagacaggtggagggaaagttagcgtaatatttttaggttttatggccggctttgggaaaaagacgatctggtttccatgacccaccttggggtttctacggctagccttgggggagaatgggactgagagtcaggagggcaggagagggtcgcagagacacttttgcttctgaggttgwttctcaggtttccattttggggcactgttttctgagtcccaaaaatgtaatattttaaatacttatatggatagtctattcatgtgttgctttataattagatattaattaaaataacaactcagagcagtacgtgttaagtaccaaatgagtggtggagacagtaactgccgcagatcagagaagctttgtatagcagtcagctgggtactcatcagcacctcccatttgcagactttcaaacatagtcctaaaatattaaatggcatgatttttagctgagcttctccaccaaatatatacccagaaagcacatcatcttcctcattaagtagttaccaagaacctactgtgtg

SEQ ID NO: 301594 - DNA, 636 bp, Homo sapiens
tccttctgggtgttgggcaagactccctctggaatgggggttttatgacctacaatcaaacaaggtaggccagatcatttctttatggccagtttttacacagacaggtggagggaaagttagcgtaatatttttaggttttatggccggctttgggaaaaagacgatctggtttccatgacccaccttggggtttctacggctagccttgggggagaatgggactgagagtcaggagggcaggagagggtcgcagagacacttttgcttctgaggttgtttctcaggtttccattttggggcactgttttctgagtcccaaaaatgtaataytttaaatacttatatggatagtctattcatgtgttgctttataattagatattaattaaaataacaactcagagcagtacgtgttaagtaccaaatgagtggtggagacagtaactgccgcagatcagagaagctttgtatagcagtcagctgggtactcatcagcacctcccatttgcagactttcaaacatagtcctaaaatattaaatggcatgatttttagctgagcttctccaccaaatatatacccagaaagcacatcatcttcctcattaagtagttaccaagaacctactgtgtg

SEQ ID NO: 301595 - DNA, 551 bp, Homo sapiens
acaatgttcacgacattccatctgtcatagaagcaagcatgtaggaacaccatttggacaggagaaatgggaactagctgcagaattgtgaggataagacccagctgggaaaatgcttttggtgccattcagcctgggtttatactcctacatgaggtgagaaggatcaagaacgaggaatccaccacgtcgctatcccacactgtcacccaggaccaggctttctcggctgggtctgaaggagcactaggctcaacttccaggaacagtgcactcactaccctcaggacagatcatcatccattcttgtttgcacaatatagatgtattctgcctttcacacattggaaagatatatatatttgaaaatagctgctgtgaccttcctacaatgcttcttctctaggctaaatatcccgtttctaaaawcattcctataattccaaggttgagcttcctcttggctcactaactaccacccagggctataccttgaagtttactggcttaactgcccaaaattgttagttatcagcactttggtatgaatt

SEQ ID NO: 301596 - DNA, 507 bp, Homo sapiens
agcaagaaagtgtgattcataactaagagaaatcccagcaatataaatagacccagaggtaacacagttaattactggaattagcagaaaattattttaaaacagctattataaatatattcagtaatttaayggaaaaggtggatatatgagtaatcagataaggactctatggaaaggaacagaaactgtttataaagaaccaaatggaaattttagaattagtataatatccgaaaataaaatttcaatggataagcttgacaacacattggagactgcagaagagatgataagcacacttaggtgattagaaactctccaaacttaaacactaaaagaaaaatactggagggaaaatgaacagggcctcagtgacctagtaaataatatcaaatgggctaacatgtgtgtaattggagtaccagaataaaaggagagagagagattctggcagattagaaagacactggggcagaaaaaaaatgtattacaagaaataatgac

SEQ ID NO: 301597 - DNA, 331 bp, Homo sapiens
aaatctgcaccttgctcttagagtatgcccttcccaattaaagaaaagctgctctcctgccagtcacrgaaaaaaatagctgcccttctcaactagaaattcttccaagtccatttgtcctgaccttgatcaaagtttcactgctgtggattgggatattgtgtacagtgtctgatagaaagaatttactctacagagaaaaattctcaggatagccacccctaggacactgattataaagtcctcatgtgacagagccggcaattcccgcatccagatgtcaaaagctggttaattaagattaagacatagttgcttgagcaagtccagt

SEQ ID NO: 301598 - DNA, 606 bp, Homo sapiens
cccccaatcaactaccagacttgagccagtttatagacccagaaccctttgactaaatggaaggttgagtcccctcaaggaaggacccaagtacactaccaaaaatgtgtactgttaatctttctcccagcaggattctgtaagtaggaatggggacattcctattgccttttactagggtaactgtacattgggaaaataaaagaaataatcaggcctttcagggactactgaacactgtttctgaactgatactgattccagaaaattcaaaatgtcactgtggctctctagktagaacaggagcttatggaggtcaggtgataaatggagttttagctcagatccatcccacagtggatccagtgagtccctaaacctatcctgtggcctttcctcagtttcagaatgcataattggagcagatctactcagcaggtggcaaaatccccacactgactacatgacttgtaaagtgggggctgttgtgatgggaaatgccaagtggaagccactggaactacctctacatagaaaaatagtaaaccaaatgcaattcaaatgcagtatcccttatgcaaaatgcttgggaccagaagagttttt

SEQ ID NO: 301599 - DNA, 554 bp, Homo sapiens
ggtttcaaactatggccattattactgactaatttatagaggttgcagtcagccttgtcctagcggcttaacccagttttgtttccaggggcaatatacattgttgaagttaattgttccctaaccactttttccatatggcagagtgagtctctctgtaatagctttggaatgatttatccaacgtgtgtcattatrccttggatattgcttgggaagtctcttgaatctttgttgggccataacgtatttccaagtagatatgttgaaactgctaccttaaacccaccaattgccttaattttgttgcctgcattaagatcagtttgtaatattttctccacaagtgaattaaatgttattatccttattatcattattgatgctatcattgtacaggtgcaaaaatatttctatttccactgtttctgaatcttcctctatggatctacggttagtgattagtactatattaatcattcattaacatatttggagttccctattcatgctggaaactagtacaggctttcagtaaagttagaagcgacaga

SEQ ID NO: 301600 - DNA, 554 bp, Homo sapiens
ggtttcaaactatggccattattactgactaatttatagaggttgcagtcagccttgtcctagcggcttaacccagttttgtttccaggggcaatatacattgttgaagttaattgttccctaaccactttttccatatggcagagtgagtctctctgtaatagctttggaatgatttatccaacgtgtgtcattataccttggatattgcttgggaagtctcttgaatctttgttgggccataacgtatttccaagtagatatgttgaaactgctaccttaaacccaccaattgccttaattttgttgcctgcattaagatcagtttgtaatattttctccacaagtgaattaaatgttattatccttattatcattattgatgctatcattgtacaggtgcaaaaatatttctatttccactgtttctgaatcttcctctatggatctacrgttagtgattagtactatattaatcattcattaacatatttggagttccctattcatgctggaaactagtacaggctttcagtaaagttagaagcgacaga

SEQ ID NO: 301601 - DNA, 591 bp, Homo sapiens
tatcaagtatgacaccttgcaaatgacaagctctcaataaaaggtcaactattattgaccaacattaaacaatattaagtgtgatttaagcagatagaagaacaagaagacactttaaaaaaatatctatggctttattaacatccaaggaaaaagataataaatgacagtgaggccagatgctgggtgcatagatcatgaaaacattagccaccaaagcacctgrctgctttactgacacttccttagtcaactgcagaagagcaaaaagaaaaaaaataatttatttccctatctctgtataatgaactctcttggctgcattgtttgaaacagtgaagaagttttggtatttgcagcatacttcatggtttgaaaatgttgatatatatgtattctaacttgattatgtcaggccagtagaacaaagacattccaatttccatgtcaaggtgataactggattatttaggtgtcaaaagtacaaaatgtgtattaaacctctctctgccttggtgtaatgatattctgtatgggagacgtatacacaatagtcctgtacaagtcaaacaaataagcgtgatctgcacc

SEQ ID NO: 301602 - DNA, 599 bp, Homo sapiens
agaaaattacctggtatcacatgcttgttataatattaactaacttctcaccacctctcagaaaatttaattagcattgacatgaattgacaagctctcgccctaratctgcttccattaaaaaataattacatttattagtgttattgaacacatagtttatccaatacaatccttctgacttcctgaagcttgtcgggtacctgagctactgcaatggcatgcctactcagctatccgtttccaaatgtttcccattgtaaccattcactacactgcctttggggtatgctttccttccaaaagacggatccattcatatcacctccttgcttcagaaccttctgtgattcctgatgtctaatagaataaagcctagatgtgttatcctggcattcaagacaattcatgttttgatatcaacctaactttcctgtctcaagttctgccaatctcagtgatgcactcctgtcaccactaactacttactgtcctttgagccctttactgttcttgcccctctagccacccatgcttgttgacttgcttctttatgggaaagccctcttgtctcattttctgctgctatgtgaccttac

SEQ ID NO: 301603 - DNA, 599 bp, Homo sapiens
agaaaattacctggtatcacatgcttgttataatattaactaacttctcaccacctctcagaaaatttaattagcattgacatgaattgacaagctctcgccctaaatctgcttccattaaaaaataattacatttattagtgttattgaacacatagtttatccaatacaatccttctgacttcctgaagcttgtcgggtacctgagctactgcaatggcatgcctactcagctatccgtttccaaatgtttcccattgtaaccattcactacactgcctttggggtatgctttccttccaaaagacggatccattcatatcacctccttgcttcagaaccttctgtgattcctgatgtctaatagaataaagcctagatgtgttatcctggcattcaagacaattcatgttttgatatcaacctaactttcctgtctcaagttctgccaatctcagtgatgcactcctgtcaccactaactacttactgtcctttgagccctttactgttcttgccyctctagccacccatgcttgttgacttgcttctttatgggaaagccctcttgtctcattttctgctgctatgtgaccttac

SEQ ID NO: 301604 - DNA, 616 bp, Homo sapiens
gtctcctgcaaaacctcaaaattaaaatggtttcagaggcttaagtgcgacatggatctgctttcttcttcaaataaacctctgtaggaaggagttcagctcgactacttcgaagggccgaaatcatagcaccttgaggcaatgtgtgttgggggcatttgtatcaaattcttggagaggctgccacaggtgacatgttctcacactggcatcgtggacaatgtttccccaaggcagataccrcagcacagggagaggaagtctgtgtgcctctccttcccgccccctactttgggtccccactcggtgcgggaatgttgaaatgcacataggctggccacattttttataggtattaatttgttgttaatttggagttgtccaaagtctttttttgaggtccctctctctgtctctctctctctcgctttccttcctatctctgtctctttgtatctctgtctccttctctctctctctttcatgcgtgcacacacacacacacacacacactatcactaccatatcatagccaccaccatcatctctcttactccctttcttccttttcttatacacacagtaacaacttggtggatagggggaggttggggga

SEQ ID NO: 301605 - DNA, 489 bp, Homo sapiens
tctgattctctcaaggcatttttccctcataatgcctcagttacactaactcaggttgagaatggtgaagaatgctttatraaaatcagagttgttttttaatgaggccatctggtgagccttctgcatttatatcctcttctcccaacaggttagaagctgaaaaattctctgctagtatagtattagtagaaattatttatagtatggcagaacagccactgtaattacaacttaattcttaggtgacaagagacagaacgttaattagatcttgcagataatagtaatgaccattcacatgtaccaagcatttgctcacatgtaataggtatgaattcttagcatcactcacttggggtacacaagaaacataattttcattagtttctttaataaaataatttgaacctacaacctacctagtggtcagaacatcatctacacactctcaggaaaggtccgatgcagcatgtgttagtcactcag

SEQ ID NO: 301606 - DNA, 612 bp, Homo sapiens
aatttggcagttgtgatttcctaccatggacctttctaattccaataatggtgctaatatttgtttctgggtatcagcctaagcgctgttcatggattatgtcatttgattatcattcaacctgatctactagaatctattgttatcatcattttacaaacgaaaatgataaggtttagtgcggttcagtaagttgccaaagtctgcctggatagtaartatttgaacaaaggcttgaacctgggttgtctgtttccaaagcccaggttataaatctccacattacccagtcttgcgaatgtgcgcaagtttagcatatacaaggtgggagatgggcatttccttcctgacagttgtttagagattaaaacaatgttgtatttcagttgtataatttctggtgatagatataattatctactcttctggtacaggggattaaaagtggtcccaccataaactgctgagcagtagattcactctttctgccgtcctgcatagcacacaatattacattgttcatagtaggcactaaataagtctttgcttattattaaagaagagaaaataaatgacttttatgatgcctattttcataattctagtcaaaaa

SEQ ID NO: 301607 - DNA, 446 bp, Homo sapiens
ctgttcctaacacacatttcttaaagcctggtatggaaccagaagatgaatagttgttgctatgattaaggattaagactttatatcagaaagaatccctgaggtccagtttttacaagaatcttgttagtactgtaataagagtgaaagaagaaaaacatggaaaccattttcaataatcttgcccagtacactgagatatgaatagtaaatttgatcaagaggtacttgactttttcgctgatcatttccccatgaagggggggtgtcatagccaactgmgtgtattgatgagactctcttagcctttccaaacctctgtttattcacctataaaatgggaataaaaatgctgaggtatataaataatacacagctgaggctgatggaaattacaatgacacaagtgaaatgtactctctctcctaaagctacaggcaagatac

SEQ ID NO: 301608 - DNA, 634 bp, Homo sapiens
tgatgcttaaaacatagtaggtgtcaagccaaagtcagagtttccaatttagcaggtggcctgtggcmtcactcattctaggcagcttcactagatccccctccctgtggaagaagataaataagggagatccatcccattcctaggaaagacattgtaattactgtgggctgatagcaaccccttactcctctgaattcctgtaacactctatttgtgtttttcttacaaaattatcctctcctgtttatcagtgtatcaccagtgccttgcacactgcctggcacttggcagatgccaagcaactctgtgttaatgaatgagcaagtagtctgtactgagagacaaagaacctggaatggagttgctctccagattgcagtgtcttgtaaagattctccaccatctttacataatatatacaattattatttgtcaattaaaataaagttaaaaagacaaagtgatatggtttagctctgtccccactcaaatctcatgttgaattatggctcccataattcccacatgtcatgggagggacccggtgggaggtaattgaatcatgggggcaggtctttccggtgctgttctcatgatagtgaataagtcttaggagatatgatggtttaac

SEQ ID NO: 301609 - DNA, 634 bp, Homo sapiens
tgatgcttaaaacatagtaggtgtcaagccaaagtcagagtttccaatttagcaggtggcctgtggcatcactcattctaggcagcttcactagatccccctccctgtggaagaagataaataagggagatccatcccattcctaggaaagacattgtaattactgtgggctgatagcaaccccttactcctctgaattcctgtaacactctatttgtgtttttcttacaaaattatcctctcctgtttatcagtgtatcaccagtgccttgcacactgcctggcacttggcagatgccaagcaactctgtgttaatgaatgagcaagtagtctgtactgagagacaaagaacctggaatggagttgctctccagattgcagtgtcttgtaaagattctccaccatctttacataatatatacaattattatttgtcaattaaaataaagttaaaaagacaaagtgatatggtttagctctgtccccactcaaatctcatsttgaattatggctcccataattcccacatgtcatgggagggacccggtgggaggtaattgaatcatgggggcaggtctttccggtgctgttctcatgatagtgaataagtcttaggagatatgatggtttaac

SEQ ID NO: 301610 - DNA, 650 bp, Homo sapiens
gtgtgtgtgtgtgtgtgtgtagaataatattaacctctacctgttttcccttccccttaatatttgaaaatactgtgtataattataagtgtgaaaatgtgttcctattactaagattcctttcctaaaatgtcgtagatgagacagtataatgtaagatcatgatatgttagctcttcttatcagttagctttagtttaaagagactgcaaaagacctgcattttagaaatacaatgccaggatattaagaaaagttatatttaaattttgattaccttaaatgtacatggacaactcagtggattaccttattttttgcatttgcctttgttaaaaagacaaaaataaaagaaagcaaatgaaaccaaaagacaagaatcaaaattaagttcaaaacggcagtctggtactcagactaggtacagctgtaccttctacgctttcgccacctactgggcaaaggsagttgatgctcaaaatgagtagaaggaacttggattctccagataacagaaaaccctaaagactcctccaaaaaacaaattttataaattcagtaaagtgtcaggatgcaaaatcaacatactcaaaatcagtggcatttcgatgcaccaataacaataaagcttagaacaaaatcgagaaggc

SEQ ID NO: 301611 - DNA, 568 bp, Homo sapiens
ggaaacctcctgaaagctatggacttactccatagaamatttttcatgtgtgcatatattaaaaaattgtcatgcggacatggtggattcagatacttctcaggattctctaacagaccaacccagagattcaaggacctcagcctaagaacttctgctctgacagagaagcacaacttataaggtgacacaactggtgatggactatggatgcctcctttgaaaacctatccctcacattcattcacagctacttttggggcagctactatttccaaggaactttccagatctactgtccacttaggtttctgatttcacaccttccacttttcttggatatttaccataaatcaggtcctttagaatcatgtcaccagttccatttttgttatttccatgtgcaccaaaactgtatctattaagaaaatccaggatctggattttttgagccagtctgcttcttagaagggagctgtcctgaatgaaaatcacttcattgcaacggtaaaataaaatgttccacagtaaagtgacatagctgtacctttttccctcgactgtaaaa

SEQ ID NO: 301612 - DNA, 568 bp, Homo sapiens
ggaaacctcctgaaagctatggacttactccatagaaaatttttcatgtgygcatatattaaaaaattgtcatgcggacatggtggattcagatacttctcaggattctctaacagaccaacccagagattcaaggacctcagcctaagaacttctgctctgacagagaagcacaacttataaggtgacacaactggtgatggactatggatgcctcctttgaaaacctatccctcacattcattcacagctacttttggggcagctactatttccaaggaactttccagatctactgtccacttaggtttctgatttcacaccttccacttttcttggatatttaccataaatcaggtcctttagaatcatgtcaccagttccatttttgttatttccatgtgcaccaaaactgtatctattaagaaaatccaggatctggattttttgagccagtctgcttcttagaagggagctgtcctgaatgaaaatcacttcattgcaacggtaaaataaaatgttccacagtaaagtgacatagctgtacctttttccctcgactgtaaaa

SEQ ID NO: 301613 - DNA, 589 bp, Homo sapiens
cactgtatttcacagatgctgggatgggatacaaatccctaacagaaccagtggtttgtggggatagaattagaagaaatgttttgacacaaattcagaaaaagcccaggacaaagatgtaagaagatgtcagacttgctcgagtaaaaggaggcagctgctgcttgactttgattcatttatgtgtttacgtttcctggaaagaactggtagacaaatgccagagggagtaggaggagctgggtaatgtagaatgtgcttcataggaagtggatctctttaatgataatgattattataatgttctcatttcttartgctacaagtccaatgaaacattagaaatgaatcaacaaacccatttatcatgtactatgagaatttctgcctgggtatggcattaggatgtaaggtttaaaaagcatctaaaggctatgctccttttaggatatttcctagaaatcatgggaatagtcttatttgagatgtgcccaagcgcagcccatggtacctcccaaagtaaaaaaaaaacaaacctgagagtcatcctgcatgtctctttccatcatctcattcagtaagttaccta

SEQ ID NO: 301614 - DNA, 581 bp, Homo sapiens
tgcatagaaatgaatgaagggcagtcagggtgagaagagtgttctggtggaaattacggtacatgtaaagactctgtgggaggatggatcctggtgtatttgaggaactgggctgcataaagcagtgatgtaaggggcattacaggaagatataatctggagagacagtcaatggctagatgctgcagggttttatggatctgctaaggatatgacctttaatctaacagcaatgcaaatttactcaaatgtgttaagcaggatgagcagacttgaattcagaaatgacctctctggttgctatgtggagaatagcttggaggaaggtgtgagtgggcagaagagtagaaaacagtgagaacttttatgggatgttgcagtcatctgagacagasagcgaagtgagagtggagatgaagagaagtagacagattgacggaaattgtggagggaaaatggacaggatttagtgctgaactggatgacagtggatgagggaggtgtcaaagatgactttgctgaatgacggatggcagcattttcctctgtcttggtgtaatagaaatcgttttgtcagtatt

SEQ ID NO: 301615 - DNA, 552 bp, Homo sapiens
atcactacaataataagactagaattaaataatttcactatgttatgtaaggaaaaaggccaagtgtaatataaaccagagaagaaaagccactctaggaaattttctggagcataatttcatataaagtatgtgtacttttatagataacagttttacctagtgattcatcctttgtcatttattgaggaatggttttctatgttgtttgctcctgttaagaaaataaaccaatataagacacaattccttcttgctgacaggtcaccaatccagcttagaaagtaggagatggctacacttgtgagacccttatttttatagtttctatcaaagagttacaatgagtrgtcctgagtaagagtcatagtgccatttctgagaactgactctgtgccaggcctgtaatttttgcataaatcacattcattctttataacacctagttttgaaaataaaaacacctgagccattgaatggttaagaaacttgccccaaggtcacacagttagtgtacagactgaagattaaatgagcaataataatcacagt

SEQ ID NO: 301616 - DNA, 584 bp, Homo sapiens
acttttaatagttgacttagaaccagcaaccaacacagagatgtaaccaccagtgaaagttggaagctgaaatatactgagatcttgtgctctaaaatagcacctcttagaaactcacctactcttcctcaaactcagctctagaattctccgaccatgactttgaaatattgatgtatattattccaaaagacaaatcatattatggtagaaaataaagacaaacaaagagaagaaagcaaggatacacccccacatcttcctacctggagacatccattattaactagttggtgtagtgctatccaggcctttgactatgggattatgcctctcccctctgagacacgacagctctttacacactcaaacacagctattttggctttgtctttaattattctccaagccacatttctttcacttgccagacaattattttagacaccaygtccccagtcctcactccattctaccttcatcttccagctgaaccaagggcaatgctcttcttcagaaggaccataaattccctcaatccagacattaagctccttttgatatatctcattagagcaacatca

SEQ ID NO: 301617 - DNA, 351 bp, Homo sapiens
cagtccatcagcaaattcttcccatgatcccttcaaacttataccctgattctgaccactgctcacctcccacaatggactgccaaccaagagccctcctatcttaactggaccattgtgatgacttattttctcttctccctgtttcaaccattgttcctgtctcaaagctgtgctgcacatgacagccagaggaattatttcaaaaataaaattaaagcatgtctagccttcttgctccctctaatgactttctattacgttaaaagtaaaacccagtgtcttgatcttggcctrtaagacacaatatcatctggacactagctacatctccaaactccttacgtagca

SEQ ID NO: 301618 - DNA, 438 bp, Homo sapiens
ccaacaccttaagtgcaaaaaagtggggaaagaaggaattgttagggtcaacgtatctgcagcacagtctaaaatgatgttgtcacattggcttcwttctcaggcaggctctcccaacgatggaaagtggcaaacttatcatcccagattcagttctgagcagaaaggtgtctctcttaccagtaattccagccagctctgtgagactgatactctttggtttttattggctcacttgagtcttatgcccatccctgaaccaatcactgaggttggcaggtaaggtatctgcattgaccacgtgggtattatgtgcccaccctgaagctgagacaccccatcagcccctttgtaaccacgaagattgaaaatccagtaggggtgattcccgagggaaaatcaacatgctgccaccataaaatggataaacgaatgtca

SEQ ID NO: 301619 - DNA, 568 bp, Homo sapiens
cttatcttctactcttatcatggctgtgcctactggaagaagctctcactgggcaaccctcaataaaaagcctctccctgtcccttaagaaaatgtctaagcaggagaaatgccctatagcacagagagcccttagaggctgctgcattcttgattttgtagtctcttccataaaattttactctcaatgagtgagtgggtcttacataagaacttacaaattcctttgtatatgtttacatttgcctcaatgatgaggttctcaaaggcagaggactgaatgtctttggccccacacagacctaagctccaaaactggaaggtcgaatgattgtgaacaagtgactttgtgtcttygtgctttagttttttgtttgtagaatggggacaggaccacctaagtcacagaatcattgtgagcattaaagacctgagacctttacataaaagcctccatataatcagaaatacttttaattaatttacatttgtgaaggcagtataggctagtggtcaagcgtatacatttttggtagcaggccaacctggatttaagccctgacttact

SEQ ID NO: 301620 - DNA, 568 bp, Homo sapiens
cttatcttctactcttatcatggctgtgcctactggaagaagctctcactgggcaaccctcaataaaaagcctctccctgtcccttaagaaaatgtctaagcaggagaaatgccctatagcacagagagcccttagaggctgctgcattcttgattttgtagtctcttccataaaattttactctcaatgagtgagtgggtcttacataagaacttacaaattcctttgtatatgtttacatttgcctcaatgatgaggttctcaaaggcagaggactgaatgtctttggccccacacagacctaagctccaaaactggaaggtcgaatgattgtgaacaagtgactttgtgtctttgtrctttagttttttgtttgtagaatggggacaggaccacctaagtcacagaatcattgtgagcattaaagacctgagacctttacataaaagcctccatataatcagaaatacttttaattaatttacatttgtgaaggcagtataggctagtggtcaagcgtatacatttttggtagcaggccaacctggatttaagccctgacttact

SEQ ID NO: 301621 - DNA, 550 bp, Homo sapiens
tagcacagtacctagtccacatgtggcactgaaatgtgtatgtcttcctcctctgtttatatgcattatttctccagtatctacattgtgctttacaaactgtatgctcatcacaaaagttgcaaatgaaaactctawattcctgtaggcactaatgcagaacattgctgcacaccctccatcagtgttgggtgtcatcctattcctccatcaggaagcttttcctaacattctggccaagcagggacatttcaagaggctgtttctcctcacttactgttgcaatagacctaattgggctggtaacaacagtggactcccttggtgacagaagagtggtaaacacccaagaggaacagttacaatttcaaacttgtaagagctgagaactgctaatttcctgccagcaagactgacatggctgctttttagttgacctcttcaagggaaacctcagaaggcccattgggagctttataatgtacggtgcaaagaggccctgaactgattttgttcaaggggaattttatttgtgtttatattggctact

SEQ ID NO: 301622 - DNA, 550 bp, Homo sapiens
tagcacagtacctagtccacatgtggcactgaaatgtgtatgtcttcctcctctgtttatatgcattatttctccagtatctacattgtgctttacaaactgtatgctcatcacaaaagttgcaaatgaaaactctatattcctgtaggcactaatgcagaacattgctgcacaccctccatcagtgttgrgtgtcatcctattcctccatcaggaagcttttcctaacattctggccaagcagggacatttcaagaggctgtttctcctcacttactgttgcaatagacctaattgggctggtaacaacagtggactcccttggtgacagaagagtggtaaacacccaagaggaacagttacaatttcaaacttgtaagagctgagaactgctaatttcctgccagcaagactgacatggctgctttttagttgacctcttcaagggaaacctcagaaggcccattgggagctttataatgtacggtgcaaagaggccctgaactgattttgttcaaggggaattttatttgtgtttatattggctact

SEQ ID NO: 301623 - DNA, 596 bp, Homo sapiens
gtattttgataggaattgcattgactctgtagattgttttaggcagtatgggcattttaacaatttttttttcaatgcatgaacatggactatttttccattttcttatgtgtcctcttcaatttctttcatcaatgtcttacagttttcattgtagatatctttaactttgtgagttaagtttattcctaggtagtttatcttattaatattagttgctattgtgaatgggattactttcttggtttctttttcagattgtttgctgttagcatgtagaaatsctaatgacttttgtaagttgattttgtgtcctgcaactttactgaagacacagaatagccaaagcaatcctaagcaaaaaaacaaagctagagacatcacattacctgacttcaaattataatacaaagctataataaccaaaatagtctgatattgtcataaaaacagacacatagaccaatggaacagaatacagaacccagaagtaaattcatgaatttacagacaactcattgttgacaaggtaccaaaaacatacattggagaaaggacagtctcttcaaaaactagtgccatctccactagaacaa

SEQ ID NO: 301624 - DNA, 596 bp, Homo sapiens
gtattttgataggaattgcattgactctgtagattgttttaggcagtatgggcattttaacaatttttttttcaatgcatgaacatggactatttttccattttcttatgtgtcctcttcaatttctttcatcaatgtcttacagttttcattgtagatatctttaactttgtgagttaagtttattcctaggtagtttatcttattaatattagttgctattgtgaatgggattactttcttggtttctttttcagattgtttgctgttagcatgtagaaatcctaatgacttttgtaagttgattttgtgtcctgcaactttacygaagacacagaatagccaaagcaatcctaagcaaaaaaacaaagctagagacatcacattacctgacttcaaattataatacaaagctataataaccaaaatagtctgatattgtcataaaaacagacacatagaccaatggaacagaatacagaacccagaagtaaattcatgaatttacagacaactcattgttgacaaggtaccaaaaacatacattggagaaaggacagtctcttcaaaaactagtgccatctccactagaacaa

SEQ ID NO: 301625 - DNA, 541 bp, Homo sapiens
taacgaaaaatgcaagattagtccaaaactaattatgtgttaacaccagctgctttctccatacttaatagataatttttaagtgcttaatgatcaatatgtttaagtacacacatctgtagccaaagaaagggcaggttgaaacataggcaagatggagtacaatcctcagtactattgatttggaatttagtcacccctctgaagaaagcagcatcttctagctagggactgaaatatgatatactttataaacttgcctataagattagtttttagggatagtctatatttgatgaacactgtggttgagcacaatatattttattaaagtaaaagttttcgtttgatggccgttagtatatttagaactctcataaatgctgttgraaaaagcaaattgatttgaatttatttatcagtattggctctaataccacactttctgattaaaccacccaattatgactttttttttaagaacaagagaaagacataacccagaattgaggagttaaccaagcttgcctctgacaaaaat

SEQ ID NO: 301626 - DNA, 497 bp, Homo sapiens
gattctattaagatcttggaaggaagcttggaggaagagtttaatctgaaaaatacctaagagctrctgagtctccacctgcaactctgctaaggataaggaaagccactgggtctagaaaccagtaactttctgagatttttaccatcattcagaggtgaatctcttcagaatccagcattggtcttgacgagctaggcagccaccttaagaactcagaacagtttatgcaggactactggtgggtaggaaaggtagaatggaaagcagaaatcagagattgtcactcagaaacatacaattctcccttctagtcaagtgcaaaccagcccagggcttgataaccacaggccagtctgtatcttcaatatagatgcctgccagttatttagctcatttcagttttgttgtggattctcccttctgcatgtgtttttcctcctctctgatttctaagccaagcttttcagaagcaaagaaacttcagatctctgcct

SEQ ID NO: 301627 - DNA, 557 bp, Homo sapiens
ggcattggggcttgggcagctctgttcttgtggtcatttgcacatggctttgatggcattttctcttccctgtagcttagacaaatagaattggagcaaggaggaaaaaaagaaatctggtaagtatttctatccatcttgtattgatcttcatgacaaaagaaaaattgtgtgtggttgtttttgctcttatctgaagcactgtggctccctcagacaaaatgcattcccatatacaaaaagtaaatatatatatatatacacacttctgccaaaggccctagattacgtgttgtatggtttacactccatcattctacactagacccatgccctcatgctgataatctagttaatttagmtttacacctacactcaatcaacttaatatatgtgaaaaatacaaatccataattaaagttttggtgtcgctctaagtgatcaagaacatagtactttggcctcttggtgaattgattttaatgggtcagttgagactttgaggatctgctttcttcatctttccaatatcattgttggtaaattgaggccaaaat

SEQ ID NO: 301628 - DNA, 565 bp, Homo sapiens
ctcaagactaaacttgaaataattgaaattcaattatttccatcatacagaacccaattcatcacagttgttcgcggaactagcattgcacaaatatgttttaggaaatatgactccagatgacttcaattatttcagtggaaaaccacagagtttatgtataaatgtatcagttagagttctgactctgtccccaacagctatgtagtatatagtagacactaaaaacaaagtgatacttttttttaactgcccaccttcctggcttccaactccracctacctgccctgccaaattaagtttattttttcccagcctaagctgacttccgttcttctctaaacttagaatcatccaacctatttaagaggaaatgtataatcagccacctgcctttctccatgctatctcgtaaactttgatgcttccttttagttttcattataaatgtaaaacccacctgcttctgtatgggctaccaaataaacctctcaacagttctagccttcctcaagtacctcaatacccatcctgtttcatccgtagctccaacatggaacagca

SEQ ID NO: 301629 - DNA, 614 bp, Homo sapiens
gttgcatgatttctgaggctgtcttagaagaaccaattcagmtttgatatggactaaatatttgtttccccccaaaattcatgtgttaaaatcctaaccctcaaactgatggtagtaggaggtggagcctttgaaagctgagtaggtcatgaggatgaagccctcataaattattagtgcctttatacaagggatcccagagaattctatttctgccacatggagaaatacatcaagaaatcaacagtctgaaaccaaaagagaggtctcatcagaacctgaccatcccggctagcacactcatctcagactttcagccttcagaactatgaaaaataaatgttttttaagccaccaagttcatggaaatttgttatagcatcccagacaaagacacacttccacctgtcccactctctctctcgggacatggacctctggagctctgagttgctatggaagtcccactaccctaaagtcaccatgctggacagaccatatggaaagactatacagaattcaagagagttgtccaaggagtcccagctgcactggtccaacagtctttgagtctccctacccagtcaccaacatgtgagtgagttttcaggtga

SEQ ID NO: 301630 - DNA, 643 bp, Homo sapiens
attgttattcaaaaatcacagaaacaagaagataaaaaaagaaagaataaatgaataaatgacaaaatttggaaaatacctttggatcaaaacagcagttgtatttgtagactgctttataattttccaaatattcttgcttcactcatcaagtatttattgtgttgggcaatgcactgtgttctgcagatactagtgaataagacagaggcgatccttgtccatttatgcattggatcctcaaaaccatagtcctataaggtagataaatctacttgacagataagaaaactgatgactgaagaaattacaacttaaaagtagacaatggaacctgagattcattcactcaacaaatatttattgagtgcctttcacatgctaggtgctttgctaggaactggacatatagaaatgaagctcagataaaaaagtatttgctctcatgttgcttactttctagttgtgagcattagaaaatgtcaaacacatataacatctaatatgtcagatgatgataagtattacatggaataataaatcagaaagtggaggtgggaagttcaggtgcgattttgcatagggttatttaggaaagtctctccagaagktgctattgagaaaagacagaaaagatggggaa

SEQ ID NO: 301631 - DNA, 577 bp, Homo sapiens
tagtaattgttccaagaaacagcatctcctgatgacttcatctcaggatctggctccttgaagtctctgactggctcccccaggagcaatcactcctactgggaaaagaattagaagggagtctggggaagcaacataattccaggcggatccctcaggaatatggaagaggaaaccaccttgccctttaaagaatgtctctctctttgattgtgaagtggatccaatggctgaccccctgcagttctactatataattacaacaaccctcttattgctaccccatatgaaatagactgtgaggccatcaaggccctgctttcaggaagctgtagtcaaacttaaaacaactggcttatttaagtgacttcactgaatcattctataatgcatacataggctaaaacattacattgtaccctataaataagtaaacacaattattatttgtcaattaaattttttaattaaaaaacactatcagaatgattattaagatggttcagtcactgtttggccagtcccagaagagaagcaaaatgaacctcagagtayagataaaaatttcatatattgt

SEQ ID NO: 301632 - DNA, 549 bp, Homo sapiens
gtttccagtcagtgaagaccagaaagatgagatctacagggagatagagtacttgcgtgacccatatggttagagtaaagaatggagcatttcccagataagagagaatgctgttctgtgaacacaaaagaacagatttttaccacacaatggtaagaagaatcagagaaattcccactgcacctgtgcttcagggaaccccacagagatgttggctgagcagtggctgagggaggcaacaggtggcagagtgaaaagcatgtcggccactagagtctaaacagtttctgtttacatcctatctgccatgaacaaggcattgggaagacaatggctgcttgataattttttaagcttaagcctgacgtctagggccaatgtaagatgcagaaagtttgtctctggmcactccatcttccttggccttagccattcccataattctcagtttccaggttctcaagtgctctctctctccatcgtaacccatgctctgagacaggtctcagacatctccctctgaaggagatgactgccaatgctttatgt

SEQ ID NO: 301633 - DNA, 549 bp, Homo sapiens
gtttccagtcagtgaagaccagaaagatgagatctacagggagatagagtacttgcgtgacccatatggttagagtaaagaatggagcatttcccagataagagagaatgctgttctgtgaacacaaaagaacagatttttaccacacaatggtaagaagaatcagagaaattcccactgcacctgtgcttcagggaaccccacagagatgttggctgagcagtggctgagggaggcaacaggtggcagagtgaaaagcatgtcggccactagagtctaaacagtttctgtttacatcctatctgccatgaacaaggcattgggaagacaatggctgcttgataattttttaagcttaagcctgacgtctagggccaatgtaagatgcagaaagtttgtctctggacactccatcttccttggccttagccattcccataattctcagtttccaggttctcaagtgctctctctctccatcrtaacccatgctctgagacaggtctcagacatctccctctgaaggagatgactgccaatgctttatgt

SEQ ID NO: 301634 - DNA, 576 bp, Homo sapiens
tgttttacatttttgcctgatacaaacatggctgctatgaacattcatgcagaagtctgtgtgtggatatatgacgccatcttatttgtcttgagcaaatagctaggagtggaatacctagggttttatggtagacaaatgtttaaatgtttaagcaactgccaaactattttccaaaatggttttacatttgacattacaacaacaatagagagttacagtttcttcgtatggcttccaacacttggcatggtccatataaaattgtatgacattggaaagtatttgccagtttcttataatgttaaatacacatctaacctatgccccagtaattccctttccttagtatatatgcaagagaaatkaatgcacatactcattcaaaaaggcttttataagaatgtcctcagaagcttgattcacaacagctcaacactgaagacaacccaaatgtgtatggacagaataatggataaacaaactgtagaatattcatatttatacatacaacgacatgggcaaatctcaaaaaatattatgttgaatgaaagaagccaaggccgggtgcagtga

SEQ ID NO: 301635 - DNA, 501 bp, Homo sapiens
aagggcttaagtatcattcccaaggctgcacagctcagaagtggtggaacggccattagaaacaaaactgtacacagaatctctgtttagtttatagcaagattttactgcatcacctgattattccaacagcctctactcagaaggtgtccatcattaattaaacaaacataaataccagctctgcagtctattaatatctgaagactgatagaggcttttgagctaacagtaagttctttggcagagttgtagtgcaacaggatagaaaggacattggatcacctttaaagcataagactttggcagctatgmttgtgtcagactgacctattgggaaaaaaatgataattaaaggaaattggatctggtgatctgaatggagcaggaaccaagaaaaccaggtcagtttcttcacctgaattccacatctttacctggcaggtcctcttctctctttgtccactatttttccttaatgtctaaaaggtcatttctcac

SEQ ID NO: 301636 - DNA, 501 bp, Homo sapiens
cattcaaacaaaatataacatttttaatcatataaggaaatacaggaaatatcctcagagacaacaaagcattctttgtctggatggcagtactcataaatctgttatgcaattgtctcctcattagcttttcatcccattttgctcaatgttaatgttctaaggatgttagccttccctgtcgctgtcattacataagggaatttcaagtatttatcaatattttcccccattaaaatatggaaattctttgttgatattcagcctctgtcttacattgcttcccctagagctggactttatggaaaacttctggctggaaaattctctacctctggggrcctggttccatgcctagtttgcatgaacacctgcaaatgataatgagagcccagatggttagtacaacagaggaggttgttgaatgttttgcagagctatgaaggtaattagaacaacttggctttattaagacctttcctcagggcctcctttgccttt

SEQ ID NO: 301637 - DNA, 570 bp, Homo sapiens
gagcaggtgaagtgtatacattggattacatttgtcaaaccctctacaatatgcagtcaccagcttctgccagacatcttgagagttgtgatggtgtcataaagcaagggttgacagtcccacaaaataatcatagacacatctgaaaatctattactatctaggatttccaaagatcaatttcagtcaaawaatattctaagtgctagtttcccatcaatgagtcccaaaaccaccacccctcaatattccatgttccttatagcccttgtttgacctccataattcagaaagcagtgattacttgtcacatgcttttctttaagtgtgggcttgatacatcatggaataaaggaactaattgaacttctaaatagatttttaatgtatattagtccattttcatgctgctgataaagacatacctaagaccgggtaatttataaagaaaaaaagtttaatggacacacagttccacgtggctggggaggcctcacaattatggcagaaggtgaaaggcacatcttacatggtggcagacaagagagagaatgagaaccaagcaaaagg

SEQ ID NO: 301638 - DNA, 578 bp, Homo sapiens
tgagaatacttaatgctacaatgtatgttgttcaggtgatggataccctaaaagccctgacttcaccactatacaatctatgcatgtaacaaaattgtacttgtaagccatacatgtatacaaataaataatgtgtgaaatcaagcagtctccctgtcctcccaccccctactcctggtccccttcactgatcctcagagcatgaaaagaatatggttccgacttcatttctttcctccttttgaatctcatgccaaatgtttcccgcagtccacagtgaaccaaactatgcaaaaaataaaattgtgggaaatggggctccaccttgactaaattaacccaaatccatgagcaattccacctctaaccatttatcakcaggaggctgagcatgagtacataaccagtcacattcaaagatgtctattgcaacattgtttgttattggaaaaaattagggaaataagtgaataatctgcagcctttaataagaagagatacttgcaattaacaagttacagtgacatccgtaattgtaaagtagaatggcaagttgcagaagatgatataaaatatga

SEQ ID NO: 301639 - DNA, 543 bp, Homo sapiens
gtctgcaggctccggctccagcgtaagactctactagtttgttttgccccaacactgtcatagccaatccgtggccagtgtgggtctccaaggagagattactgctgatattgggattatttatatgcaaatagcccctttcatgtaggaaaagagaaggtttctcttcaatctccatttctaaaagctgtacacccagttgggccatcgctaagaatggttaagggagcctgaattctagttctgacttgtcccatgaggaatcatttatcttccaaggtccagtttcctcagtcagaataatgtcatgaatcacaggctctgccaccctcgccagctgtgtcctgggagaacggcccccygcccagctatttacctagaataggtagaatggaaactgatccacctaggaaaaggcaaggcccattgtagcctctagtttgccctccctggaatcaggcacttcatcaagtttgtcctttaatctttaacacaaagaaaaccttagggaaaaataactaggacaagtgcactgcccagaga

SEQ ID NO: 301640 - DNA, 561 bp, Homo sapiens
attctgagttggaaacactgcccctgttctcctctttgtagcatcatttttattcttcatgtcttatctgcagggatgggagggtagaagagatgctcaggggtctcatcagaatcaaactataacagggagcctgcacccccggagggcgatcatctccagcacagatttaagttgcaggataaaagtcacgtgaaacaaaccttgcttccagctcctcgttattgtctgcccacctgtactttccctttgcccaaatcttactcctcatttttaatttattttatcttgctacatgttatgcatttttataagccactttaaatctcttttggaaagaggtattgatgaataaataaatacaaaataaaattgcccatttgccacatgtcagaataatcggaatcatcagccctctctgcattagmccaataacagtgccgccagaggactttgccaaatgggttctggaaagacagtgcataaactgtggttcaacctaaatcagactgatctatggatgacagaaaaaggcagatgctcaagcgagaaaatgaaaac

SEQ ID NO: 301641 - DNA, 515 bp, Homo sapiens
ttcaataagagttgctgcttgctcttccactttctcaatgtaactaattacatgtaaatagcctccccacttttccatgtgatctcacctttctatgtcttctgattctgaaaacaatcacgtggagtaggtatgcaaggcattatcagttccatgttatagataaggaaaccaagacacaaagatgctaagtgcctcgcattattgcaagggagaagcraaagtattaagtcccagcacattgtgctcccagaaaatcacatgtagctttgaccccaccctgagcgccagagggagtgggagaagatccagcagcagcctgtctgtggcacagagagcctggactctggttacaccatctccccttatgccttcagccctcctgctgcagctaatctctgcatgagctcatctatcccttctgctcctccagtgttttcattctgtaaccaatctcctctattaaattctctgaaataccaaaaacaaaacaaaacaaaacaaaaagaaacaaa

SEQ ID NO: 301642 - DNA, 495 bp, Homo sapiens
tgacacaaaacatggctcatgccttcagcctgggttgcagttggggctgacacaatggcatctcttctggacttgtccttattgtgaccatgactcattttggaactttctagtatagacatcttgaattctcactccaatctactatcctattctatgacttaataactcttcttgaggtagcattttacatgattatttagccacgagtcctttttggggggggtgggcatggaaattttgaggtatgtaatctatgcttcaggacatgcttgactagatgatcttccagtactgtttctgctktgtctgtctctgaatcataagattataaatatgggccaggtgtggtggctcatgcctgtaatcccagcacttttggaggcagaggcaggtggatcacctgaggtcaggagtttgagaccagcctggccaccatggtgaaactctgtctctactaaaaacacacacaaaaaattagccaggtgtggtggc

SEQ ID NO: 301643 - DNA, 600 bp, Homo sapiens
cgttagtttctgtgcccatatatgtctgatgccctacatttggatgtggcattatgtcaggcaagcatctgagtgacttgtttttccagtgtttagggatcactcattgtgcacatggctgtcagagtgggctcagcaaatcctgacacactggtagtggtggctcactatgctyctctcaacacttgttgaaaatacccacgatcaccctcagagacccaggacttatggacacacagaaccctagagttggagaggaccttggtgatgtggttctgtggttttctagctatgttcctcagcctcagctctggaagagctgtctcaaggagacacagcagtgggatgtgaagggaaggctcagcaggtgggtgctgccatttcagcctcagaattcttataaacaatgaggtgcttcatttcattttgcttagaagcagggctctactgttaaagaaaattttaatgcacctggtctactatattttcttcattttgcaaaagagaacaatgaagtccagagaagtgactttcacccagtaagtcagaaaacattccctcccaagtcaatcttgatgggacctcaacactagtgtccca

SEQ ID NO: 301644 - DNA, 612 bp, Homo sapiens
catacccaaatggctggatgaagggaatgagcagggttttgaaaggagcagaatttttaaagaagtggtgaacctgcaggggaggaaagctaagctactcttrcgagttctgtcttctacttatgctacctacaggctaccttgatatgaggggatcatcatttcccaaaagaaacatcactgattaacatttctgtcccatcatctgactcgtggtgtactgttatttcattcaatattctcattctagaatgtaacaatttcaatgaaagactcgtataaaggaataatttttcagtaaggaaaaggagctcttccatgtacattgaagcatttcttcacaatagctataacataagattaacctaagtgttcaccagtagaaaagtggatgaggaaaattaaatcttgtcatttgtgacaacatggataaatctggaggatatcacattaactgaaataagacagtcacagaaagacaaatactgcaggatctcatatatgtaatgtaaaaaggttgaactaacagaaacagagtaaaaagatggttaccagaggcttggggtgacaggattggggagatgtttgtcaaatgacataaaattgtagtta

SEQ ID NO: 301645 - DNA, 582 bp, Homo sapiens
ctgttgtaacacaatttaggtgaaatctcttcactttttggatgaaaagctaataaaacatttgttaaaatagccagaggttttacaaatttaggatactatgggaggagaatttaattcaaaatatatcagtaaggacmtgttaatttatgttacagtaaaaaataatccctaattttcagtaggttaaaattacagagtttgatttctcactcataccacatgtccatcttgggtgggcaagggggactttgcaagaaaagatcctatttcaggatctaggctggtaaaacagtcactactgggacattgccagccatcctggaagagggaaaaattacctttggatggtcatgtctaggcacttaagtgttctgacacagaagtgattcgtgttacttttatttacaacttatttgccagatcgagttttatagcctaatccaaccagatgaaagccaggcatataattctacttgtgactggacagtgggaaattagaaatctacagtgaattcactcaagacaatcacaatctacctatttggttccaaatatttgctttattctttcttgcaagca

SEQ ID NO: 301646 - DNA, 582 bp, Homo sapiens
ctgttgtaacacaatttaggtgaaatctcttcactttttggatgaaaagctaataaaacatttgttaaaatagccagaggttttacaaatttaggatactatgggaggagaatttaattcaaaatatatcagtaaggacctgttaatttatgttacagtaaaaaataatccctaattttcagtaggttaaaattacagagtttgatttctcactcataccacatgtccatcttgggtgggcaagggggactttgcaagaaaagatcctatttcaggatctaggctggtaaaacagtcactactgggacattgccagccatcctggaagagggaaaaattacctttggatggtcatgtctaggcacttaagtgttctgayacagaagtgattcgtgttacttttatttacaacttatttgccagatcgagttttatagcctaatccaaccagatgaaagccaggcatataattctacttgtgactggacagtgggaaattagaaatctacagtgaattcactcaagacaatcacaatctacctatttggttccaaatatttgctttattctttcttgcaagca

SEQ ID NO: 301647 - DNA, 581 bp, Homo sapiens
ctttcatgtttgctttgatttataaagcttaccactctttaaaatcatcttatctgcttatgtttacttgatttgaatttatctccctcttagaatgtcagtttcatgagagcaggctccctctctgtcttgttctccactgtattcttaacacttagatcagtgcctggcacataataagtgttagtccgaactgcaccattttgtaaaccacccactattttgcagaccttggtcaaagtgaaacattcatgggggttctggctgtgagaaacatcctgcctaacacctgcctacaagtcagacaaaggcccaaytaaagaaatatccctatcatattctgttgggagaaagtgcaaagaaacaccatgttccaccagaaaaagggccagaactgcctcatcatgggaacatcttatcaatatcctgctgagcagcaagccatatggcccagacccctcccgctcaaacctttaagtaccccagcctgtaagtggaggtgggctctggcattaagctggtctcccacttccataggtgtctgcaatatacttgtattgctgtttgagccgccctgtgtg

SEQ ID NO: 301648 - DNA, 343 bp, Homo sapiens
aatgagtagcaaggaacacaacctttgactttccttcgaaaaaggcatccaaataaggagaaagaggggcaagaagagtaaaacatcttactaacagcaagcgtgaaattttagactgcaagtcgtttgcttgtttgatcttagatccattctctgccatttccctgctttgaactgcccactgcaaactgcatttctcaggcttctttgtgctgccttccagttaggctttccattgggaagcactgacatagatggagaaatatacaggsaattatagtagagaatgatgctgaccattctagggattagttcgtgctaaaggccggtagggtatttttct

SEQ ID NO: 301649 - DNA, 568 bp, Homo sapiens
gtaagaaactttcttcttggttaatgaagggtatctaatggtcttctttatcatcttgatatatttgtatttacctctctaaaaaaaaaaactgtacttggttagttattcaaattgctaaaaatcaagctgaaaccaataataagtagagccttaaattctgaggaaaagtttgcagagtaaaacccatctttttttataccgtaattcaaaagtcagtttttaaatcatgattcttgaattatgycttctttttccttggctattaagactgtctaagatagctttctagtttaagaggtggagattgatctttctttaaataactaaccctctgtggattgttctatacaattaatcaattaagttggtgttgttttattgtttgctgctacatgtatattaagtcttacctccaagcccaactgtatgatccttgaaagcaggacataaaccagtttctcagatattaaaggaagctgaagagtattacacagaaaaagtatagaaatattaaggatgagaagtactgggtattttatgagttaagcaagcttctttagtgcag

SEQ ID NO: 301650 - DNA, 608 bp, Homo sapiens
aaattaatataaattactataatattaattttatattagcttttatttctcttcatttttgtaaacttttggaaattcttgatgttattatgtagttaatgaacttagaatcaatttcaatgagctatatcaaagaaggcagaggaaaaactacatggttttacttaactataccccaccttgtcatttacttcatcatgagatagcaatagtcacaaaacccaatttaaaagtagaaataaagataaattatcagagttcacaaaaatcttccattcctgtgtgtaaatggcactattgagcaaaagtcttagatttctcttatggaaagtttaaatatttccatgttgttatattttatttttcctgctggaaggggaaatacgactgattttttggtaggcaactgaaataactmgtttattgcctatccttccacagatattttgtgcacatgtgggcaattatataagctctaccgcttttaaatttttaacagatgctatattttagactagatttaaattttaggaaaagttgtaaagatattacagagcccctatatactgcatcaaccagttttctcttttgttaacatctcacatttc

SEQ ID NO: 301651 - DNA, 608 bp, Homo sapiens
aaattaatataaattactataatattaattttatattagcttttatttctcttcatttttgtaaacttttggaaattcttgatgttattatgtagttaatgaacttagaatcaatttcaatgagctatatcaaagaaggcagaggaaaaactacatggttttacttaactataccccaccttgtcatttacttcatcatgagatagcaatagtcacaaaacccaatttaaaagtagaaataaagataaattatcagagttcacaaaaatcttccattcctgtgtgtaaatggcactattgagcaaaagtcttagatttctcttatggaaagtttaaatatttccatgttgttatattttatttttcctgctggaaggggaaatacgactgattttttggtaggcaactgaaataactcgtttattgcctatccttccacagatattttgtgcacatgtgggcaattatataagctctaccrcttttaaatttttaacagatgctatattttagactagatttaaattttaggaaaagttgtaaagatattacagagcccctatatactgcatcaaccagttttctcttttgttaacatctcacatttc

SEQ ID NO: 301652 - DNA, 515 bp, Homo sapiens
tgtcaaagctgcaaatcatctgtctcctgcaagaggctctgatatggatgcatatttgctgtggaatgttctttcttatcagaaagtcacttgtgtatgcaaatgtagaacaaaacgtaatgagaaaaaagtttgaaaaatggcaaataaactcggttaaggtttaaataactctttgggataatgcaaaaatttktctttatattgcaggcagagttgcttctctgcatagctgtttcctttggagagagatttcttccctatgtttgtagtttttaattttaaaaatgttatttatttattttttaattaacaaagattgtacacatttactgtgcacaacatgatgttttaaaacctgtatacattgtggaaggctaaatcaagctaattaatatgtattacctcacatacttatcattattttttgtggtgagaacaccaaatatactcttttggcaattttcaatcacacaatacattattattaactatagttgccatgctgtacaata

SEQ ID NO: 301653 - DNA, 515 bp, Homo sapiens
tgtcaaagctgcaaatcatctgtctcctgcaagaggctctgatatggatgcatatttgctgtggaatgttctttcttatcagaaagtcacttgtgtatgcaaatgtagaacaaaacgtaatgagaaaaaagtttgaaaaatggcaaataaactcggttaaggtttaaataactctttgggataatgcaaaaatttgtctttatattgcaggcagagttgcttctctgcatagytgtttcctttggagagagatttcttccctatgtttgtagtttttaattttaaaaatgttatttatttattttttaattaacaaagattgtacacatttactgtgcacaacatgatgttttaaaacctgtatacattgtggaaggctaaatcaagctaattaatatgtattacctcacatacttatcattattttttgtggtgagaacaccaaatatactcttttggcaattttcaatcacacaatacattattattaactatagttgccatgctgtacaata

SEQ ID NO: 301654 - DNA, 610 bp, Homo sapiens
atttaacttttgttaatgcagcttttcaagccattgatttataaggtacaaacagagctaatgtgagaattgttgaatccataaacggtactaatttttggaattcttaactgttatgtagatattagaatatattaatctctccactagctggctgacattacttatcagtaacagaatttaagacaagcatttccacttgcagccagaagttaaaagattatgaaacaattgccaatgaaatttgtggcagattataagacctgtatgaaatttaccraaagtacagatttgctgataaaattgaatcatttaggagattaaccttcagaggtaaatggactactaaaaacaagtctattgaaaaagaaattgctataacctgctgcaataatttgacaagctgacagaagcattatatttgcatatgaaagagaagagatataggattcatttaaaagtagaaaaatatccagtttgtcatctgctcctatggttgtcaagctcctatcgagtttcttagtcccagtctgaagactcagccacattccaagtgctcaaactagattttgtattaattagataaactgtaagaaactctaagatagta

SEQ ID NO: 301655 - DNA, 626 bp, Homo sapiens
tatatataagtagtaatctagtgctctacccagcacccgatcatccaagttaaataaatatattgtgattgactcattgttagctccataatagtcaatattcaggtatgtctataaggcaaactataatctcaygatgctggcagttccagaaggaaaagagactaggactgaggattggtcagtcatctgaattatagtttcgatgtaaaagggcatcttagaaggatcttacttgggttttcaattcctacaaacatggatttgagttccaattctatcattttgtagctatgtggccttgggtagggtgttttccacctcaagccttcagtttcccctacttcaaagtgtggaaaagtaacatctgctctagaaatatcctaacaattaaaaataatttggccaaagtcagtgtttaataaatagtagatgttgcagcaattattgttgttcttgaatgtacatggaggatttatgcttgatttatattaaagattgcatctgctatgggctgaattgtgtcccccctcccacaaattcatatgttgaagccctagcctccaatatgactgtatttggagacagggcctgtaaggaggtgactgagattgtgtgaggtcata

SEQ ID NO: 301656 - DNA, 391 bp, Homo sapiens
tggtgttatcctcatgatagtgagtgagttctcatgagatctggttgttataaagtgtggcagatcttccaccctactctctttcttgcttctgcttccgccatgtaagatgcctgctccctcttcaccttataagccaaaaacaaaattctaagccccctcaatcaactgaatagacccttcctctgagmcaagagcattccaaagttaacctgaaacatgagttcaggccaagatgggaataggtggctggacatgcctcattatggcctccttcctttggaattcaggcacaactgactggcattaacattaaaacagagaccttaagacaatctgtattctctgaagcctgctacctggtggattcatctgcataataaaaaccctg

SEQ ID NO: 301657 - DNA, 611 bp, Homo sapiens
tgtaacccaaccaccttgggcacatattctcaagggcctcctgaggctatgtcataggcatgttcttaaccttgcaaaataaacttctaaattggttgagacctgtctcagatrcttttggtttacagccttctgccatgattgtgggcttcctgaggcctccccagaagcagatgctggagctgtgcttcctgtacagcctgcagaaccatgagccatttaaactgcttttcttataaattacccagtctctggtatttctgtatagcaatgcaagaattgcccaatacagaaaattggtaccaagaagtgggcattgctataaagatacctgaaaatgttaaagcaactttggaactgggtaataggaagagatgtgaagtgtttagaggactcagaaaaggacaggaatacgaggcaaagtttggaatttcctggttaaatggttgtgaccaaaatgctgatatggacagcaaaagccaagctggggtttcagatggaaatgaggagcttactgggagctagtgcaaaggtcaatgatgtttttatgccttagcgaagaacttggctgcattgtgtccatgccctagggatctgtggaagtttgaact

SEQ ID NO: 301658 - DNA, 611 bp, Homo sapiens
tgtaacccaaccaccttgggcacatattctcaagggcctcctgaggctatgtcataggcatgttcttaaccttgcaaaataaacttctaaattggttgagacctgtctcagatacttttggtttacagccttctgccatgattgtgggcttcctgaggcctccccagaagcagatgctggwgctgtgcttcctgtacagcctgcagaaccatgagccatttaaactgcttttcttataaattacccagtctctggtatttctgtatagcaatgcaagaattgcccaatacagaaaattggtaccaagaagtgggcattgctataaagatacctgaaaatgttaaagcaactttggaactgggtaataggaagagatgtgaagtgtttagaggactcagaaaaggacaggaatacgaggcaaagtttggaatttcctggttaaatggttgtgaccaaaatgctgatatggacagcaaaagccaagctggggtttcagatggaaatgaggagcttactgggagctagtgcaaaggtcaatgatgtttttatgccttagcgaagaacttggctgcattgtgtccatgccctagggatctgtggaagtttgaact

SEQ ID NO: 301659 - DNA, 611 bp, Homo sapiens
tgtaacccaaccaccttgggcacatattctcaagggcctcctgaggctatgtcataggcatgttcttaaccttgcaaaataaacttctaaattggttgagacctgtctcagatacttttggtttacagccttctgccatgattgtgggcttcctgaggcctccccagaagcagatgctggagctgtgcttcctgtacagcctgcagaaccatgagccatttaaactgcttttcttataaattacccagtctctggtatttctgtatagcaatgcaagaattgcccaatacagaaaattggtaccaagaagtgggcattgctataaagatacctgaaaatgttaaagcaactttggaactgggtaataggaagagatgtgaagtgtttagaggactcagaaaaggacaggaatacraggcaaagtttggaatttcctggttaaatggttgtgaccaaaatgctgatatggacagcaaaagccaagctggggtttcagatggaaatgaggagcttactgggagctagtgcaaaggtcaatgatgtttttatgccttagcgaagaacttggctgcattgtgtccatgccctagggatctgtggaagtttgaact

SEQ ID NO: 301660 - DNA, 581 bp, Homo sapiens
accttctgaggtactgaggattaggacttcaacatatgaattttgagggaacatgattcagcccataacacttttattacagaaaggcaacacgtacagaagtcatcatatttcagattattttgttaatattttagaagctaaacaaatagtttaaaccctgttggaagtagtttatttgaatttctatttatgcagatatatttcttttgacttactaggagctgggctatgatctcatgctttggtaatacatacaattctcggaagaaaagggtttgtagacaaaagatgctttgctcttgaattcagggactatagattgtctttctccttcattttacaaaaaaggaccgtttttccccccagaactccaacgaatgaatttagggctttaatagcttagagagatcatgggaggagggaaaaaaamcccaacaaagtggactggggttcataagggcgtgatcccaggcatacagaaggaagtttgaccaagaggattaataatagctcctgccattaccagagtactgtctaactcctggaagccaaaaagtagccctcttaccctttctctc

SEQ ID NO: 301661 - DNA, 372 bp, Homo sapiens
gcaccaccaccagcacaactgcatgcacagtcgccagcaggatcctcctccccactgagccatgatgcctctatcactgttgtgaacgcccacatggaggcaggtaacggcacccactagcaccctgccatagccaatgagcatgcacaccactgcactatcactgctggcacatatgaacaaggaacgatcccactacctccacactacaaaatgctttggctggcaccactcatcagagtgtagtgaccagcagtcagggaacaccttggygctgccattgcaatggattcctaacttaaaagagccatagaacaaagtcaggcctgatacaagtcccccagagttacagcatgcactccagcaactggg

SEQ ID NO: 301662 - DNA, 649 bp, Homo sapiens
ttaagtttgccagatcagatgaaatatactgtgcaagaattttcttttctttttctatttctgtcccttggtataaattcccgtacttatttccttataagtagtgaaacaaattatggacaccgttagcaaagttaaccatatgttagaataacttgcttgttttattgtttattaaaaattgagttgctaaaggtaaaaaaacatagtgcagaatatcctattatcaccatcttggagtcaagagctaaaattacttcttcaaccacaaataaaaatatgttaatttttttgttttaggaaaaactatcaaatattactataataccaaaaacaacctaaaatgcaagttattaatttaaggcaatatcagtgtgtattctcatgtgctcttttagcatattaattgtcccaacaaccatatagcacaargtatttttaatttacattttacagatgaaaaagcagagattttaaaagaggtcagtatcttgatcactgtctcacagcccatctgaggaagagtttggtcttgaactcaggcaggctgtcttatatcagacctcaagtcttaactttctgttatatccatccttcagtaacattatatacattgtaattattgaatttggtcatatgttccatgtat

SEQ ID NO: 301663 - DNA, 610 bp, Homo sapiens
ggatggtgctctttggagatcatgtcaaactgacaaaattgcagatgggatattgttgtacttgaaaatatggcaaggttgaagaaatgaaccttgaggacagaatggaacacttgaaagtgtgacgtctaaaaaaaatcacttgagtatatttagttcaattatttaaattattaaatgacccagataatatcaatatgaactattattttctgtgtggcacagaaatacaggacaaggacaacataaatggcaataaaaagagaacacattcaaaacagacataggtattattcatgccaasaataataaaagtgcaaaaaatccaaaatgagttcagaagaaagaatattatagcaaaaatcctgaggtaagttagaacaaaagagaaattctaaaaggaaaaatcgctaaacaatctgagtgtgcaacccatacttttgccattttctattccccctagtccagtacttggcactaagaagcaactcaaatgtacttgcttggtacctctcagcatccaggacagtggcaagctaatagcatacatataatatttcttataagcatttaacaacaggttggtacaatttaaaaaaaaaacaataat

SEQ ID NO: 301664 - DNA, 540 bp, Homo sapiens
gtctccttcttgtcaactatcccacatttgagtacttagcttaaaattgaatgattgtaaataaaatatttttgtatcataaaaaagagcaagttacataatttctcattaaagagtatcctaagaaccatgttctgtattttgtctagaattatcagctctgatttttcaatgaatctttaaccatttgcctcttcattacattccatgaaccaggtaataatgatgtcatttattttggtttgtcctattatctctstctgtgtgtgtgtgtgtgtgtgtgtctgtttgttgctcattcaggcctcacaggaatgcatccataggcaagttctctgaatgaggtgtgattgctttcctcagaaaattactttgcactttaattatttttctgacatttttaccaataaataatcagaaattttcaaacagcacaacatagagttcgaactctgagcctggaggttaggaagactttcatttatctctgtccacatgatatgagttattggttacttgcttttcaacaacaacccatta

SEQ ID NO: 301665 - DNA, 540 bp, Homo sapiens
gtctccttcttgtcaactatcccacatttgagtacttagcttaaaattgaatgattgtaaataaaatatttttgtatcataaaaaagagcaagttacataatttctcattaaagagtatcctaagaaccatgttctgtattttgtctagaattatcagctctgatttttcaatgaatctttaaccatttgcctcttcattacattccatgaaccaggtaataatgatgtcatttattttggtttgtcctattatctctctstgtgtgtgtgtgtgtgtgtgtgtctgtttgttgctcattcaggcctcacaggaatgcatccataggcaagttctctgaatgaggtgtgattgctttcctcagaaaattactttgcactttaattatttttctgacatttttaccaataaataatcagaaattttcaaacagcacaacatagagttcgaactctgagcctggaggttaggaagactttcatttatctctgtccacatgatatgagttattggttacttgcttttcaacaacaacccatta

SEQ ID NO: 301666 - DNA, 559 bp, Homo sapiens
tgatatatcagtgattttgaatttataggtacaccttttatacaattttcaggcaacaaataattgcaataaggttttgatgctaatttttagtctcctcccaagttttcctgatagaatcttatttgtgaatactgaagtatataagatcaattcccttaattgtaccaaaagaggagacctacagtaaaatttggctgctgtatttgsaacgatacattcttggctttctcatgttcttctcaggtacaagtttttcagctgatggaatcatatatgtcctatctctgagcaaaccttgactaaatacacataaaatggggaattagtcttaccctgttcactgacacaatatataccctgcttatgctccccactccctaaaaagcaaatctcacattttgaaaatgcacttacacacacacacacacacacacacacacgaacacactcctccaacaacagcaggcacctgctgctaaagctttactctctttttcccctttcactcaatcagcatgaactcccaccaaacccgtacctgtactttccaactttc

SEQ ID NO: 301667 - DNA, 541 bp, Homo sapiens
ggcccacttggagagggtctgaggttcccagcagacagcaccgattttcagamataacagtgaataacactagatgattatattcctctagtctttgaatattatagctgaggcatcagacctgatgagggagagacaattgtcttatgatcatcataaatgactattttttaccactaagttttggggaaatttttcatgtagttatattaaggaacagaaatcactacctgaaagtgggttgctaccataacaaaattctacaaaagtggcagtggaaattggaagagtgttgaagagattggcagtatcccactacagagccatttggaagctggagaactttcatgattcacactgctgccacattgtagtcatccaggcagtcaaaaagtctcaaccagattcaagaggaagaaaatagtccccacgcttttatgttaatgataaacttttgaagagcctatgggacaagaaacattgctttgaccatttttggaaaataaaatctgccacagtccactctctgatgaccacattt

SEQ ID NO: 301668 - DNA, 615 bp, Homo sapiens
attgtgcctacaaatgataatactgcattgtatactttttaagctgttaagagggtaggttgcatattaggtgttcttacaattttttcaaaaaaattaactcaatacaaaaaataatgtaaaagaagcataaaatatatctaagaaaattaggaaacatgagtaatataaggtaaaaccaagacatcataaaaacaaaaaaaaaatttaatgaacagggtaatagggattaaaaaataaagaatgtaaaacaaatttttgagtcctaagaccagattagagaactccrtcagaacgtaggaagaaggggtaaaaatatagaaacataaaggaaaacaggtaagagaataggagtaatcagaggatatttgaaaaattatcaaaactatttatttcacaataatactagatggatgatcttaaatacaatgggctcatagattgctacaggagtggtaaggaagcaaatacacatatggacacattctatattgagaatatcaaagaaaaatgaataattataaaagtttctacagagaaaaagtagattgcctacacaggaataataatcagaatgctgtcaaatttattaaagcaacactggatacaaaaaga

SEQ ID NO: 301669 - DNA, 615 bp, Homo sapiens
attgtgcctacaaatgataatactgcattgtatactttttaagctgttaagagggtaggttgcatattaggtgttcttacaattttttcaaaaaaattaactcaatacaaaaaataatgtaaaagaagcataaaatatatctaagaaaattaggaaacatgagtaatataaggtaaaaccaagacatcataaaaacaaaaaaaaaatttaatgaacagggtaatagggattaaaaaataaagaatgtaaaacaaatttttgagtcctaagaccagattagagaactccgtcagaaygtaggaagaaggggtaaaaatatagaaacataaaggaaaacaggtaagagaataggagtaatcagaggatatttgaaaaattatcaaaactatttatttcacaataatactagatggatgatcttaaatacaatgggctcatagattgctacaggagtggtaaggaagcaaatacacatatggacacattctatattgagaatatcaaagaaaaatgaataattataaaagtttctacagagaaaaagtagattgcctacacaggaataataatcagaatgctgtcaaatttattaaagcaacactggatacaaaaaga

SEQ ID NO: 301670 - DNA, 562 bp, Homo sapiens
aacaatggacatagtatgactgaataagaagactagatttaagtacaatggcattttgatgatctccacaggatcctttatagaaaaacacaagaatgcataaaaacttcctagttttaaactggaaaaaaaaaccagatcatttaaagacattttcaaacaaaaattgtattgtctttttacacrcctactgcagttttaatatatctcatatgctatttattctaaatattagcaactagtaccatccaaaatattcagtaaagatggtctaccatcatccttttaatctacaactaatattcccttggctttttttttttttcccagaggggtgtgcatacttctctgtttctcagaaaattgctgaggtgtgttttgaagccagagtaaactacagcgtttgttatcaggcattagtggtcctaatatatattaacgccaaaataatatgcatgatgaatagaaatgtaacataggtcctaattataagttgaaaaaaagcatttttatactaaaacttctgttaagatgttttttgttcattccattttaattgtga

SEQ ID NO: 301671 - DNA, 608 bp, Homo sapiens
tgtttgcatactgattagaaagtgcactaacaacactgatgtaaagatgtgccccagaatattatttaattttctaatgagttgtatagaagttctatctctcaaatctatgtgtttgaatattctatgccatattttctaattcttcaaatttcatattaaccaatccacagccttaatgtataatttagaaatgtttttaaactcctgttgttttyccccattattaagacttgaattgatttataagatttgtatgcagtagtaaattctactcttaaacataacttaatctagcggcatcagagctaatgatgaataaatgtaacctaccttaataacggtacttccttttaaagaaactctcaagaagtcttttttgaagaaaagtatcaaatcggtaccttagagtcttctgtgctatgatagtgcattgaatacaagaaagctgatggggtagttttaaaaaatgtcctgacagagtcaaggtgatggccatttttagctgccctgctatccatcacctctttcagccaagcatactccatcatatgcaacagcctcatgaatttatgcatcaagctgtgcagccagtcgtgccgagggcg

SEQ ID NO: 301672 - DNA, 469 bp, Homo sapiens
gattgtgaaacagagtaaacacagtataaaattttttttgctctctttaccaagtgtcctggagagttttaaaatagttcaaatactcacaatttcagtattttaaaacatttatatttgrtgatgccattcaccactaccccttgctatatattctccatatatgctctggacaatgaagaaatgaacctcagaaatacagagggagtaaaataagaccaacaggaaagaatctagaaaatattaaaataaaataccctacaagtaggattcatctgggcctgcatacataagtaaaattatggtctgaactctgagcacaacttgatatttcagcccatcctcatcatttcattctaattttaaaacaacacgatccccttctccaatttgatggatcctcctgctctgttctctatcctgtatcatttcatctcttccttgacatagacattctttcagtaaacac

SEQ ID NO: 301673 - DNA, 476 bp, Homo sapiens
tgtcatagcttaacctagcctaccttacatatgctcagtgcacttacagttgggcaaaataacacaaaacctattttataataaagttttgactatctcatgtaatttatgaaatactgtactgaaagtgaaaaacagaaagattgtatgggtactggaagtacagtttctacttaatgtatatcattttcataccatcgtaaagtttaaacattayaagttgaaccatgacaagttgaggacagtctatatatacaagtatataaatatgtataagttcatatgattaatgtcagcggtataaaaataagtttactgtacatttaagttgcttttatctatgccttaaattggtattctttttcctaaagaagactctcaatcttgctggagttatctttgttttacagatatttaaacagaaacacatgcaatttaaataactttcccaaggccggttaagtggtagtaataat

SEQ ID NO: 301674 - DNA, 552 bp, Homo sapiens
ggcaaaatacactcacccaggattgctctctcaaactggtctcaggtagaagcagacaggggatccccagaaagcatgattttttcatgaaattgttctatccaataactgacttggggtggggggagtgaagctactaatggccgtcatccaccaatctagaagcaccctctcccacaatggacagaagtgagtgagaaagagaagcagaggccagcaatgctactccagtggaagtagctgcacagaaacctgaagggaaatgagtattcccctataacacctgctgtgttctagtctcctttccatgtgaaytgaaagcagattcatcattttcaacagtgtcattattcaacttacatttatttcaactcattttttcacctaatcacttttggacaattttttccaaaatgtcgacgtatgttcaaaatctgaattttataatagagaacttacctaccatattttaaaatcatgaattcaatatcttatcctttctacatatgtatctaaatataaaatagtactataagatatagctaatgacag

SEQ ID NO: 301675 - DNA, 535 bp, Homo sapiens
ctttacacactgttggtgggratgtacagccattatagaaaacatggagtttcctcaaaagatgaaaaacagaactactggatgacccagcaatcttactactaggcatatacccagaggacatgagatcagtatgtcaaggagatagtttcactctcatgtttattgcagcattaattacaaaagccaagatacaaaatcaacctaaatgtctatcagtagatcaatggatatggaaaatgtggtatatatacatgatggaaggttgaagacctgagccacactattcaatctttaaaaaagaagaaaattctgtcgtttgagacaacagggatgaacctgaaagacattatgttaagtgaaataagccaaaagaagagagatgaataccatataatctcacttatatgtggagtgtaaaaaagttaaactcttagatacagagtaaaatggtggttagcagcagctgagaggtagaggaattggagagatggcttgaagacaaaatttcagttagccatcagaaataagttca

SEQ ID NO: 301676 - DNA, 617 bp, Homo sapiens
gaaaatgtggtatatatacatgatggaaggttgaagacctgagccacactattcaatctttaaaaaagaagaaaattctgtcgtttgagacaacagggatgaacctgaaagacattatgttaagtgaaataagccaaaagaagagagatgaataccatataatctcacttatatgtggagtgtaaaaaagttaaactcttagatacagagtaaaatggtggttagcagcagctgagaggtagaggaattggagagatggcttgaagacaaaatttcagttagccatcagaaataagttcaagagatctactgtacgtcatgcttmctattagttaataacaatgtattacatgttttaaaattgctgaaagagtagattttgtgttctcactaccaaaatataagtatttaatgttaaataatttgatgtagccattctacaatgtatatgcataacaaaatatgctgtacaccataaatatatacaatttttgtcaattataaaataaattttgtcagaactgttgcttgcttgcttgttcctgcagagaagggtgatttggggtgaagaggaaggagataaggaaatgatctcttgtgagtggcacaggttgaaa

SEQ ID NO: 301677 - DNA, 617 bp, Homo sapiens
gaaaatgtggtatatatacatgatggaaggttgaagacctgagccacactattcaatctttaaaaaagaagaaaattctgtcgtttgagacaacagggatgaacctgaaagacattatgttaagtgaaataagccaaaagaagagagatgaataccatataatctcacttatatgtggagtgtaaaaaagttaaactcttagatacagagtaaaatggtggttagcagcagctgagaggtagaggaattggagagatggcttgaagacaaaatttcagttagccatcagaaataagttcaagagatctactgtacgtcatgcttcctattagttaataacaatgtattacatgttttaaaattgctgaaagagtagattttgtgttctcactaccaaaatataagtatttaatgttaaataatttgatgtagccattctacaatgtatatgcataacaaaatatgytgtacaccataaatatatacaatttttgtcaattataaaataaattttgtcagaactgttgcttgcttgcttgttcctgcagagaagggtgatttggggtgaagaggaaggagataaggaaatgatctcttgtgagtggcacaggttgaaa

SEQ ID NO: 301678 - DNA, 600 bp, Homo sapiens
acttaatactctccattctctttgttggtttacttttctgatctgtgatgccccattcccatccctgttccctaaccctaacacaaccccagtgactaaaccatgaggccttttgaggccaggggtgatatcagtcttaagtctccatcattcatatacaacacaatatctgcaaattgctgcctaatcactctcccatgaatgactcaatgggcaagcaagtaaatgaatgcatacattaatgatacaaagaatcctgctacagtttctttctcttctcctagacattttttaaaagacaaatgctgagcaaaaaggattttttagactctacaaagatattatatcattctattactgaggaaagagattgagttgacagctgacacagaaaaagcaaaactacacaagtattatgcttttgtcttttttyttcaaggagaatgacttgcaaactggaaagggtaaaaatgatgaagaggtaaatgtgagaagacagtaaggaagtactgagattctttaaatgaatccaaatatctaggctgggtgaatttcatcctacaaaactgaaataagttacagacgtgactgcagagcctc

SEQ ID NO: 301679 - DNA, 617 bp, Homo sapiens
aatgaatgaatgaatgaacctagcccgcctcaaacgtcctcacaatagataatctttaaaatttctttcagttgtgagattctataacataattctctccttacttaaagaaataggctatgcattttgattgacctgccagtgggataggccagtgcatatgcttatgccttctccattcaagccaattttattgttgagtttcattcagcctttaaataagctcattagagagagtctgttcctgaaggactcaaaactgtctgaactagcttccttaaatatccaagcttttatttatcatctctgagacctaggagcccacattgttccctgttagtagtaaaagcccagggtttctatgtatttttaactaacattgtctaattctctcttttgtggacatgacagttcttagtgtttcttctgttaactcctaaatcctaaagaacttcacatgtgaggwttctcttgtattggaagactatccaaactataatttagatccctcaggactgagtagggccagtttgtcctgtgtaacttggtttggaagtcttcaatgctttgagactccaaactgtgccccccgatacctcagaactgaataggccaag

SEQ ID NO: 301680 - DNA, 617 bp, Homo sapiens
aatgaatgaatgaatgaacctagcccgcctcaaacgtcctcacaatagataatctttaaaatttctttcagttgtgagattctataacataattctctccttacttaaagaaataggctatgcattttgattgacctgccagtgggataggccagtgcatatgcttatgccttctccattcaagccaattttattgttgagtttcattcagcctttaaataagctcattagagagagtctgttcctgaaggactcaaaactgtctgaactagcttccttaaatatccaagcttttatttatcatctctgagacctaggagcccacattgttccctgttagtagtaaaagcccagggtttctatgtatttttaactaacattgtctaattctctcttttgtggacatgacagttcttagtgtttcttctgttaactcctaaatcctaaagaacttcacatgtgaggtttctcttgtattggaagactatccaaactataatttagatccctcaggactgagtagggccagtttgtcctgtgtwacttggtttggaagtcttcaatgctttgagactccaaactgtgccccccgatacctcagaactgaataggccaag

SEQ ID NO: 301681 - DNA, 604 bp, Homo sapiens
tgcataaatatcttctggagatgtggaaactggggttcctgggggtttcagtcactatttctagccagaaattcagagacacaaagctcttgaatttacgttaaaaattcacttcttagttatagacctgcacatttctagctgtagtaattctgcaaagcagcagccggtagacactaaaaggagcttagctgcaagtaaaatgggaacatagaaggtggtagcaacctgcctctaggtaatcagtccgtgtctagtatagctagtatatatatatagcttcctttagtgaactcctcctttctacccctcttcgaattctcctggaacgggcaatcccaggacctttcctctggtaaacccaaggacacttggcccaagctaggccaatcagacctttttctcctaggacacaacaaagttaaaactgkgtagcttgatgaaaaggcctaaagttacattctgtgaattgttattactcagttcttgggactttctcttgtccttcctctatctaagtcctgattatttaattcttccttcagttttataagttactcagtctcttttcaataaagtcatcagtgaacatttctgttattta

SEQ ID NO: 301682 - DNA, 543 bp, Homo sapiens
gctgactgtctacccttgaacaatgacaatggtggttacaacagcgcggggaacaagacaggccttgttacctctgggtcattttaaaggtgatttcaattttctcagtaactttcattcctaagggtagaatgctgctgtaactcagtcattggaaaacgatgacctttttgaatacagcttaattgtaatcacttccttagtagttttaactttttaactaacctacaagcatacccaaaagttgctaacaaatatttaccagaaattcaagaatgaagacaatttactggaatcatcttgaatttaatagtctttgttatcctaaagcctatagtgctttcctatggattatttcacctgtgttaacaccatccttggaaaatttgtaggaaggctggtcttgccttagttttagaaatgggagagaggatacaaagtgggtgactaactcaagcctatgcaataacaggacatagaccccacactttcagmctgttctgtgcccttagacctgcccatgataaatgtgcctagtgggca

SEQ ID NO: 301683 - DNA, 561 bp, Homo sapiens
agtcatgttttaagtacttagcaaaattttgacatataataaggacaaaaataaatattaactttcatgattacgttattaacaaaaccttatggtgaaataagctgtcttacattagacacagcacctcatacatcattaattcaaaatcatgtaaatcctaaactgcttcatcaatttgtacctcttccaggagataaataataaaaatatgtgagcaaaataaataataaagatagaaatacatttacatgttctatgtttttaaaaagttggtcaaaatagagattatttgggggtccccttgaccactgaagagtaaaataaccatgggaaaaggagttgggctgatgaccatctgggaattcactgwaggaggcaccatggttctgataaaagtggcccgtggaacttaggaagggaaactcttgaatgttaatgatggctgagattacatgtcaggggacattaagtaaaaagaggaaaggaaaacaatgtcttcttttccttagacaactgaaacctagttaggtgaattaagttggaagggtaaatataaaa

SEQ ID NO: 301684 - DNA, 572 bp, Homo sapiens
cttcctcttttccaatttggatgcctcttatttctttctttttcctgattgctctgactrggacttccagtactatgttggactagtgaaagtgggcatccttgtctttttcaaattcttagggggaatgttttaaacttttccttgttcattataaggttggctgtgggtttttcatatatggcttgtattattttgagttgtgtatgtttgttctatgcctagcttattgagtaactttatcacaaagagatcctggattttatcaaatgtcttttctgcatccattgagatgatcatatggtttttgtctttcattctgtatatgtgatgaattacatttattgacttccttacattgaaccatccctgcatccctggtgtaaaatccagttgatcacactaaattattttttgatgtactgttggattccagttgctagtattttgttgaggatttttcatctatattaatcagagatactgatttgtagttttcttttttgtctatgttctttcctcactttggtatcaaggtgtaatggctttgtagaaggaattagggaggagtc

SEQ ID NO: 301685 - DNA, 572 bp, Homo sapiens
cttcctcttttccaatttggatgcctcttatttctttctttttcctgattgctctgactaggacttccagtactatgttggactagtgaaagtgggcatccttgtctttttcaaattcttagggggaatgttttaaacttttccttgttcattataaggttggctgtgggtttttcatatatggcttgtattattttgagttgtgtatgtttgttctatgcctagcttattgagtaactttatcacaaagagatcctggattttatcaaatgtcttttctgcatccattgagatgatcatayggtttttgtctttcattctgtatatgtgatgaattacatttattgacttccttacattgaaccatccctgcatccctggtgtaaaatccagttgatcacactaaattattttttgatgtactgttggattccagttgctagtattttgttgaggatttttcatctatattaatcagagatactgatttgtagttttcttttttgtctatgttctttcctcactttggtatcaaggtgtaatggctttgtagaaggaattagggaggagtc

SEQ ID NO: 301686 - DNA, 572 bp, Homo sapiens
cttcctcttttccaatttggatgcctcttatttctttctttttcctgattgctctgactaggacttccagtactatgttggactagtgaaagtgggcatccttgtctttttcaaattcttagggggaatgttttaaacttttccttgttcattataaggttggctgtgggtttttcatatatggcttgtattattttgagttgtgtatgtttgttctatgcctagcttattgagtaactttatcacaaagagatcctggattttatcaaatgtcttttctgcatccattgagatgatcatatggtttttgtctttcattctgtatatgtgatgaattacatttattgacttccttacattgaaccatcccwgcatccctggtgtaaaatccagttgatcacactaaattattttttgatgtactgttggattccagttgctagtattttgttgaggatttttcatctatattaatcagagatactgatttgtagttttcttttttgtctatgttctttcctcactttggtatcaaggtgtaatggctttgtagaaggaattagggaggagtc

SEQ ID NO: 301687 - DNA, 528 bp, Homo sapiens
atatcacactctggggactgtggtgggktgtggggaggggggagggatagcaatgggagatatacctaatgctagatgacgagttagtgggtgcagcgcaccagcatggcacatgtatacatatgtaactaacctgcacaatgtgcacatgtaccctaaaacttaaagtataataaaaaaaaaaacagaaaaaaaaaaacccaattccttctggtttggaagttttctcctgagaagtctactgttagtctgatagattttcatttataggttacctgatgtttttgtctcactgcttttagaaattttttcctttaggttgactttagttggtctaatgaacataggtcttggtgatgtcctttctgcactgagtctccaggagttctttgtgcttcttgtatttggatgtctaaatctctaccaaggccagtgaagtattccccaattattccctcaaataggttttccaaacacgtttttccttctccctcaagaacacctataattcttaggtttggccatttt

SEQ ID NO: 301688 - DNA, 528 bp, Homo sapiens
atatcacactctggggactgtggtggggtgtggggaggggggagggatagcaatgggagatatacctaatgctagatgacgagttagtgggtgcagcgcaccagcatggcacatgtatacatatgtaactaacctgcacaatgtgcacatgtaccctaaaacttaaagtataataaaaaaaaaaamagaaaaaaaaaaacccaattccttctggtttggaagttttctcctgagaagtctactgttagtctgatagattttcatttataggttacctgatgtttttgtctcactgcttttagaaattttttcctttaggttgactttagttggtctaatgaacataggtcttggtgatgtcctttctgcactgagtctccaggagttctttgtgcttcttgtatttggatgtctaaatctctaccaaggccagtgaagtattccccaattattccctcaaataggttttccaaacacgtttttccttctccctcaagaacacctataattcttaggtttggccatttt

SEQ ID NO: 301689 - DNA, 528 bp, Homo sapiens
atatcacactctggggactgtggtggggtgtggggaggggggagggatagcaatgggagatatacctaatgctagatgacgagttagtgggtgcagcgcaccagcatggcacatgtatacatatgtaactaacctgcacaatgtgcacatgtaccctaaaacttaaagtataataaaaaaaaaaacagaaaaaaaaaaacccaattccttctggtttggaagttttctcctgagaagtctactgttagtctgatagattttcatttataggttacctgatgtttttgtctcactgcttttagaaattttttcctttaggttgactttagttggtctaatgaacataggtcttggtgatgtcctttctgcactgagtctccaggagttctttgtgcttcttgtatttggatgtctaaatctctaccaaggccagtgaagtattccccaattattccctcaaataggttttccaaacrcgtttttccttctccctcaagaacacctataattcttaggtttggccatttt

SEQ ID NO: 301690 - DNA, 571 bp, Homo sapiens
gaaaagatttttcatcattcatggtgtgcttttgaaactctattcagcataggtaattaaagggccagattcatgtttcgtttggtaaatttctggcttttagcactgccatttttcttatgttggcattttaaaattaaagatccagatgatgcttaaagaggggtaaatttctttctatttttcttgraattaaaaatacacatttattagtttctaaaaattattttataataactgatttccactagtgttcattcaaaaaacttgtaacaccaatattaatactgaagtgtaaacaatgcaaatgccatttttcatgatttaatatttcatttaaaaagaaagcaaacaaaaatatccccagtttccgttttcctagattttacttggtagttcttcgtcacccatttttgacctgtggaagtaacacagtgtagcagagggaagataggcttggcagtaacagaagcttgaattgatatcccatctctcagctcagttgtgcataagttatataaactctgtgcaccccagttttcttaagtcactggagatcaatgatgcctgg

SEQ ID NO: 301691 - DNA, 599 bp, Homo sapiens
ggaggcatgcgcagtcctgcttttcccttgccctggcaggcttacctggtcagggattcagatgcaagtagtgggcaaagaaaggagggaggaggttgatatgaggctggtctgataactgctgctamaagaagtcagggcctaaaatgtgcaaatatcgcctcagttttccataaccccaaggccaatctttaacataacccattatcttttttcctttagacttctaaggctaaaatgttttctagcttataactctaatgctcttttaggtttatttaaagcatgacatatgtaaatattaggcacagaatgtgatttgaagcaagattgaaaaaaaattaaattttcttcatacttcctaaagataacttggtgcccaatgttgatttgagacatccttaggaataaataaatcaaatactatcttccttccttccttccttctttccttccttctttccttcctttctctctgcagcactttttctcttttatatcaagggtgtaaggttaagtttgttggagcatttaaaaaaaacaattctgcctggatgtcactaaagatattttaattatgaatcacttactgagaattt

SEQ ID NO: 301692 - DNA, 599 bp, Homo sapiens
ggaggcatgcgcagtcctgcttttcccttgccctggcaggcttacctggtcagggattcagatgcaagtagtgggcaaagaaaggagggaggaggttgatatgaggctggtctgataactgctgctaaaagaagtcagggcctaaaatgtgcaaatatcgcctcagttttccataaccccaaggccaatctttaacataacccattatcttttttcctttagacttctaaggctaaaatgttttctagcttataactctaatgctcttttaggtttatttaaagcatgacatatgtaaatattaggcacagaatgtgatttgaagcaagattgaaaaaaaattaaattttcttcatacttcctaaagataacttggtgcccaatgttgatttgagacatccttaggaataaataaatcaaatactatcttccttccttccttccttctttccttccttctttccttcctttctctcygcagcactttttctcttttatatcaagggtgtaaggttaagtttgttggagcatttaaaaaaaacaattctgcctggatgtcactaaagatattttaattatgaatcacttactgagaattt

SEQ ID NO: 301693 - DNA, 542 bp, Homo sapiens
ggtcccaactattctggaggctgaggcaggaggattgtttgagcccaggaggtcggctgcagtgagctataatggaagaaaatatttgcaaactatgcattcagcaaaggactaatatctagaatccataaaaacttaattcaacaaagaaaaaacaaccccattaaaatgtgggcaaatgacatgaacagatatttctcaaaagaagacatgccagtggccaacaaacatacgaaaaaatgttcggcatcactaatcatcagagacatgcaaatcaaagccacaatgacacaccatctcacatcagtcaaaatggctattattaagtgaaaataaaaaagaaaaaatcaacagatgctggctaggcttaggagaaaagggaaaacttatacactgttggtgggartttaaattagttcagtcgttgtggaaagcagcgtggagacttctcaaagaacttaaaatagaactaccattcaacccagcaatcccattactgagtatgtatctgaaataaagtagatcattctaccaaaaagaca

SEQ ID NO: 301694 - DNA, 589 bp, Homo sapiens
aactaccattcaacccagcaatcccattactgagtatgtatctgaaataaagtagatcattctaccaaaaagacacattcactcgtatgtttattgaagcactatttatctcagcaaaracacggaatcaatcccggtgcttatacacatggattggataaacaaaatgtggtacatgtataccatggagctgcagctataaaaaaaagaatggactaatgttctttgcagcaacatggatgcagtgaaaggctattatcctaagcaaataaaagcaggaaaaacaaaacgaaatactgcttataagcagtattctcacttataagtggaagtgggtcctcatggacataaagatgggagcaatagacactgagggctactagagggcagagggagcggggcaagggatgaaaaactaactattggatactatgttcactttctgtgtgctgggatccttcatatcccaaacctcagcctcatgtggtacacccatgtaacaaacctgcacatgtaccccttgaatgtaaaataaaagttgaaattataaaaacagacaaagaacagagtttcctacaacctgtctgga

SEQ ID NO: 301695 - DNA, 589 bp, Homo sapiens
aactaccattcaacccagcaatcccattactgagtatgtatctgaaataaagtagatcattctaccaaaaagacacattcactcgtatgtttattgaagcactatttatctcagcaaaaacayggaatcaatcccggtgcttatacacatggattggataaacaaaatgtggtacatgtataccatggagctgcagctataaaaaaaagaatggactaatgttctttgcagcaacatggatgcagtgaaaggctattatcctaagcaaataaaagcaggaaaaacaaaacgaaatactgcttataagcagtattctcacttataagtggaagtgggtcctcatggacataaagatgggagcaatagacactgagggctactagagggcagagggagcggggcaagggatgaaaaactaactattggatactatgttcactttctgtgtgctgggatccttcatatcccaaacctcagcctcatgtggtacacccatgtaacaaacctgcacatgtaccccttgaatgtaaaataaaagttgaaattataaaaacagacaaagaacagagtttcctacaacctgtctgga

SEQ ID NO: 301696 - DNA, 636 bp, Homo sapiens
ccaagaccagaagccccccatagtctaatgctgtcctacccacccttccttcttgattctagatgtccaaaatgttcaggtgtaggaggagtgataatgaaagaaaaatggttaaaagctggctcctatgaaacttagcacttgagaagactttagggcttccaggacccttttgaatgttatgtctttccaactctaagtctaaatatattcttcaatttcaattgcattttatttcagggcttggaaaggagaatcgtaggatattgtccaaagcatgataaagttaaggaggagaaatgataactagaaattaaaagagaaatcgtatgtatgtttttaaaggtgaacagaaattctaccaggccccttttcctattggcagtgcccrggtaaagtcagagttagcacatcctcagatagaatgggaggtcagaaacatcataaaataccctcgcttcactgacagagtgctactgttattggtcaacctgaaaatcaccttcatttgtttactgatcacacctaggtgaaatgagaatgtctgaaaactggggctgcacacagtgacagctgtggacaaagggtttcacccacatccactcacagtagcctaccacttctatgtgagcacca

SEQ ID NO: 301697 - DNA, 636 bp, Homo sapiens
ccaagaccagaagccccccatagtctaatgctgtcctacccacccttccttcttgattctagatgtccaaaatgttcaggtgtaggaggagtgataatgaaagaaaaatggttaaaagctggctcctatgaaacttagcacttgagaagactttagggcttccaggacccttttgaatgttatgtctttccaactctaagtctaaatatattcttcaatttcaattgcattttatttcagggcttggaaaggagaatcgtaggatattgtccaaagcatgataaagttaaggaggagaaatgataactagaaattaaaagagaaatcgtatgtatgtttttaaaggtgaacagaaattctaccaggccccttttcctattggcagtgcccaggtaaagtcagagttagcacatcctcagatagaatgggaggtcagaaacatcataaaataccctcgcttcactgacagagtgctactgttattggtcaacctgaaaatcaccttcatttgtttactgatcacacctaggtgaaatgagaatgtctgaaaactggggctgcacacagtgacagctgtggacaaagggtttcacccacatccactcacagkagcctaccacttctatgtgagcacca

SEQ ID NO: 301698 - DNA, 606 bp, Homo sapiens
catgagggcaaagctctgacaaaatactgtaattcaagagtgtgcatgactctctggtgaacagtcacaaatgctggtgaaaaacttgtcaaaatgataaaagatccacatgtggtagagacttgaactgagctgaacggtgacatcactgctaaaaagatgtgccttttggctattgtggggatattctccagctattattcgtagtgatgtgggagtgactgggccttgttttaattcagttagcagcttcctgttaatgctttggttataggttatagccacagaaaatatatcttgtatatgtgagtggtataattttgaagactctaaaatatggtaacaactatgctgactctattatataatggaggtgaatagaattcaattaacaacagacactgtgcaactcttaattttcaaacaycaatctcacgccactgttgcttcctgaacaactaagcaaaaggcaaggagttaaaccacacataatttgatacactgtaacccaagcaagtatggtttaatcttagcagaaacttgaagaactgaacatttggtaacttgaaggttatataatttttaaaagccttcattttatgaata

SEQ ID NO: 301699 - DNA, 432 bp, Homo sapiens
agaaggaaaggctatgggtcattttggtattccacgcagcctacagtcaaagttgatggtgagaagcagagagactacttttgcttctccttaacatgctctcccaccccaagttgctacaggcttactgacactatttaaccacggttctcaccatcatttatttattcatagttaaacagcctcaaggatcccatggaagcccctcayttactttcagttcttcttcattgaaatcagatatgaatctaaaaacctgagacaaatagacaggcatgaaggaagcaactttcttccttccagtatgtatagtaaacacaaacagcaaaatgggtaaaataatagcagactacaccagggcacggagtagcaaaaattgtgagttaaaaatcagacttgacatttaaactccattattattaatgcagcatg

SEQ ID NO: 301700 - DNA, 432 bp, Homo sapiens
agaaggaaaggctatgggtcattttggtattccacgcagcctacagtcaaagttgatggtgagaagcagagagactacttttgcttctccttaacatgctctcccaccccaagttgctacaggcttactgacactatttaaccacggttctcaccatcatttatttattcatagttaaacagcctcaaggatcccatggaagcccctcacttactttcagttcttcttcattgaaatcagatatgaatctaaaaacctgagacaaatagacaggcatgaaggaagcaactttcttccttccagtatgtatagtaaacacaaacagcaaaatgggtaaaataatagyagactacaccagggcacggagtagcaaaaattgtgagttaaaaatcagacttgacatttaaactccattattattaatgcagcatg

SEQ ID NO: 301701 - DNA, 524 bp, Homo sapiens
gttggaatatacagagagaaaccatgagactctgttttgaaagcacagattataccatgagccattttcataaacaccagtgccaagcaacatgtttcatatggaaatcatgtttgacattgcttttgtacattcattcatttcctcaatcatttcctgaatgtttattgtgtccttcttttaaggataaagcctggtctaaagaactagagaataaacactggaaaaagacattgctacttggcttaagaatctctcaaaataatgggaagacaagcatgttcagaactaagkttaaccatatggccagagtgttacaagtacaatggatagaagaatcaattttgaccttggaattacagaacatactgtagaggacatctatgactctggggcttgaaatataagtagaatttttacagcagataaaaaaatcataattctttataattataaacttataaatagaaaaaataaagtgatggagaaataaaagtgaatagcttgagtaaaaagctaattgt

SEQ ID NO: 301702 - DNA, 578 bp, Homo sapiens
tactattagtatgattttatgtctatagagtaaaactctattcatacttaaacccccccacacaaaacaattgtaaaatgtgcattgttttttactacctggacctcctcatatgaggatgtaattaaaaaatatgtacttacttattatttccacttataatagagaaatttaaacttaaaaacttaaaatatataccagtttattataatatatttataatrtgtgtctaccactgcttcttgtacacacaagaagtgtttactgaggtcacattaaatgtcaggtgttttacatatgttacttaatctaattcatgaagtcaaccacaaattagcatttcattcaataaatatttagtgattgtctgctatttgccagacactattctaagtgcagcagtgaaaaaaagagacaaaaattattatttcctattttactggaaggaaacaggtaaatataagtaaataagtaaataatatactatgataaaaggtgataaatctcaggagggaatattaaacagtgcaagaaggaaaaagagtgctttctggagatgggtgtgatattgttttgaa

SEQ ID NO: 301703 - DNA, 586 bp, Homo sapiens
aataatcatacttgtatctattcgtttcccacaatgagcattcaaaaattaatttatatcttcttacattctttatccatttccctgtcaacccagtatacctccctcttaaatgtactcaatggtatttttccttaggggttatcattgcactcttaaatatgcttatatttctacgtgatttgatttgctagctttaactgctcttttggcttctagctacttaagaggaracataagtatattagtctgctctcatgctgctaataaagacatatccaagactgggtaatttataaaggaaagagttttaattgacttacagttccacatggctagggaggcctcacaatcatggctgaaggccagtgaagagcaaagtcacgtcttacatggtggcaggcaagagggttggtgcaggggaactctcgtttatcaaacaatctcatgaagcttattcgctaccacaagaacagtatggggaaaatcacctccatgattcaattatcttcaccgggccctgcccttgacacatgaggattattacaattcaaggtgagatttgggtggggacacagccaaacca

SEQ ID NO: 301704 - DNA, 586 bp, Homo sapiens
aataatcatacttgtatctattcgtttcccacaatgagcattcaaaaattaatttatatcttcttacattctttatccatttccctgtcaacccagtatacctccctcttaaatgtactcaatggtatttttccttaggggttatcattgcactcttaaatatgcttatatttctacgtgatttgatttgctagctttaactgctcttttggcttctagctacttaagaggagacataagtatattagtctgctctcatgctgctaataaagacatatccaagactgggtaatttataaaggaaagagttttaattgacttacagttccacatggctagggaggcctcacaatcatggctgaaggccagtgaagagcaaagtcacgtcttacatggtggcaggcaagagggttggtgcaggggaactctcgtttatcaaacaatctcatgaagcttattcgctaccacaagaacagtatggggaaaatcacctccatgattcaattatcttcacckggccctgcccttgacacatgaggattattacaattcaaggtgagatttgggtggggacacagccaaacca

SEQ ID NO: 301705 - DNA, 535 bp, Homo sapiens
aatccaaggaatgtggtgggaattggtggtccaacttaaagggtctaaccctttcacccttatctccctctgatccattttctaccccagagccagagtgatcttaaaccataagtaagctaaggttactgctttctagaaacacttcaatgccttctattacagttggggggatacaaattacgtaacgtggcttgcaagactccccctcccctactttgaatggtccttaggagttggccttctgtcagggcctgggagatgccgagcttgatcctcagtaactttgcagaggctgttccctctttggagcccttccctcactcttccccttaccaaggacaatcacttcttcggttctcarctcctgtgagaccccaggcgggagcatttgggtgtgcgtcattggagggctcacttgccattctttctcttttccctctttcctccaatggctcctgtggaggttttgagactcctcaatgtcactctgcttctctctccagttccagtcctaacaataggaaccctaggt

SEQ ID NO: 301706 - DNA, 636 bp, Homo sapiens
agccttccatcctggaatagatctcacttggttctgatatataattttttttacattgttggattcaatttgctaatattttgttgagaatttttgcatctctatttatgagagatattgttctatagttttccttcttgcaatgtctttgtaatactggtctcatagaatgagtcagaaagtattccttttgcttctatttkctgtaagtaatccttacttccttaaatgtttggcagaactcagcagtgaattcaattggcatggtttctttgttttagaaggtttttaattattgatctaattttaaaatagatgtagcaccattgaggttatctctttctctttgtctgagttttggcaaattgtatccttcaaaaagttggtctattttatttaggtttttgaatttgtggccttggaatccattttgtttctttattatctttttaatgtccataggattagtaatgatggttctactttcctttctgatattagcaatgtgtgtcttttttcttaacctgtataaatgtttgaaaatttatttatcatttcaaagagtcagcttttttctttatttcctatttccaatttcattgatttctgctctaattcttattatttcttttcttt

SEQ ID NO: 301707 - DNA, 551 bp, Homo sapiens
gttttggtaccaaattatccttattatgcaaattccctcccccagcaggttccagttgtgcccggggacccatggcgggtgcatctgcttcccatagttccrattcaccgagttgccagggcccatctgctcagcccaggcccagggcctgcggccagggaggagggggcgtgggcaggggccaggctgttgctccaggacctgcagggccactcctggagctggaaggtgatgcagcctgccttgagaagcccagatcccagacgtggacaggagacagagttctagggatgtctgccttgttcctgtcttggccatgtcaaaaagcagaaaaagcaagggagtatccccatgaggctcttacctttctccttagaaaagtgcagccaagaacttggcctttccaaagcatcggcctccatgaggcctgggctgcattgcagggtcctgtcttctttgccggctgctctccagagcccatctctgcccacccttgcagtccactgtcacccaccacttgaaggtcattgccagcatcctaaacacttgac

SEQ ID NO: 301708 - DNA, 491 bp, Homo sapiens
aatgcagtctgagagcatactttgtataatgtccattattttaaatttgttgagatgtattttatggcttggaatgtggtatatcttggtgaatgttgattgtgagcgtgagaaagaaaatatattctgctgtcattggatgaaatattttacaaatattgatttgatccagttaattgatggtacttttccattcaattatatccttacctattttctgactgctggacctgtccatttctgacaaaggggtgacaaagtctccaactataagrgtgagtttatctgtttctccttagagttctatcactaataatatagtaactgtgaaaagtagattctcgcccatcttcaggatttactggtttttgtttgtttgtttgtttgttttggttttgattgttgtagactacctctgtgctgaaaattggccttaggtgtaaactttttttcccccataagttattagggtacaggtggtatttggttac

SEQ ID NO: 301709 - DNA, 491 bp, Homo sapiens
aatgcagtctgagagcatactttgtataatgtccattattttaaatttgttgagatgtattttatggcttggaatgtggtatatcttggtgaatgttgattgtgagcgtgagaaagaaaatatattctgctgtcattggatgaaatattttacaaatattgatttgatccagttaattgatggtacttttccattcaattatatccttacctattttctgactgctggacctgtccatttctgacaaaggggtgacaaagtctccaactataagagtgagtttatctgtttctccttagagttctatcactaataatatagtaactgtgaaaagtagattctcgcccatcttcaggatttactggtttttgtttgtttgtttgtttgttttkgttttgattgttgtagactacctctgtgctgaaaattggccttaggtgtaaactttttttcccccataagttattagggtacaggtggtatttggttac

SEQ ID NO: 301710 - DNA, 574 bp, Homo sapiens
gcggggagaattacaaggaaccttcttaagggtgggggagattacaaagtaccttcttaagggtgggggagattacaaagtacattgatcagttaggatggggcagaaacaaatcacagtggtggaatgtcatcagttaaggctatttttactgcttttgtgcattgtcagttacttcaggccatctggatgtatacgtgcaagtcacaggggatgcgatggcttggcttgggctcagaggcctgacatttagtaatcccttcatgttttggaccgataccaagtccaggaacaaaccccatgttttccatcatgtgctgactggsagcactgtaagagttatgtggaatattaatttcagccccccattgtgccagtaactctcttccccaaagattaatggggattggcatgatataaggctgaattgtacccttttgaccatcagggccagtgcaaagcaagataaatgtgctctcataaacttcttcggcttttccaacacctactagtcccatgttagtgggatgtttaagccaggaggaaggccataaactagaggaaataatagaaa

SEQ ID NO: 301711 - DNA, 574 bp, Homo sapiens
gcggggagaattacaaggaaccttcttaagggtgggggagattacaaagtaccttcttaagggtgggggagattacaaagtacattgatcagttaggatggggcagaaacaaatcacagtggtggaatgtcatcagttaaggctatttttactgcttttgtgcattgtcagttacttcaggccatctggatgtatacgtgcaagtcacaggggatgcgatggcttggcttgggctcagaggcctgacatttagtaatcccttcatgttttggaccgataccaagtccaggaacaaaccccatgttttccatcatgtgctgactggcagcactgtaagagttatgtggaatattaatttcagccccccattgtgccagtaactctcttccccaaagattaatggggattggcatgatataaggctgaattgtacccttttgaccatcagggccagtgcaaagcaagataaatgtgctctcataaacttcttcrgcttttccaacacctactagtcccatgttagtgggatgtttaagccaggaggaaggccataaactagaggaaataatagaaa

SEQ ID NO: 301712 - DNA, 589 bp, Homo sapiens
ccaatttctagaaagactattataaataattttcttttaattatggccaacttgatcacataaatattttttcataaattctctttttataaaccttattatgacttacacaaaccatttactgaatacttggagtttctgttttatcccaaacatcctcttttttaaataaccagtgattttattttaggacaaaaaatatatcacacaacatttttgtcatgtaaaattgttttccttttaatctttcttaccaaaaataccacttaatatttataactttttttgcatctcttttatttactgtttccttttaccttgttttagaaacgacctttaagtaatctttgaattagacaaaaattatttctttttaataagaaaacattgtttttcagaaaaacattttcctatatttttttttaaattggaaatgacccagacatttaagcaatatctattattttgtttaatgttactttagattctaaattatatgtcgttttttaacaagcatttattctattatatttatctaattaattttttaatagmttacttataaaaactgatggtcatcatttaaagt

SEQ ID NO: 301713 - DNA, 307 bp, Homo sapiens
aacattttgggaaaaaaaaacaggccatcttttaaatgtggataatatatgcctttcgtgtgtatggaatttgagtctttctttggagatctgatattaaagaggcaataagcwctggacagaatggctcacatttacagataaaagattcagaatatcaaatgaacaataagaagcttatgaacagaataattatttcattataaaatgtatttactgtgcttataatgattgccagtttcagaaacttcaattattttgtctatttcagtatttaaagagtacaaccaaagtgtttatgttaaat

SEQ ID NO: 301714 - DNA, 307 bp, Homo sapiens
aacattttgggaaaaaaaaacaggccatcttttaaatgtggataatatatgcctttcgtgtgtatggaatttgagtctttctttggagatctgatattaaagaggcaataagctctggacagaatggctcacatttacagataaaagattcagaatatcaaatgaacaataagaagcttatgaacagaataattatttcattataaaatgtatttactgtgcttataaygattgccagtttcagaaacttcaattattttgtctatttcagtatttaaagagtacaaccaaagtgtttatgttaaat

SEQ ID NO: 301715 - DNA, 617 bp, Homo sapiens
atttatttttatttcatgatatctggacagtgtgaaaaagcctctgagtagagattctcagccctcactctccccactccctgtctccacgttacaaggcaccattcgcaaacaggcaggggaagccaacctcgaccaagcatgatcagtggatcctgcctcttagatgggataataatatagtccctaaaaagcttatgaacagaataatgaattcattatgaagtatacttgctgtacttgtaatgattgccattttaatgtaacggtgtctagaggaagggatgctgtgttccacctacttgtcttttgctctgaggctgtacatcctgggctaaaattcgagactacttccagtgtttacagtgaaaaccaagtcaataacagcttgaacaaaagtgaccctgattttggctcatttacaccaaaaaacagstctcattctccagcttctatatccataagaagtgatcccagtgggttctatgtgcatctttttgtttgtatttgtatttgtaaaacgtatgttgctttgcgtgcatgcactcttggtttgcatactatcagatacagcacaggccactgtgtcagcaaggcaatgtgaagactatccactg

SEQ ID NO: 301716 - DNA, 552 bp, Homo sapiens
gctctcaaactcatctgtttacaaactggaaatccactgttttgcaactgctgggtttttttagcttacaagacttaggtagcgctgacagatttgtcagattctttgatgagataacagtcagggactagagccagagttagtgctcaggcctactttccatacaactgctcttctcagagactgtggtcctcaaagccaattattctacatgattgaccccaggttcccgcagcattcttcagaaagtcatgaagattctgtgtcactgaggcccttagcacatgagttttctcaactacagagagagaaacatcacagacttcctcacatgggtaaaaagcaacataaagtgttctgggaggcagcatggcrctgcgggggagaagggtggactctggatccagagaactcggcttgcgtcttatctccaaggcttattagctgggtgaccttaggtaaccgaggaagctcaggtaacctctatggccaatatgatgcactcccatccctcggatggagagatgggagagactgtgctcctggaaccag

SEQ ID NO: 301717 - DNA, 552 bp, Homo sapiens
gctctcaaactcatctgtttacaaactggaaatccactgttttgcaactgctgggtttttttagcttacaagacttaggtagcgctgacagatttgtcagattctttgatgagataacagtcagggactagagccagagttagtgctcaggcctactttccatacaactgctcttctcagagactgtggtcctcaaagccaattattctacatgattgaccccaggttcccgcagcattcttcagaaagtcatgaagattctgtgtcactgaggcccttagcacatgagttttctcaactacagagagagaaacatcacagacttcctcacatgggtaaaaagcaacataaagtgttctgggaggcagcatggcactgcgggggagaagggtggactctggatccagagaactcggcttgcrtcttatctccaaggcttattagctgggtgaccttaggtaaccgaggaagctcaggtaacctctatggccaatatgatgcactcccatccctcggatggagagatgggagagactgtgctcctggaaccag

SEQ ID NO: 301718 - DNA, 552 bp, Homo sapiens
gctctcaaactcatctgtttacaaactggaaatccactgttttgcaactgctgggtttttttagcttacaagacttaggtagcgctgacagatttgtcagattctttgatgagataacagtcagggactagagccagagttagtgctcaggcctactttccatacaactgctcttctcagagactgtggtcctcaaagccaattattctacatgattgaccccaggttcccgcagcattcttcagaaagtcatgaagattctgtgtcactgaggcccttagcacatgagttttctcaactacagagagagaaacatcacagacttcctcacatgggtaaaaagcaacataaagtgttctgggaggcagcatggcactgcgggggagaagggtggactctggatccagagaactcggcttgcgtcttatctccaaggcttattagctgggtgaccttaggtaaccgaggaagctcaggtaamctctatggccaatatgatgcactcccatccctcggatggagagatgggagagactgtgctcctggaaccag

SEQ ID NO: 301719 - DNA, 539 bp, Homo sapiens
agggcccaccctaatccagaaggacctcatcttaactggattatggctgtaacaaccctctttccaaataaggccacattcacaggtgccaggggttaggrcttcaacatatctgtttgggggatgcaattcaaccccttacatactgtaccaaactggaggcacctagaagtgttgactccaattggtagcgcagtccttgaggaaaatgacgacccaagcaaatgtttccttcaatctctgctctaccccgtttcaggtgctatagaaaaattacgggagggcattgttttagagtgagctcctgcactaggtcccaacagaccaaactaaagtggagtcactcatgctaagtgccatttaaccaagctgaaactttaagaaagctggtggtccccaaatagaccagtttttcttgaaaacaagagtcacagcaacccatcagaaagagttcagtctgcctgagtcagagtaataaggaagtcccatttgctttaaccatgacgagaaaagtagtctgaattaagctgacactaacc

SEQ ID NO: 301720 - DNA, 488 bp, Homo sapiens
ccttggatttgaacaataatttcttaaaaaactgttaaccttctgagatccgtatgtggatttatttattgctttcaatatcttatcgccactaagcttaactagctaggcttggaaggttattttaaaggacaatgccctaaaaaggcagacacaattgggcttcctctttattttaccttcctatagaatgtcggcatgtgtatgagcgtgtatgagcgtgtgtgtgtgtgtgtgtgtgtgtgtgtgtgtgtgtgtgtgtgtttagcaaacatttatgattgaagaaaccattcagggaatccaaaaactaaaatgcaggattccactgcctcccctccmcccaccccgcaaaaaaaaaaaaaaaaaagtgacgtttcaggccaaaaaattgttttcgttgttattacttctgtaactgtcttcaatcacctattaatttaaccagcaaatatttattgaagcccctaatgtgccagtccctgggc

SEQ ID NO: 301721 - DNA, 488 bp, Homo sapiens
ccttggatttgaacaataatttcttaaaaaactgttaaccttctgagatccgtatgtggatttatttattgctttcaatatcttatcgccactaagcttaactagctaggcttggaaggttattttaaaggacaatgccctaaaaaggcagacacaattgggcttcctctttattttaccttcctatagaatgtcggcatgtgtatgagcgtgtatgagcgtgtgtgtgtgtgtgtgtgtgtgtgtgtgtgtgtgtgtgtgtgtttagcaaacatttatgattgaagaaaccattcagggaatccaaaaactaaaatgcaggattccactgcctcccctccacccmccccgcaaaaaaaaaaaaaaaaaagtgacgtttcaggccaaaaaattgttttcgttgttattacttctgtaactgtcttcaatcacctattaatttaaccagcaaatatttattgaagcccctaatgtgccagtccctgggc

SEQ ID NO: 301722 - DNA, 488 bp, Homo sapiens
ccttggatttgaacaataatttcttaaaaaactgttaaccttctgagatccgtatgtggatttatttattgctttcaatatcttatcgccactaagcttaactagctaggcttggaaggttattttaaaggacaatgccctaaaaaggcagacacaattgggcttcctctttattttaccttcctatagaatgtcggcatgtgtatgagcgtgtatgagcgtgtgtgtgtgtgtgtgtgtgtgtgtgtgtgtgtgtgtgtgtgtttagcaaacatttatgattgaagaaaccattcagggaatccaaaaactaaaatgcaggattccactgcctcccctccacccaccccgcaaaaaaaaaaaaaaaaaagtgacgtttcaggccaaaaaattgttttcgttgttattacttctgtaactgtcttcaatcacctattaatttaaccagcaaatatktattgaagcccctaatgtgccagtccctgggc

SEQ ID NO: 301723 - DNA, 595 bp, Homo sapiens
tattttacattccttttttcatactaagtcttcaaaatttagttgtgttgtttatacttacagaacrcctcaatttggaataggcacatttcaagtccttgataaccacatacggccataactgacagtgtaggactttaattctatgttttagagtgaggaaaagagcattctttcttttccccctctttttttaagctatgaatgaggaagcatattgccccatggctgcttacagccatcttatgaccatgaagtgatccagactggatcctgggtccttgatcacataactaagctttgctactccagagtctgcctgcctctgaactcccagtgataagacatgattcatttctctatagtttaagccattttgagtctgattttctgttaaacgcatcagaaaatgtgctaatctacatacccctcccatccgtattgtagccacaaagaagtatttccagcccttgtgatgagttttcttgttatatcaaataagtagacaccagccaaacacgtttctcacccaggctacaaattgagagaaccagtgaaactctaagtctcctatttccttgaacagttactactg

SEQ ID NO: 301724 - DNA, 595 bp, Homo sapiens
tattttacattccttttttcatactaagtcttcaaaatttagttgtgttgtttatacttacagaacacctcaatttggaataggcacatttcaagtccttgataaccacatacggccataactgacagtgtaggactttaattctatgttttagagtgaggaaaagagcattctttcttttccccctctttttttaagctatgaatgaggaagcatattgccccatggctgcttacagccatcttatgaccatgaagtgatccagactggatcctgggtccttgatcacataactaagctttgctactccagagtctgcytgcctctgaactcccagtgataagacatgattcatttctctatagtttaagccattttgagtctgattttctgttaaacgcatcagaaaatgtgctaatctacatacccctcccatccgtattgtagccacaaagaagtatttccagcccttgtgatgagttttcttgttatatcaaataagtagacaccagccaaacacgtttctcacccaggctacaaattgagagaaccagtgaaactctaagtctcctatttccttgaacagttactactg

SEQ ID NO: 301725 - DNA, 551 bp, Homo sapiens
ttagtcctgtgaaagcgttcaggaaggaaagctctctaagcaatttcctcagttctcagattcactttgtgagcctagacctaggaatgagaaatttttaaggaacattttcagtgtgcgcttggaagaaaatatgggctgttttcaagaaacattcactacttgcagagctgagtcctgctcacatttctctcagacagtttccctaactcatgacatgcacaatgatgttacccaaggttgaagttaagaaacggcaagatttcctatatattatgcattagtccatctgaaattgcctttctacacaggtaacagaaagctgactctaatcaaagagtatttatttctcaaacatagcaagaaatcctgaggtggctggtgcaggcaggtgtagcaattcctcagcaggagctgggtcccagcctcctccctctctcatctactcctcaygcttcttacctcatggttacaagatagcggtcctcctgtggtaccccatccacacaaaaggaaaaggggataggacatcagccttcaagagaaaagca

SEQ ID NO: 301726 - DNA, 414 bp, Homo sapiens
gaagagccctatcaaggaaaatatctaaaaggttgtmaaataaagtcatccttaggttaacacaagaaagccccaagaaagataagccaatttctctttaagaatattttcatcaagccaagagatttcaaataaatccaaactgaaaacaaaacaaaatggaagttctaacatcacctggcttatgtgtgttctgtcaacacttactaaataacacattcacctatttctgaacacacaaaaggaaaatatccttcatggacagccagaccaaatgtttgttaatggaaaattaaggacaaatgcaaatttttgcaacaactataatttggctcaaattgtctttctgtctctcctccccttcccatgacccaccccaggatacatttatcccaaatgattgtttggtttatc

SEQ ID NO: 301727 - DNA, 605 bp, Homo sapiens
tggcccactctatatataactagatgatgatagtaaaataactgtttatattttacataccactttgcaaggccttttgtttaaccctaacatctaccctgaaggtaaatagtatgatccctattttacagagaggaacagaggctcaaggagggtaagtgtagttgcccgagtccacgaagcttaaggcagcaggtataaggttgcatcgcaggccacctgactctacgtctgcttcagtcactctctgcttctcacaccctggggctgctctgagctagaaataagcaaaatattgggcaagactccatgaactccccgaccctcactaccccacaaggaataagctccttatyaccatccaagcccatatagaatgagcccagtgtctagactgcaagaaagaggcaagaaatagtctttctctctccactgtagaatgactgacacattgcaagagaaggtttcagggtttcatatagacccaatataaaggacccaacttcttttaaacatagagaaagtgtaagtgtttggtaaggataataaaattcaatgaatagtaactaaacatgcttattgagaacccaaaatgggttgactcc

SEQ ID NO: 301728 - DNA, 594 bp, Homo sapiens
ttttcttgattttcaaaattaatctctctctggatctgttactagaatgcaaagagtgcaattattccagaatcatttgctttttcagggctctgaagactggaaagtctctgtgttctcattgcagctcagctctccattagaccascctcagaaaatgttaataattagaaaggagctgggtgcctttctgaggctttgtttctttgtatcttgaatgtttcctctgtagtgttgatactaaaacctgctccatttgtataaaatcagagacatcaacaaactgtgtccttacacaacccaatgtcatggtcgttagataaaaatgattctcatcgcctcaaagagagatctccagattttttaagccatccatcccatcagtgaaaaattatagaaactgtatacacatacacatacacttgatctttaacaatgtatacgaacacataagttggggaaaggaaaccctatttgataaatgatgctgggaaaactggctggccacacctcatattttcatacttatttgaataatttaatttatttgaataatttaatcgaatataaattattcaattatttacttataaa

SEQ ID NO: 301729 - DNA, 515 bp, Homo sapiens
ttcaggcttctccacctaaaacaaaagaacattagagctgtacaaaaaaatgcggagatcctaaaacagccccctctttctacagacgagaaactgaggcacagagagatgatgtgatttgcccagtcacatcatctggttgtttatggctaatctcaccaaccctggtcatgctgcttttgggggatgacagggttcggggctccargcggccgggaaagtgtgatgagttggccttattctgttgaagacgcaaaggagtgatcaaataaggaaaccagcagcctgggagatttgtgttccaggccccagtgaacccgttacagggtgggactgggtggagcagccttcaggccgccccggcccctcgtgggaatgcgccgcgccccccggactctggagcggcccgaccctgcttcccaggccccgggcaggcgggcgggcgagacacaaagcaggccccgcgggcggtgctccgggtttcgcgagggcggcggtgcgcttgattgatggat

SEQ ID NO: 301730 - DNA, 547 bp, Homo sapiens
tgatctgactccaatccctctcttccttgaacacatttctttggagaatcaaaacccaacatctggaatttggcttttcactgtcacaggatgtctccaatgctggctcttgtttctggagttacataatttctcctaagcagcttttttctcacttcaaaaagaaagtgagagagattgcagaggaaatgcctatgatattaaaaagtcataagcactcatctgtgataacaaaaaagcagtggtcctggacacacataggttctgatagttaacgacgaacttgagggaatgaggcctggtggaactgaycataaatgaacagaaataaagagtgtgaggaaaagaggtaaatgcctcatgatgtgcaaacattgtggcagtggtttaaacatctcaggaaggaattgaagaatcattggtttgataggcatctggttaggtcagaccatctcatcaagataatcttataaaccttcaatcaacggttggcttaaagtctttaagccttgccactagacacctcctgcatactgcagaagggcca

SEQ ID NO: 301731 - DNA, 623 bp, Homo sapiens
gtttctccaaggaaaggctctgtaaatctcgtccttttgaaatctaggggaaaacagcctccttcactgaggattaatttaaagaaagggggaaataggaaaattccatgcgttggaagtccatttagatttctacatgaaccatcatatatgtgcactacataattcttatttttttatttttaaaaaagggataatttatattccagtgacaagtttgggaaaggccaaggcaagcaattgagttgaacattatgtagcgtttatatagaccttgcagacgtctgtgcaatatccaccacygaacacgtgaggtcgtactcaagtctctctggcccctggtaatgtgactcccttcctttatttgcatgaatcgcctggattgggtgtcaggtttttaaaacgtcaaggtttacgcctattgttgtcaaccaatcagcatcctactttgacgtgattggcttctactgtaggtgtcaatcatccaaaatttgcatactactcctcaggccgccgggagcctgtcagtcggctgtggcagctggaagagaaggaatcggacggagaagaatgaaaaatcactttgctttcgcaaagcgaaagaaaagtattcttttcctcat

SEQ ID NO: 301732 - DNA, 547 bp, Homo sapiens
tgatctgactccaatccctctcttccttgaacacatttctttggagaatcaaaacccaacatctggaatttggcttttcactgtcacaggatgtctccaatgctggctcttgtttctggagttacataatttctcctaagcagcttttttctcacttcaaaaagaaagtgagagagattgcagaggaaatgcctatgatattaaaaagtcataagcactcatctgtgataacaaaaaagcagtggtcctggacacacataggttctgatagttaacgacgaacttgagggaatgaggcctggtggaactgaccataaatgaacagaaataaagagtgtgaggaaaagaggtaaatgcctcatgatgtgcaaacattgtggcagtggtttaaacatctcaggaaggaattgaagaatcattggtttgataggcatctggttagstcagaccatctcatcaagataatcttataaaccttcaatcaacggttggcttaaagtctttaagccttgccactagacacctcctgcatactgcagaagggcca

SEQ ID NO: 301733 - DNA, 555 bp, Homo sapiens
tgcctcttcttcccacaactccctcacactgccacacatatattcccagcgataagcaatgtgtcatgaggatagtacaggagacagtggtgtcatcctggtggcacctggttctccttcctcctgacctttgtgccagggatgagcctctaactctctgcgtttcattctgaagtgtttccatatagaaaacattgtgaactgttttccatctccccgggggtgactctttcctaatataaaggagggatattgtaggggattgaggttggcaatggaggattaagaagaagggaagatgaaccgcaatgcaaaaaaataataatttacagctccattcatttttgtttcttctcaaattttctcccagtagattaatcaacaaaagtaaacctacctaaaacatagtgcaacttagaaattgaccaattactctttttttttttcatttctgagtgtcaaaccaaccctaaaatgccataaaaacaaacttcctgtcaataaaggaataagcttcaaacttaygggaaatactttagaagcatacttagtaga

SEQ ID NO: 301734 - DNA, 567 bp, Homo sapiens
ggaaactggggtttggagaagtgaaaggacttgttccaagtcatgtcattgatgagtggccaagttggaaatggctccaacactacagctgcacttacaagtagggtggagcctctgctctcacctctgggtaggtctacggttgctggggctcctatttctctgagaggtgttcactcctcactctgagcagagtagtttaatgctgagtatccccctgtatgagggtttcagaaaacctgaaggtttgccaggcctacagtgcttagaggtttgattatgggagccttcagtgagggcaactgacaacactgatcatctgtgagtgttaaaagaaacaatatttatggctatgataaaagatgtaagcattaatgtctatggcagaagtcaggaatgtggtcacaaaagtgatcctagaatgttaatgatgccagggaccctgtccaatgccatctttctccaactcaagatgaaaactgaggccagggagattaagtcagttgccctaggtcacagagattccartgccagagttggaactaagaatctactgctggaattgca

SEQ ID NO: 301735 - DNA, 539 bp, Homo sapiens
gaacaactcgcaatgatggaagtgttctcagttggcactgtccaatattgtagccattagctatatgtggctagtgagcccttgaaatgtgattattctgactcaggaactaaaatttaaatttcattttaataaatttaaaatatagtcatgtgactaatggctaccatattggacagttcaaatgcagaatattttcatcactgcagaaaattttatcagacagcactaagctaaagggtctacccctgagcaaaagcsctgagactctaccccatgtctgaccctgagctgggttcattatttgggctgagctaaaagagaggcctccaagatggcttggtgtgcaatttctgggacttaaggatacaatgagttcgggcagggtggaggcactgtattggttcctatacaatcaagctttggagtgtataatggagaagaaagcttagagacctctagttgttgcccctctttacagacaggaaaactcagtggcagtaaattagtcgcttggcaaaagttaacacaaaagttaa

SEQ ID NO: 301736 - DNA, 595 bp, Homo sapiens
atgtcattctttcttgtattacttcagcacatccatattgtgtatttcccctgtatgaggattcttttgtttaggatggacagggtgggagacatgagctgcctcttggtggaggagaaaggtgtgttcgtcagcttgcctcaaagggctgtgcagggatgggatagggtgaccaagccttacctgggactgactcagttttagcactcaamgcccccatgccaagaaatctctcaatccgaggcaaatcaggatagttgttccactgataccaatgataatgtcaccaatcttccaaaattcagatgaagcaaagaatcaaggcaagttgccagccatggtgatatgcacctgtactcccagctactcaggaggctgaaacaggtcgatcacttgagcccaggagttcaagtccagcctgggtaacctagcaagaggtcatctctaaaaagaaaaaaaagaatcaaggcaagtctaacattttggtgggtggcttatgcctttgctttatagattcagagaaaaagacgtttcctggtacttttcccttcatctgcattcaattgttctcctcaaccagcaaccttaaagcagc

SEQ ID NO: 301737 - DNA, 511 bp, Homo sapiens
gcgtacttagatttgtgcagttcacacagaaaaaataatgatgatgatgaaaataaccaggctgtgaggtacgatatctgcaaatggccaataaacaagaatctttgggaattattagatgatgttaagatactactgaacaggaagaatggcgctaataaagaaagcatattttaatgacatgctagctttatttggcattctatgtgtcctataaamatctgtttaaaatgattctttttagatatatcttctgcactagatgagaagttcatctggggcaggggttagcaaacattgtctgtaaaagtctagagagtaagtattttcagctttgcaggccatatgctcactgctgcaactacccaattctgccactgtagcactaaagcagccatacaaggtaagtaaatgagtgagtgtggcccaatttggcccactggccatagtctgccaactcctgatctaaaggaagaactataatagcctttgttttccgtgtttattttct

SEQ ID NO: 301738 - DNA, 583 bp, Homo sapiens
tggtgctgggataattggctagccacatgtagaaaatgaaactggatcctcatctctcaccttataaaaacatcaactcaaaatggatcaaaaacttaaatctaagacctgaaaccattaaaattttagaagataacatcagaaaacccttctaaacattggcttaggcaaagacttcatgaccaagaacccaaaagcaaatccaacaaaaacaaagatatgcagatgggatttaattaaactaagaagcttctgcacarcaaaataatcagcagagttaacaggcaacctactgtgtgggagaaaatcttcacaatctatacttctgacaaaggactaatatccagaatctacaaggaactcaaaccaacaaatcagcaagaaaaaatcaatctcatccaaaagtgggctaaagacatgaatagaaaattctcaaaggaagatacgcaaatggctgacaagcatatggaaaagtgctcaacatcactatcgggaaaatgaaaatcaaaaccacaatgtgatattaccttacccctgcaagaatggtcatcataaaaaaataaaaaaaaatagatgttggcgt

SEQ ID NO: 301739 - DNA, 583 bp, Homo sapiens
caacagcacgaatacacctggcatccaaatcttgatttctaaatactcattctgcaatttaaaacaacacaacatggccgggcacggaggctcatgcctgtaatcccaacactttgggaggcggaggtgggcggatcatctgaggtcaggagtttgagaccagcctggccaacatgatgaaattctgtctctaytaaaaatacaaaaaattagctggacatggtggcgggcacctgtaatctcagctacttgggaggctgagccaagagaatcgctttgaacccaggaggcagaggttgcagtgagccaagatcacgccattccactccggcctgggcaataagagcgaaactccgtctcggggggaaaaaaaccacaacacaaaaccaaacaaaaccaaaccatgggtctttgaagaaatggctgactccagtgctagagctcagcaagcacaagatgtgtgtagacatcttgctgtaccagaagataagggaagtactcaaagaggatgacaaaggacacagaagttggcttgaagggctgccactggccagactgggaacaatctgtaactcaatgataa

SEQ ID NO: 301740 - DNA, 559 bp, Homo sapiens
cacctcggcctcccaaagtgctgggattacaggcgtgagcaccgcgcctggccrgaatataaatattttaatgatccaataaaagtcatatacataaagaggtagcaataaatgaaattgttctagcttgacaatgccttttgctttagccctacatgatctaatcattataagttgggccataatttctagatcaggttgcttttggaccaccacagagcagagtggcaaaacacacccaatcatctgctgccagtctcagggagcttgacttatgcccttgaaagacaggtttcagaactagaatcttgtaggcgtagaccctcggaattagacaggatattaaattacagtgtaaattggtagttaggaactcaggagtattagttacattattttagatccttagcctctttccaccatataaatttgagtaagtcagtgagtctctgagcctagttttcttatcagtaaaatgggaaaaataatcccaccctcctgaggattaaatgaaataatatataactatctctgatgtacatacctgatgctcaattaa

SEQ ID NO: 301741 - DNA, 606 bp, Homo sapiens
ctgcaccatcctctctccttcagatacacttcagatatctttccctcctgaaatactcttcctcctttttctgctatgctttgacaatacctactcacccttcagattaaagaaagtattattcccgtggaatgccttcttgacgctctcctctaggtcagagcttttgtttgtcttcgtttggtctggtttagtattctctgagtacatttgagtacstagactttaagattttggatccaagttctcttctttttcttgagcattcactttgtataattcgttagtgtgattttacttggctgactgtaggtccattagggaaggaaggggccatgtctattttgctcaccattgtatctccagagtgcaaggcagcatgtcactcactggaataatttaataaatattagctgaataaagattgaatgaatgaatgttgtcctgccattgcttaattttaccaatgtgccagcaattctttagtaataaagtaaattacttttagcaatgggaacatgataaatgtgaggaagctaagaggagaataagagattatcttgaaacaaagtgcaatttggaatttttgtcttttaaagacttagg

SEQ ID NO: 301742 - DNA, 606 bp, Homo sapiens
ctgcaccatcctctctccttcagatacacttcagatatctttccctcctgaaatactcttcctcctttttctgctatgctttgacaatacctactcacccttcagattaaagaaagtattattcccgtggaatgccttcttgacgctctcctctaggtcagagcttttgtttgtcttcgtttggtctggtttagtattctctgagtacatttgagtacctagactttaagattttggatccaagttctcttctttttcttgagcattcactttgtataattcgttagtgtgattttacttggctgactgtaggtccattagggaaggaaggggccatgtctattttgctcaccattgtatctccagagtgcaaggcagcatgtcactcactggaataatttaataaatattagctgaataaagattgaatgaatgaatgttgtcctgccattgcttaatkttaccaatgtgccagcaattctttagtaataaagtaaattacttttagcaatgggaacatgataaatgtgaggaagctaagaggagaataagagattatcttgaaacaaagtgcaatttggaatttttgtcttttaaagacttagg

SEQ ID NO: 301743 - DNA, 586 bp, Homo sapiens
atctataaggtggtttatttgagaccatgtaaatatcctttttccagtcaactttaacccctaattgttttagcatctatggattatgctttcttgaaatagttattttgtagcgggttaaaaaatggttattttataaattctttatttattctagaattattagctggtattattttgtgcaggagagcttctcccatatatatatataatttttctctatcattctggatttatttttgatatatcatgacataattttttatatatcatattagaatgtttttgatatataatattgttctttttgatatatcatatatttggttttttgatatagcatgatattatatctcattaccatgtggtagacttctaattgatgttagcttttcctctaatctctgtctctctcccatcctccctctcccttttgtctactctcaataccttgatagtcatcttgtatatcacaaccaytctacttttctttaaatactgcctttcacattttatacatgccacagatgctcatattcatctgtgttcctaactgcttgtaaattatgtgcaaatttcttagccc

SEQ ID NO: 301744 - DNA, 540 bp, Homo sapiens
ttagcttttcctctaatctctgtctctctcccatcctccctctcccttttgtctactctcaataccttgatagtcatcttgtatatcacaaccactctacttttctttaaatactgcctttcacattttatacatgccacagatgctcatattcatctgtgttcctaactgcttgtaaattatgtgcaaatttcttagccctatatttaagccctttcacaatgcagcttttaccacaaccctctctagtctttttaagaccagatacttctctgatatgagggaacgttagagtggattctgtctagtcctcccatatcattggtggaaaaagtgaggcacagagaatgaagttattttccaaggycactcagtgtatttgtagtagagtccagatgagaatgctagagttcaatgtcctacattacacgcctcctctcctaagcaaaccctctgctgctgctagaagcttcatgtccatccctagcctaatgttattcccttgggcctaacttcctcctccttgttttacttcctgtt

SEQ ID NO: 301745 - DNA, 520 bp, Homo sapiens
tttatgatttacaataggttctgtgccatgtcccatggattcaaagattatttagatagcctctgttcttgaggagctcagtatatataagatgatctcctactttayagaattttttctcaaagacctaactgtagaaagtcaagctttctatgcaaataactcaatatgtacccataactccaagtcctgacgctaactggtattgtattttggagaagtggtttatcttctgtgttaaatctctgaggtagtgtaatagaagggaaagagtgtgggttttgtccagcagactcaggattggaattttgactctgtacatctattaagtgatgataggaatatctacttcaaaatggttgcagagttatattgagaactgaataaggtgatgcagatgaaaacccactcaatgaatggtagcttttgcttttactatgggaaattgaagaatacttctgctttgtttaagcacccttttcaaatcagtaaaccaataaattcattttttctggactaa

SEQ ID NO: 301746 - DNA, 492 bp, Homo sapiens
tgaaccacacaaaattgacaatattcaacttgacctacagaaatggcaacttcayatggttcagcctaataacattattaatatcactaaaagaaaattttaatttctactttttaatgtaaatagcatgtacaatttcaatttttttctagaagagtatttcctcactaaaaagtatgtttagtgtgtaaaattcacgacatttgctgttttgattaagaaaaataatgttaaaataaatcttcctggttctttttcccaaaatagttttaggaagtttaaatttgagttaaatgttgtgaaaattttagcctcaggaaatgtgaaaagggacattaaagtcttatgtattgttggctatcagggaaaagagtaaatctttgaccattctaaaagaacaacattggagttgtcagctaatgagctgaaagttgttctgtgatatattactgagcaaaagattagaggaaactagtataacagagagaaaga

SEQ ID NO: 301747 - DNA, 586 bp, Homo sapiens
gttgttttgaggagtaaatataataatgtattgaaagagcttaccatggggcttgacacacagtaagcattgacacacatcagtgaagattatcctctctttttgagaaagagtgggaaggagcccttccttggccttaactttctgctcaagggccaaagagaggtggagacaagttgtaggaggctgactgctggggctttcattgagacttaaggagcaaagaggctatgatgaccttctggtatcttcctaggtcatgcagctctattcccagaaatttgagagaaaaagcccacttagaaataaagatggagcttttacttaggaacctgaatacagtggatgaaagactacaaaatgtagagaatcaaaatccaacacataccagatygatccatgactctgagaattagaaatgatttaaaaacaagaatgtcttagaacaaaatgagaaaagatgaacagttgccaatgaaatgttattttctttcactgtgttcctaaaaaatttattcaatgtccttaaataatacatcttgcgggattaattgaaaatgccacaatggaatgaaaataaaaaaaa

SEQ ID NO: 301748 - DNA, 554 bp, Homo sapiens
tttgtttttaattctgtttatgtagtgtatcacatttattgacttgtatatgttaaaccatccctgcatccctgatatgaaacctacctgaccatggtggattattttttttgatatgttgttggatttggttagctagtattttgttaaggattttagcatctatgttcatcaaaaatattggtctgtagttttcatttttggttatgtcctttcctggttttgctattagggtgatgctggtttcatagaatgaattagggagggttccttctttctctatctygtggaatagtgtcaaaaggattggtatcaattcttctttgaatgtctggtagaattctgctgtgactctggtcctggaccttcttcgttggtaatttgtaaattaccatttcaatctcactgtttgttattgatctgtttaggtatctaatattcctgattttaagctaggagggttgtattcttttccaggaatttatccatctcttctaggttttccagtttatgtatgtaaaggtgttcatagtagccttgaatgatcttttgta

SEQ ID NO: 301749 - DNA, 500 bp, Homo sapiens
cgcctgtggagtctgcaccccggattcgtgccctgccctagttctggccaggaggattctcacccagttcaaaytgttacaacgctcagctagagatttccttctccctgtggagttttaccccctcctctcccgatggatccctgtggtgccagcaggaatgggctgctcggggacccagcgagctccgcgggcctttccgctgcttcctctacccctgtacctcactgggctccccagacggactcagctccaggtaaagttggaaattctcccgcaaacagaccttcagcttccccagtgggggtgtgtgtttgggagaggagggtctccctctcccacttctgcagttggggcactcacacttttgcgggggtctcccgggtcctgcaggagcagcccacttccttcagagggtctgcgggtcctctcgggactgctggtttcttcctgcagtccatctggagctaaaagtcacaatgcgagccccgcacgctgcc

SEQ ID NO: 301750 - DNA, 500 bp, Homo sapiens
cgcctgtggagtctgcaccccggattcgtgccctgccctagttctggccaggaggattctcacccagttcaaattgttacaacgctcagctagagatttccttctccctgtggagttttaccccctcctctcccgatggatccctgtggtgccagcaggaatgggctgctcggggacccagcgagctccgcgggcctttccgctgcttcctctacccctgtacctcactgggctccccagacggactcagctccaggtaaagttggaaattctcccgcaarcagaccttcagcttccccagtgggggtgtgtgtttgggagaggagggtctccctctcccacttctgcagttggggcactcacacttttgcgggggtctcccgggtcctgcaggagcagcccacttccttcagagggtctgcgggtcctctcgggactgctggtttcttcctgcagtccatctggagctaaaagtcacaatgcgagccccgcacgctgcc

SEQ ID NO: 301751 - DNA, 540 bp, Homo sapiens
agcccacttccttcagagggtctgcgggtcctctcgggactgctggtttcttcctgcagtccatctggagctaaaaktcacaatgcgagccccgcacgctgccctgagggagctgcaatgtagtcctgcctcccgtccgccatgatgatctgtctcttaaaagtctcctttctatgatcttttcgggtaatacatatcattggccaaaggagagtgtattagttaactcagttatggtgatgtatttcgggaatctggaaatatattttaaattatacctctttgtacccaataaacaataaatttgaaagcttttctgtgctgttttaatgtcttcttattgctatatttctccttgatatgtaagatgtttgtgcgtacatggcaaaaattatagtcttcattcatgttaacaaattttgcttgaattaccaccctagaaaacgcataaaaacaacttattagcatatggtgtatagaatttcttaaaactgtcattaatattttctttactacctttaaaattcaatggttctcagt

SEQ ID NO: 301752 - DNA, 583 bp, Homo sapiens
ttttcagtgattaaaaatgttttggaagctgtcrgaaattaagaatgagttcgttagcacatcaatagactcattaagatgattggcaaaaatcactggagtgattgacttcctagaaatttgattttatttttagtgtaattcctttctgctaagcaaaatagtagtttatttggtaatttttattgtgctaatgatagtaatcattaatatttcatcaagcctggcctccagaaaaatcacgacttaggcaaagattgtttagatccatttaccactttgtaattttatttgtatttattttattaatttatgcaccaaatatttattgtccatgtaaggttgttggcgaccttgacaagtgcggttttggaggagtagaggaagtgaaagacagattgaagtggacttgagggagagtgggatgagaaaattggaaataactttgagaagctttgctacaaaggatgacaaagaaatggagtattaaatgcgatggaattgagtgcaagggaaggtgttttaaacagaagaaataacaacatatttatgtgctgatggggtgactcagtggatattgaag

SEQ ID NO: 301753 - DNA, 583 bp, Homo sapiens
ttttcagtgattaaaaatgttttggaagctgtcggaaattaagaatgagttcgttagcacatcaatagactcattaagatgattggcaaaaatcactggagtgattgacttcctagaaayttgattttatttttagtgtaattcctttctgctaagcaaaatagtagtttatttggtaatttttattgtgctaatgatagtaatcattaatatttcatcaagcctggcctccagaaaaatcacgacttaggcaaagattgtttagatccatttaccactttgtaattttatttgtatttattttattaatttatgcaccaaatatttattgtccatgtaaggttgttggcgaccttgacaagtgcggttttggaggagtagaggaagtgaaagacagattgaagtggacttgagggagagtgggatgagaaaattggaaataactttgagaagctttgctacaaaggatgacaaagaaatggagtattaaatgcgatggaattgagtgcaagggaaggtgttttaaacagaagaaataacaacatatttatgtgctgatggggtgactcagtggatattgaag

SEQ ID NO: 301754 - DNA, 578 bp, Homo sapiens
ttgcaaatgactggatctcattccttttttatggctgaatagtaccccattgtgtatacgtaccacattttctttatccattcatctgttgatggacacataggttgcttccaaatcttagctattgcaaactgtgctgcaacgaacataggagtacagatatctctacaatactgatttcctttgttytgggcacattcccagcagtgggattgcaggctcatatgatagctcaacttttagttttttgaggaacctccaaactgttctgcatagtgattgtattaatttactttcccaccaacagtgtacaagggttcccttttctccacaaccttatcagcatttattattacctgtctttcggatataagccattttaactgggatttgatgacatctcattgtagttttgatttgctcttctctaatgatcaatgatgttgagcaccttttcatatgcttgtttgccacttgtatgtcttcttttcagaaatgtctattcaaatcttttgcccagtttttgattggattattagatttttttcctgtagagttttttgagctctttatatatt

SEQ ID NO: 301755 - DNA, 578 bp, Homo sapiens
ttgcaaatgactggatctcattccttttttatggctgaatagtaccccattgtgtatacgtaccacattttctttatccattcatctgttgatggacacataggttgcttccaaatcttagctattgcaaactgtgctgcaacgaacataggagtacagatatctctacaatactgatttcctttgttttgggcacattcccagcagtgggattgcaggctcatatgatagctcaacttttagttttttgaggaacctccaaactgttctgcatagtgattgtattaatttackttcccaccaacagtgtacaagggttcccttttctccacaaccttatcagcatttattattacctgtctttcggatataagccattttaactgggatttgatgacatctcattgtagttttgatttgctcttctctaatgatcaatgatgttgagcaccttttcatatgcttgtttgccacttgtatgtcttcttttcagaaatgtctattcaaatcttttgcccagtttttgattggattattagatttttttcctgtagagttttttgagctctttatatatt

SEQ ID NO: 301756 - DNA, 621 bp, Homo sapiens
gccacgtgaggtgtagcttttcagtgaagggcatgaatgtgttgctgcggactgttagaaacattagcataatgcaagaagacagcagccaggaatgatagaggccacattcagattatgatggagaccagtgttttgaaaattgtgttttcacagtgcctgtgsttcctgaagatgcctcacaaacaccacaggccactcaagggaggccacacagggtagggtttaaagccccacccttcccgcctcagttaaagttgctcttcattatttgtttggcgattcgacagtttcaggattcaaatagaagaaagtgaaacctcatcaatgggtagattcagtgatgaacactggacaatggatatatttctagcaacatttaaggctggatattcatgaatcaggagcaaaagcaggagctttaggagatggtattagagagacttgtagaagaaatgaagaatgaagaagacatctggaagatcgaattttgggcattctaggaaagaaatgtcctttctcatgaaggatccagagatgagagccaattctcaaagccctggggcagttgcagagtggaggtacagaaacacccaggacaagaaggggaatgcagagccc

SEQ ID NO: 301757 - DNA, 421 bp, Homo sapiens
tattttgagccaaatatgagtgaccatggccggaggcgtggcctcaagagatcctgagaacgtgtgtccaaggtggttgggctgcagcttggttttatatgttttggggagacatatacaatacacatgaggtttagtccgaaaaggcakaacaactccaagagggagcttccaggttgtagatggagtcaaggattttctgattggcaattggttaaaagagttattatctaaatagaataatagaggcaatagaaaggagtgtctgggttaacataaggggctgtggacactgaggttcttatgaaatcttataggtggctgcccttagatacaatagatggtgaatgtctcctcttcaaacctttaaaaggtgctggactcttgattgcttgagcccaggatgcacaggttgcagtga

SEQ ID NO: 301758 - DNA, 548 bp, Homo sapiens
atactgagatatggggctgcagcagagaaaggggtttcatcatagggctgctgaatgaggagatgagaggaaaccccaaattcatctccctggggagtakgagggtggggtttttaaagaattttggagtaggctgaagtgtgaagatcatggattggtcaaagagtgcagggtgaaatactgggacaagaagatgaagaaacagcattcccacgttgatttggctcctctgtggggtcttcaaactggtggcatcaactattctcctggaattcagaatctgcttaagcacttcttaaacacaagccttatgattctaaggtcagaaatcctccctataggaacagtgcggacgtgagtgctcagtgccgggtgcaacagccctttcagttacaaggaagtgggtcaaagcgcagcctgattattgcttaattacaacaacatttctgtccagaattcttgttaacactgtcaggacagccttattgtattaagtataataatcacattgaaaattatttaggctttcctcaaaaagacaaaccaca

SEQ ID NO: 301759 - DNA, 548 bp, Homo sapiens
atactgagatatggggctgcagcagagaaaggggtttcatcatagggctgctgaatgaggagatgagaggaaaccccaaattcatctccctggggagtaggagggtggggtttttaaagaattttggagtaggctgaagtgtgaagatcatggattggtcaaagagtgcagggtgaaatactgggacaagaagatgaagaaacagyattcccacgttgatttggctcctctgtggggtcttcaaactggtggcatcaactattctcctggaattcagaatctgcttaagcacttcttaaacacaagccttatgattctaaggtcagaaatcctccctataggaacagtgcggacgtgagtgctcagtgccgggtgcaacagccctttcagttacaaggaagtgggtcaaagcgcagcctgattattgcttaattacaacaacatttctgtccagaattcttgttaacactgtcaggacagccttattgtattaagtataataatcacattgaaaattatttaggctttcctcaaaaagacaaaccaca

SEQ ID NO: 301760 - DNA, 633 bp, Homo sapiens
aggctgaagtgtgaagatcatggattggtcaaagagtgcagggtgaaatactgggacaagaagatgaagaaacagcattcccacgttgatttggctcctctgtggggtcttcaaactggtggcatcaactattctcctggaattcagaatctgcttaagcacttcttaaacacaagccttatgattctaaggtcagaaatcctccctataggaacagtgcggaygtgagtgctcagtgccgggtgcaacagccctttcagttacaaggaagtgggtcaaagcgcagcctgattattgcttaattacaacaacatttctgtccagaattcttgttaacactgtcaggacagccttattgtattaagtataataatcacattgaaaattatttaggctttcctcaaaaagacaaaccacagatcagcagaccatttgcaaagcatctaattaatagagggataatgttcaggatttgtaagagtttgaaaaatatattaaaaagataactgaacagaaaaattctcaaagaaaacaaataggcaaatcacagaaaaaaaacacaagtggccagtgaagagataccaaaacttcactaataacccgggaaataaaaagttaaactaaagctgacac

SEQ ID NO: 301761 - DNA, 633 bp, Homo sapiens
aggctgaagtgtgaagatcatggattggtcaaagagtgcagggtgaaatactgggacaagaagatgaagaaacagcattcccacgttgatttggctcctctgtggggtcttcaaactggtggcatcaactattctcctggaattcagaatctgcttaagcacttcttaaacacaagccttatgattctaaggtcagaaatcctccctataggaacagtgcggacgtgagtgctcagtgccgggtgcaacagccctttcagttacaaggaagtgggtcaaagcgcagcctgattattgcttaattacaacaacatttctgtccagaattcttgttaacactgtcaggacagccttattgtattaagtataataatcacattgaaaattatttaggctttcctcaaaaagacaaaccacagatcagcagaccatttgcaaagcatctaattaatagagggataatgttcaggatttgtaagagtttgaaaaatatattaaaaagataactgaacagaaaaattctcaaagaaaacaaataggcaaatcacagaaaaaaaacacaagtggccagtgaagagataccaaaacttcrctaataacccgggaaataaaaagttaaactaaagctgacac

SEQ ID NO: 301762 - DNA, 351 bp, Homo sapiens
cccgggaaataaaaagttaaactaaagctgacaccattttcacccatccattttgtacacattatgaaacctgttttcaccaacctgatgctaaaaaagaaaaaaattataaagtctaacattatcaagtattgtgaaaattttgaaaaatggaaatactcatccgtcattagtgtgggtataaacttgaaaaaccatcctgaaagtattttgattatgtctatgaaagctaccccccaaaagtacaagttctacaaaagagcaattttacttkttacgtgcattatattaataccttacacatctgcagtgagacatgtaaaataatattttaaggacaaataaagatta

SEQ ID NO: 301763 - DNA, 568 bp, Homo sapiens
attgcactccagcctgggtgacagagcaagattccatctcaaaaaaaataaaataaaataaaataaaataaaaaataaaaataaaaataaaaaagattaaaaatgatagcckaattcttccgtttgaaaataaggtaagaaacttctccctctctcttttcttagaacatttactttagaagatttgtaattgtaagttccttttctgtctctaaatctttttccaagcccaataagcctcttgccagctttacgacccaggaatggctttctcaagcacctggaaatcacctctttgtaaacatcgagtgagacagtgcctctgtggcccagtttctgggggagagtaagagcctgtctttgggggatgccttgctcctagttgcaaaactacctcttgtcataaaaataaatgtttatttttccctcatttaaaagtgattaccaggtgaatttaggatgaactgtgtgtaataaatggtgctatcacattctctcacttgaggactagttattatataccttgagagcatgtatgtaatgaattgtatctgcttggttatacgaa

SEQ ID NO: 301764 - DNA, 590 bp, Homo sapiens
ttggcatagaatgaactaaatctgtgatttttcagcatgttatggttgtagagttcatgaactattattccatcttgggaatactttgagaagtaaaagtaaattttattattgcaaaagatgcagtaatatttagtattttgttttaaaagtcaaaacttactcagcaaatgcacggcatacagatggtgaagaggtgattcagtaaagttttggtttcaagaaatcctggcccacctaagtaatctccagcatagcaaggtttatcttaaagataaaaaaggatcaaaaggcccttgagaattaggcagctaccccctctgtctccctctccctcgtgcaagattatctgctccccacctatgactgctctctccctttcctcagartggattcttccccacagccacttgtactggcctcacatggtcacctgtgccccactttatcatggctcactggcccctcttatcattttctccctcccagattattgacagatgaatgggattttcacagtttaccttttcaatgtggctctgtatccttagcaaacctatggattctctgccagtggcagaatagagaca

SEQ ID NO: 301765 - DNA, 600 bp, Homo sapiens
agtggaggcccattgggaagaccctgggaatgcagactcctcatgtatatgggctctgttcacactaatgcaaggcaacaattctaaaggtgggtaacatcaaccccagcactttgggaagctgaagaggattgtttgacgtcaggagcttgaggccagcctgcaacagagtgagacctcgtctctacaaaattaaacaggttagttgggcatgatggtgtgcacctgtagtcctagctacttgggaggctgaagtgggaggatcacttgagcccaggaggttgaggctgcaatgagcaatgatcgatggtgccactgcattccagcctgggcaacagagcaagaccctgtctataaaaataaatcaatacaaataaaaataggtgatattcattttgtacttatgatagttactattcaaaggctttatctgtattagctcatttaattctcacagtaaccatatggattaggcgttattgtcttcaattccctgtctggakttaggccaaaccgcaggttaagggcacagttctttacaagacttccttcacggcagacaccagctgcaagtttggaggcctccggagccaccctaac

SEQ ID NO: 301766 - DNA, 568 bp, Homo sapiens
actcttgaagcaatggattggtttttgtagattaatgcaaagttgtttcaagaaacctgaattacaggctgattcttgatatatataagggttttggattctactaaacatcctacctaaatacgttttacaaataataaagaggaggctaaatatattttaaaaataaggagtcctggccgggcatggtggctcatgcctataatcccagcattttgggaggctgaggygggcggatcacaaggtcaagagattgagaccatcctggccaacatgatgaaacctcatccctactaaaaataaaaaaaaattagccaggcatggtggcgcacacctgtagtcccagcttctcgggaggctgaggcagaagaatgacttgaacccgggaggcggaagttgcactgagccaagatcatgccactgcactctagcctggtgacagagcaagactccgtctcaaaaataaataaataaataaataatagtaataaggagtgctatgtgtggtatatagttgactatcaacaaatatttcttgactgactgcatgaactaatgaataaattga

SEQ ID NO: 301767 - DNA, 567 bp, Homo sapiens
tggatctcagaattataaatacagctgtccattcagcatctcaatttagatttctgatagtcatctatgagtttgtagtagaaaaaagtaaagtttttctcttgcactttttcatgtctcagttaatgatatttcttctactcatcagttgcaacacagaaccttagagtcatctttgttctcttccaatagaccccatatacaatacattatcagtactgtggattcgttctcataaatagattcagaatgtaactattaaccaatatgtgcactgttaccatccatcaatgctagctctcaactgaatacctgcaatagtcttttaaatgatgtcctatgatatggtttggatgtgtcccacccaaacctcagcttgaattgtatctcccagaattcccacgtgttgtgggagggacgcagcgggaggtaattgaatcatgggggtcagtctttcccrggcaattctcatgatagtgaataagcctcatgagatctgtgggtttatcaggggtttccgcgtttagttcctcctcatttttctcttgccgctaccatgtaaaaagt

SEQ ID NO: 301768 - DNA, 552 bp, Homo sapiens
taacatgaaaacacgtaaatacataaaactcactgtaaagataaaaatacgtttaaactcagaatactctagtactataaaaatggttcttagatcacttttaactctaacataaaacttaaaagatgaaaatactaagaataactatagctataataatttaatagatgcacgagaagaatttatattgagataacaacattaaatgttgggagagaagttaaaatgtaaatcttttatatacggtcaaaattaacttatcctcagcttaaaataaagtattataactataatatgttttttctaagcctcatggtaacaacaacaacaamaaaaaacctatagtaggtacgctaaaggcaaggagaaataaatcaaatcttaccactacaaaaactcatcaaatcaaaaaagagagaagaaagaaagaaaaaagaaaatacaaaataatcagaaactaacaaaatggcaataataagtccctatctcttcatcagttcttcaaatatattagattaaattattcaaccaaaagacatacagtgaatgaat

SEQ ID NO: 301769 - DNA, 558 bp, Homo sapiens
tattattgccaaaactagaactaacttcaatatccctcacaaatattatagctgatgaaataagtgcatattcaattagactttatactgcaataaaaggcaaatggtagcagtgtgcaggaacatggatgcatyttaaactgtaatgctgcaggaaataagctagccaaaatgaacttgaaaagtatgattacattaatataaattcaaaagatgcaaaacgaaattatagtttagagatgaaaacttaggtgataaaatctatgaagaaaatcagaacagaagaaaatcagaacaaaagggaatcagtcaggaaagtatttatctgaaggcagtgggcaggccttataattaaaaaaataataatttagagatctaccggcttctaatttctgatcacaggaattagaatattgtttacacaattgctcactttatttctacattgcacttaaatactttatatacatgttattctgtatgttacatttaattattgaaaaaacattagtactgagtacatagaaatgtaaatgataaaataatggagatctttga

SEQ ID NO: 301770 - DNA, 615 bp, Homo sapiens
aataatttgcaaatgaaagtgaattaataacatgctgatccataacaccatgtttatsaattaggggagtgggaagcacactgtccatgactgaaagagaagctatcaccagagaagaacacaggatcaaagaaataatcgcaaatgttcaagaccaaaaattttgttcagtatgagaatgcagacttcctagggcaaaatagaaagggtagaagagtgactaccaagaattgattggttagacaggagaatcaacaaataaattctgaggtttttggttttgttaaaagatagacagaagtaaatgtgctgcaaaaggtgttttcagacatcatttaaaaatgtaggtaaaattaagttggattttctagcaccattgtaacaggtgatgtctctgtacttcctgcagtgtgacacttccaatacctcaaattccttttacacctgttactttgtgttacttttacaacttcctagtgatataggcagtttagtgttttagcctcatgttatctaatatataacataaagtaaactcaaagtggcaaagtaatttgaaacctaggaatcaaaactgaatgccccaatttggacttcatattttctacatcaaca

SEQ ID NO: 301771 - DNA, 615 bp, Homo sapiens
aataatttgcaaatgaaagtgaattaataacatgctgatccataacaccatgtttatgaattaggggagtgggaagcacactgtccatgactgaaagagaagctatcaccagagaagaacacaggatcaaagaaataatcgcaaatgttcaagaccaaaaattttgttcagtatgagaatgcagacttcctagggcaaaatagaaagggtagaagagtgactaccaagaattgattggttagacaggagaatcaacaaataaattctgaggtttttggttttgttaaaagatagacagaagtaaatgtgctgcaaaaggtgttttcagacatcatttaaaaatgtaggtaaaattaagttggattttctagcaccattgtaacaggtgatgtctctgtacttcctgcagygtgacacttccaatacctcaaattccttttacacctgttactttgtgttacttttacaacttcctagtgatataggcagtttagtgttttagcctcatgttatctaatatataacataaagtaaactcaaagtggcaaagtaatttgaaacctaggaatcaaaactgaatgccccaatttggacttcatattttctacatcaaca

SEQ ID NO: 301772 - DNA, 499 bp, Homo sapiens
gttctggggtgtctaattttggcctgaagagcatgaaatcttaaatttcctactaggtctkttgtggtatgggtacaaatagggggacttatattttttctgaaatatttgtctgtatagtgcaattattgtctaaaggttttgtctgtaccctttggtatttccagttgtcagtttctttggctctaaattcatgatatagaaagaaaaacaaacaaaaagaaaaacaaggatctcactatcctgtagttccttgggtccagaggtctctatttagtcctgttttttctctgcctttcagagtcttcttataattttcatatgtattgcctaaggtttttatttgtacttagcagaaagagtagggaaaatacaactactgcaactttctagaagtcttataaaatctttttaagcataaaaaccgtaaagtcatatatacttgtgtgtccattaatctatattatctgtattttgtacatgtatagagaggtttcta

SEQ ID NO: 301773 - DNA, 499 bp, Homo sapiens
gttctggggtgtctaattttggcctgaagagcatgaaatcttaaatttcctactaggtctgttgtggtatgggtacaaatagggggacttatattttttctgmaatatttgtctgtatagtgcaattattgtctaaaggttttgtctgtaccctttggtatttccagttgtcagtttctttggctctaaattcatgatatagaaagaaaaacaaacaaaaagaaaaacaaggatctcactatcctgtagttccttgggtccagaggtctctatttagtcctgttttttctctgcctttcagagtcttcttataattttcatatgtattgcctaaggtttttatttgtacttagcagaaagagtagggaaaatacaactactgcaactttctagaagtcttataaaatctttttaagcataaaaaccgtaaagtcatatatacttgtgtgtccattaatctatattatctgtattttgtacatgtatagagaggtttcta

SEQ ID NO: 301774 - DNA, 579 bp, Homo sapiens
tcatgtgacaatcaactgttatctcagatcaaaagtcagcaaagacctgagtcctctaacattcaggaaggagcctggaagcaggtcctttcccagtcaaacttcgtgatgactgccgccacagctgacaactcaatggcatccttataacagaccttgagctagagtctccctgtcaagctgcaccagatttctgatccacagtgagagaggtggagataaagtatacaggttgttagaaatgtcacatattttagttgactatgtctgaatttcattgtaatagtttatcataaagataaaaaacattttataaaatataaactggggaagatattttcagactgtactcctctaaggccttttgagtggttccggggagcaagtgaatcagcaccatggagagctccrtgaacatgcagctgtaacattcacttagtgtcactatttatgtctccttgtttttagctctgttataaaatgtccatcttattgatacatattctccacccttttcactaaagtctttaacgtatttttaatagttaaaataaattttctgtctgatagttccagtag

SEQ ID NO: 301775 - DNA, 498 bp, Homo sapiens
gatttgatacaaaatttatatggagtagagagggtcctcattcttctgggatcactagttagatgggttgtgtaatgctgcatctctgagccttctttatccacacatgggaagtaaccgagagtgagatccccagagtaaactagcaccaagtagaagaagaggttaaaaaggagaaccctttatatttwgttgcaagtctttattttttggctcaccagaaacctgctaaaagcctggattagaatatagtttttaagtaatcatgaaacttcaaataagattacagaaaatgtagggaatattttaaaatcttgagaaatttttagccaaacagaaaatccagaatccatagaacaggaagactaacacattttactaattaaaaatatattaatttaaaaatacaacagaaaacaatgaagaaaaatacaatatgggtaaaagtatggaccacaaatgcaacaagtatttcattttcaaaataagtaaaattcc

SEQ ID NO: 301776 - DNA, 513 bp, Homo sapiens
ttcagcctttaatttttttcacggtgcataatgtgcttttgtaactacataaatgtactaatctgtattcatactgcaataaagaactgctcgagaccaggtaatttagaaagaaaataggtttagttgactcacagttcagcatggctggggaggcctcaggaaacttacaatcatggtggaaggcaaaagggaagcaaggcaccttcctcacaaggcagcaggagggagaagtcctgagcaaagatggaagagcccctcattaaaccatcagatctcatgtgaactcactcactattatgagaacagcatgtggaaarcaccccatgattcaattaccgacatctgatctctcccttgacatgtgaggattacaatttaagatgagatttgggaggggacagaaagcctaatcatatcaataaagatattttattatttattaaaaaggaagccaagttttgtcacacccaaacctcttggaaaatagtaagtttacttttgaataggttt

SEQ ID NO: 301777 - DNA, 564 bp, Homo sapiens
tttagaaagaaaataggtttagttgactcacagttcagcatggctggggaggcctcaggaaacttacaatcatggtggaaggcaaaagggaagcaaggcaccttcctcacaaggcagcaggagggagaagtcctgagcaaagatggaagagcccctcattaaaccatcagatctcatgtgaactcactcactattatgagaacagcatgtggaaagcaccccatgattcaattaccgacatctgatctctcccttgacatgtgaggattacaatttaagatgagatttgggwggggacagaaagcctaatcatatcaataaagatattttattatttattaaaaaggaagccaagttttgtcacacccaaacctcttggaaaatagtaagtttacttttgaataggtttttatgttattttccttgaaaatgcttgaagaatcacaaatggtttgttcacaaagcaactttataatagtcacaatgtaaattcattaacgaaagcaaataaataaaagaatgggagaaggaaagggaggaagggaagcatgaagaatgtagtaa

SEQ ID NO: 301778 - DNA, 541 bp, Homo sapiens
ttttttttcttttttgagtcagtgtatcactctgacaccgaggctggagtgcagtgatgcaatcatggcttattgcagcctcaatctcctgacctcaagcaatcctccctttttggcctctcaaagtactgggattacagtgatcctccaagtttgtttcaaatatttgactacwgattttttaatcttacatgataagtagacaatttagtgatttacaaaaagagactagaaaaaaaggagctgtagactgaattgccaactatttcaaaaatataatctttgaagacctaagccagtgattctcaaactgtagttaagtaatcaactacttaaaatgcatatatccctgaaccctcaaggaccacttaacaatgtgtatatcccttaactcacctcatggatttgaattcagtagatcttgattatttttaggaatatgtattcttacatataaccgaaagaaatttgagctgatcactctcagtttgcactttaaaacattgcattaaattccccctccctccctccatttttagcc

SEQ ID NO: 301779 - DNA, 541 bp, Homo sapiens
ttttttttcttttttgagtcagtgtatcactctgacaccgaggctggagtgcagtgatgcaatcatggcttattgcagcctcaatctcctgacctcaagcaatcctccctttttggcctctcaaagtactgggattacagtgatcctccaagtttgtttcaaatatttgactacagattttttaatcttacatgataagtagacaatttagtgatttacaaaaagagactagaaaaaaaggagctgtagactgaattgccaactatttcaaaaatataatctttgaagacctaagccagtgattctcaaactgtagttaagyaatcaactacttaaaatgcatatatccctgaaccctcaaggaccacttaacaatgtgtatatcccttaactcacctcatggatttgaattcagtagatcttgattatttttaggaatatgtattcttacatataaccgaaagaaatttgagctgatcactctcagtttgcactttaaaacattgcattaaattccccctccctccctccatttttagcc

SEQ ID NO: 301780 - DNA, 553 bp, Homo sapiens
gatcactctcagtttgcactttaaaacattgcattaaattccccctccctccctccatttttagccccatgaagtaagcttcacctcatgagtcaatggagtcattatatcttcataagtttgtaagtcagtcattcaccgacttatgttttgagaagatggagacccatgatatacaacttaactgtggcagttacataaaaattcaacatatacatgtataaagaattataacacatagcaattatttactcaagcaagatgcagagacatttgttttgatagatgagctttctcagtagctttttctacttggcaagccaggtgtatytttagtagagccaaagcacctggtttagcagaacatccattattaatctgatagtagaatgtataatttactgcccataatgctaattataatagctccttacataagcaaagctgaaggactgccacttaaattgttgacagtagctagtagattacagacttaaaaaaattccacagaaacataaaaatatctggtaaacacaaaaatgaaattagaatg

SEQ ID NO: 301781 - DNA, 591 bp, Homo sapiens
ttgtgttgttacttttcataggtaaaactttttattctttcacatgtgtaattaaatatttccactggttagagtgactgaagttgttacaaatgattgcattttattatctactaactactttcactattagcattactattctgattaaaggatttatacatattaacatgataaagagataagataaatgtggattctgtaagaataatttatttcttcagtcttcttatctcaaatttccatatccaaaattatgagttttttgttctcacaaaataaaatgcattacatatttgaagtgacagcagtgtcaacttatcaattcyaatggtgttcataataagaaaggagtatatcagtgaaacatctatttgaagatataaggaaagtgaattccaggcagataagagagtaaatataaaagttaaaatcctgagttcaaaacaagattaaactgcttaatgaagtgaaataaattcagttgttctgaaacggagtaagctgagggaagagtgggttgaaataagttttgtttgagcaagccagaaattataattcatggtaaggaataaccaaatggtgagagct

SEQ ID NO: 301782 - DNA, 533 bp, Homo sapiens
gttatggatagaagaataaatataaggatgacaacaggtaaaacaaaatacaatagagcagcatttcgttgaatttaagaaattgccaacaatctttcaaaaacaaaagtgaaartaaagattatcccagacacagagaaaccacaagtatttatcatcaataggtctacactaaaaatatgttaggaaaagtctttccggaagaataaaatgatatgagattgaaatctgtatgtctaaaaggaagtaaagtacatttgaaatgttgtataagtgaataaatataatttttctataattttaaatttatttaaaacataacaccaatatgttgtggtgcttataccatatgtaaaaacaaatgtataaaaataataacacaatgtctagaaaagtaggtgtaaaaatttttattttaaaggttttttaagatttaagcattacaacagtatctgaaggtatgctgtgataagtaaaggccgatactagaaaatctaaagcaatttctctctcatatttctctctctccccca

SEQ ID NO: 301783 - DNA, 533 bp, Homo sapiens
gttatggatagaagaataaatataaggatgacaacaggtaaaacaaaatacaatagagcagcatttcgttgaatttaagaaattgccaacaatctttcaaaaacaaaagtgaaaataaagattatcccagacacagagaaaccacaagtatttatcatcaataggtctacactaaaaatatgttaggaaaagtctttccggaagaataaaatgatatgagatygaaatctgtatgtctaaaaggaagtaaagtacatttgaaatgttgtataagtgaataaatataatttttctataattttaaatttatttaaaacataacaccaatatgttgtggtgcttataccatatgtaaaaacaaatgtataaaaataataacacaatgtctagaaaagtaggtgtaaaaatttttattttaaaggttttttaagatttaagcattacaacagtatctgaaggtatgctgtgataagtaaaggccgatactagaaaatctaaagcaatttctctctcatatttctctctctccccca

SEQ ID NO: 301784 - DNA, 569 bp, Homo sapiens
gaactcatttctttgtggttatgtaattgaggtcctaattttcttgctagttattggctaaaggccactctcagcatctagtggttactcttgggtcctttccacatgacccatgccatttaatatgctccgtcaagtccagaaagaaagtctatgtgtatttgagtctgttttaatgggctcaagggactacgtaaggttcacttatggtaayctcccttttgattcattcatagtcaactgactaggaacattaattacatcttaaaagtttctttggccgtatcacaggagtggtttttatattcacaaattctactggcattcaaggagaagattttatagggggcaggtacactagtgggtgggaatcatggaatccatcttagaattctgcctattatttccactctggtaaacaaattgtcagttttttataaaattagatacagcaagtgcactcctgaacatttatcctggaggaattaaaacttatgttcatagaaaatcctgtacatgattgtttataccagctttgtttgtagtaactggaaagaaaactcgaaaca

SEQ ID NO: 301785 - DNA, 636 bp, Homo sapiens
gcagtagtttcaaattaatgtttttctcccccaaaattatggctgtatcataaaattgtataattttaaatacaggtaatttttttaaaaagcaagttatttaaagtattttaaacaaattgaggaaagtctcakaatttattgtcagtctattgaataattagcaatttcagataattatacttctagaaaaaatagaaagtaaaaccataataggaaaatattggtaactccaaaaaaaaaagtatcactagtcccatgacgtaattaggagtgagacctttggcaagaataacaataaacagcacttaatcaaatatctgtgtgtctagatggcatcttgtttaacagctttaacaaggcacagagcatgtccatgccttacgagcactccccttcccccaggtggcctacaaattggagaatggcttattttatttgaccatcttggtcactactcatgtcctcattgatgaagtcttttggcctccctgctttgtttggtttgaaagattcttgctgagtttgagagctcaggtacccaggatccagcctctgaaagtaccacatagagatgtcatcttgaccgtgtgcccactccctggaaagcagacaatgatcaggatatggattctt

SEQ ID NO: 301786 - DNA, 636 bp, Homo sapiens
gcagtagtttcaaattaatgtttttctcccccaaaattatggctgtatcataaaattgtataattttaaatacaggtaatttttttaaaaagcaagttatttaaagtattttaaacaaattgaggaaagtctcataatttattgtcagtctattgaataattagcaatttcagataattatacttctagaaaaaatagaaagtaaaaccataataggaaaatattggtaactccaaaaaaaaaagtatcactagtcccatgacgtaattaggagtgagacctttggcaagaataacaataaacagcacttaatcaaatatctgtgtgtctagatggcatcttgtttaacagctttaacaaggcacagagcatgtccatgccttacgagcactccccttcccccaggtggcctacaaattggagaatggcttattttatttgaccrtcttggtcactactcatgtcctcattgatgaagtcttttggcctccctgctttgtttggtttgaaagattcttgctgagtttgagagctcaggtacccaggatccagcctctgaaagtaccacatagagatgtcatcttgaccgtgtgcccactccctggaaagcagacaatgatcaggatatggattctt

SEQ ID NO: 301787 - DNA, 552 bp, Homo sapiens
tgtgacggttaatactgactgtcatcttgattgggttgaaggatacaaagtattgttcctaggcgtgtctgtgagggtgttgccaaacgagattaacatttgagtcagtggactgggaaaggctgacccaccctcaatctgggtgggcaccatctaatcagctggcagtgtggccagaatcaaaagcaggcagaagaacgtgaaaagactagactggcttggcctccccgtctgtatccttctcccaygctggatgcccttgaacatcggattccaagttcttcagctttgggacttggactggcttccttgctcctcagcttgcagacagcttattgtgggaccttgcgatcatgtgagttaatacttactaaaccctgttagttctatccctctagagaaccctgactaatacagatggactggtgggccttgtaaatcattttattttaatcatgttcagtgaaaagttttcagaagagagcgatttaatttagcttcatttttttaacaaagataccttgttgaaaacaaaatggattctactgaata

SEQ ID NO: 301788 - DNA, 615 bp, Homo sapiens
caaaaatagaacataacttccttatttagataaaaattgtaaatgtatatgctgaacttgctttataatcctctcccccattcttgtcaaaatgcatctctgagactgactaatttaccataagtattttttaaacaaataatagaagggtttaaatacacattatgtcctgtgggtgatgaggttataatctactttagatgtgataaattaatagggaaatagcttggacattcgtcacattaaacattttaaaaattcatgtatctgattaaaatagacctgaagatttttgatacagggaattgctacttcattcataaatttctgtttaattataatgtatgatgacacaaagttacaagtacaagagtggttgtcttatctgcaaaayggtcactttcaatgatcaacaagtacatgtttttgtattttttgatgctataattgtcttgcatattttattgaaataaacatttccttgttaaatttaatacttaaaaattgtgatttatttttgtatgtcttaaaatttcatttttatagagtttcaatttttgttgggtttttcaaaagtattggtctatgacaatttgtaggagaaatggtcctata

SEQ ID NO: 301789 - DNA, 546 bp, Homo sapiens
tttactgagcacctatgttaggaatgttataggyattatgtgtataggaaaatgaataaaacagacagaaatctctgcccatataaggcttattttctaggtgggagaatgagcccaacattcatactaactcctttcaggatgatcagaaagaagataatatgtgcaggtggaagtaacatatttatataatcacagtgctatataatttcattacctttccattattaactttctcagcctcttttattatacaaatatagtaaacatcctctgaaggatgtatttcctctcattacaatggttactatgctttttagtcaaaattatctacagttgatttctcaaaatagcaaacattatattgagcttacttagcattccatctattatactatggagagtttaacagagaatatatatacacacacacacacatatttgtacacatatatatatatccatgtatacacacacatacacacattgtccacataagacagaagactacctttcagctatttgtgaaataggtttattagaaac

SEQ ID NO: 301790 - DNA, 546 bp, Homo sapiens
tttactgagcacctatgttaggaatgttataggcattatgtgtataggaaaatgaataaaacagacagaaatctctgcccatataaggcttattttctaggtgggagaatgagcccaacattcatactaactcctttcaggatgatcagaaagaagataatatgtgcaggtggaagtaacatatttatataatcacagtgctatataatttcattacctttccattattaactttstcagcctcttttattatacaaatatagtaaacatcctctgaaggatgtatttcctctcattacaatggttactatgctttttagtcaaaattatctacagttgatttctcaaaatagcaaacattatattgagcttacttagcattccatctattatactatggagagtttaacagagaatatatatacacacacacacacatatttgtacacatatatatatatccatgtatacacacacatacacacattgtccacataagacagaagactacctttcagctatttgtgaaataggtttattagaaac

SEQ ID NO: 301791 - DNA, 546 bp, Homo sapiens
tattatacaaatatagtaaacatcctctgaaggatgtatttcctctcattacaatggttactatgctttttagtcaaaattatctacagttgatttctcaaaatagcaaacattatattgagcttacttagcattccatctattatactatggagagtttaacagagaatatatatacacacacacacacatatttgtacacatatatatatatccatgtatacacacacatacacacattgtccacataagacagaagrctacctttcagctatttgtgaaataggtttattagaaacttagtaaagtattctgtggtgtaatatagtccaactagtttaaattattcatttcatatcctagtgcttttttcccacatgtgctactttattgttttaaactagttgatttataaaaatgtcatctgaatagtgcaaattaatgattccagcaaaacacatttgcgataccttaggtatgtgacaggcaattaaaaaaagttgtattgatttgtctaaaatgttaaatgacataatagccatacag

SEQ ID NO: 301792 - DNA, 546 bp, Homo sapiens
tattatacaaatatagtaaacatcctctgaaggatgtatttcctctcattacaatggttactatgctttttagtcaaaattatctacagttgatttctcaaaatagcaaacattatattgagcttacttagcattccatctattatactatggagagtttaacagagaatatatatacacacacacacacatatttgtacacatatatatatatccatgtatacacacacatacacacattgtccacataagacagaagactacctttcagctatttgtgaaataggtttattagaaacttagtaaagtattctgtggtgtaatatagtccaactagtttaaattattcatttcatatcctagtgcttttttcccacatgtgctactttattgttttaaactagttgatttataaaaatgtcatctgmatagtgcaaattaatgattccagcaaaacacatttgcgataccttaggtatgtgacaggcaattaaaaaaagttgtattgatttgtctaaaatgttaaatgacataatagccatacag

SEQ ID NO: 301793 - DNA, 295 bp, Homo sapiens
tggtaagcatatattgtacttgtaaaacaggccatggacaatcttagattcaaaacatgaggatcaaacaagaatcaattaaattttcagaaaagataacctcataaatgtgagagatcaactcaacaaacagaaaataaaaaataacaaaatgtacaccaacrtataaagcaacagataaaagaatcaacacaaatataaattataacttcagagtaatatgggaggcagcatttccatgaagtagcatacaaagattttcaaaattaaaatttttgttgtgaagaaaatagaa

SEQ ID NO: 301794 - DNA, 295 bp, Homo sapiens
tggtaagcatatattgtacttgtaaaacaggccatggacaatcttagattcaaaacatgaggatcaaacaagaatcaattaaattttcagaaaagataacctcataaatgtgagagatcaactcaacaaacagaaaataaaaaataacaaaatgtacaccaacatataaagcaacagataaaakaatcaacacaaatataaattataacttcagagtaatatgggaggcagcatttccatgaagtagcatacaaagattttcaaaattaaaatttttgttgtgaagaaaatagaa

SEQ ID NO: 301795 - DNA, 481 bp, Homo sapiens
aaaagaagatgtataactttggcagggagaagtggctcacgcctgtaatcccagcactttgggaggccgaggcaggcagatcacgaggtcaggagttcaagaccagcctgaccaatatggtgaaaccacacctctactaaaaatacaaaaagttagccaggtgtgggggcacagacctgtaatcccagctagtggggaggytgaggcaggagaatctcttgaacctgggaggtggaggttgcagtgagctgaaatcatgccactgcactctagcctgggtgacacagcaagattccatccgccccccccccaaaaaaaaaaaaaaaaaaaaagaggtataacttctagatggtatgaaatagaaggcaggggtgagaacattaaaaagtaggaaagtattacatttgtaaaacagagggagaaagttaacatgttgtctaaacagaactagtagtataattatagtgttttaaaataaagc

SEQ ID NO: 301796 - DNA, 578 bp, Homo sapiens
tctattttgctctcatttcaaaatatatgcaaaatcctctgaattctcaacacctccaccacttgtaactttttctaagcttccagttttgctttcctgcatatttatttgactaatctttctacacaaaatccaatttagcctttcacaacctaaattagataaaatcactcctctgctcaaaactctgcaaagactcttcatcttattctaaatkgaatccaactctttccagggtctcctagtttctctatgatttagcctttggctacctttcagacctaatctcagttatctccattctacctggactttttgttgtttcttaaggatatcaaaggctttttgcatttgttttagagtctttgcatttgcttttctctctgttcaaaattcactttgctgaggtcttggtttcttctcacgggagttgttagtgatccccagacatccatcacccctctattccaacatccacacccttgccaccattgtgtcacaaatatgctggaatagatttcatcacaccctctcatgctgtgtaaatggtcatcacaaaacacctcttgttctaccag

SEQ ID NO: 301797 - DNA, 578 bp, Homo sapiens
tctattttgctctcatttcaaaatatatgcaaaatcctctgaattctcaacacctccaccacttgtaactttttctaagcttccagttttgctttcctgcatatttatttgactaatctttctacacaaaatccaatttagcctttcacaacctaaattagataaaatcactcctctgctcaaaactctgcaaagactcttcatcttattctaaatggaatccaactctttccagggtctcctagtttctctatgatttagcctttggctacctttcagacctaatctcagttatctccattctacctggactttttgttgtttcttaaggatatcaaaggctttttgcatttgttttagagtctttgcatttgcttttctctctgttcaaaattcactttgctgaggtcttggtttcttctcacgggagttgttagtgakccccagacatccatcacccctctattccaacatccacacccttgccaccattgtgtcacaaatatgctggaatagatttcatcacaccctctcatgctgtgtaaatggtcatcacaaaacacctcttgttctaccag

SEQ ID NO: 301798 - DNA, 578 bp, Homo sapiens
tctattttgctctcatttcaaaatatatgcaaaatcctctgaattctcaacacctccaccacttgtaactttttctaagcttccagttttgctttcctgcatatttatttgactaatctttctacacaaaatccaatttagcctttcacaacctaaattagataaaatcactcctctgctcaaaactctgcaaagactcttcatcttattctaaatggaatccaactctttccagggtctcctagtttctctatgatttagcctttggctacctttcagacctaatctcagttatctccattctacctggactttttgttgtttcttaaggatatcaaaggctttttgcatttgttttagagtctttgcatttgcttttctctctgttcaaaattcactttgctgaggtcttggtttcttctcacgggagttgttagtgatccccagacatccatcacccctctattccaacatccacacccttgmcaccattgtgtcacaaatatgctggaatagatttcatcacaccctctcatgctgtgtaaatggtcatcacaaaacacctcttgttctaccag

SEQ ID NO: 301799 - DNA, 535 bp, Homo sapiens
atgcaggacacctgtctctcctgctctttatatatccttgagaccattttctctcccatgtccctaaaactgcccaactttaaaatgtttatcatcacttcatattaccatttatgaagctttattgctgtcacttctcaatacctggaccatttacccttatttccggatgacttcagtttctagttcactgacattttctttacaagaaaccctgtcttaattcttcatgattctagtatacacatagatcatccagcacactaacttctcaaatccttgagtcctctcctttgatgctcttattcttttctccacctaggaaatttactggttttgtcattacaaacaactgcaaaatttttgtaatytcagtttcattcatcccattttctgaccactacttaactaggatttgaaggctctaacagttcttctaccccaaaggggcttcaagtcttactacattttcactgcctgtagctcatttgatgttctctttttctgaaccagcttaaataccatgatcaatgaa

SEQ ID NO: 301800 - DNA, 441 bp, Homo sapiens
tttctccacctaggaaatttactggttttgtcattacaaacaactgcaaaatttttgtaatttcagtttcattcatcccattttctgaccactacttaactaggatttgaaggctctaacagttcttctaccccaaaggggcttcaagtcttactacattttcactgcctgtagctcatttgatgttctctttttctgaaccagcttaaataccatgatcaatgaaaataattctcttttatacaattccttgactcctctgtatttttctcactgtttaaactcacatggcaaaaacatcatttttggttaaatccaacttcctacctctgtttctgcagccaygcatcagattgacctcacttaatgatacaaaagaagagtgacctagtgggctgtctgacaatcacacttccctacatcattaatctctcactctcc

SEQ ID NO: 301801 - DNA, 415 bp, Homo sapiens
taatcccagctactcaggaggctgaggcaggagaatcacttaaacctgggaggtggaggttgcagtgatccgagattacaccactgcactccagcctgagcgacagagcgaaactaagtctcaattaaaaaaaaaaaaaaactgaaaacaattccaatgcccttcattcatctgtggactgtataaacaaactgtggaataattatgcactrgacaagtccttggcaatgaagaacaaactaaagacacatacaataatatgaattattgcaatgcatcacaaatgcatcatgctaaatgaaagccagactcaaagactacatatcatataatttcattcatataatattttggaaaaggaaaaacaatagaaacaaaaattatatcagttgttatcaggggctggttgtaggga

SEQ ID NO: 301802 - DNA, 597 bp, Homo sapiens
taaacacagtactactgcagatactacactcaaaattttagggaaatacttttacagaatgcactggaaattttgtagcttagattctcataaaaatatttttattaaacatttcctttggttcttgcatcatctctttattaagttgtttaacgtttggaacacattaggaaaatattttccagatatgaaagaaagatgaccttccttgccmtaattccctggtgggattttctcgtgcactggagaatgatgatgtggttgcttgaaacggtatttcagctgtgctcaggaggcaggaaaatatcagtctggacacatgtagcaagtagtgtgcatgtagagcatcgcagaaattggatgtgtcctggagaagtctatgaatgatcagtggttcagggatgtgattattgttggctttgctaggacaattctgaattaaaataggatttttttctatttccattggagtgaaattcatctgggtagaccatatactctaacaattggttataaaaaagaaaaatatatatttcttgtatacaagaggctcaagaacattattccttaggtagtaacatcatgcccgaattgcaa

SEQ ID NO: 301803 - DNA, 503 bp, Homo sapiens
atacttctaaaatatatagagatatatatttcagtcagttttgaacattgttttgaacattgtgataaagaagggagagcaaatttcaagactaaatattacaagaagatataatttaatgtttaaatttgaaggaaaaaactacattttattggataactcctcactgcttggttgatgatctcatttaaaatatgtgtattgtgactaaaatataaagcagacaaaatctaccactgggactactttaagagtatgtgagtagacatacttcattaatgaatgctaytacacttagtaattaaaaaatgaaaacaaaaaagatgtaatattttgatgtgattctctttaaatattttcatgtatgctattatgcttagtaaatcaaaatgaaaatgaaaagaaaaaatgtaatattttgatgtgattctttttaaattggttgttttagctttcatttaaatgaaatgttttcgatactgaaaaacaaagattttctctaa

SEQ ID NO: 301804 - DNA, 503 bp, Homo sapiens
atacttctaaaatatatagagatatatatttcagtcagttttgaacattgttttgaacattgtgataaagaagggagagcaaatttcaagactaaatattacaagaagatataatttaatgtttaaatttgaaggaaaaaactacattttattggataactcctcactgcttggttgatgatctcatttaaaatatgtgtattgtgactaaaatataaagcagacaaaatctaccactgggactactttaagagtatgtgagtagacatacttcattaatgaatgctactacacttagtaattaaaaaatgaaaacaaaaaagatgtaatattttgatgtgattctctttaaatattttcatgtatgctawtatgcttagtaaatcaaaatgaaaatgaaaagaaaaaatgtaatattttgatgtgattctttttaaattggttgttttagctttcatttaaatgaaatgttttcgatactgaaaaacaaagattttctctaa

SEQ ID NO: 301805 - DNA, 503 bp, Homo sapiens
atacttctaaaatatatagagatatatatttcagtcagttttgaacattgttttgaacattgtgataaagaagggagagcaaatttcaagactaaatattacaagaagatataatttaatgtttaaatttgaaggaaaaaactacattttattggataactcctcactgcttggttgatgatctcatttaaaatatgtgtattgtgactaaaatataaagcagacaaaatctaccactgggactactttaagagtatgtgagtagacatacttcattaatgaatgctactacacttagtaattaaaaaatgaaaacaaaaaagatgtaatattttgatgtgattctctttaaatattttcatgtatgctattatrcttagtaaatcaaaatgaaaatgaaaagaaaaaatgtaatattttgatgtgattctttttaaattggttgttttagctttcatttaaatgaaatgttttcgatactgaaaaacaaagattttctctaa

SEQ ID NO: 301806 - DNA, 503 bp, Homo sapiens
atacttctaaaatatatagagatatatatttcagtcagttttgaacattgttttgaacattgtgataaagaagggagagcaaatttcaagactaaatattacaagaagatataatttaatgtttaaatttgaaggaaaaaactacattttattggataactcctcactgcttggttgatgatctcatttaaaatatgtgtattgtgactaaaatataaagcagacaaaatctaccactgggactactttaagagtatgtgagtagacatacttcattaatgaatgctactacacttagtaattaaaaaatgaaaacaaaaaagatgtaatattttgatgtgattctctttaaatattttcatgtatgctattatgcttagtaaatcaaaatgaaaatgaaaagaaaaaatgtaatattttgatgtgattctttttaaattggttgttttagctttcatttaaatgaaatgttttcgataytgaaaaacaaagattttctctaa

SEQ ID NO: 301807 - DNA, 370 bp, Homo sapiens
gggaggaaggacaataattgtttttttagtactacaataccaaagattggggaagaagtcaaagaaattatatcttttttatttttgaatattaagataaaaatcatacagccgaattcactctttgttttttgtttgtttgtttgttttagacgaagtttcactcttcttgcccaggatggagtgcagtggcaggatctcggctcaatgtgacctctgcctcctagattcaagcaattccctgmctcagcctcccaagtagctgggattacaggcatccgccatcatgcccagctaatttttcatatttttagtagataggatttcatcatgttggccaggctggtctcgaactcctgacctcaggtga

SEQ ID NO: 301808 - DNA, 592 bp, Homo sapiens
aaggaactttcaagtacaaacagctgagggtttgtcacagctgtagaacaacaactctggtggatactaaaccacgctccaaccacagattttcatttaaatatagctgcaaaaattgacatctgacgatatggacaaaagatttcaaataatctatattaaaccctattgaaatccatctgttaccaggtgttataatgaaaatatttctgtaaaatttcttagataatatgataatataatactttttgaaaaatacttcttttctataaacatgttgatgtcaaataaaatawtctgaagttttgctcttcagaagaactcttgtccatgctaaaacaagctgataaaatatcagcacaaattatatttctgtgaggcagtataagcaattgaagggaatcaggtattgactggctgcagaaagcacagacacaattatcttagggaaaccgtacattgatacagagtcccgaaaagaatgcaggcatggaatggagtgagggggataaaaatataatagttccttttcagtggctttgggtaaaagttacatagcattgttgaagaaacccttggcttttctacattc

SEQ ID NO: 301809 - DNA, 592 bp, Homo sapiens
aaggaactttcaagtacaaacagctgagggtttgtcacagctgtagaacaacaactctggtggatactaaaccacgctccaaccacagattttcatttaaatatagctgcaaaaattgacatctgacgatatggacaaaagatttcaaataatctatattaaaccctattgaaatccatctgttaccaggtgttataatgaaaatatttctgtaaaatttcttagataatatgataatataatactttttgaaaaatacttcttttctataaacatgttgatgtcaaataaaatattctgaagttttgctcttcagaagaactcttgtccatgctaaaacaagctgataaaatatcagcacaaattatatttctgtgaggcagtataagcaattgaagggaatcaggtattgactggctgcagaaagcacagacacaattatcttagggaaaccgtacattgatacagagtcccgaaaagaatgcaggcatggaatggagtgagggggataaaaatataatagytccttttcagtggctttgggtaaaagttacatagcattgttgaagaaacccttggcttttctacattc

SEQ ID NO: 301810 - DNA, 560 bp, Homo sapiens
ggataattttagtctcaactttgaaaagcattgaaaatgagatttattgaccatactttatgttatgtctacattcacaaaaggtgaaaattacttcataaaatctaatctctacttattctctcttgatccctatttatctctgttatggtaggatgctttcacattggatgattataaatacttaatagcagcttttaggcaagttattttgaatttgtagcatacattttgtaaaatacctgagcattaagccaataaagcatgcttcacttctaataaataattaaccgatgttataggtaaacttagtaatcaactatttaaattattaataaatagtagattaatggatttacacattaatacagtcatcccactctaytacttactccttccaatgttatatgtatttgtctcagcccattaaatgcttgtaaatgaagaatacatatatatataattccatgttttgtacatcaaattacttattaaatatatgtgtaatatatttaaattattgtttaagaaactttcaacctatattttataaatgtttt

SEQ ID NO: 301811 - DNA, 637 bp, Homo sapiens
atttatcccccatggaacatttacctctactcatatccaggtttttgtatctatttatctctctcctgactttattagtaattatttccaataattgaaattatttattatgtactttggataaataaatgtgtcctgaactcgtaaattctttgaggagataaattctcttcaaaaatgtttaattcttattcttgcaaatattctcaatatacaaggtttttgttttgttttattttgttttgtttttgaaaaagtttctcgctgtcggccaggctggagtgcaatggcaccatctcggctcactgcaacctccacctcccaggttcaagcgattctccggcctcagccttctgagtaggtgggattacagccactcaccactacacccagctaattttttgtatttttagtaggggtttcaccatgttgacctagaccagtcttgaactcctgacctcaagtgatccacccgctttggcctcccaaagtgctgggattacaggtgtgagccacctcgcccagcttcaatatacagtttttgatataagactcagtgtgcccattttaagctgccrgagtttcactgagggtgttctgacttaaagcattttgccaacagttttattcttgttat

SEQ ID NO: 301812 - DNA, 561 bp, Homo sapiens
gaaaggaaaggaaaggaagaaaaagaaagaagaggaagaagggaacgaaggagggaaggaaggaaggaagcgagggaggaaggaagsgagggaggatggaaggaacataaaccaagaactctatgccacagggaaataattttcaaaaatgaaaaagaatcaaagattgtccagacaaaatggcataactgtcatcagacatgatacttcaagaaatgttaaaacttctctggccaaggaaatataatccaaacagacacataaacatacacaaataaataaagagacccagaagtaaataaatgaagatagagtaaacttactcttttgtcgttgttgcagtaaagtgtaattgtctataaaaaatacttgtaataccttgtatcgtgtttcaatagcacatgtaaagtaaaatgtgtgacaagaatagcctaagaataggagagagaatctgggactctcttattataaagtctttacatgtgaaacagtataatgttccttaaaagtagtcactaattaatagtaaatgatgtaaaatctagggtaactatagtaaaa

SEQ ID NO: 301813 - DNA, 499 bp, Homo sapiens
ggaagcgagggaggaaggaagggagggaggatggaaggaacataaaccaagaactctatgccacagggaaataattttcaaaaatgaaaaagaatcaaagattgtccagacaaaatggcataactgtcatcagacatgatacttcaagaaatgttaaaacttctctggccaaggaaatataatccaaacagacacataaacatacacaaataaataaagagacccagaagtaaataaatgaagatagagtaaacttactcttttgtcgttgttgcagtaaagtgtaattgtctataaaaaatacttgtaatacmttgtatcgtgtttcaatagcacatgtaaagtaaaatgtgtgacaagaatagcctaagaataggagagagaatctgggactctcttattataaagtctttacatgtgaaacagtataatgttccttaaaagtagtcactaattaatagtaaatgatgtaaaatctagggtaactatagtaaaaatt

SEQ ID NO: 301814 - DNA, 569 bp, Homo sapiens
tcctgtacccataaaaacccgaggctccactggcagaagagaggcagagaaggagaaaagagaagcagcagccagacgttggtgagaagcagcttgacttcagagggatggcttgactatgggacctcagattagagttcagccgggcrtggctgaattccaggagaaaactaccctcccactccaccccttttccagctcccatcccgctgaaagacactttcattggcaataaaatcccccgtggtgttcactgtcttgaattcattcgcgtgacctgattcttcctggactctgaacaagagctcaggatgcagagggctgtcacattgagctgttaaacgcttaagctgtctgtggacagcaaagctaaaagagcacactgtaacacatgccctctggggctccaggggtcccgggtacccctcagaccttgcggcagggctgcacagagctctactccacctggagctcagaagcactcatcctggcccctgcatccgctcacttgagtgctccccttcccgcaagcggttgagagctgcaggctgagtaaatgaaccaccgcc

SEQ ID NO: 301815 - DNA, 592 bp, Homo sapiens
gccagcctggcctgccccacccaccatcctgtacccataaaaacccgaggctccactggcagaagagaggcagagaaggagaaaagagaagcagcagccagacgttggtgagaagcagcttgacttcagagggatggcttgactatgggacctcagattagagttcagccgggcatggctgaattccaggagaaaactaccctcccactccaccccttttccagctcccatcccgctgaaagacactttcattggcaataaaatcccccgtggtgttcactgtcttgaattcattcgcgtgacctgattcttcctggactctgaacaagagctcaggatgcagagggctgtcacattgagctgttaaacgcttaagctgtctgtggacagcaaagctaaaagagcmcactgtaacacatgccctctggggctccaggggtcccgggtacccctcagaccttgcggcagggctgcacagagctctactccacctggagctcagaagcactcatcctggcccctgcatccgctcacttgagtgctccccttcccgcaagcggttgagagctgcaggctgagtaaatgaaccacc

SEQ ID NO: 301816 - DNA, 584 bp, Homo sapiens
gactcattaacactattgatttccttctactagccacaccctaattaatttctccacacagtttcagcacttattctcatggttgaattgtcttatccataacagaggacacaatttgrccattttaaaattaaaattgtataataaaatccctaatgcactacttcaccaatgtcattcctaataacttttgtattccattcactgggctatttgggagagtaatccatcttcttataatggtttccattctgcatttttaactgttatacgcatgacaagctctttagtaaaatgcaccattgtccttcatatttaaagattttatttcaaaagctaatattatatttgtatgtaagactgataaaactaacagctttatgttttgagaaatattttaaggaaagtttaaaattataataatatctatctattatttttcattctttgtgtgatataagcagacttaattttaatgtggctaagatggcaacaacatttgcctttaataattattttgtgttatcaatagctttcttatatacattcttaaattctatgaaaattgtttcgattatggacat

SEQ ID NO: 301817 - DNA, 428 bp, Homo sapiens
gctccagcttaaaaaaaaatagattatctccagaacwtcacctgaaacatcctgtactgtgactctgcccatggtattgttactaggtatcattttcattaatgtctgcttaaccctgttctggccattactaaatgagtacttcctttcagaaaaatttctcaatttcttggatcagaaataatctctatcccctatgttctcatttataatgacagtcattcatttgctttgttttgaagttattatgtgtttgtttctctgagtagcatttaaattatttctttggaaaatatgtcagattgatctttttagttcccagtctttagtaaagtgctttgagggaagtaggtgctccaaaaatgcttgccaatttaaatttaaaaatataaataggatataacaattataatcttcaaacaaggttc

SEQ ID NO: 301818 - DNA, 609 bp, Homo sapiens
tctgtaccaaatactcaacaaattgcttctcttcctaaatagctgtggtttcttctctcaggaatgttgctgaacaggaggttcacagtctcctttcacttagatggcctgaacttagactagtttatcgtaccctttcatgtccctaaaatgtcagtgtaactgttgcctcctcttttgagatttctttgaacccttatatcgtcctcagtcatattaagtttcagtgtgcatcccgctaggtagtacttatcccacagagtagcaaaaattattccactccattggaaactgtaggacactgagtcatgtcamggagtttttcatcctaccagatcatagaaaatgaaagacagaaaaacaaaaacctaaaaagcagctatagtcaaataagatgaaaatcaagcattgagtattgaatttagcaacatggaaggcattcgtgatctgaaaatcagtagtttgggtggtgatgcgggggtaaaattctcaatgaatttgattttataaagaatgagagacgagaagagaaatgtctatcatcattaaaaccttttaggagtttccttgcaaattgaaattaaaaatgagtcatttcatgacaggaat

SEQ ID NO: 301819 - DNA, 609 bp, Homo sapiens
tctgtaccaaatactcaacaaattgcttctcttcctaaatagctgtggtttcttctctcaggaatgttgctgaacaggaggttcacagtctcctttcacttagatggcctgaacttagactagtttatcgtaccctttcatgtccctaaaatgtcagtgtaactgttgcctcctcttttgagatttctttgaacccttatatcgtcctcagtcatattaagtttcagtgtgcatcccgctaggtagtacttatcccacagagtagcaaaaattattccactccattggaaactgtaggacactgagtcatgtcaaggagtttttcatcctaccagatcatagaaaatgaaagacagaaaaacaaaaacytaaaaagcagctatagtcaaataagatgaaaatcaagcattgagtattgaatttagcaacatggaaggcattcgtgatctgaaaatcagtagtttgggtggtgatgcgggggtaaaattctcaatgaatttgattttataaagaatgagagacgagaagagaaatgtctatcatcattaaaaccttttaggagtttccttgcaaattgaaattaaaaatgagtcatttcatgacaggaat

SEQ ID NO: 301820 - DNA, 531 bp, Homo sapiens
cgttgagagggcttaagcacttttgaaagaggagaggaaggggacagacaggaatgtgcagagctgataaggattagaatctgggaggtatggctgacttgattctagaaatgtgtattgtaactgacatgaacaggaattaatgttcttggtagattcaaggcagacagttattgtacagctgtaggtgaaaggagagatagaagggtgagtatctgtgtctctcttgactctcgtgtataaaaacaagtaggttcttatttcagttatactgattgccctgatgatgarggtaaatggctcagtggagacaaacatttacaaccagaatgagagttgattcatcttctctgttgaaagacaggttagcttccactgagttcatgggcttccttcttgatgactgttgataggattgagcacatctgggaaatcagtatgttattctaatattgatatctcttttttttttacccttaataaagacaaagcaaagattaagtgaaatgtggtcttattcacctgcctaga

SEQ ID NO: 301821 - DNA, 558 bp, Homo sapiens
tttggaagactttgcattctaagagaacgttgagagggcttaagcacttttgaaagaggagaggaaggggacagacaggaatgtgcagagctgataaggattagaatctgggaggtatggctgacttgattctagaaatgtgtattgtaactgacatgaacaggaattaatgttcttggtagattcaaggcagacagttattgtacagctgtaggtgaaaggagagatagaagggtgagtatctgtgtctctcttgactctcgtgtataaaaacaagtaggttcttatttcagttatactgattgccctgatgatgagggtaaatggctcagtggagacaaacatttacaaccagaatgagagttgattcatcttctctgttgaaagacaggttagcttccactgagttcatgggcttccttcttgatgactgttgataggattgagcacatctgggaaatcagtatgttattctaatattgatatmtcttttttttttacccttaataaagacaaagcaaagattaagtgaaatgtggtcttattcacctgcctaga

SEQ ID NO: 301822 - DNA, 577 bp, Homo sapiens
cacacactggggcctgttttggggtggggggaggtgggagggacgcattaggagatatacctaatgctaaatgacgagttaattggtgcagcacaccaacatggcacatgtatacatatgtaactaacctgcacgttgtgtacatgtaccctagaacttaaagtataacaaaaaatatatatatattataaaatctattcatttttctgtttttctggtcgacagagcaaatacaatcttttttcaaaaaaagtcttgaaattcatactcaggataagaaaaaattatattctctgcacatttttcaaaaactgmcactaaaagaaattttatacctattgtttttattccaaaatgtgtactgcagaaatgaaatatgtcaggagtattactgttaatgctgggcaaataaaataagagtggcagtgatattcataacagacatatagaagtgttgtgaaaaattttactgccagctgagatgagcaaaatataagcataaggtgtaactcactattccttattgagaagatgagagatatgggtttaagggattccagctcagtttaattcaaaa

SEQ ID NO: 301823 - DNA, 646 bp, Homo sapiens
ctagaatataataaacagaaacctaagaaagttaaattttaagtaaactttcattctaagtttaatatatttagtaaccataaaaagcaagtaacagcaaatrtaataatatatattgtttgcacatctatgtgtatatacatatacacatataatacactagatataatggcaatgtaaataccttcaaaaaatatcatcttgtctagtcaaataatttcagaattatttatgaagccattaatcacaacaatttgtatgaagccattaaacacaacaattatctaaaatacttatattttagttggttctaatattgataaagttttaacagctttaaatggaagctttgtcaaaatgaaaaataatattttagtgttccaaaattaagcacttacaaatagactcagacaggatactggacatccattgataaaataagatgtacgtgttatacactatcatataataaactagagttgtactctacactgctttcatgtggaatccctgggtttataattccatatctgtatatttgttcagaattgtaatgtttactatatacattatgtgccctcgacaatgtcttcgaaaaatgaataaagaaggaaagattaacagtaacacagaatgaaaccaatcc

SEQ ID NO: 301824 - DNA, 646 bp, Homo sapiens
ctagaatataataaacagaaacctaagaaagttaaattttaagtaaactttcattctaagtttaatatatttagtaaccataaaaagcaagtaacagcaaatgtaataatatatattgtttgcacatctatstgtatatacatatacacatataatacactagatataatggcaatgtaaataccttcaaaaaatatcatcttgtctagtcaaataatttcagaattatttatgaagccattaatcacaacaatttgtatgaagccattaaacacaacaattatctaaaatacttatattttagttggttctaatattgataaagttttaacagctttaaatggaagctttgtcaaaatgaaaaataatattttagtgttccaaaattaagcacttacaaatagactcagacaggatactggacatccattgataaaataagatgtacgtgttatacactatcatataataaactagagttgtactctacactgctttcatgtggaatccctgggtttataattccatatctgtatatttgttcagaattgtaatgtttactatatacattatgtgccctcgacaatgtcttcgaaaaatgaataaagaaggaaagattaacagtaacacagaatgaaaccaatcc

SEQ ID NO: 301825 - DNA, 646 bp, Homo sapiens
ctagaatataataaacagaaacctaagaaagttaaattttaagtaaactttcattctaagtttaatatatttagtaaccataaaaagcaagtaacagcaaatgtaataatatatattgtttgcacatctatgtgtatatacatatacacatataatacactagatataatggcaatgtaaataccttcaaaaaatatcatctygtctagtcaaataatttcagaattatttatgaagccattaatcacaacaatttgtatgaagccattaaacacaacaattatctaaaatacttatattttagttggttctaatattgataaagttttaacagctttaaatggaagctttgtcaaaatgaaaaataatattttagtgttccaaaattaagcacttacaaatagactcagacaggatactggacatccattgataaaataagatgtacgtgttatacactatcatataataaactagagttgtactctacactgctttcatgtggaatccctgggtttataattccatatctgtatatttgttcagaattgtaatgtttactatatacattatgtgccctcgacaatgtcttcgaaaaatgaataaagaaggaaagattaacagtaacacagaatgaaaccaatcc

SEQ ID NO: 301826 - DNA, 646 bp, Homo sapiens
ctagaatataataaacagaaacctaagaaagttaaattttaagtaaactttcattctaagtttaatatatttagtaaccataaaaagcaagtaacagcaaatgtaataatatatattgtttgcacatctatgtgtatatacatatacacatataatacactagatataatggcaatgtaaataccttcaaaaaatatcatcttgtctagtcaaataatttcagaattatttatgaagccattaatcacaacaatttgtatgaagccattaaacacaacaattatctaaaatacttatattttagttggttctaatattgataaagttttaacagctttaaatggaagctttgtcaaaatgaaaaataatattttagtgttccaaaattaagcacttacaaatagactcagacaggatactggacatccattkataaaataagatgtacgtgttatacactatcatataataaactagagttgtactctacactgctttcatgtggaatccctgggtttataattccatatctgtatatttgttcagaattgtaatgtttactatatacattatgtgccctcgacaatgtcttcgaaaaatgaataaagaaggaaagattaacagtaacacagaatgaaaccaatcc

SEQ ID NO: 301827 - DNA, 548 bp, Homo sapiens
cgacaatgtcttcgaaaaatgaataaagaaggaaagattaacagtaacacagaatgaaaccaatccaagcagcgactactgttactgcagtaacagaaacaggttctgtgttgcttagcaytgtgtcagttttgtaatccattgggatgtgatttatgaaagagtctcacagatgaggcaaatatacagattatattgcagtatcataattaagcagtttttcaaagagcaaacacttcatatgcataacaatcttaccttatctgctcttgcaggtttgtcgttttttgtatttatgattatgctttcaaaaatacatgcaaatttattgttgaaattacagtatttggctattctttctaatacctatcacagcaattattgtatgtgacacctggaagcaaaatgtcattcacactattctatctaattggaatatcatccattattgattttgtattccatttagatgtagctatagttgacttgaaatctaggagatataatggaatttattactatcaaaagagtacaacaacttagaaaaa

SEQ ID NO: 301828 - DNA, 548 bp, Homo sapiens
cgacaatgtcttcgaaaaatgaataaagaaggaaagattaacagtaacacagaatgaaaccaatccaagcagcgactactgttactgcagtaacagaaacaggttctgtgttgcttagcactgtgtcagttttgtaatccattgggatgtgatttatgaaagagtctcacagatgaggcaaatatacagattatattgcagtatcataattaagcagtttttcaaagagcaaacacttcatatgcataacaatcttaccttatctgctcttgcagrtttgtcgttttttgtatttatgattatgctttcaaaaatacatgcaaatttattgttgaaattacagtatttggctattctttctaatacctatcacagcaattattgtatgtgacacctggaagcaaaatgtcattcacactattctatctaattggaatatcatccattattgattttgtattccatttagatgtagctatagttgacttgaaatctaggagatataatggaatttattactatcaaaagagtacaacaacttagaaaaa

SEQ ID NO: 301829 - DNA, 524 bp, Homo sapiens
aacttccacgatgaaataaaaattttcaatggtgttcatattgagaaatactgccacactaatgtcaaatacgttaatgttttcaagtagtcacaatgcagttataattagcaagaatgaatacattcagctctggagtcgggcaaacccagaatggcattcaacctctgccacaaccctactgtcattttgagcaaataatttaactctgagctcagcttcatttcatgtaaaatagacacagaatggctttcagtcacaataactgtttggaaagataaaagcaataatacctatgaagtacttagaataatgtctgatataaagtaagwggtcaatatctttatgtgtattgcagttgtcataatcatcttaattgtagtcatcatcatctccattctcatcatcacactgctgggtaagtctccagccgttggctcacaacttgcactaatgcaatgagatattgctaaaactgtataatgacatactgaaaaactctaccaatactctctaatttacag

SEQ ID NO: 301830 - DNA, 524 bp, Homo sapiens
aacttccacgatgaaataaaaattttcaatggtgttcatattgagaaatactgccacactaatgtcaaatacgttaatgttttcaagtagtcacaatgcagttataattagcaagaatgaatacattcagctctggagtcgggcaaacccagaatggcattcaacctctgccacaaccctactgtcattttgagcaaataatttaactctgagctcagcttcatttcatgtaaaatagacacagaatggctttcagtcacaataactgtttggaaagataaaagcaataatacctatgaagtacttagaataatgtctgatataaagtaagaggtcaatakctttatgtgtattgcagttgtcataatcatcttaattgtagtcatcatcatctccattctcatcatcacactgctgggtaagtctccagccgttggctcacaacttgcactaatgcaatgagatattgctaaaactgtataatgacatactgaaaaactctaccaatactctctaatttacag

SEQ ID NO: 301831 - DNA, 557 bp, Homo sapiens
acccatgtgaccaaagagctctgctaacccccagggaaatgcgagaggaaggataatattcttcagcgtgaacagcagcaacccaggtgggcatgcttcctargaatacgtggaggaataggcacagctgtgtgagctgggaaagcagacagatcaggccagagtggaggaagctgcagggcagcacccacatgcacacaccagggcacctttcagctgcttccagggagggagtatgccatctctcctgctggtcctctgcccatctaatgccacagacactcctgtttaggtagtccttcttgggcacagacatgagcccagatgttgggcagtgaacagaaccacttacataggtcacttttaggcaaatcaaaatctgtaccaggcaggtaggaaagacggatgatttcatgcctttatagtcactctccctggaggaggttttactgggaacaggcccaagagaaagtgacccggagaggaagccacatctcctttttgggcaacttttaggaagcagagcaccctctaccccaccctatttgccaggaata

SEQ ID NO: 301832 - DNA, 530 bp, Homo sapiens
aaaaatagatgctagtaaccgccagggatcttgcagagagcatgtggggctgtgtttactagggagagaagaatacctcctattcatgcccagagatcagggcagaaccactactgcttctcacaccagyccagggcctctgggtctgggggagtcagctgacagagcagggtttaccgatggctggaagacctttttcctctgtgacagggaagcaacctttctctcctcaggacccccagggccacgcccattcctggaaggacagctccaggtcaggaaatctatgcaactgaaggggaaatggcaaccaagagataaaatcatcccactcgggctgaggcaaacctgctctccatagactttgcataaaatggtccccagccgggttcagtgacgtcacctctcagatgagtcttgggtacagactaggatcccttgtctccctgccaagacctagctgggtgccataggcaagcagtctcttttcctctaggccttagtctactcatctgtaaaatggagataac

SEQ ID NO: 301833 - DNA, 508 bp, Homo sapiens
aggcactctccttaaatctcacccccctttgcatctctggcatcagcttctcttactgtaatggttctcatcctagcagcacataaaaatcacctgaggagcttctaagaaacaaaaaacaccagtacctgagactctcctgcaagagattctcatttacttggtcttgggaggccctgggcatgcgtgttgtttaatacctcctcacgtggttctaatgtgtagtcaaggttgaggaccattgcctaaaacagtagttctcagtgtggttcctagaccagcttcagcgtcacctgggaatttgttacccatgtgaatgctgaggcttcccacagccctccagaatcagaagttctgggggtggagcccagtcacctctgttttaacaagcccttcagatagctgtggtgcacactcaagttccaaccattaggcttaraagaatataacaggaattttcaagagaatgcagttaacacatgacagggaatataggtaggtggacttt

SEQ ID NO: 301834 - DNA, 556 bp, Homo sapiens
tatggcatccatgggttcttagaaactgtgactttaagcaaaataacatatmataaaaccaatttcatcataggctagttgatataaacaagagttaagttcctatggcatatttctggtcaaaaaaacatcgctaaactttttttgttttgttttttgagacagggtctcactctgtcacccagactggagtgcagtggcgtcatataggctcactgcagcctctgactcctgggttcaagtgattctcccacctcagcctcccaagtagctgggactacagatgcacaccacaatgcccggctaatttttatattttttagtagggatggggtttcaccatgttggccaggctggtcttgaactcctgacctcaagtgatccacccgccttggtctaccaaagtgctgggattacaggtctgagccaccatgcccggcctaccaaacttctacataaagactaaaacacttctaatattaaacactgaaacaaatgagagctatgtatacatttaagaaagattaataaaaacaagtaagataattatttaccc

SEQ ID NO: 301835 - DNA, 556 bp, Homo sapiens
tatggcatccatgggttcttagaaactgtgactttaagcaaaataacatataataaaaccaatttcatcataggctagttgatataaacaagagttaagttcctatggcatatttctggtcamaaaaacatcgctaaactttttttgttttgttttttgagacagggtctcactctgtcacccagactggagtgcagtggcgtcatataggctcactgcagcctctgactcctgggttcaagtgattctcccacctcagcctcccaagtagctgggactacagatgcacaccacaatgcccggctaatttttatattttttagtagggatggggtttcaccatgttggccaggctggtcttgaactcctgacctcaagtgatccacccgccttggtctaccaaagtgctgggattacaggtctgagccaccatgcccggcctaccaaacttctacataaagactaaaacacttctaatattaaacactgaaacaaatgagagctatgtatacatttaagaaagattaataaaaacaagtaagataattatttaccc

SEQ ID NO: 301836 - DNA, 556 bp, Homo sapiens
tatggcatccatgggttcttagaaactgtgactttaagcaaaataacatataataaaaccaatttcatcataggctagttgatataaacaagagttaagttcctatggcatatttctggtcaaaaaaacatcgctaaactttttttgttttgttttttgagacagggtctcactctgtcacccagactggagtgcagtggcgtcatataggctcactgcagcctctgactcctgggttcaagtgattctcccacctcagcctcccaagtagctgggactacagrtgcacaccacaatgcccggctaatttttatattttttagtagggatggggtttcaccatgttggccaggctggtcttgaactcctgacctcaagtgatccacccgccttggtctaccaaagtgctgggattacaggtctgagccaccatgcccggcctaccaaacttctacataaagactaaaacacttctaatattaaacactgaaacaaatgagagctatgtatacatttaagaaagattaataaaaacaagtaagataattatttaccc

SEQ ID NO: 301837 - DNA, 485 bp, Homo sapiens
cttactaacctcattcctacgagagggtaaaaaaaaaaaaaagcgcacatatgstggcataaccctgtgtgtggtcccagctatttaggaggctgaagttggaatgttgcagaacttttccttagttcagctaaagatggggtccttgtctatcctatggccacgaagatttaggttcacagacagtttgaagggtgagtaagacagggttttattgggttaaaaggaagaaaagggggaaacagggactctcactaggccagagtcccagctagagtgcttcctgcccagcatttgaatcccagattccacccaagaagcggaggggccaggctcctccctgctgcaaatgcagtgaacttccaaggctccacctcagtgggcaggctggttggagtttctccaggaccccctcccacctggctgtcacaggaggatcgcttgagcctgggaggtggaggctgcagtgagctgtgatttgacac

SEQ ID NO: 301838 - DNA, 485 bp, Homo sapiens
cttactaacctcattcctacgagagggtaaaaaaaaaaaaaagcgcacatatggtggcataaccctgtgtgtggtcccagctatttaggaggctgaagttggaatgttgcagaacttttccttagttcagctaaagatggggtccttgtctatcctatggccacgaagatttaggttcacagacagtttgaarggtgagtaagacagggttttattgggttaaaaggaagaaaagggggaaacagggactctcactaggccagagtcccagctagagtgcttcctgcccagcatttgaatcccagattccacccaagaagcggaggggccaggctcctccctgctgcaaatgcagtgaacttccaaggctccacctcagtgggcaggctggttggagtttctccaggaccccctcccacctggctgtcacaggaggatcgcttgagcctgggaggtggaggctgcagtgagctgtgatttgacac

SEQ ID NO: 301839 - DNA, 507 bp, Homo sapiens
tatcagttctctaggtgtagctttctttttcctgaaaattattatcagaaaaaactaaagtgaaacatatttttcacatctttaagtcataataacatttaaaggataaaccaaaattccaaaaggacttcatctatccctttcattgttttgtgaagctacttgtctattacatcaacaaaagcagttagtagtctatgggtactttcccaaaaaaaggccttgttaccaaacaaaagggcagtgcygcattgattcagcctgtgtttgcaccacaggcactaaccagcccgacctctgttctgtaaaatacctcatccacctatttagtaaagtctggattacactgatctaaattcaaactaggtgacctctcagttcattcaaggtctttggtcaaatatcacttctacagaaagacctctctgaccaccctctctaaaataacactacccctcagtctcttccccttttctctccttgattttccttcactgctcttatcac

SEQ ID NO: 301840 - DNA, 395 bp, Homo sapiens
aataaagcaacagttttaggccaggcacagtggcttacacctgtaatcccagcattttaggaggccaaggcaggtggatcacttgaggtcaggagttcaagaccagcctggccaaaatggtgaaaccctgtctctactaaaaatacagaaattagccgggcgtgktggcaagcgcctgtagttccaacagctccaggagaaccgcttgaacccgggaggcagaggttgcagtgagccgagatcgtgccactgcactccagcctgggccacagaatgagactctatctcaaaaaaaaaaaaaaaaaaaaaaaaaaaagcctattttgtactgtgtacattgctaagccttttaaatgtttatccaatgtcatcagtgcagtgctggtaaatggatt

SEQ ID NO: 301841 - DNA, 557 bp, Homo sapiens
aattgtagctcccataattcccttgtgttgtgggaggggacccggtgggagataactgaatcatgggggcagcttccccaattctgttcttgtgrtagtggataagtctcatgagatctgatggtattataaagggaaaccccttttgcttggttctttctctcccttgcctgccactaatgtaagacatgcctttcaccttctgccatgattataaggcctccccagacacatggaactatgagtccattaaacctctttttcttcataaattaccccatctcaggtatgtctttctcagcagcatgaaaacagactaatacagaatgtaaattagtatgttattgaaaacttatggaggatcctcaaaattaagattagaactactttacgatgcagcaagcccatgtctgggtacatattcaaaggaaatgaaatgagtatcttgaagagatatctgcatttctctgtttattgcagcattattcacaataaccaagaaagaaaacaacctaaatgtctgttgacagattaatggaaaaagaaaatgtggtgta

SEQ ID NO: 301842 - DNA, 557 bp, Homo sapiens
aattgtagctcccataattcccttgtgttgtgggaggggacccggtgggagataactgaatcatgggggcagcttccccaattctgttcttgtggtagtggataagtctcatgagatctgatggtattataaagggaaaccccttttgcttggttctttctctcccttgcctgccactaatgtaagacatgcctttcaccttctgccatgattataaggcctccccagacacatggaactatgagtccattaaacctctttttcttcataaattaccccatctcaggtatgtctttctcagcagcatgaaaacagactaatacagaatgtaaattagtatgttattgaaaacttatggaggwtcctcaaaattaagattagaactactttacgatgcagcaagcccatgtctgggtacatattcaaaggaaatgaaatgagtatcttgaagagatatctgcatttctctgtttattgcagcattattcacaataaccaagaaagaaaacaacctaaatgtctgttgacagattaatggaaaaagaaaatgtggtgta

SEQ ID NO: 301843 - DNA, 553 bp, Homo sapiens
aatagtaaagcaagaaggagaaacaaatggggagcagggctaaaaaagatgaggtcaactttagacaagtatcaatctgttaggttagagatcattttgatggcaaatgatagaacaccaaacaaagaatgctttagagaaatagggcttttttcttcacaaaacaaaaatctgaaggtgggtaactactgatctgggttcagcaggtggacaaagtcagaactgggggctctgtgtttctctgggcacttgctcctgggattacaagatggctgccacaggcccgggcctcgggtagtaactccaggcagaaagaagagaggaaggggaaatcaaatacacgggtaaagcaagagcttccctggaagcctcctgtagacttctgctatgtctcattggccagacagtgccacatggacacctcacctgaaggaagattgggaaaataastatgttgtttttctagcctctatagcagaggtaggtgaaggaaaacaatgtctgccccacaaaatattaatgggatattcatgtgggaatatccaacagacaa

SEQ ID NO: 301844 - DNA, 497 bp, Homo sapiens
cgccaagaaagagctggcatggagagaaaagagagtagtggcagcactttgtgtttcttctggggcaggggaarcaagagggtgcacacggatgcagctgagtcaacacaccaggattgtccgcctccgctcgtcagccagattgttttctgtcagatgttcagctggatctctcgctgtctccctccccacccagttctttccatcctctttctctttcctcagtctctcagtactcctagggcagtctctccctcatctgtgacgtgaaagtactggaggaaaaacccactctcattgaccactgttgaggatgcacaaacgtgattttattctgactgaagaaaaactagctgcatggggtgtgaggaggtggtgcaggacaataagcagctacgatgagagggccataaaatcttctaagctcatgggaaattccaacaaaaggtatctgccagtcccacctcacaggaggggccagaaatccatttgagaga

SEQ ID NO: 301845 - DNA, 541 bp, Homo sapiens
taatgtagtcttggatgtgagataccatcatttctgccatattccattggccaaccctggtacaatgtaggagggactccacaggctgtgaataacaggaagtgcagatcactgggtgccatcttggaggctgtttaccccaggtaggaatctctacatctctaaataaatacgagtactccaatccacactcaggttttaattttattggactgtaagggattacttcacagaactgagagaaacagaaaacattgatgaagttttgttccaatwaaatagaaactgtttcttagcaacatgaaaatatcattttagtgatctgaggctcagaatcacagtttttcaatgtctatttttacctctgtattttagatttattcaactgctgaatgtgaataaaattccatttagcaatatcacaggtagaagtaaatctgaaaaacagaatatttgaacaaatacatatatattaattttagcaataagaaaataaattatttattaagccagaaaattaggccaacttaggcctggcaca

SEQ ID NO: 301846 - DNA, 541 bp, Homo sapiens
taatgtagtcttggatgtgagataccatcatttctgccatattccattggccaaccctggtacaatgtaggagggactccacaggctgtgaataacaggaagtgcagatcactgggtgccatcttggaggctgtttaccccaggtaggaatctctacatctctaaataaatacgagtactccaatccacactcaggttttaattttattggactgtaagggattacttcacagaactgagagaaacagaaaacattgatgaagttttgttccaattaaatagaaactgtttcttagcaayatgaaaatatcattttagtgatctgaggctcagaatcacagtttttcaatgtctatttttacctctgtattttagatttattcaactgctgaatgtgaataaaattccatttagcaatatcacaggtagaagtaaatctgaaaaacagaatatttgaacaaatacatatatattaattttagcaataagaaaataaattatttattaagccagaaaattaggccaacttaggcctggcaca

SEQ ID NO: 301847 - DNA, 582 bp, Homo sapiens
aaaagtgaaattgttaggctgcctcattttctaattttggctagtctagtgggtatacactattacttaatgtggttttaattttcattttactaaatcttactttcttgatgaaaaatatggatgagtgccttcttatgtgtgagttggccatttgaatatgttcttttgtgcaatatttcttccagtctttacctgtttttttgctgggttatttgattttttattgttgagtttcagttctttttatagtctggatacaagagcttaygaaaaatatatgttttgcatatatatttttctagcatgtgtcttgccttttcaatttttaatgatatcctttgatggacatatgtttttaactttgatgaagtctaatttccaatttttcttctgtagttacttctgagtactgcttaaaaatctttgcctactcccaagtcatatataaataaatatatataaatatatatttatatatatatttatatatataaaaatatatatttgttgttgttgttgttcaatgacctttagagtttagcttttaagtttaggtctacgatacatatcaaatgaatt

SEQ ID NO: 301848 - DNA, 614 bp, Homo sapiens
ttgtagctgtgtggcattacttctgggctttctgttctgttccattggtctacgtttctgtttttgtgmcagtgccttgctgttttggtcactgtagacttgcagtatggaagtccaggaatgagatgctttcagttttggtctttttgcttaggattacctctgctattcaagctcttttgattccatatgaattttttttttttttacagtctcactgtcacccaggctggagtgcagtggcagaatctcagttcactgcaacctctgcctccctgttcaagtgattctcctgccttggcctcctgagtagctggaattagaggcatgtgccaccacacccagctaatttttgtatttttagtagagatatggtttcgccatgttggccaggatggtctcaaactcctgacctcaaatgatccgcttgcctcagccttccaaagtgcttggatcacaggcgtgacccactgtgctccacttccatacgaatttttaaatagtttcttctaattctgtgaaggatatcattggtagtttgataggtacagtagtgaatattaaattgctttgggcagtatggccattttaacaatattgatttttcctatcca

SEQ ID NO: 301849 - DNA, 614 bp, Homo sapiens
ttgtagctgtgtggcattacttctgggctttctgttctgttccattggtctacgtttctgtttttgtgccagtgccttgctgttttggtcactgtagacttgcagtatggaagtccaggaatgagatgctttcagttttggtctttttgcttaggattacctctgctattcaagctcttttgattccatatgaattttttttttttttacagtctcactgtcacccaggctggagtgcagtggcagaatctcagttcactgcaacctctgcctccctgttcaagtgattctcctgccttggcctcctgagtagctggaattagaggcatgtgccaccacacccagctaatttttgtatttttagtagagatatggtttcgccatgttggccaggatggtctcaaactcctgacctcaaatgatccgcttgcctcagccttccaaagtgcttggatcacaggcgtgacccactgtgctccacttccataygaatttttaaatagtttcttctaattctgtgaaggatatcattggtagtttgataggtacagtagtgaatattaaattgctttgggcagtatggccattttaacaatattgatttttcctatcca

SEQ ID NO: 301850 - DNA, 591 bp, Homo sapiens
catatatcttgtacatataatccaagtgtctgggacagtggcacgattagaggaaaatttagcaatatatgctcaataatgagatcttgtatgtgaggaggcctagaaaaaagcttgtcatacaatgaatcctcttgttattatttttctgctaaaaaggaagatgtaactgttaattttgattattagttttcataccacactataccacaatactggaaataaacattatcagttcaaagttagggtgttttattggatcaaccttttaaaaaaatctgtagttttcagagatcagatattttggtgcaggatatagatcgaatcactgatcttgagggttggctctggggactctgagatgacacacgaaaatgaaaaccacccagaggttttctygtgtaccaattttttggatatatatcattaaatgagtctggggtaggcatttgaaaaggcatggaatctgctacccaaaatatcagtctaataagagagatgggcacatgaaccaaccattgaagtgtggtgtgataaaaacctcaatgaaaggaataactaaatgctcaggatcccaggagaaagttaatg

SEQ ID NO: 301851 - DNA, 591 bp, Homo sapiens
catatatcttgtacatataatccaagtgtctgggacagtggcacgattagaggaaaatttagcaatatatgctcaataatgagatcttgtatgtgaggaggcctagaaaaaagcttgtcatacaatgaatcctcttgttattatttttctgctaaaaaggaagatgtaactgttaattttgattattagttttcataccacactataccacaatactggaaataaacattatcagttcaaagttagggtgttttattggatcaaccttttaaaaaaatctgtagttttcagagatcagatattttggtgcaggatatagatcgaatcactgatcttgagggttggctctggggactctgagatgacacacgaaaatgaaaaccacccagaggttttcttgtgtaccaattttttggatatatatcattaaatgagtctggggtaggcatttgaaaaggcatggaatctrctacccaaaatatcagtctaataagagagatgggcacatgaaccaaccattgaagtgtggtgtgataaaaacctcaatgaaaggaataactaaatgctcaggatcccaggagaaagttaatg

SEQ ID NO: 301852 - DNA, 601 bp, Homo sapiens
catggaatctgctacccaaaatatcagtctaataagagagatgggcacatgaaccaamcattgaagtgtggtgtgataaaaacctcaatgaaaggaataactaaatgctcaggatcccaggagaaagttaatgtaaaagatggagactgatgtgtgcattagagtaaagagatgctaaccattcaaaggaaagctgagaggaaggcagatattaatagataaactagtatataaaactcatggagacagagtagcatggcgtgttcagtgaaccacaacccgtataatatggctggagtataacatggaaaaggaatgatggaagaagtgtctgaagattcaagtagcatcctgactccactactggcatacagctgctgatccatcattcttcttacacttttcctttctactcccattcaagataaccaatcagaaaggtttactttgactgaagcacttgtcaaattaagtttttgagtgaagaaattcatctcttgaatgtaggatttcctttcatcttattattccattgctttaaacacttacggcatcattgcctgttattatatgctgaaaattcattcttctagaaatgatt

SEQ ID NO: 301853 - DNA, 601 bp, Homo sapiens
catggaatctgctacccaaaatatcagtctaataagagagatgggcacatgaaccaaccattgaagtgtggtgtgataaaaacctcaatgaaaggaataactaaatgctcaggatcccaggagaaagttaatgtaaaagatggagactgatgtgtgcattagagtaaagagatgctaaccattcaaaggaaagctgagaggaaggcagatattaatagataaactagtatataaaactcatggagacagagtagcatggcgtgttcagtgaaccacaacccgtataatatggctggagtataacatggaaaaggaatgatggaagaagtgtctgaagatwcaagtagcatcctgactccactactggcatacagctgctgatccatcattcttcttacacttttcctttctactcccattcaagataaccaatcagaaaggtttactttgactgaagcacttgtcaaattaagtttttgagtgaagaaattcatctcttgaatgtaggatttcctttcatcttattattccattgctttaaacacttacggcatcattgcctgttattatatgctgaaaattcattcttctagaaatgatt

SEQ ID NO: 301854 - DNA, 504 bp, Homo sapiens
tgttttcaacatgaagctgaagcttactttaaatatatatatacatatagaatgaaatatacatactttatatatatatgaaaagatatactatgctaacatgaatcaaaaaagttgcaatagtgatactaatatgagacaaagtatatttctttcagggcaagaattattaccagaggtaagtgaagggttttaaaaaatactaaaaatgtccagcartcaaaaatacaaaataatcttgaatatttgtttacctaaagacagagcttcaaaataaatggggccaacttctgctttatggtttggcatgttaaaaacttggaagttgttttaccattctagcaagtaaaaagctgaacaaactgaaaaatcaattattcttagatctatttgagaaattagtttactgtgcaaactgctgccccccaaattggagagacagaaaggcaactatagagaatcataacttaccagagtacacacctcatgtaagaaccagtgtct

SEQ ID NO: 301855 - DNA, 532 bp, Homo sapiens
attatattaaaaaaaaaaaagacacctgcatatacatgtttatcacagcacaattcacaattgcgaagatatggaatcaatgtaagtgctcatccatcaatgagtggataaacaaaatgtgatatatgtgtaatatatcacacataccatggaataacacccagccataaaaaagaacaaaacaatgtcttttgcagcaacttgggtgraattgaaaactattatcgtaagcgaagtaacttagagatcaaaaaccaaatactgcatattctcatttataagtgggagctaagctatgggtatacaatggcatacaaagtggtataatagacattgaagactcagaagaagagagggtgaaaggaggataaagcatgaaaaattacctactaggtacaatgctcactattcaggtgacaggtacactaaaagctcagatttccctactctacaattcacccatgtaaccaaacatgacttatactcctaaagctattcaaattttaaaaattaatgaaaattgaaatgaatc

SEQ ID NO: 301856 - DNA, 532 bp, Homo sapiens
attatattaaaaaaaaaaaagacacctgcatatacatgtttatcacagcacaattcacaattgcgaagatatggaatcaatgtaagtgctcatccatcaatgagtggataaacaaaatgtgatatatgtgtaatatatcacacataccatggaataacacccagccataaaaaagaacaaaacaatgtcttttgcagcaacttgggtggaattgaaaactattatcgtaagcgaagtaacttagagatcaaaaaccaaatactgcatattctcatttataagtgggagctaagctatgggtatacaatggcatacaaagtggtataatagacattgaagactcagaagaagagagggtgaraggaggataaagcatgaaaaattacctactaggtacaatgctcactattcaggtgacaggtacactaaaagctcagatttccctactctacaattcacccatgtaaccaaacatgacttatactcctaaagctattcaaattttaaaaattaatgaaaattgaaatgaatc

SEQ ID NO: 301857 - DNA, 648 bp, Homo sapiens
taaggtcactgtattctctaatatgcagtgacagctaacacggctaagcataaagtgcttaggcactagggatggaatttaaatgttggttcagcatcccatttctgaagtttgatatctyttttgaaattttcaaggcattaccactaatgaattatttagataagcaattacaacagttgggatatttttgttattgttgttaaacatttaatttaaaatatattggtattcaactgctatcttttccttaaataaactaaagaaaatattgctatcctcattgagagtgataacaatatgttagtgactgagggttatacagggccatacaggggtatacagaggtacaacgcctgtcgtctgtactcaacacactcttgaaggataagcaagggctgattgatttttaacggcagtgtaatgatttcctgggcctctcagtcatttgtctaactattctgacttcatgtttatcatcttactgaaaggagaagatctgattaaatgtgtacttcagaaagctccagagattattaaagtccagttgttagcccataaatcatcctaagtttttacattacgtgattctgaggcatcaatgctactaattacagatttccttctaaggcttttatgatagccaat

SEQ ID NO: 301858 - DNA, 551 bp, Homo sapiens
gcagaaatattgaaaatataagaaagctggtatgattgacgggaaaagatcacaaaggagataaggaacaggatcaaaccccatgtgggcagatttgtcttggagagccgtggtatttctccttttgaaacaagtggtaagaaatgcactatcaagtaaagaaacaggtaagtttagaagaagaagaaatgggatttgagcatttatgtctctgtgcctgatatctttattgtttgctccaaagagaagagttcactactggagaatgagaacccaggagaatcgtaaagatttggaaaatttaggrtagggcagccaagagacagcttgggcagaataaagcttagcctttcatggtatctagggaaccatccccaaatttaagtaataataatgatagaaatgaacaatagatatgaacatggactgtgaattgtctctcaatcttaacgtaagcatgacagaaagtctcttcagatacttctgctattttactgatatacaaactaaatgcaaacaaaatgctattatgcaaatgtaaattcaaggta

SEQ ID NO: 301859 - DNA, 592 bp, Homo sapiens
actctggtgacagttacatctctgatataytatatcacattgtttcccaaagtatgtttcccaattgctatgtttccaggacatgttagtcattgctttgttgttattttagaaaatctgtagttaaacaaggttaaataggtttcttcattattgaacttttcagaacctagaagatgatagtgtgctttgtgaatttctaaaaagagtacgtagcatcggcatatcccaaatgtatttgatcacaaaaccttattttttgtgtgtgaactatttatattattgtgcaacagggaaacattcagtgaaaaacttaagcagatgttttgactaatggtatctggatagtaatcaatcaagtaagtagtaatgataaaactactgctattaggtttataaagaaataggaaactgtaataaaaaagcactgcatgtgagacgagatcacaccactgcatgctagcctgggtgaaagagtgagactctgtcaaaaaaaaaaaaaaatcactgcataaataggttggtggatttggtgtaaacatactgttctgtagaattctgtaaacatctgttagcttcaggaaagctagta

SEQ ID NO: 301860 - DNA, 517 bp, Homo sapiens
gggctgttaccacgggatttcttgtgccaatattttactcaagttttttaccaatttacaagtgttcatttgataatagttaatcaacaatatggaccatgctcagccaaaattgaacaaattatttactcaatgagcagatcatagtaagagggttaaacacgcaatttctaaagcttaattttgtatgtgttacattaaagaaaagtatgcaattacctctctatttaagtcattataagaagcaaagctagaaattttaactcgaggaaggggaaaggtggctcatgtagccagacaatattacataccttataaattagggttttatcctctctggtttatataaacactgctatttatctaatttgttaaaattaaaaactcaagttttaccgttaggtctaaggagttgcatgttgagttctctaatatgctgttgattatagaaactgtgmcataaaagaatgatactctcttggtcaagatcattgggaaccagaaatacatgtataca

SEQ ID NO: 301861 - DNA, 675 bp, Homo sapiens
cgaagtgttttgctttcatgtggattaaatacacccctgcttgctcatccccatggagctatctttgacttggagccctacctcttcacacatcattctgattccttctctgaaatgtatcttttgtataccttgtccctcaaagttaggatctcttagaaatataaagtgacatattacattagttcattaaagctataaaataaatgtgtattaatatattactgycacttgctgaagcagatagaaccacccacccaaaatgtggtttcaatgttaggacagaagctaccataaacatacaaagagggtataaaaaggattattgctttcatcattaaagtctctggggaaagcaggcttctcaagcaggctcgaaatggtgcaagagagcaaggaaaggagacaggcttgagttttcactgtggtttatgagtaggagcttacatggttggaatctcccactagtgccaaagaagatggcatctgggttttcttatcagcttgtcacatgtgaggcacaaaaaggagaaggaggagtaagacttaaaagctgttagcagttaaatatcaaaaactgtagtcagatttctcattacataatataaacatggaaagagactggttctctttcttagtaacactaaatggtgaatgaataaatgaataaatgca

SEQ ID NO: 301862 - DNA, 588 bp, Homo sapiens
gcaccaattagaccttattggagatttcgatttagagaagaatgacataagaagatgatgctgactcacacctgtaatcccagcactttgggaggctgaggcggggcagactgtgaggtcaagagatctagaccctcctggccaacatgttgaaacctcgtctctactaaaaatacaaaaattagctgggcatggtggcatgtgcctgtagttccagctactcgggagggtgaggcaggacaatcgcttgaaccygggaggcggaggttgcagtgaacccagatcataccactgcattccagcctgttgacagagcgagactacatctcagaaaaaaaaaaaaaaaagggagaagacacaaatcactaaaatctgaaattaaaaaaatcattatccctaacccttctgaaattaaaaatattaaaaaggaactatgaacaactgtatgcccacaaattgcataacttacattaaatggatatgtttctacaaagatgcaaattaccaaagtgactaaaaaagtaaacaaatgttaaaataaatgtacaacaaatgctgtaatctaatgaaatattttccaacaaagaa

SEQ ID NO: 301863 - DNA, 588 bp, Homo sapiens
gcaccaattagaccttattggagatttcgatttagagaagaatgacataagaagatgatgctgactcacacctgtaatcccagcactttgggaggctgaggcggggcagactgtgaggtcaagagatctagaccctcctggccaacatgttgaaacctcgtctctactaaaaatacaaaaattagctgggcatggtggcatgtgcctgtagttccagctactcgggagggtgaggcaggacaatcgcttgaacccgggaggcggaggttgcagtgaacccagatcataccactgcattccagcctgttgacagagcgagactacatctcagaaaaaaaaaaaaaaaagggagaagacacaaatcactaaaatctgaaattaaaaaartcattatccctaacccttctgaaattaaaaatattaaaaaggaactatgaacaactgtatgcccacaaattgcataacttacattaaatggatatgtttctacaaagatgcaaattaccaaagtgactaaaaaagtaaacaaatgttaaaataaatgtacaacaaatgctgtaatctaatgaaatattttccaacaaagaa

SEQ ID NO: 301864 - DNA, 588 bp, Homo sapiens
gcaccaattagaccttattggagatttcgatttagagaagaatgacataagaagatgatgctgactcacacctgtaatcccagcactttgggaggctgaggcggggcagactgtgaggtcaagagatctagaccctcctggccaacatgttgaaacctcgtctctactaaaaatacaaaaattagctgggcatggtggcatgtgcctgtagttccagctactcgggagggtgaggcaggacaatcgcttgaacccgggaggcggaggttgcagtgaacccagatcataccactgcattccagcctgttgacagagcgagactacatctcagaaaaaaaaaaaaaaaagggagaagacacaaatcactaaaatctgaaattaaaaaaatcattatcmctaacccttctgaaattaaaaatattaaaaaggaactatgaacaactgtatgcccacaaattgcataacttacattaaatggatatgtttctacaaagatgcaaattaccaaagtgactaaaaaagtaaacaaatgttaaaataaatgtacaacaaatgctgtaatctaatgaaatattttccaacaaagaa

SEQ ID NO: 301865 - DNA, 574 bp, Homo sapiens
acctttaatgtatacatacatacgtatatataaatatctagatagagccatgtgctgcttaatgtcagggatacatactgagaaatgagttattcgacgatgtcatcatcatccgttgagtgcatttakgcaaacctagatggtacagcctactacatacctaggctgtgtagtatgacctattgcttataggctgtaaacctgtacacagtgttactgtactgaatactgtaggcaattataacacaatgataagtatttgtgtatctaaacatatctaaacatacaaatgatacagtgaaaatgaactataaatgattaaaaaaatagtatacctgtatagggcaagtaccatgaatggagcttgctgtactggaagtcactctggatgagtcagtgagtgaatggtgagtgaaagtgaaggcctaggacattattgtacactactgtaaactttatgaacacagtactcttaggtaaacctaaatttagttacaatctttttcttcaataataaattcatcttagcttactacaacttttgtgcattctaaattttaaattttttaaacat

SEQ ID NO: 301866 - DNA, 518 bp, Homo sapiens
aatattgacaatttattataaacatattaagttcctgatataacgtgcagtgtacaccaagatcatgtttacattataaaaatttaaaactttaattttctagaattaagttgatttggaacctacatttgagctgcaatacccctctctaatttcataatttgtatttyttgtcaccttaattggagtcatatctttgttaaacagttgctttgttcttctgtgatgctataatatcctcatgttcttttcgtataagagctctttttattctgaaacgaagtggttcaagtctgctttgccttttgggtcgatgtgtctctcttttctcttattttttctgtgctcaccttctctgtagattcagtctcacttctctgagtcaattttaaccaggcagcatctagggaggatcggccattcatcaagcagccatggacctgggtacagtgaggtcatggtaagctgtgggaatctgacctgctctctgctagtggatgaagctacatcattcaact

SEQ ID NO: 301867 - DNA, 518 bp, Homo sapiens
aatattgacaatttattataaacatattaagttcctgatataacgtgcagtgtacaccaagatcatgtttacattataaaaatttaaaactttaattttctagaattaagttgatttggaacctacatttgagctgcaatacccctctctaatttcataatttgtatttcttgtcaccttaattggagtcatatctttgttaaacagttgctttgttcttctgtgatgctataatatcctcatgttcttttcgtataagagctctttttattctgaaacgaagtggttcaagtctgctttgccttttgggtcgatgtgtctctcttttctcttattttttctgtgctcaccttctctgtagattcagtctcacttctctgagtcaattttaaccaggcagcatctagggaggatcggccattcatcaagcagccatggacctgggtacagtgaggtcatggtaagctgtgggaatctgacctgctstctgctagtggatgaagctacatcattcaact

SEQ ID NO: 301868 - DNA, 559 bp, Homo sapiens
ctagtttgtaaattagagagcattgatctcccctaattaatctggcccccagggccayggactttgtggtttttggagaaatgggtcctttgcttcccactgtctagagcacttttccatatatccaggcccttctgaaatttgtcatccatatatcattctgagaaggatggccaggcagttctacatagcccccgtttcttgttcattttgtgagtgtccactcaagatgacatgaggggacattgacttcagattcagtgttaacacatcatggattattatgcagagagaaccccaaatcagccaataattcctgaggtcagacaatttcctaatctgtacatctgttccttatagaatttcataatacaaatcagtggttcccaaacttgaaggtgcctcattcatctggagggaatgttttacctctagaggcctgcaatcagtaggtctcagatggggcgtgagaattttgtatgaaattctcaggtaatgatgctgcttctggttaagagccaccagtgaactatgaaggacaatttctatctatgctcag

SEQ ID NO: 301869 - DNA, 616 bp, Homo sapiens
tgatctcccctaattaatctggcccccagggccacggactttgtggtttttggagaaatgggtcctttgcttcccactgtctagagcacttttccatatatccaggcccttctgaaatttgtcatccatatatcattctgagaaggatggccaggcagttctacatagcccccgtttcttgttcattttgtgagtgtccactcaagatgacatgaggggacattgacttcagattcagtgttaacacatcatggattattatgcagagagaaccccaaatcagccaataattcctgagrtcagacaatttcctaatctgtacatctgttccttatagaatttcataatacaaatcagtggttcccaaacttgaaggtgcctcattcatctggagggaatgttttacctctagaggcctgcaatcagtaggtctcagatggggcgtgagaattttgtatgaaattctcaggtaatgatgctgcttctggttaagagccaccagtgaactatgaaggacaatttctatctatgctcagctctaagtggagctattattgggagtttccagctgtcttgcatattttgattgaaaaaataaatgtacccaatattccta

SEQ ID NO: 301870 - DNA, 597 bp, Homo sapiens
aataacatataatgttcatgaaggccaaataaaactatattgttcaaaattaaattaaaccacattaacgggcacaaccaatgtgttcattaatatgttttgaattaattcattaatgaaatattccatactacttcagatttcagtgattcatttctgtccattatattgttaatatcgtttaagtgtactaattatttttccyttccacatgaggtcagataatatgtcttctctcttttgcacccttaaagtagctggcccagtgtggggaaagaagaactactcaaaaaatgaatagtaattgagtaaatatatttttactttattagaataaaaatattggacttaacataaaacatttaataaacccatctctcttttctggacatatcctgcacataatatgacactttttgctttgtaaaagttaaactataattcaattttttcctttatgtcatctttctgtacctccttctgaacttctgacattagctgtcactcactgtcagggagctaactctaagcatcaaccaatctttaagctaaggataaatgtgagctgagttgcacagagtaatgtctctctacctc

SEQ ID NO: 301871 - DNA, 610 bp, Homo sapiens
gaaatagacgctgtagaaaattttatttgtcctacaggataattcagacattgctctaacacattttgccatcgcccacacttttttagtctgccctatatttcagtctcaggagagtaaaatctctacgttaattctgcccacacacttctacactgcttttctgtctcctcagtgacagatttgggttggcaatgctctgtactggctgcacaaccttatggtattgcttgcatgagagaagcaaacaacagtttcattttacacattcagcacctctgatcttcagcaggagctgaagtgttaaactctttattagggattcatggagactccagatctttcayagggcatttcatcctcagaaggagaccatctgccttccccagaatgcctcacggtgcccaagagaggaacagccaggacatgaggaagttctcttgtaagtggtggtgaacaaatctcaggagataaccccagggatatcaacagaagtttaatttttaaaaaactaaacatagaaatgattttctccattcattgactaaatatgataatagaaataatgataacaatgagaataaagtctgataaaatttatgaaatcatt

SEQ ID NO: 301872 - DNA, 610 bp, Homo sapiens
gaaatagacgctgtagaaaattttatttgtcctacaggataattcagacattgctctaacacattttgccatcgcccacacttttttagtctgccctatatttcagtctcaggagagtaaaatctctacgttaattctgcccacacacttctacactgcttttctgtctcctcagtgacagatttgggttggcaatgctctgtactggctgcacaaccttatggtattgcttgcatgagagaagcaaacaacagtttcattttacacattcagcacctctgatcttcagcaggagctgaagtgttaaactctttattagggattcatggagactccagatctttcacagggcatttcatcytcagaaggagaccatctgccttccccagaatgcctcacggtgcccaagagaggaacagccaggacatgaggaagttctcttgtaagtggtggtgaacaaatctcaggagataaccccagggatatcaacagaagtttaatttttaaaaaactaaacatagaaatgattttctccattcattgactaaatatgataatagaaataatgataacaatgagaataaagtctgataaaatttatgaaatcatt

SEQ ID NO: 301873 - DNA, 582 bp, Homo sapiens
ttctgtggaaacatttattcagatcatgtggtataagtggatataactgcagaaagcctatatgcaggaatatgtttttttcagttgtagtcattttgtttcaccatttataactaaatcaaattacaagattttttagtgttgtataaagaaggaacacttgtcaagaaatcatgtaaaaagattctgtgtgaatacgatatctatactgtgtaaaatacaagaagacttgtcactgggcctttttgttttaaattttcatctttagaaagataggatttgaacaaatgattgctatcagctctgattctaagaattcccagtgttctgattctaagaatttccccattggatagatcatatctccatgtaattctactactgacatgtatttsaaatgaaaatctaaacatttataattattttactgtcctattctataattgatagtggcaggaggcaaacaaatgtctaggcagataggggcaggtccccagcaaaatcccaccttcaagctgaagatactttaaagcctagatacaagtcctgggtaaatccacaaaccagactgagaactctctt

SEQ ID NO: 301874 - DNA, 532 bp, Homo sapiens
gtctccttgagtgacatctctagacacaggaatgaatcagatgaatagggcctgaagtgaatccccagcaaactgcagcagccctacagaagmgggacctgactattgaaagaaaaacaaaaagcagaaagcaacaaaaaaggccccacaaaaaccccatccaagggtcagcagcctcagagaccaaaactagacaaactcacgatgatgagaaagagtcaaaaaaaaaaatgctgaaaactcaaaataccagagtgccccttctcccccaaatgatcacactgtctctccatcaagggcacagaaaagtatggaggatcagatggacgaattgacagaagtaggctaaagaagatgggtaataaaaaactatgctgagctaaaggagcatgttctgacccaaggcaaagaagctcagaaccttgataaaaggttagaagaattgctaactagaataatcagtttagagaggaatataaatgacctcatggagccgaaaaacacagcacgagaacttcatgaagcatgcaca

SEQ ID NO: 301875 - DNA, 532 bp, Homo sapiens
gtctccttgagtgacatctctagacacaggaatgaatcagatgaatagggcctgaagtgaatccccagcaaactgcagcagccctacagaagagggacctgactattgaaagaaaaacaaaaagcagaaagcaacaaaaaaggccccacaaaaaccccatccaagggtcagcagcctcagagaccaaaactagacaaactcacgatgatgagaaagagtcaaaaaaaaaaatgctgaaaactcaaaataccagagkgccccttctcccccaaatgatcacactgtctctccatcaagggcacagaaaagtatggaggatcagatggacgaattgacagaagtaggctaaagaagatgggtaataaaaaactatgctgagctaaaggagcatgttctgacccaaggcaaagaagctcagaaccttgataaaaggttagaagaattgctaactagaataatcagtttagagaggaatataaatgacctcatggagccgaaaaacacagcacgagaacttcatgaagcatgcaca

SEQ ID NO: 301876 - DNA, 604 bp, Homo sapiens
tataccctcagttattttcatcagtaaagtaggatcatattacctgttgtgatactgcatttctcaaaggttgccaaatgttgcacaagtgcttgttaaaaatacaattttggccttcttctattgagaagtatggtctgtatttcacttccttgaatatggaaaggtctatgactatgacacaactgaatctatgtgacatccaaggctaactgataaaaagttattgagcttcctcctggttctcctgaggcgctcatccaaggaacccaggtgccatgttgtggagaagtcaagtagccacatgraaaaacaatttgtacgtggtctggctatagcctcaactaaggcaatgccagctaccttctagcataaaccatcagacaaatgaatgagtatgcctttagattattccattttttagcatctgagctgccccaaattatgtcttgtggggctgagacaaactctgcacacttagccctgttcaaatttcagactgtgaacaaaataaatgctgtcatttacttcaggccactaaattttggatcagtacgctacacagaaatacatagccacaacatctgtcttaattcacagtata

SEQ ID NO: 301877 - DNA, 604 bp, Homo sapiens
tataccctcagttattttcatcagtaaagtaggatcatattacctgttgtgatactgcatttctcaaaggttgccaaatgttgcacaagtgcttgttaaaaatacaattttggccttcttctattgagaagtatggtctgtatttcacttccttgaatatggaaaggtctatgactatgacacaactgaatctatgtgacatccaaggctaactgataaaaagttattgagcttcctcctggttctcctgaggcgctcatccaaggaacccaggtgccatgttgtggagaagtcaagtagccacatgaaaaaacaatttgtacrtggtctggctatagcctcaactaaggcaatgccagctaccttctagcataaaccatcagacaaatgaatgagtatgcctttagattattccattttttagcatctgagctgccccaaattatgtcttgtggggctgagacaaactctgcacacttagccctgttcaaatttcagactgtgaacaaaataaatgctgtcatttacttcaggccactaaattttggatcagtacgctacacagaaatacatagccacaacatctgtcttaattcacagtata

SEQ ID NO: 301878 - DNA, 604 bp, Homo sapiens
tataccctcagttattttcatcagtaaagtaggatcatattacctgttgtgatactgcatttctcaaaggttgccaaatgttgcacaagtgcttgttaaaaatacaattttggccttcttctattgagaagtatggtctgtatttcacttccttgaatatggaaaggtctatgactatgacacaactgaatctatgtgacatccaaggctaactgataaaaagttattgagcttcctcctggttctcctgaggcgctcatccaaggaacccaggtgccatgttgtggagaagtcaagtagccacatgaaaaaacaatttgtacgtggtctggctatagcctcaactaaggcaatgccagctaccttctagcataaaccatcagacaaatgaatgagtatgcctttagattattccattttttagcatctgagctgccccaaattatgtcttgtggggctgagacaaactctgcacacttagccctgttcaaatttcagactgtgaacaaaataaatgytgtcatttacttcaggccactaaattttggatcagtacgctacacagaaatacatagccacaacatctgtcttaattcacagtata

SEQ ID NO: 301879 - DNA, 554 bp, Homo sapiens
aggttttggaaaacccaacctccagcaacgatttctaagcgtcttgcacaaggcacctgcaaaaaccccagaacaagaaagaaaggaaaatgatagagtgactataggccagtgaaccgggagtctggggaatcagattagagtcttgaactcagctctgtcatttgcaaaataaaggcattgaagttgatatgttctaaagcatttttcagttacaaaattacgtgattttagctagatgacagttggtttcttcctgcccctttctctattttctctgtctttagcatcatccygacgttccttgtaacctcaccaaattcaaaagcaccattttcaatctgcaatttcatgtcttctcataagcaaattaaggataattttcttgtggttgtcattttccactttaaaagagccaggtagcacactcatccagctgctgagatcccacaaaagcaattaattcaaagcatgactttgttcttcctattctcttgtcctttcagagtcatgaatcactgttatttggacttagtacttattcttactttgcc

SEQ ID NO: 301880 - DNA, 552 bp, Homo sapiens
tggtctcatttctacaggtcagtctctcctatatttagctatataatgcaaatatgagtcaaatgaatttcagagtgaaatgttaaatcttgcaaagatgtggaattttataaaatctctgaatagaatgttggatatgattgctgagtttaattatgaatttgataaaaattcaaatctagtagaactctatcacttaacaattgaagaaaaaaattgagatgaatgatgacatagtaggtacttcaaaagagaaataactaatatcaaataaaattttgtaaaactcttactctgacaaaattaatgactttataataaagctataaaagttaaaaataagaacacttctttttttcattttaaacattagctcatarcctcatttagaatccaaatttcaacttacttttgtgatatttattctcacatgttaaagataaaagcttgataattttttgtcaaatctaaaatatgttcagttttgctgtaatggaatcctggtaggaaaatttttcttattaactgcactcagatattgaggatttccag

SEQ ID NO: 301881 - DNA, 398 bp, Homo sapiens
attttttgtcaaatctaaaatatgttcagttttgctgtaatggaatcctggtaggaaaatttttcttattaactgcactcagatattgaggatttccaggattttccacaatgtccrttgggaagccactcaatttatccagttttccattttattattatatggactatgatataaagaaagtgattggcccagataatatccatttgctcttttaaatctagatatttaattatataatcctgtcaattatttcattatgtttcccctcacctacaacttttctgtacattcctacaaccaccccttcagtcatgcttagactactctgctccatatctcatatttaatatgcatttgcaaaatatttcaagccaatacacaaacactgcagagaa

SEQ ID NO: 301882 - DNA, 603 bp, Homo sapiens
ccttactcatgacatagtcaattcacacatatttgtatattacatgtattatatactatattcttccaataaagtgaggtataaaatgttgttgagaaaaatgtagggaaaggaaaatatattcactattcattaagtggaagtggatcgatattaagatcttcattctcattagcttcacattgaacaggcagaggaggaagaagtggaggagggyttggtctttctatctcggggtggcagaggcaagagaaaatccacatataagtggatctttcagttacaaccactgttgttcaaggatcaactgtatttgtaaatggactgtttcttgcaggggggtgttgaaccaagttgagtccagtagatttgaatatgataaatcttcaaaattaatttgaaatacactccacaaacgctatgaattaaaagaaaatcattacattaaaatttcaataatatggattttaaggagtttctggtttcaaaatggcagtatagaagcaagctgacttcactcttgcttcacagaaaacaaaaaataaatatacagcaccaagatcatcacaagcaatatcttagaacttgaatatgagaaggaga

SEQ ID NO: 301883 - DNA, 501 bp, Homo sapiens
caactgaggcaaacctgggcttaaggcacatgagtaatatgtatcaatttaaccatggttatattcaaaatatttctcaacagattccacgccaatcagaatggaaggcagttatgatcaaccatrtggatgtatgaatgcatatcaactgaatatcagctttgaatgttacaagtatataatttctcacctctcattattactgaccacttatattactcattgcttttatgtccagttttcttaaatgttggaagtcatgtgtagttaatagtctcttttaccttgaacataaagttaagatatcccattcattcaagcgaatagtatgttaacagaagtgaatcatgctgggtttctgcaagaggtagcagtcacatttgcaagaaaattacaaggaatgagagccatgaggctattaactgcaaagctgctaactccccaaggcctaaagaaacaacggacaggaggtacctagcatctgattggagagagtcctgt

SEQ ID NO: 301884 - DNA, 565 bp, Homo sapiens
cagacctctgaagcaaaatattaaagagagatggctggagaatgaatctgaaagggcaaaaagtatatactggcccaattagaccgtctctttttacctcgtcctcgtatcaagtatttaactctgatactgtattagtctgttttcacattgctataaagaaataccagagactgcgtaatatataaagaaaatctgtttcattggcttatgtttccacaggctgtacagaaaacacgatgttgtcttcttcttggcttttgaggaggcctcaggaaaattacaatcatggtgaaaggcaaagaggaatattccacaagtcccctgggcttgaacccccacccaatcccacactgacaggattctcctgtgggacrtccccgattctggacaggcagctctcttattgtttactagaatcaaggcaaacctgggccagcatttcacatggctggagcaggaggaagggagagagagggggcaggtgctacaaacttttaaaaaccatgtctcttatgagaattctgtcatgagaacagcataaaaagaatggtgctaaaccatt

SEQ ID NO: 301885 - DNA, 523 bp, Homo sapiens
aagggtctgcaggcttcatgcaagtctgaaaaccagcagggaagtcattaaatctcaaagctccaaaataatctcctttgactcaatgtcccatatccagggcatactgatgcaaggggtggactcccaaggctttgggcaactttgtgcctgtgsgtttgcagagttcagcccccacagctgctctcgagtgcttgcattgagtgcttgtggcttttctaggcacagggtgaaagcagccagcgaatctaccattccagggtctagagaatagtggtcctcttctcacagctccactagacagtgcctcagtgagtactctgtgtggggcccaaccccacatttcctctctgctgtagtagaggttctccatgagggctctgcccctgcagcaggcttctgcctggactttttcatacatcctctgaaatctaggcagaggatcccaagcctcaactcttgcactctgtgcatcttccagacttaacactacttggaagccaccaaggcttacatcttgcac

SEQ ID NO: 301886 - DNA, 523 bp, Homo sapiens
aagggtctgcaggcttcatgcaagtctgaaaaccagcagggaagtcattaaatctcaaagctccaaaataatctcctttgactcaatgtcccatatccagggcatactgatgcaaggggtggactcccaaggctttgggcaactttgtgcctgtgcstttgcagagttcagcccccacagctgctctcgagtgcttgcattgagtgcttgtggcttttctaggcacagggtgaaagcagccagcgaatctaccattccagggtctagagaatagtggtcctcttctcacagctccactagacagtgcctcagtgagtactctgtgtggggcccaaccccacatttcctctctgctgtagtagaggttctccatgagggctctgcccctgcagcaggcttctgcctggactttttcatacatcctctgaaatctaggcagaggatcccaagcctcaactcttgcactctgtgcatcttccagacttaacactacttggaagccaccaaggcttacatcttgcac

SEQ ID NO: 301887 - DNA, 523 bp, Homo sapiens
aagggtctgcaggcttcatgcaagtctgaaaaccagcagggaagtcattaaatctcaaagctccaaaataatctcctttgactcaatgtcccatatccagggcatactgatgcaaggggtggactcccaaggctttgggcaactttgtgcctgtgcgtttgcagarttcagcccccacagctgctctcgagtgcttgcattgagtgcttgtggcttttctaggcacagggtgaaagcagccagcgaatctaccattccagggtctagagaatagtggtcctcttctcacagctccactagacagtgcctcagtgagtactctgtgtggggcccaaccccacatttcctctctgctgtagtagaggttctccatgagggctctgcccctgcagcaggcttctgcctggactttttcatacatcctctgaaatctaggcagaggatcccaagcctcaactcttgcactctgtgcatcttccagacttaacactacttggaagccaccaaggcttacatcttgcac

SEQ ID NO: 301888 - DNA, 584 bp, Homo sapiens
acaaaaaaatatttcttctgtaaggtccatggggcacaggagcaattttattaaagacaatgtcagatgaataagaaaattcagaaattagaaaaggcagtggggtgccacwggaccattctacttgtgattagtaaaagtgtgttttgccatgcctggcagctcatgcctgtaatcccagcactttgggaggctgaggctggtagattgcttgagtccagaagttcaagaccagcatggacaacatggtgaaacctagtctctacaaaacatacaaaaattagctgggtggggtggtgcatgcttgtagtcccagctacttgggaggttgaggcaggaggattgcttgaactcaggaggcagaggctgcagtgagccgaaattacaccattgcactccagcctgggtgacagagtgaaactctgtctcaaaaaaaataaataaagtgtgtttgtaatgataatcagataagtctccttagggtctggaaatctcacagtaaaatcaaatgaaagaagtgtctctagacctcatgaatacccccaaataaatgatataagaaaggttaaatggtcaggctaaac

SEQ ID NO: 301889 - DNA, 524 bp, Homo sapiens
aaagacaatgtcagatgaataagaaaattcagaaattagaaaaggcagtggggtgccactggaccattctacttgtgattagtaaaagtgtgttttgccatgcctggcagctcatgcctgtaatcccagcactttgggaggctgaggctggtagattgcttgagtccagaagttcaagaccagcatggacaacatggtgaaacctagtctctacaaaacatacaaaaattakctgggtggggtggtgcatgcttgtagtcccagctacttgggaggttgaggcaggaggattgcttgaactcaggaggcagaggctgcagtgagccgaaattacaccattgcactccagcctgggtgacagagtgaaactctgtctcaaaaaaaataaataaagtgtgtttgtaatgataatcagataagtctccttagggtctggaaatctcacagtaaaatcaaatgaaagaagtgtctctagacctcatgaatacccccaaataaatgatataagaaaggttaaatggtca

SEQ ID NO: 301890 - DNA, 481 bp, Homo sapiens
gttttgccatgcctggcagctcatgcctgtaatcccagcactttgggaggctgaggctggtagattgcttgagtccagaagttcaagaccagcatggacaacatggtgaaacctagtctctacaaaacatacaaaaattagctgggtggggtggtgcatgcttgtagtcccagctacttgggaggttgaggcaggaggattgcttgaactcaggaggcagaggctgcagtgagccgaaattacaccattgcactccagcytgggtgacagagtgaaactctgtctcaaaaaaaataaataaagtgtgtttgtaatgataatcagataagtctccttagggtctggaaatctcacagtaaaatcaaatgaaagaagtgtctctagacctcatgaatacccccaaataaatgatataagaaaggttaaatggtcaggctaaacatcaaggaaccaatatttatgatacgttgtcaaaagatgg

SEQ ID NO: 301891 - DNA, 622 bp, Homo sapiens
actttttcaatgggacagcagagagattcaaaaaaatgacctttggtgactttgctattatagactatcttcyagaatgagataatgcaggatggatcatggtcaatggtatgagtcagttctagactacagctgttcaaagtttatcatggttttatatttcttattctttgggggtgtagatgatgaagctctgtagaatggtaagaatacttgagaatagtgtaagacccaaggctgaatgtctccgttccaattctccatcttcccctccaactgacccaataactaaagaagttccacttgaccaagttttaccccagctctctcacctgccttctgccttattccttgtcaactttcttgattttctcattcacatggcttctgatctttttattttgtctctattttacccgctccttcaaatttggtaattgatatagtttctcccacataaatcatttcccccaggttttcagaacagagatccaaattttctctatgattttatccaatttctgtgactcttggaaactatgaagccctcttttgctttccatttattccactggtttctgtatgactataacacaacaaaatatggaattgcttgtattta

SEQ ID NO: 301892 - DNA, 539 bp, Homo sapiens
aagtaagctctgtgcactcactagcaacacaggggagatggaataatgatctctccttaatcaagactgatgggaactttgattagacccactttcccacaagaaaaagccacattagacatgtttgtctgaagtgaagactgaaaaaaaaagctgtttattaaatcatagatgactgataatctcttttctagcattatattattaatgtgaattggtagaatttgaaatctacagcaatttcagagtgcagaatgaaggctgggagtrttggcctcaatttgagcaagagaattttaatagttaaaatgcacagaacaaggtgctttgggagaggatgaggttattacaaagtgaattcatgcgtgaaagaaccagtgccatccgtaccatttctgaaactatttgattcttttaaaattccaacaaaagtaaattgaagccatgaatgaagtgcacccagaatctccacagattctactgaattttttgaaggctttccctttagtaaatttgaaaagggcttgtagagattgcca

SEQ ID NO: 301893 - DNA, 555 bp, Homo sapiens
gaatactgggagatgaaaatatctggggactatcttggagtttgctaccaaactgctctatatttgtgtctcttcctcatctcatcaaatgttaygaaatgctttaaaagaaaagaggcttgccagttggagagctgtgctgcttactctctgttttttagcttttacctaaaacacttaacctgtatgtactctagtttcctgatgcatacaattagagtaaatatctatgctctaattacgttgtgatacaattgagtagggtaaaaaaaaaaaatgtgaactctcaagtagagtgctagcacatactaggtgctccaggcatagtggataacattcctacttttctaattcttatatcatccctagccccatttttcctaatcctctttgctagggctttccacatcctgccctctgttatagttgtttatatacatttattatcttgcttaatgaattgtaaaaatactttagagtcaggctttacaattccattaacttagcacctggtaggtgcttaataaaaaagcattgattaaatgttcactactt

SEQ ID NO: 301894 - DNA, 456 bp, Homo sapiens
ttagggcaaagttctgtactttcctaaaatttcaaatttgggcaaaccaacatgggctatcttatttttccgcttggagaaaataagagatcttctcatttaatcatctactcatattttaaagtcttggaaacttaraacaccctaaatttgtctatattagatcagagtcatgattttctcagcccaatattgtgtctgcaataaaagaaacaagtgaagcattttgcctacctgcatatcagcctcaaggtttaggtatgttcacaaaatatctgtgtgcctagcacagtgcttagaacaaaacagaaaaacaaacacttaaaaaatatttgttagaatgaaataaaattcttatttccaagaatagtatatacatgtattttcccaaaattgttctaaatttcattctgttttctgtctgaatctactatgaaattatgctgtctcatgtat

SEQ ID NO: 301895 - DNA, 508 bp, Homo sapiens
gggcaaaccaacatgggctatcttatttttccgcttggagaaaataagagatcttctcatttaatcatctactcatattttaaagtcttggaaacttagaacaccctaaatttgtctatattagatcagagtcatgattttctcagcccaatattgtgtctgcaataaaagaaacaagtgaagcattttgcctacctgcatatcagcctcaaggtttaggtatgttcacaaaatatctgtgtgcctagcacagtgcttagaacaaaacagaaaaacaaacacttaaaaaatatttgttagaatgaaataaaattcttatttccaagaatagtatatrcatgtattttcccaaaattgttctaaatttcattctgttttctgtctgaatctactatgaaattatgctgtctcatgtatgaagcacaatttttgtaataatttttttaaattttattgaatatttgccacgtgccaggcatagtatcttatttttaacctcacaacaacc

SEQ ID NO: 301896 - DNA, 515 bp, Homo sapiens
caataaatatattataaattagtgaatgaattaatgagggagtgaataaattaatcaaagaaggccacaaatccttgaatcacttgtcaagttattgaaacgagttctagatgtgacagcaaggttgcctcaatcttttatgttcatatttttcagcaattttatrtgcataacaatcctcaatctgttcaagttgagtcaaactttattcaagtaagtcaaaattacccgtgtgttatgacgagatttaacatacatttgaacaacagcaatgagccaaccaatgtactaggctccacggatataaaaacatatagagggatcttgacttcaagaagcttataatctggagataaacgttattaaataataattataaactgcgataggagttaaagtagactttttaaagtttgcaccatgagctctgtaaagtataaaaattgaattctattttgctcattctttaatttctaacttttttaaatatcagaagattggcaataataatgttt

SEQ ID NO: 301897 - DNA, 612 bp, Homo sapiens
  misc_feature (1)...(612): n = A,T,C or G
tattcaaaatgatccatgagggagaaaacaaaatattggagctttcattaatatttatttcatccttcctctaaataaatttttctttatgtattgtagtattcacaatatgttcaactagtatactacttgcgtataccttataaataaatcaatatttcttgggaaatgcatactcaaaatttttactgatagctctgtgtgatatgctcattagggtttgtagatcattggtctaagaaatgaaaataaccaatataaagtcaagaaattaatcaaattttccactcatggaagaaarttttctggtgctaatgtatggttaatgttgaagtagagagctgtacatannnnnnnnnnnnnnnnnnnnnnnnnnnnnnnnnnnnnnnnnnnnnnnnnnnnnnnnnnnnnnnnnnnnnnnnnnnnnnnnnnnnnnnnnnnnnnnnnnnnattgtattgcttaggaaaaaaacaatgtcctttcactatagattacattctccttacctggaaggcctacatggctatatttgtatgtgttgattatcgggacactcattgttatatttgagcctgtagtcaaatattcaagcaagaacccttaatgtctaa

SEQ ID NO: 301898 - DNA, 583 bp, Homo sapiens
aattgttgaatttttttttagtcttttatgttcagcctttatttcaggtgtgacattttaaatagcatgtacttggataatttttctaatccaatctgtctacttttgtccctgaactgtacaaactagttgatgttacattgttctgacgataaacattttttatttatttatctaacaaattaatttcttatttgtatttgtcctgcttctctctcatayttatttgagttgtttagtgtgatttgttttccttgtattcccctctatttctccactcatttagaagttatgcacattttcccatctataaaggggtaagtctagcagcattacgtgcatatgtaatttaatgaagtttataaatatcattatctatcccctttacaataaatgactctcaaaaggctttaaatctgattcctttacccttcacttagagacagttgattttttaaaagaaattgaattctaaactcataaattaaaaattgctattatagtatgcagccaatatttacttagatttacttagaagtttacagttatcattgttcaagcttatttctttcatctgatattt

SEQ ID NO: 301899 - DNA, 596 bp, Homo sapiens
gaccagtgatggatgatcatttggaatgatgagcatcttaggaaataatgaggmatagcgtcctctccattttctcccctcctcaccacacacccagtcttggaattaagtaagctccttaggcacaatcccttaagaaaaagaggcttcaattttattgacattattttctgctgctctaataaattgtgaatttaaaatggaaattatgttgaactacagaaatatattatccatgttgcctacaaggttaatacctgattctaacacaaacaattcaaacaagtaaaatatgttgctgtactactatgaggttaacaaaatgaacaggtaagactgacgatctaaccactcaggagtaccaggggccagctatgccattcaaacccactccaatcctggcagggatttgtcatcatttgttggtggtggttgctctggctttaatcttgatgagaatgtctctggtcctctagctggctgagattttcaaaggggtaacaatgacagcaattccagttatgtcctccttgggggatccatttttgttgtagcagggagccatactttttgcatctcatttccaaagaaggcag

SEQ ID NO: 301900 - DNA, 591 bp, Homo sapiens
gagaggagaaaaacctgttttgtcatccttgcccataactgggaggagagggggctctggagcacattccttgagggctctggttttgcagataatgttattaaatccttttcagagctcggctgcctatctctaggtcttggagtgagtcagcctagcaagagaagacttgttcctttcttttacttgttttttctttttacattttctgcttcattcccccctttgatgcttcttataaatgaagtttaatagaaagcatcatcatctttaaaatttatcctttcatgaggcgctagtttcctattaagcaggggttgatatttagttagarccattagttgggtagtagtttgcctgattacaagaatctcaatagctgactgcatgttcctaacaaggaggggcaaaagacaaggaagtatgaggcagccccctagtatggccagaactattcctactaaggttttaaatccttcaagagatgaaaaccagcctccaaagagtgaatctggagaccatcatttccaagtctgcactgggacatgggctaatttctggattctggcagaatccaaaattgtttgacaa

SEQ ID NO: 301901 - DNA, 591 bp, Homo sapiens
gagaggagaaaaacctgttttgtcatccttgcccataactgggaggagagggggctctggagcacattccttgagggctctggttttgcagataatgttattaaatccttttcagagctcggctgcctatctctaggtcttggagtgagtcagcctagcaagagaagacttgttcctttcttttacttgttttttctttttacattttctgcttcattcccccctttgatgcttcttataaatgaagtttaatagaaagcatcatcatctttaaaatttatcctttcatgaggcgctagtttcctattaagcaggggttgatatttagttagaaccattagttgggtagtagtttgcctgrttacaagaatctcaatagctgactgcatgttcctaacaaggaggggcaaaagacaaggaagtatgaggcagccccctagtatggccagaactattcctactaaggttttaaatccttcaagagatgaaaaccagcctccaaagagtgaatctggagaccatcatttccaagtctgcactgggacatgggctaatttctggattctggcagaatccaaaattgtttgacaa

SEQ ID NO: 301902 - DNA, 542 bp, Homo sapiens
tacttggagttgggggctattttcaaagctctcgcttcccaagactggcaggtagagagctaggtatgatgaatttgaatggtccgggtgagcctgggcatgtcagcagtgagaatgagtgcctgaagaccagaagtttgtctccaaatgttctgggtaatataaactccagggtgcttggacaatcctggaaaaggagaggtgttyactaacagtgattaatatggataaattgtcaactttggcaagaaacagcacagagctagataaagaaaaattgatttcaatttagacttagaaaactaaagcaacataagcatttgtgcacattcatacctaaggtaaacaaagtatcaagcatataactgtgaatatctactgacaaataatgtttttcagaaaactcccaggttttatagctctatatttcatttgtatgaagtattcatttctcagctctcagttcccttgaaaaattgggacttttctttgagcttaacattttatctctaacttaacctcctttgatcggatttactttt

SEQ ID NO: 301903 - DNA, 542 bp, Homo sapiens
tacttggagttgggggctattttcaaagctctcgcttcccaagactggcaggtagagagctaggtatgatgaatttgaatggtccgggtgagcctgggcatgtcagcagtgagaatgagtgcctgaagaccagaagtttgtctccaaatgttctgggtaatataaactccagggtgcttggacaatcctggaaaaggagaggtgtttactaacagtgattaatatggrtaaattgtcaactttggcaagaaacagcacagagctagataaagaaaaattgatttcaatttagacttagaaaactaaagcaacataagcatttgtgcacattcatacctaaggtaaacaaagtatcaagcatataactgtgaatatctactgacaaataatgtttttcagaaaactcccaggttttatagctctatatttcatttgtatgaagtattcatttctcagctctcagttcccttgaaaaattgggacttttctttgagcttaacattttatctctaacttaacctcctttgatcggatttactttt

SEQ ID NO: 301904 - DNA, 542 bp, Homo sapiens
tacttggagttgggggctattttcaaagctctcgcttcccaagactggcaggtagagagctaggtatgatgaatttgaatggtccgggtgagcctgggcatgtcagcagtgagaatgagtgcctgaagaccagaagtttgtctccaaatgttctgggtaatataaactccagggtgcttggacaatcctggaaaaggagaggtgtttactaacagtgattaatatggataaattgtcaactttggcaagaaacagcacagagctagataaagaaaaattgatttcaatttagacttagaaaamtaaagcaacataagcatttgtgcacattcatacctaaggtaaacaaagtatcaagcatataactgtgaatatctactgacaaataatgtttttcagaaaactcccaggttttatagctctatatttcatttgtatgaagtattcatttctcagctctcagttcccttgaaaaattgggacttttctttgagcttaacattttatctctaacttaacctcctttgatcggatttactttt

SEQ ID NO: 301905 - DNA, 648 bp, Homo sapiens
gcttgcctagtgggtgatccagatattcatacctgtaggggctgggatgtgattactatgcttttgctgtaattgcttgtttgtagttgaaactgggcaaaagacccagagatgtctgagtgggttctgagttccagatggtcttcttcttggcacattatgtagcagcaattctaccctctcattataatcaggattattgcccctggcagttcagcaactttttgctgtatctgtctactggcactagtggtccaaaaggacctaaaagttgtagcattaggtttagtggggcccttgtttcctctggtggaattgttttcctcctcacccctaggcaagaaccatggcctctagacacaccaaaactaacattgcaggaatggaagcctaaattccccccaagcaggcactggatatgatggtgagaggagacacttctactttactacttggttcctggacccatatgctctkcttattggggacaacaccatacagtgattactggctcaacttgaataatgaagctgtaatcccacaggttatcatttctaagatagtgtcttaattgaatccataagaagccattctaaaattctatataaaaagcagctttgaaatgatatagtatatgacaggatcagt

SEQ ID NO: 301906 - DNA, 559 bp, Homo sapiens
aaccttgtggtgatgcttaagtattttgattttggttctgtgatgatagacatgattaaattgcatagaagtatacacatacaacacatatacatacacacaaatgactgcatgtatacctagcaaaatctgattcagctgtatggatcatacgaatgttcatttcctggktttgatattgtactagagttaggcaagacatacattgggaaaggctaagtgaagagtgcatggaacctacctataaatgtctttgcatctttctgtgaatgtagaattatttcaatgtatattttttaagttaacgaatgaaacaaatctgctggatctataagatgcatacaaagttaagatcaaaactaaaacatccagaatattttacaaaaacttaatattttgaagttggcatatcaatttctcattaataattgaaacaagtaaactaattcaaccacatgtctgtctaaagctataatcaattgtatttatctataatcatttctccatttatttctcccttgactatgttgtgaattgttatcatagttgatttgtctat

SEQ ID NO: 301907 - DNA, 401 bp, Homo sapiens
gtatttagagcccactcagataatccaggaaaatctctctgtgtcaagacgcttaattcaatcttatctgcaamggttctttttccttttaagctgtgttccaaggatttggacctgatatatttgaatggctattattcagcttagtacagaagtctttaggtataccatggttttggttcttctcaacttttgcttagtgtaacattcaataaatacttgcatgtaggtgtattgttgtttttaattgttatttcattttagagtaatttagtagactctctcgcttatgttttcataggtctttttcaactgatcctttatttttaaaaatgggggtaaccaatgatgtttagaaattaaaacccatgcaacagcgaaatgcaaataaattctacaac

SEQ ID NO: 301908 - DNA, 401 bp, Homo sapiens
gtatttagagcccactcagataatccaggaaaatctctctgtgtcaagacgcttaattcaatcttatctgcaacggttctttttccttttaagctgtgttccaaggatttggacctgatatatttgaatggctattattcagcttagtacagaagtctttaggtataccatggttttggttcttctcaacttttgcttagtgtaacattcaataaatacttgcatgtaggtgtattgttgtttttaattgttatttcattttagagtaatttagtagactctctygcttatgttttcataggtctttttcaactgatcctttatttttaaaaatgggggtaaccaatgatgtttagaaattaaaacccatgcaacagcgaaatgcaaataaattctacaac

SEQ ID NO: 301909 - DNA, 536 bp, Homo sapiens
agttgaatttctatgtaaagttgctagtattctctatggctgtcaaatggatcatcataacgtcaaggttcgtttatataatttaaatgttatttattctgttacacataatatccccattgatttcaaaaaatattattttgctcacatctgatgtacatatcatgatcaaaatttaatttgaattttcctgaactggagaatagattttgtctgagtgctatagcacttacattcaattttaacttgtaattatcaatatgtttctattacattcagagaataataaggaatatgcctgcagcaagtttaatacctttaaattcctatagatcaaaatgaaagaacatktcccagcatgcttcatatttcaaaggttgagggctgttaacattgtacttttattaaaatttctattaatttttttgctgtcaatctgaatataaatttactttatcattttctatagaataaaaaatatagaaaaattactttattaccaactacttatctagccaaaaaaatggaaaaagaaa

SEQ ID NO: 301910 - DNA, 548 bp, Homo sapiens
taagttgcctgaccttaaggcacaaggtaagtcacaggtagcataagcttcatggaagactgttttccacagttttacatcctacacagcaccacatagagttgacttttgataaacatttccaaattaataagcaaaagaacctctgtatcaacatatatattgactcataaacatgggcagtaaaagaagcttatagttcagaacaatcagaagccacatggtctatatcatacccaatgtttttgggatatgtaaaagccagacacaaattatgaccccaagatacttgtaatatgtagaaaacattaataaatgaaatatatgtgtaaatatgatacaatawattgtaaatatgaaagggacaagtgattactcttaatgcttagaaaatcaatggatttactcagaggaaagtatcccagagtttgtgaattttaaaaagaaacaagtttacaagttcatttattgcaatattatatatgcaatacgaaaatattggaaactaccctaatgcccataaatagaagctacttgaaaaaactatg

SEQ ID NO: 301911 - DNA, 599 bp, Homo sapiens
ataataatgaaaaggactatgctaatataggttatgtttaggctgattgcaaagtgaaaacagtcaaagtgtagaaaaatatatgtgtgagcawgcatatgtatatatatcttatgtgtatatatatgtacatgcatacatgtacgtatatatatgtgtttatatacacacatacatatatagtatgtgcaatgagatacgaatacactcctattatatacacatattatatataacacatattatatatatgcgtgggagatagatatgcacacacacatttaatttcatttgtaaaaaaaatgaaaaagatgagaaagaaacactggcagtataaactaaaaactaataaaaacggtaggctctggtgtacgtaacgtggcaaaaagggatgaaagtgagacttttatgaatacactttgttacaaagttttgactttggaattgtacaaatgacttatacatctaaaaaaatgttaaaatattcaaaagcaacctctaaaagtcaaaaacaatttgaaataaatgaacctaattgtataccaaacttgtgacacaagcatagaaagattcatttcaagtgatcctagcagaaagca

SEQ ID NO: 301912 - DNA, 599 bp, Homo sapiens
ataataatgaaaaggactatgctaatataggttatgtttaggctgattgcaaagtgaaaacagtcaaagtgtagaaaaatatatgtgtgagcaagcatatgtatatatatcttatgtgtatatatatgtacatgcatacatgtacgtatatatatgtgtttatatacacacatacatatatagtatgtgcaatgagatacgaatacactcctattatatacacatattatatataacacatattatatatatgcgtgggagatagatatgcacacacacatttaatttcatttgtaaaaaaaatgaaaaagatgagaaagaaacactggcagtataaactaaaaactaataaaaacggtaggctctggtgtacgtaacgtggcaaaaagggatgaaagtgagacttttatgaatacactttgttacaaagttttgactttggaattgtacaaatgacttatacatctaaaaaaatgttaaaatattcaaaagcaacctctaaaagtcaaaaacaatttgaaataaatgaacctaattgtataccaaayttgtgacacaagcatagaaagattcatttcaagtgatcctagcagaaagca

SEQ ID NO: 301913 - DNA, 586 bp, Homo sapiens
ccaaactcattcttttaaaaggaactcactcccatgataatgaacccatacctgtgataatggcattatccatttagagctcttatggcctaaccactttttaaggtctcacttcttaatattgttacaatggtatttaaatttcaacatgagtttgggagggaacaagcattcaaattgtaacattctgccccaggcacccaaaactcatgttcttctcacatacaaaatacattcattccatcccaatagctccaaaagtgttaacttattccagcatcaagagtccaaagtctcatctctcaaatatgggtgagactcaaggcacaattcatcttgaggcaaatkccctccagctttgagcctctgaattcaaaacaaattatctacttccaaaatacactggtgcaacagggatagattcccattccaaaagggagaaataggcaagaagaaaggggcaacttcttccaagtaagttcaaaacccaacagggcaaacaatattaaatcttaagactctcgaataatcttccttgacatcatgtcccacactttggacacattggggtgagggttgggccccc

SEQ ID NO: 301914 - DNA, 553 bp, Homo sapiens
aatgcaagtaaaaatagcaatgaaaacacctattagaatggccaaaatccagaacactggcaacaccaaatgctgacaatgatgtggagctacagaaagtctaatcattgctcatataaatgcaaacagctactttggaaaacacttcggttattaccaaactaagcatactcttaccatatgatccagcagtcaggctccttggtaatttactcagagtttaamcttattctaagagttgaaaacctatgttcacacaaaaaactgtacacagatgtgtatgggagctttcttcataattgtcaaaacttggaagcaacctagatgtccttcagtaggtaaatggataaactgtggtgtatgcagacaatggaatattattcaacactaaaaagaattgagctatcaatccatgaaaagacataaatgcatattactaagtgaaagaaatgaatctgaaaaggctgcatactgtgtttccaactatatgatattctggaagagtttaaggagatggtaaaaagatccgtagttgctaggggttaggaaagaa

SEQ ID NO: 301915 - DNA, 654 bp, Homo sapiens
agcacagaggatttttagggcagtgaaactactccgtatgatatgataatggtagatacatgtcactatacatttgtctaaaccaataaaacaccaagagtgaaccctaatgtaaactatggtctttggttgataatgatgtgtcatgtaggttcatcaattgtaaaaaaatgtacaacattccccctctggtagagaaaattgataatgggggaggctaaatatgtgtgggggcaggagtatatgggaaatttctatacctttcattaattttttgtgaatctaaaactgctctaaaaattaaagtctgttttaaaaagataaaaacatgtttgattcttttaataataattcaaaatgactaatcactcattaaacctaaacatgttttcattggaaatttaaaatttgcctaatgcattattccactgtgttcactgttaagggagaaacagaaatatatactatatagatattttacaggataataagycattctaagacaacatctttattctcgcctattctagcaggttttgtgtgtgagagagttcaaagcctgagggacaaaaagaacccataaaattcagctatttaaagagaagtcatgtggatgaaatccaaagaaagctcttcttttgctaatataactag

SEQ ID NO: 301916 - DNA, 631 bp, Homo sapiens
cgtgaataatgtatgtatctcctttgagtctgtgatccatgcctaaaagaatcctagaggagaaatgcatttaacacttgcttttattacactgaacaatgagaaagaagtgagttagagaagctgaagatctgatgagctgtagatagggaataaattctatggaataaaaatgtcttccccacattttcgtttttatcaactgttttcaaaaaaataatttgtaaatgtaggaaacgtttgtaaaatgctaaaataattataagcttggaaaaaatcaacagttaactttcccatcctatgataaatcacaatttaaacaaaaacgactcaaagaactattttgtaagaataagtgataaagtctaagaattttatcttatggtaatctttaggtaataagggtctcccctgaacctctaaggctctctgaactaacatctgcaaagttaactataataaatatattaaagagacagcctagaacccagtgctgtgttaagttccytcttctgaaggatgctgtatctataactagttctgtttcatttgtttacagcatatagataatgttccaggatatattaatcttcacatttttttccaattatcgcttcagaacaaaggatat

SEQ ID NO: 301917 - DNA, 531 bp, Homo sapiens
cattttgtaactaattccaccatggaccagcatcaagttggggtgtttaatatcagaaagattgtcaagccttaagtgaaacttgtttacatcacagacagtttacacataacattgctttgaaaacctctgcactcagatagtagaacaatggggttttaaccagtatatatctgcaagcttgcacacctgaagttgattcatgcagatatccttgagacccattctggtggcattcaggaagcttactgtactgggaatattggggaggccttggcatcttcagcaccctaataggataagggtactcctgccaaggtcccatctgcaagtatgacayttacctctattactttgtgaaatgctattttgggaatatagtccatggctgtcattaccagattttgggacttcttggaccagtaatagccactcctcaggcttgggggccaataaggacttgtcaagttcatactggcaaataaagacactcaacaagcaatacaaaatataaaactaccatattttcta

SEQ ID NO: 301918 - DNA, 612 bp, Homo sapiens
tcagggggtcatcagtaaggctctcggccaccttaatttcccatgagacctactgcagggctgctgttatgttctgcaaagtgtcaaggataaaggtacaatattgtgttcctaaaagggcacaggtgcctttttgggtagcagttactatgtctaaggccatttggttttgcaatgctacctttctggtctgatcaacttcaccagttaacaagaggagggccactcaggtataattcagagcccgagtggtgtgctctgcaagagtaacttgtgcttctacagttatgacacctgctccagagacagtcattgtcaaggggtagaatcaccayggggctcgttgcacttgcaaaaactaagagcatagcacctcccagtcatgcaggcatctgggcaatgcagggagaacagtggcaggtacataaggccaccctcatgtacaatgtccagttccctagtaggtaaggcaactctgtgtccccacagacccataaactcccaggggccacaaagtccactgaagcccaaccttggtagggctgcatgttccaccacacctttggtgtagtgacacatgttatgttagcacaggctgtgacaggtacccat

SEQ ID NO: 301919 - DNA, 612 bp, Homo sapiens
tcagggggtcatcagtaaggctctcggccaccttaatttcccatgagacctactgcagggctgctgttatgttctgcaaagtgtcaaggataaaggtacaatattgtgttcctaaaagggcacaggtgcctttttgggtagcagttactatgtctaaggccatttggttttgcaatgctacctttctggtctgatcaacttcaccagttaacaagaggagggccactcaggtataattcagagcccgagtggtgtgctctgcaagagtaacttgtgcttctacagttatgacacctgctccagagacagtcattgtcaaggggtagaatcaccacggggctcgttgcacttgcaaaaactaagagcatagcacctcccagtcatgcaggcatctgggcaatgcagggagaacagtggcaggtacataaggccaccctcatgtacaatgtccagttccctrgtaggtaaggcaactctgtgtccccacagacccataaactcccaggggccacaaagtccactgaagcccaaccttggtagggctgcatgttccaccacacctttggtgtagtgacacatgttatgttagcacaggctgtgacaggtacccat

SEQ ID NO: 301920 - DNA, 535 bp, Homo sapiens
cctgttggggttgtggcaggacatgaggctagtgatgcatatgtccgcatagcaccagcttcaccacacgcactcagagtctgaattctctagccatggtttgtaataccaggccatgtaaaatgtccacccacataatgcattcaggtatgggggagacatacatagtgtataagtgagaagccaagcggccagtgctgaggtacagagatacaggtttcactttcactgaccagcctccataaccatcaatgtatgtagccttgcccagaaacttatccaagttcctataaacaaggctacaatctgcatcagtatctaccagcagcaacatctgctgtacattggtgggggaccagaggattgccaactccacatgtggcctctggtcatctcatgtccccgcaagcagagcacatcagccagttctctaatcaaacagaaaaggctctacatttctgtctggctgtagcaagtagtctatgagctggagcrcccaggcaagactgggtcacacagcaatgtccttctcctc

SEQ ID NO: 301921 - DNA, 411 bp, Homo sapiens
actatggaccccatacatgacaatggttccatataattgtaatggggctgccatatacagatgtacaacttttttatcttttatatcatatttttactgtactttttctatatttaagtattttttwaaattttattttattttaagttctgggatacatgtgcaggaagtgcagttttgttacacaggtaaatatgtgctgctacagtgatttgctgcacctatcaacccaccaactaggtattaagccccacatgcattgtgttaaaatagcctacattattcagcataataacacactgtgcaggtttgtagcttaggagcaataggctataccatacagcctatgtgtttagtaggccatagcaactaagtttatgtaaatacactctatgaagtttgtacaaaata

SEQ ID NO: 301922 - DNA, 558 bp, Homo sapiens
aactacataccaaataccagagttagtattaacctgttgtagtaaacgtatcatggtcattgcagcttggttaaactttcagtgatccactgtcatctgccatgatttgttgatttttgtgtatgtcacattggtgactcaagaggaaatgtgttgggaaatctttgttaaatctttgagagtggcattaatccctgccacttcatttgaatataatgtagtttctggtcttcaatcttggccaagttgaggggtagggagtagtcttaggggatttcatttggtcttttctcccatcatgacctttacaccacaggttaatgagccaaggtaagtgttcttcaaactgctgaatatataagctcattctgagatttctctctcatttaatgtgagacatcatttattccagacttccaggaaccactctatcagtgtgttaggattgactccagatgcttttgcsagaatattgaatcatgaacattaagtcatggaaaaatgtccctatatcactaaacgctcccttacaatgcctcatgttctacccagcacctt

SEQ ID NO: 301923 - DNA, 639 bp, Homo sapiens
gcaatgtttctctgtgtggtaatttgaaaaagtgttttaatgtatgattttacttaggtatatgaaattatatgcttaactaattaatacattctcataagttctcttaggctatttttacatcggatgaccaaattttgatcacttacataaatgaccmagacattcagtttgagcttttattttctcactctccaggttttctagttttggccttatttgtagtttaactctacatgggaaaacaaaccctttcaaaatagtttcttttcactctattcttggatttttttcccttcccagtgagtctttctgatagttttcagaaattcccatgtgcccaaataaacaggaggttattcttagtatattaatagttattatcatgggagaagaataatcttaatattaataagaataatttccactcactgttgaaataaatttatttttaaaaattgattcaatgactgatatttatagaatgttaattttttaaaaagggcaactctgtgtggagttcgaaagcttttggcatccttgcctgccctacacaataagaacccagaaaccattctgcacatcaaatggaaacccaatcttataaacctaaataataactcctagtactgatgctct

SEQ ID NO: 301924 - DNA, 588 bp, Homo sapiens
ggcaccaatagcagggagaagccaggcagcagaagcaggcactttcaagcctgcaaaagtagggagacttcttgggcccccatgagggcagggatgcctgagtctgcatctgtggtttgtagggttgtgtggggctcctgcctgctccatggagtgggaggctctggcctgcagtggaagtttgggcgactgcagtggcacccagggagctcctgccacacctctgaagggccactgccatcagaacaacttcaagtgacctaatatatgagtggttggagcccccaaataaagaggatggagaagaaaaatatttgaagaaataatggtcaaaaactrtccaaacttaattaggattatgaaaccacatatctaagaaattcagtaaattccaagcaaaataaacataaggaaagcaacatcaaagcaggtcataatcaaattggtcaaaaccagtgataatgagaacatcttaaaaaggagctaggaaaaaaagacatgttgcatacagaggaagataagtaaagattacatgggatttcttgttggaggctacaaaagcaagaagacagtgaagcaacatgttta

SEQ ID NO: 301925 - DNA, 577 bp, Homo sapiens
tatgggtcacctatttcttcaaacttacataagccaccctaaaagcctgttggcattgtcttccagaatgtttggccactccatattgataagccctttcttatcccatttcatcttccgtatctgttagttcacatcctcagggtcaagttctgtgatctcctgtatcttactgatatatgttggcagctcctttgggaaacagtccatttcttcttcagcaggttcagcacatttcccatctggttatattgtgacttagtcctagtttttggactggggccaggaaggtaagtaggggtaagtcacggtgggaaaggtgcatgcaaaaaasactttgcgatgcctttaattaggaagggaacagtggctttgtaacatggagcagtggtctactttgcaagtccagagagctcagaggaatatggggattgaagatttgaaagcatcaaccctgatgtccttatcaagtctcaagatcctactctttcttaactaggcttttgatcttggtataggtgattttccaggattgagaattcaactttctctgtagctctgctgaccttatgattaa

SEQ ID NO: 301926 - DNA, 603 bp, Homo sapiens
agtggtctactttgcaagtccagagagctcagaggaatatggggattgaagatttgaaagcatcaaccctgatgtccttatcaagtctcaagatcctactctttcttaactaggcttttgatcttggtataggtgattttccaggattgagaattcaactttctctgtagctctgctgaccttatgattaagtctcttgagcctgaatcctcggctttttctgtcctcctgcttcaagagatggaagtctgtttgtatactgccacaaaggttttctggctttcatactgtacttttaattcattgtaaatctctctgtctttcaacatctttctttaatrcccccatagctctcattaataactatcagatttcataccttttatatttactatttcctccagtctttcaaatgcctgacatactccaccaccagtgtatttccatcctctggtatccaattccagctggtcactggtgaaagttttagtaattgcgtagctacaccatgctgtgggctttaagtactcaacctactgccagtggcaggtctttatgaccaccagattagcaagagatgcgtctctaaaatcctattgtaga

SEQ ID NO: 301927 - DNA, 548 bp, Homo sapiens
tgacccttgattcaatatttaagacaactttaccatatattctggccttaaagaaattgtgtacattctttagagtataccttttccatctcagagaggaaaaatgtggagtacagaaagctggactgcaattcctcaagcagaatctgctggaaagagtcataatttcctgttatttttcactacaggcgatacatcataatcctaggaaattcatttaagaagtgataattagaatagtgtgatcatggaaatggggtgagttataaactgtagaatgctagctaataggtaaaactaaatcataggtaagaacacttccaaagaatgaagtggaccttgcctcaccaatcttagatgtttaatccacacaaaacaccataaacttttcccctgaacgacaatagaatggaaatgttatgatttctactttattctaaagtgactatagtgtagtctataattctagttaygtaaatatatagaccaatgtttccccaaatttagtgtgtatacacatcatcaaaggacttagtaaaaatgcaagt

SEQ ID NO: 301928 - DNA, 471 bp, Homo sapiens
gggagtgaggaagcactttgaactatcctgtaagcagtcaacaagggaaatccataaccttttggggtttttacctctctttggatgtaagggactgtagcacatttattttttttcctcgatggagttagggagattgaggagattgagagaggcatggacatctgctttcaaaaagtacttgaaagctacccatgcaacagtgtgacgggggacatccgtgccctgagagagccagcacattgcagtcaggctgatggaaaggagttagagaactakaaacaggtcaaaaccagcagctatgctggaggcccccgtctctgctcactggctttctgctttcagttagctgggaatctgattcaggatttggagaaagcctgagagtcatttccaaagtgtcattaactagctatctcagagtgcacttggtgcttagaggaacagatttcaattacaaggctccacctc

SEQ ID NO: 301929 - DNA, 587 bp, Homo sapiens
tgggtcactgctttgctgggtagaaggacccagaagagcccattgatgtttttatcatcccagaggtgaagaaaaaaacaattacccaggatttcgtcagtcattcagtacatgtgaaattaatgaagtaagaattggatagataatttcaacatgtgaattgtgtaaggatctccaagaagtaatctattcttcagacaggcccatgctttactgttctgtgtctacagttaaggactttaaaggaggtaattttaaaataacacttgctcagaaaacttacaccaggmcttgttgatgttttaaatagcataacaaacttgatctttagtaagtcaaaactccatcttgggtacttcaagcccctttgtttgtattccctatataattacctcatttttcattactctccaggtggaattgttacttctgttaagtatatttatttgtgtgttcattcaactttcaggctattcctggggatttacttccaccacccttgcttccgccgtgcttaattgacttttacctgccaggcccagctttaggtaatggagataaagcagtagaaaacaagttctctgccc

SEQ ID NO: 301930 - DNA, 587 bp, Homo sapiens
tgggtcactgctttgctgggtagaaggacccagaagagcccattgatgtttttatcatcccagaggtgaagaaaaaaacaattacccaggatttcgtcagtcattcagtacatgtgaaattaatgaagtaagaattggatagataatttcaacatgtgaattgtgtaaggatctccaagaagtaatctattcttcagacaggcccatgctttactgttctgtgtctacagttaaggactttaaaggaggtaattttaaaataacacttgctcagaaaacttacaccaggccttgttgatgttttaaatagcataacaaacttgatctttagtaagtcaaaactccatcttgggtacttcaagcccctttgtttgtattccctatataattacctcatttttcattactctccaggtggaattgttacttctgttaagtatatttatttgtgtgttcattcaactttcrggctattcctggggatttacttccaccacccttgcttccgccgtgcttaattgacttttacctgccaggcccagctttaggtaatggagataaagcagtagaaaacaagttctctgccc

SEQ ID NO: 301931 - DNA, 438 bp, Homo sapiens
gaacattatttacattatatttccaagtgccttcaggctgtttctatttttatgtgggctgcttcctctcctttgytttctgagtctaattaagcttgagaggtatcatgaaataggtcagacatatttggatttgaatttttgcttctctgtctctgtccctctctctttccctatatatatgcataaatttggaaattttaatgtactatctctgagcctcagtactctcagttaaaatggggatgatattaccatgtaaggtggtgatgaagattaaaatatgtgtgtatatgagtgtacttatgtatgtgtataaatatatacatattatacttttaaatggagagatatttatttaaaaccatgactggcatataatgggttctcattaagtatcatttgcaactcttcctagtcaattattcttattaaatg

SEQ ID NO: 301932 - DNA, 546 bp, Homo sapiens
aaaataaactcatactaacttgttataacatatctgaacaaaatgtagtttgaggcactragaagaagacatctgtttgaaaagaaccccatcagaacaacatgaattctgctaaaattaaagcaagaacgaatatcaaatttatggtgaagcttgggtggaagaatgtaaaattattggtgctttatgaaaagtttatggggacaatgcccccaggaaatcagcagtttaaaaatggataactcgttttaagaagggatgagatgatcttgaagacgaaatctgcagtgacagaccaactacatcaatttgagagtgaaaattcattttgtttaagccgtagttgagaaggactactgattaacagcagaaacaataaccagcatcaaagacatctcagctggttcagttaacacaattctagctgaaaaattaaagttgaacacacttcccattcaatgggtgtcaaaaaccattgtgctcagatgagttgcaggcaaggacagagctttcaatggaaattttaaataaatgggatcaagatcc

SEQ ID NO: 301933 - DNA, 546 bp, Homo sapiens
aaaataaactcatactaacttgttataacatatctgaacaaaatgtagtttgaggcactgagaagaagacatctgtttgaaaagaaccccatcagaacaacatgaattctgctaaaattaaagcaagaacgaatatcaaatttatggtgaagcttgggtggaagaatgtaaaattattggtgctttatgaaaagtttatggggacaatgcccccaggaaatcagcagtttaaaaatggataactcrttttaagaagggatgagatgatcttgaagacgaaatctgcagtgacagaccaactacatcaatttgagagtgaaaattcattttgtttaagccgtagttgagaaggactactgattaacagcagaaacaataaccagcatcaaagacatctcagctggttcagttaacacaattctagctgaaaaattaaagttgaacacacttcccattcaatgggtgtcaaaaaccattgtgctcagatgagttgcaggcaaggacagagctttcaatggaaattttaaataaatgggatcaagatcc

SEQ ID NO: 301934 - DNA, 593 bp, Homo sapiens
acttgaaagtattgaggagctagttcctaacaggtggtgagttcgtatgaagataccaccaagcacgaggacagatcagcaggaaagcatcatctggcagtcagtcagggaacagtggctggatatgctcacctggcagtggacaggtggaaaggcagcaggagagcaacaccattggctccgaygcttgacattaatcacattcctatggaaatgctgcaatttttacagcacacccgtggaagggaactgtcatattctattggatgttcacttacactttacttaagagtaaaacaaacaagctaaaccaacaaacagtttgtctcagcaacatcccaaaacagaatggaaataatattacgtttattgtggtggttcaaaccttgagaatacgataatgttttaaagcacaggcctctcttttgtggtaagaaaaattattgctgaaaaaatatcagctagtatatggcctgtttacttcttgaagagctactcttggttgtagacatgagtttaatctccttctgggtgcatctggggtgttgcttctaacaaagggattttgcttcttggtcgcagaagcagagtgg

SEQ ID NO: 301935 - DNA, 593 bp, Homo sapiens
acttgaaagtattgaggagctagttcctaacaggtggtgagttcgtatgaagataccaccaagcacgaggacagatcagcaggaaagcatcatctggcagtcagtcagggaacagtggctggatatgctcacctggcagtggacaggtggaaaggcagcaggagagcaacaccattggctccgatgcttgacattaatcacattcctatggaaatgctgcaatttttacagcacacccgtggaagggaactgtcatattctattggatgttcacttacactttacttaagagtaaaacaaacaagctaaaccaacaaacagtttgtctcagcaacatcccaaaacagaatggaaataatattacgtttattgtggtggttcaaaccttgagaatacgataaygttttaaagcacaggcctctcttttgtggtaagaaaaattattgctgaaaaaatatcagctagtatatggcctgtttacttcttgaagagctactcttggttgtagacatgagtttaatctccttctgggtgcatctggggtgttgcttctaacaaagggattttgcttcttggtcgcagaagcagagtgg

SEQ ID NO: 301936 - DNA, 603 bp, Homo sapiens
ttacgtttattgtggtggttcaaaccttgagaatacgataatgttttaaagcacaggcctctcttttgtggtaagaaaaattattgctgaaaaaatatcagctagtatatggcctgtttacttcttgaagagctactcttggttgtagacatgagtttaatctccttctgggtgcatctggggtgttgcttctaacaaagggattttgcttcttggtcgcagaagcagagtggtagctatgagtagaaggatagaatgttataattcgctcaggcaatgcaactctatggactgctcctaaactctggttcatacctcctttccaaggaggaagggtagattcacttgaagagctatggaaattagctggataagtatttaataaaagtttattaatgaatgaagtaatgagtgtcatttctacttcttacttcctggagtacctactgtcttcaggcttctatcccaatatccattatacttgttagtgaatgacaagtccattagcagatggtcccaagtttgctttgtagttcaacatcaccaaggaaatgggctcctttgattcttstgctttgtcatactcaataatttgtgagtatc

SEQ ID NO: 301937 - DNA, 570 bp, Homo sapiens
ttgttttgatttttagatctcacaaataagtgagaccatgtgatgtttgtctttctgtgcctggcttattgcacttaataatgatctcttgtttcatcgatgttgttgcaaatgacaggatctcattctttttttaatggttgaatagtactccattgtgtgtaagtaccacattttctgtattcattcatctgttgttagacacttaggttgcttctaaatcttggctgttgtgaatagtgctgcaataaatgtgtatactgatttcctttttttggggtgtataaccaagagtgggattgctggatcatatggtgggtcaatttttagttttttgtggaacttctaaactattctttatagtggttgtactattaataatttacgttcctattgacagtgcatgggggttcccttttctccacatccttgccagcatttsttattgcctatcttttggatataagccatattaactgaggtgagatgatatttcattgtagttttgatttgcatttctgtaatggtcaatgatgttgagcaatgtctcatatgcctgtttgccatttg

SEQ ID NO: 301938 - DNA, 474 bp, Homo sapiens
tttaccatttcattggccccaccaccaagttaagctactatcatcaacaaaaggcataatgttatctctttgctcgctctctcctggactggaaagctcccatcaaaacagagaagaaatgtcaaaaactataatcatctgaaagtacacggctgatttataaaccccacatgtgaacaatttcattgtaaaatccttctgaacactattatgtgctgaattgtgtctctcaaaaaaaaatactagagtcctaactcccagtacttcagaatgtgaccttatttggagatagggcttttacagaggtaataaagytaaaatgagatcattagggtgggccctaatccaatatgactggtggtgttcttataaaaagggaaatttggacacagagagaggtatacacatagaggaaatgccctgtgaagaaacacagggagaacatacccatctataagccaaggacaggggcct

SEQ ID NO: 301939 - DNA, 615 bp, Homo sapiens
ctatcaatattcttgtttaacatttcaactgtattcatgagattagcctttagataatgtctaggttgataatcgaaagtacactaattaataatgattgaattctgcttcttctggtgaatgagtcatgcttgatattattagagtttattacagtttatattttgaaagctcaccactctacaactatgcaaccttgaaagaaaggcaagtgtgggaggcaaagagtgagaaagctgtggaacctcatcactgggctgatgawgagggcatagtttatgtttagttctggtttcaagtatttgggttgcagtgttttcagaatgccatgatcaccaggggccattggaagaatcaattataaagtttatagttttcaagacatactcttagccacaatggaaaagagggttttgtttatgataaatcttgtcagcattaaaaagtaaattattttcaagataatttgactttaacacagaggaaaaaaatcccttaatttctcagaatcataattaattatttgtaatttttttcatacagagatgtttgaagtggtgccaaagagtaaatcaattgtcttctgttttgtttcttagtcactgaacagtttct

SEQ ID NO: 301940 - DNA, 581 bp, Homo sapiens
taccacattttccctttgctcctcaagttgttgggtaagaggggcttcctgttactgatcatctcagaattgctgtacgatcccctattcaggtttttatggtgtctaacatttttgtaatawgttcctgtgttaaaattcctctttaaactactaagtagactcactctatctaactggactttgtcaggtaaatgcagaaaagttgaaagcacacgtgtgtctttgacaccttaatttaatcattgttattgttttgttgtattcgctttataatgtaggtacatgtatgtgcgtttgtttttgtggtgaatcatttgaaaatgcagagaagatgacactgtacctctaaatcctctggcatgaacctcttaaagacaaaaacattatcctacttaaccatggtaatattgccttaccttagaaagctaacagacattttctaatatctaatagttgatcagtattctagcttttataattaacattttattttaaaagtgtatatcattatagctaaagacttcattttgaaagttatacattttttttttcaacaatgatgattactttatattcag

SEQ ID NO: 301941 - DNA, 581 bp, Homo sapiens
taccacattttccctttgctcctcaagttgttgggtaagaggggcttcctgttactgatcatctcagaattgctgtacgatcccctattcaggtttttatggtgtctaacatttttgtaataagttcctgtgttaaaattcctctttmaactactaagtagactcactctatctaactggactttgtcaggtaaatgcagaaaagttgaaagcacacgtgtgtctttgacaccttaatttaatcattgttattgttttgttgtattcgctttataatgtaggtacatgtatgtgcgtttgtttttgtggtgaatcatttgaaaatgcagagaagatgacactgtacctctaaatcctctggcatgaacctcttaaagacaaaaacattatcctacttaaccatggtaatattgccttaccttagaaagctaacagacattttctaatatctaatagttgatcagtattctagcttttataattaacattttattttaaaagtgtatatcattatagctaaagacttcattttgaaagttatacattttttttttcaacaatgatgattactttatattcag

SEQ ID NO: 301942 - DNA, 581 bp, Homo sapiens
taccacattttccctttgctcctcaagttgttgggtaagaggggcttcctgttactgatcatctcagaattgctgtacgatcccctattcaggtttttatggtgtctaacatttttgtaataagttcctgtgttaaaattcctctttaaactactaagtagactcactctatctaactggactttgtcaggtaaatgcagaaaagttgaaagcacacgtgtgtctttgacaccttaatttaatcattgttattgttttgttgtattmgctttataatgtaggtacatgtatgtgcgtttgtttttgtggtgaatcatttgaaaatgcagagaagatgacactgtacctctaaatcctctggcatgaacctcttaaagacaaaaacattatcctacttaaccatggtaatattgccttaccttagaaagctaacagacattttctaatatctaatagttgatcagtattctagcttttataattaacattttattttaaaagtgtatatcattatagctaaagacttcattttgaaagttatacattttttttttcaacaatgatgattactttatattcag

SEQ ID NO: 301943 - DNA, 508 bp, Homo sapiens
gacttcattttgaaagttatacattttttttttcaacaatgatgattactttatattcagaacacaatgagactggaaatgagtagctgacttctcatggctacaaagactgttggccttattgtgactcctcattcgtattaatagatttcagtaattttgtgagaaatatgctatagtaatttaatcctgtataaccatgtgtaagcactatctaaaaccaaactrtgtttttcaaaacacatgaacaaaaatatttcatgcatcatttttcaattaacttatttgaatacttttactgatttgtaaatttggtaatcatctcatcattagggtatacttttaccatttgaggccttcagttaaactgggtaaaatttctcataacttccacaattttcaagtcataactaaatgacatgaattgtaaaatgttatagccttcgtggttattttgacatatgtttctatcttgaaccattctgtttttaaatatgattccttgata

SEQ ID NO: 301944 - DNA, 481 bp, Homo sapiens
tatttgaattggacctttgcaagtgattaggattttgttgggctaagaaggaggaggcagaaagagcatgcaggcacaagaggagtgtttccaaagtccaggaggtttgataactcrcctgggactggaaggtaagttgatttggctggatccgcgtgaagtataacattattgcatgtaagccttgtcttagtttgggctgctataacaaagttccatataggcttggtggcttataaaccataggaatttatttcccacagttttggagactagaagtgcaagatcagggtgccgacatagtcaagttctggtgaggaccatcttccaggtcacagactgctgacttctggttacatcctcacatagcagaacgaggacccgttttctagggtctcctttatgcagatgctaatcatattcatgggggctccaccctcatgacctaatttccttccaaaggccacctcctaataccatt

SEQ ID NO: 301945 - DNA, 622 bp, Homo sapiens
gtggtagaggaaacagtggaatggaagaaaatgagaacaaatatggtatttcgcttaagggaaggaaaaagcttgttagaatatttatgtaaacagagattttgcttagaattgaaagaaattgaaatgtggatacatggagcatgaggcaacaaagaaactaggggcaggcagattaatacttgccagcaagtgagatgtgcttcctgtaagcattcaggatgattctctgatatttaatgagtcaacgaggtgtaaaaacaaagtctatgatattaatctgctatatatactaatttaccagtgatttttwaaaaaaatcaggctccaagtgagttaaatatttctacttctaaaatataaatcattccacatattatatgctttcatttaatagatatatctagaatagggaaaactatagagatagaaaacagattaatgattgtcttgggctgagagagtacagctaaggagtacagtgtttctttttttgaggggtgataaaaatgttctaaaattgattgtggtgctgcttgtaaaactctgtgaatatactaaatgccactgaattgtgcattttaagcaggtgattgtacggaatgtgaatatctcaataaaa

SEQ ID NO: 301946 - DNA, 539 bp, Homo sapiens
gtggtcaataaatggttgctgaataccacctttgaaaatcgtaaatcaccatgaaaatgtaacatattaattactcttggaaggcagcgactaagttttgtaactctttgttctgttcacagtgccttttacatgtcaagatggagagccaaggagtgtagtggaattaattcccactggtttgggaatgagacatgactgagtttgaatcccaactgtcagctcaggctaattacttactgctttaagcctcagttttcttcataaaatggggaggccataactcatagaggagttgtgagatccaaagcaaagaatgtaaagagcctagaaaaatcctggcatatttaaagtgcacaytacattttagtcatttttctctgtatttaacgaataaaaaatcactgtcttactcaaatgtagatatgaattattctcaaatcaagtatttaatttaagtatagattattttggaagcattatgataaaattattgttaaaaacattttcggggaagcaagtttgatatgtaagaaggt

SEQ ID NO: 301947 - DNA, 582 bp, Homo sapiens
gaggaaaactgaagctcaaagagataccaaatcactgtatttgcccaaatcacatggtgatgaagtatcagagaagggacttgaacaagatcttcctcagccttgaaccacactcttaactggcacactgcctcctttaaaaaatatttcatctttctttctttctttctttctttctttctttctttctttctttctttctttctttctttctttccattcccactgttactgaactaagttttgtaatctgtcacatttttattgctacacaaaatccttttgtgtatctmttctcctcccaacctatattttaaaaatttcatctaaaaaaaagtctaactgtaagtcatgccttagctcaaaatttttctatgacttctcattgcatgtagccaaaataccttagtatgacatttcacagtatctttactcatcatgccacctgctaaaatcttgcccatcctaaatgcttagtctctttatctttcgaatttttatctgaacatagaaaaatattacttagaaaaatattctttctccttggaagttgctatggcttgaatgtttgttctctccaaa

SEQ ID NO: 301948 - DNA, 554 bp, Homo sapiens
acaattgatgtaatatttctgaatggcaaagtttaatagacccagatttggcttgaggtcttaaatcgccagaatactcaactaagatgctaggtccaatcctgggcatctctcgctatatatttttttatatagatatataaatatatatatgtatatatatttatatatatgtgtgtatatgtatatgtatttatatatatgtgtgtgtatatatatatatatatatatatakagagagagagagagagagagagtcttgctttgtctcccaggccagagtgcagtggcacaatctcagctcactgcaacctccacctgcaaggttcaagcaattttcatgcctcagcctcccgagtagctaggattacaggcatgtgccaccacaccaagataattgttgtatttttagtagagacagggttttgccatgttggacaggctggtcttgaactcctggcctcaagtgatccacctgcctcagcttcccaaaatgctgggagaacaggcgtgagccgccatgcctgacttgtatttttgtacaattcaaaata

SEQ ID NO: 301949 - DNA, 613 bp, Homo sapiens
catttgggagcttactgaaatgcagaatttcgggtcccaccctaggcttatgagccagatccaggatttgcattttaacaagatcctactccccttcattcatgtgaaatttgatgcttgagaagcttcgcagttccctaaaatggaaatgcaatagtgaactggagccagatgctagagtttggattttactctgtagctaagaacagctyattgtatttcaagcaaagcattaagatgatcatattctgcttttagaagagttgagtagcaacagtgtgaagagaactgcagaagggtaggctgtgggagtgagatgatggagaaaactactgccatggcctaggcaaggcaagaggagaggatgaattatggcagtgatatggaaagtgggaatgctatttagcaaatagaattgcaaaacacgctggcatgtgggtgaggtagattgaggagactaggatgatatgcaagaatcttagtaactgggcagataaccatgagaaagtgcgtataagatgaacagatttttgtggaagaagatgaagaccttgaggtgtgtgaggtacatttaagaagaaatgttcagaagacattatgtgtatggggacag

SEQ ID NO: 301950 - DNA, 577 bp, Homo sapiens
taccagcactctggagggtaaagaccatccaatccacrttctccatgatttcgaaatgggctgagcacatctgcctctgtgggttaagcacacattctgaacttggccttgacctcattagcacatagtccaaatcactgaattcccattaatgactgaccagttgattcactgatgactaatttatccagtatttccttctttgctggcctcaggttggaattcataagccctctggagagaaaaaacaattattgaaactagattctctctttctttcttttcaacatcattatcaattcttcccagagagcactcctgagtaccacttttgagttcagcagacactgatttgaatccttcctttgccatacacttagcagcagtgcgacctgggataggttagtcaaagaaattgaccctgaagaaggctctgcatatgggggaagagtgtaaatttgttaatatgtacagaacacttggtgcaatgtctttcatgtggtaaacactaaaaaaaggtggctagcaatgctgttattatgattatactcacaataaccttggaataaaattacag

SEQ ID NO: 301951 - DNA, 533 bp, Homo sapiens
ggtctgctggtctgcagagactgcaaccacccctgcccatagaggctcaggcccagggagatccaaattctgtccctgagcctctggctggagttattggagatcctgcagggaagccctgcccagtgaggaaggatgggtcagggttagccctgaagaggcactccagctgcagactgccacagccaatgtgttcagttgtggggacaagtcttgggatgaagccatccagcttccttggctccagcagggraagagtgcagcctagagttatagaaattggtgcctcccttccccaaaccagggagcttagcatgccaggtagttgtgagtcccagtgctggcctcccctcctgcagttcagcaggcttaagaagattccagctgagaggctgtaagagtctgcacattccagggttaggatgctatgccctggtagtgtgggtttgcgagtggtctcttccaatctgtgtgtttcacacttccatggaaaaagtacaatttctccagctgggtagcatgctcactcactg

SEQ ID NO: 301952 - DNA, 592 bp, Homo sapiens
cctcccttccccaaaccagggagcttagcatgccaggtagttgtgagtcccagtgctggcctcccctcctgcagttcagcaggcttaagaagattccagctgagaggctgtaagagtctgcacattccagggttaggatgctatgccctggtagtgtgggtttgcgagtggtctcttccaatctgtgtgtttcacacttccatggaaaaagtacaatttctccagctgggtagcatgctcactcactgcctcccttggttgcggggaggaggttccacttcctcatgtggctgttgcagcacactgttcttccttctctcaatgggtcatgccagccttctagtcaattttgatgacagaacctggataccttggttgccggtgaaggattcatgcttatgttttttttccaatgggagcctctgaacgccccttcttctaktcggccatcttggccctgcccccttcttttcttaatagattccaaattaacccaagtgttccttgttcctttctgcccacacaagctagtggtctaattattttccaaatatgtacactggggctgaaatagtaacaacatgagctatct

SEQ ID NO: 301953 - DNA, 593 bp, Homo sapiens
tagtcactaaaatcaagccacaaatttcactctgtacttcctggtagccaaagcaaaaagcatttatcatttatagcatttatagcatttatcatgctataaatttccaatttccacaaaagaaaaagcataccaggttttcaggagaggcaaagcttttcagagacattaggttctaaaagaatttctcccggccgggcgcggtggctcacgcttgtaatcccagcactttgggaggccgaggcgggcggatcacgaggtcaggagatcgagaccatcctggctaacacggtgaaaccccatctctactaaaaatacaaaaaaaattagccgggcgtgatggtgggcgcctgtagtcccagctactcgggaggctgaggcaggagaatggcgtgaacccgggaggcggagcttgcagtgagccgagattgcaccactgcactcccgcctgggccacagagcgagactccgtctcaaacaaaaaaaamaaaaaaaaagaatttctcccatgaacttcttaaagggggcattgaatctgtagctagtcttcaacaatataaacccttataagaattacagtaacaagttatata

SEQ ID NO: 301954 - DNA, 613 bp, Homo sapiens
gatactaaacaaaatcaacctcttcttcagctggccaattgtgaatctcccaggcacaatgactgtgtggctgcctcaaaaccgtgaaaatcattacgacaatgaagaattcacataatctatgaacagcacagcaactcacgcaactcatcggcactactcacatctccaacccccacacacctagaaacatctcctggtacacaacactgtgcagcagccctcaaacaggctggagtggagagggagrgataccagtctcttaaagccaactgcttcatggcagttgagaacaaacaatactgtgccattagacttttcagagcctaagctagtgtgattggcagctgagtgattttgggattgcagagtatggggtcacatacctgactgcacttcagaaccaagttaatacctttcattgttcactgcctccagttccccctcgatcaggggctcttatcaagcaccttcatcacgatctcataggtcccctggtaaaaatgcagattcctgtggcccactgaaaataaacatctgcggagtagcctgacaaactatttttaaacactacccaggtcatctttatacacatttaagtttgaggacctct

SEQ ID NO: 301955 - DNA, 606 bp, Homo sapiens
ctaactctaagcttcttgattttggttcaagcacagaaatatcaagacagatccaagaaatgctgtcattgaatgctaacctgcggcggcaaagcccaactgaggaagcggatgaggctcccactgcactcctgcctgagatcctatcatggagctggggacaggggatggtgccaagggggaagtctgcacagctctccccaggctgggcctgtttctggggaaaagaacttgcagccactcaaaacacagtttagaagaatgaaaatgttcctcaccggaggcaagactcagccattcataggccctgtggcccccagaggcaggaaagcacgggggagcaataaccatgtgaaatcaagtcccaccccagagccagtgaggcggtttactgaacttcttgcatctttaatgctctgtgaggyacagggaagctgaccgctacccttcttgcccaatgctttggaacaaggaagaacaaggaaggaagggcagggaggaaaagacagctgtctcgttagccttcagattcaccaaaggcaaggactcactcaagagcctcccaagttgcaaggacagcaaatcagcaaggaggccagaaagcaa

SEQ ID NO: 301956 - DNA, 580 bp, Homo sapiens
aatccttaatctaagatgtgatggattctttagattagtaagagcttgccgtctcgccctgatctgcttcttgagcaagtttctttgtctctccaggcctaggtttccacagtttaaaaccaggaagggttgaaataggatgatctcaagtcccttccagctctgaaattctaagtagggccagaaagtcatgtttgttacaacgtttccgcaatattgtgtgagcgaatatttgtgttgccacatcaccacttcctaacagtagatgctgaattagtttaacaccctaggatattggtatgttatgtaacaagactggtggctactgtttctgtttaaataaaagataacgttagctaaagaagactagcctgatacagtggtttcagagggagctctgaggaccccttcaggcctgctgtgtgtatgcaggggactggaagaggccccagaccttagggtcaggagacaataaaaccagccagccggccaayaacaaaaaaagtgttaagcctgatcatgcctcctcccagtcaaaaagagccaagcattttgagctggtaaaggagaagggagaggt

SEQ ID NO: 301957 - DNA, 479 bp, Homo sapiens
tagaattagaaatatatgtgatgctgggcacggtggctcacgcctgtaatcccaccactttgggagcccaggcgggcagatcacctgaggtcaggagttcaaaaccagtctggccaacatggtgaaaccctgtctctactaaaaatmcaaaaaaaaaaaaaaaaaaaaaaattagatgggcatggtggtgcatgcctgtaatcccagctgcttgggaggctgaggcaggagaatcgcttgaacctgggaggtggaggttgcagtgagcggagattgcaccattgcactccaggctggttgacaagagaaaaaactccatctcaaaaaaagaaagaaaaaaagaaatatatttgaaactgaaaaaaaatatttggagcacgtatgacagactaaggactaatttttctgaaggcaaagatatgaagtgacagttcatggtagaagaaaaacaaataacttgtaaagatatgaaaaaaagt

SEQ ID NO: 301958 - DNA, 508 bp, Homo sapiens
tttacaagcaactgtttcttttatatatatccacttgaaaatctctttataaagggtcatctctttcgcacacactgatccaccagtaaaaatgcactctagcctatcctcgtgaactcaggaagaacactcagtcaggttcagctgacagcttgtgggtatcgagtttggctgtgtttggttcatgtcaaatcaatccatcagcagcctgagactaatgtcccgggtcccgaggggtctgggtctactccaaggtggccaaggtcatatgacctagggtggcacaggggagatggagctagagagtctgctggctggacttcagttccaaacgaaggcagctgctggctgaggtatagaacttcatgccttttcctttctcacgtccccttaccctgtctctactcccmacaccccgcccccaaacttcaccaacaaactccaattaccccaacccacctggggtgaatgaatgaggtctttggttatgctctaagtcaataatttg

SEQ ID NO: 301959 - DNA, 508 bp, Homo sapiens
tttacaagcaactgtttcttttatatatatccacttgaaaatctctttataaagggtcatctctttcgcacacactgatccaccagtaaaaatgcactctagcctatcctcgtgaactcaggaagaacactcagtcaggttcagctgacagcttgtgggtatcgagtttggctgtgtttggttcatgtcaaatcaatccatcagcagcctgagactaatgtcccgggtcccgaggggtctgggtctactccaaggtggccaaggtcatatgacctagggtggcacaggggagatggagctagagagtctgctggctggacttcagttccaaacgaaggcagctgctggctgaggtatagaacttcatgccttttcctttctcacgtccccttaccctgtctctactcccaacaccccgcccccaaacttcaccaacaaactccaattmccccaacccacctggggtgaatgaatgaggtctttggttatgctctaagtcaataatttg

SEQ ID NO: 301960 - DNA, 549 bp, Homo sapiens
ttgcttgtcagtttgattccttctgtgacacttcgggtgggggggaatcttttgaaagaaaccactttctttatcttgaaagaacaaaaccaaaagagaatctctgataacctttgtttccaaagcactcagcaaagctgctgagaggagggtttgacctggtgacccagagtattatctctggggtaagggctgcccagccaaggggagctttagctgtttccctcctctycctggcttattgctggtggctggacagtgagttggaggaggagggggagaggaagagaggaggagatggctctgccagctgccgctagaaacaacaacatctaatcagtccataaactccctcccctccagactacagtgatgtcaagaggtggagcaggtggcactagttctcccctcccctttagcccctgacacctttgggtctttgaaggggtaaattatgatcatcaaaaggaaaattctctatctttgggggcccaggagctccttttccttcttgttagggttggctccaccaagagcaattttctgttt

SEQ ID NO: 301961 - DNA, 617 bp, Homo sapiens
tataatgaaggtttacttcaagaaatttgtaaatcttctttcatgtatagttcaaatctatgtctaagggactcatccacggtgaaaacagaaagcagctattgatcatccttcataccattgtgtttcttgtgcttggaagcttttatttttttatttttaaattcctacctttcatttttctcccttcttagataattaatcccagtttctcaagtttagtcctttcttttaaatcttgggcctttgaattctagtaaagtgctttgcctcttgaggttacactttctttttcagggaagttacagaaagattacattgttcacgtgaaagttgttaaaaggtttaacagtctctttgycttttatgtccatttctaggttcctgtcttgttgagaacagctatactgttttgtcaattaccttgtttgtttttccaaaaataaatttacattctcattgagttttcaggaaagttgtttggagtacagggccaggatgaagacaaggcaagaaggccctcatcctgaccctgctagggtggtttaaatatggttttgaccagaggcctggagatgaaatacataaccctctgggttctctcttgcttcatggat

SEQ ID NO: 301962 - DNA, 571 bp, Homo sapiens
tcatgtaaatgggatcatacagtatggaaccttacgtcaggcttcgttttcttagcaaattgccttttagatttatccatggtgttgcatgtattgagagttcatttttatagatgattaatagttaattttatggaggtaccatagtttgtttatccattcagtcactgaaggacatttgtgttgtttccagtttttggcaattacagtgaaagctggtatgaatataagcttacaggtttgagttcaygcaggtgtttgagcctatgttctcatttctctagggtaaatgaaaggagtgggatatctggatcgcatgataagagtatgtttaactttataacaaactactaactaattttccagagctgctatactgttttccattcccatcagcaatatatgagagttccagcctcacctgtttttgttcacttggctagtctttaagtttctctgtaatgttgatggtggcttgttgctgtatgtgtttgataaatattcattgtgagcttttgtggctgaaatctatttttacttatttggattgtgatctgttgtactttctgta

SEQ ID NO: 301963 - DNA, 619 bp, Homo sapiens
tgtacaccttggcagcctggatcctggtgaatgctccgtatgctgcatgcgcccttacccaatctgccttccctattgcggaagaaaaaaaaattaggaggacactttattcccaatctacatctttaagttctctaaagtgtaagtaccgagggattctttattctgggaaagaggataaataatttgtgcaatgattattttataagacgtaaagacatgttctcaaactattatctaacatgaaaggctcaaaacagatctggttttctgatttttttcataacggacaaaactctttcaagctaaacttttcataaacaaatgttccaattttcttttctcaaaaaatttcccttcctccaccaaaacaaataagcaaataaacttgctcatggygctacccattatacaacatcaacacttatgagcaggccaacagtggggaagatcatgaaagaagataatttaaaacatccccccaaaatgagtttaagcataatgagggttctgaaaaaaaaaaatccttggctttgttgttaatgtgtgcattttgtattatgtacagggattcctttgggtggcttcgacaatgcaaagccagtgctgaattttaaag

SEQ ID NO: 301964 - DNA, 548 bp, Homo sapiens
catgtggatatggaatgactttatatgaaaaaacaaggtacagaatacaatatgcataatattttactatgttttcaaaaacatatatatgtatatatatatatgttctgtatcagcatgtatatatatacacacacagcatacacacacacacacacacacacacacactcacacatatgtatatgcatttgcttatatatgcttgagttaaccctggaaggatagataagaaactggaaacactgtggttggcagacagagtgggagggggagttttcaatgtatatctcttagtaccttgtgaatttagtrctgtatatcttagtccatttggctgctataacaaagcatcttagactgggtaaattataaataatataagtttatttcttacaattctagaggctgggaagtccaagaacaagtcaccagcagattcagtgtctggtgagggcttcctacttcaaagacagcacctcttcctgtatacttacatggcagaagggacttatgctgtattctcacatggcagaaaggcaaaaaggg

SEQ ID NO: 301965 - DNA, 468 bp, Homo sapiens
ataggagaggtattataaggacacctaggtgtctcctggaatctaaggaagtgttaracaatcaaacttcaggaagggcagagaacagggcttgaggaaaatggggaactcatgaattcctctctccccatctctaggttttgtttctgcatttctgccttgttcttctctttcactgctgaaaggttttctccgaatcccaagccaaatggaatgaagattctggattagtttacgcagaagaagcaagtagagataggaagagggcaatttttttgcaccaaacctctactggggtcaagctcacaaaaatgtaaatgtagtgcatgcacatagaagccagagcctccgcctggaaagagggcatgactggggccctggttaaaagagaagtctgagctggtgcagaatcaaattacaagagatgccaggggttcactgcggaagtgatggtttcacttttcatgg

SEQ ID NO: 301966 - DNA, 592 bp, Homo sapiens
tcccacttgtcctgagttggactgatcagtcattggatgtggccaccccagcaaggaaggtgatcttggaccaggcagctctctgcaactgaggcagtccctgaggtcccaccactgaaggtgaactgctgacagcactaccatagagtctttatgttattctctacataagatcatgtcatctgctaacagggacaatttgacttcctcctttccaattcggatgccctttatttctttctcttgcataattgctctggctaggacttccagtactatgttgaataagagtggtaagaataagcatctttgtcttgttctggttcttagaggaaaagctcacaagtattttattgtgtgaatatctattatttaactcttttcctattgatggatatttggattcctgagatcatcagatattcttttgagaagtaaaatcctttacatacaagcaaatgctgagagattttgtcaccaccaggcctcccctacaagagctcctgaaggaagcactaaacatggaaaggaacaacyggtaccagccactgcaaaaacatgccgaattgtaaagaccattgaggctaggaag

SEQ ID NO: 301967 - DNA, 512 bp, Homo sapiens
ctattttctcccactgtgctgtgttccaggcaggctccttttatctgacaattcacgtccctgagtttggagaaaatttttttttattctttcagtgataactttcccacctctgctttcagcattcttttctataactcacatttttcaagtgttgytaccactttgtctggttgtttaattttttcacgtttctttcctcactatttttcttctttttgtccttgaatttcacccctgagtttttaatttctgctatcattttacttaactggacagaatctctagttagatgttgaatagaggcagtaataatccttgttttgttcttgatttaatttttaaggtaatgttctcatgtttcagatttaggtattaggttgattttaggtgtttggtaaataaattttattaagtatctgttattcctagattgttaggcaattctattccaaataggcattgaattacattgaatgcttgtactgtatttgttaagataatttgttttt

SEQ ID NO: 301968 - DNA, 581 bp, Homo sapiens
aggttgattttaggtgtttggtaaataaattttattaagtatctgttattcctagattgttaggcaattctattccaaataggcattgaattacattgaatgcttgtactgtatttgttaagataatttgttttttctgtttttatcagtgaataaaaataatggattttctaaaatttaattaactttaccttccygggataagcacagcttagttttaatgttttctgtctcttcattgctggattcagtttgtatatattttgtttaggtttttatatctgcattggtgagtgaaattgttctgtagtattctttgcttatacttttctgtttttgctatggaggttgtatataacacagctctcaaagcagttggagagctagagagttttctttctatttctattccctggaagaatgtttataatattggaatgatttctttcttaaatgcttagtagaacttgacaacaaaataatcggggcatgatgcttttacatattgattttattccctcattgtttataggactactcaagattgctatttttctttgagtcagttagggttggttata

SEQ ID NO: 301969 - DNA, 581 bp, Homo sapiens
aggttgattttaggtgtttggtaaataaattttattaagtatctgttattcctagattgttaggcaattctattccaaataggcattgaattacattgaatgcttgtactgtatttgttaagataatttgttttttctgtttttatcagtgaataaaaataatggattttctaaaatttaattaactttaccttcccgggataagcacagcttagttttaatgttttctgtctcttcattgctggattcagtttgtatatattttgtttaggtttttatatctgcattggtgagtgaaattgttctgtagtattctttgcttatacttttctgtttttgctatggaggttgtatataacacagctctcaaagcagttggagagctagagagttttctttctatttctattccctggaagaatgtttataatattggaatgatttctttcttaaatgcttagtagaacttgacaacaaaataatcggggcatgaygcttttacatattgattttattccctcattgtttataggactactcaagattgctatttttctttgagtcagttagggttggttata

SEQ ID NO: 301970 - DNA, 500 bp, Homo sapiens
tgggaggattgcttgagcccaggagtttgagaccagcctgggtaacatagcgagacccccgtctctacaaaaaattgaaaaatcagttgggtgtggtggtttgcatctgtggtcccaactactcaggaggctgcagtgagctgagattgccccactgcactccagcctgggtgacagagtgagaccctgtctcaaaaaaaaaaaaaaaaaaaaaaaaaatagaaaatgaaaatgraaaaaatttgtttgtgaagaaagacccctgaaaagaaagtcaactgccagtattaattatgaaagcaaaaaaagaaaagtctataaaagtaatggaatgtgaataaaggtagaagggatggacacacttttgcatatattagcctcagtaatgaagagccaggacacattcaaacctgtgccagactgtctacggaaaggatacaagtaaattaaagaagacaacccagtaaactaatttagtcttgcttccattaaattttcga

SEQ ID NO: 301971 - DNA, 645 bp, Homo sapiens
aatctattaatatgataagccactataacacagcaaagaagaaaaatcttgtatccatgaagatacttgaaaaagcttgacagaaaaagctgatttaaaaaaacaaactaaagaaaatagaaactgatggatacttcattaacatcaatattatatacacaaatataaatattacaccctaatatgccatagtacgtatgatatgtgacatatgtatttcaattacacacaagcacatatatacagtttgygtgtatacacacacacacacacacacacacacacacacacactcttatgcctcagtcttctcggtccgaaagtcaggattttacttaacagggaaaaactacatatcttcccactaagatcaagaacaaggtattaataaaatgctcattatctacaattagagaagagaaaacaattagaggaatataactaagaaaaagtaaaagtgcttgggcacggtggctcacgcctgtaatcccaacactttagaaggccgaggcgggcagatcacctgaggtcaggagttcaagaccagcctggtcaacatggtgaaaccctatctctactaaaaatccaaaaacaacaacaaaattagttgtagtattaaggtcaacttaataatacagagatacc

SEQ ID NO: 301972 - DNA, 645 bp, Homo sapiens
aatctattaatatgataagccactataacacagcaaagaagaaaaatcttgtatccatgaagatacttgaaaaagcttgacagaaaaagctgatttaaaaaaacaaactaaagaaaatagaaactgatggatacttcattaacatcaatattatatacacaaatataaatattacaccctaatatgccatagtacgtatgatatgtgacatatgtatttcaattacacacaagcacatatatacagtttgcgtgtatacacacacacacacacacacacacacacacacacactcttatgcctcagtcttctcggtccgaaagtcaggattttacttaacagggaaaaactacatatcttcccactaagatcaagaacaaggtattaataaaatgctcattatctacaattagagaagagaaaacaattagaggaatataactaagaaaaagtaaaagtgcttgggcacrgtggctcacgcctgtaatcccaacactttagaaggccgaggcgggcagatcacctgaggtcaggagttcaagaccagcctggtcaacatggtgaaaccctatctctactaaaaatccaaaaacaacaacaaaattagttgtagtattaaggtcaacttaataatacagagatacc

SEQ ID NO: 301973 - DNA, 645 bp, Homo sapiens
aatctattaatatgataagccactataacacagcaaagaagaaaaatcttgtatccatgaagatacttgaaaaagcttgacagaaaaagctgatttaaaaaaacaaactaaagaaaatagaaactgatggatacttcattaacatcaatattatatacacaaatataaatattacaccctaatatgccatagtacgtatgatatgtgacatatgtatttcaattacacacaagcacatatatacagtttgcgtgtatacacacacacacacacacacacacacacacacacactcttatgcctcagtcttctcggtccgaaagtcaggattttacttaacagggaaaaactacatatcttcccactaagatcaagaacaaggtattaataaaatgctcattatctacaattagagaagagaaaacaattagaggaatataactaagaaaaagtaaaagtgcttgggcacggtggctcacgcctgtaatcccaacactttagaaggccgaggcgggcagatcacctgaggtcaggagttcaagaccagcctggtcaacatggtgaaaccctatctctactaaaaatccaaaaacaacracaaaattagttgtagtattaaggtcaacttaataatacagagatacc

SEQ ID NO: 301974 - DNA, 595 bp, Homo sapiens
agtctacatagtgataagggaagacactgatgatgaccccaaggggtaccaggcttaaaatctggattgagagagagagagccctgaaaaaggaatagaaagaatcctcagagcaggaacaccggctgagtgtggcctcccggaaatcagagagacagactgaaggaggagatcacgtgtgtgaaatgtctctgaggactgaaaagtgttaaatgtagcagtaagaactgattatcttggcaagagcaggtttaggggagtatggaaggtggaagccaactgcaggtgaggaagccgagtttatgttttattagttgatgggaaggagggagggaacaggctgggagattgtctgtcctttgtagttasgatccagcagctcagcttgggtccctgttttagatttgggcttaatttttttttttttggtagagacagggtctcactattttgtccaggctggactcaaactcctggcctcaagtgatcctcccgtctcggcctcccaaagtgctgggattccaggcatgagccactgttcccggccagatttgggttttgatgatcctgaggctcttctctgttgcaacacaga

SEQ ID NO: 301975 - DNA, 552 bp, Homo sapiens
tgtgaagaagggaaattagcacatgctggagagatggtaaccacttaatggcactgcagcgagacattctgcactcgctcaggaccatgagagttgaaaagggcatgagtgattcagtgtcatttggtttcgtgtgtatccctagtacccatttctcactttgggaagcactggattcgatcatagacctggaaggaaccttaaagattacctgacccccccatcattttgtagatggatgagctgagcctgatgtggaggtggctgctcgtgcccttgacccagccatgtgaagacctgtgccctcgattctcaaaatgcgggagtcgaaagacagacagacagatagatagatagatagatatgcaggagttgaaaaataggcaggcaggtagatagacagagagatagatatgcaggaattgaaagatagatagatagatagatagatagatagatagatagatagatagayagacagataagacccatgcctgactatgcttgtgtagtgttacagaaagcagctgagacatggagagtgccagcagt

SEQ ID NO: 301976 - DNA, 544 bp, Homo sapiens
agaataacagattcatccagggatgaaaataaatgtctccaacatgttctgcatccacttggccgcccccgccttttgttrtcaccccctactccatctcatcaatttgtcttgagaataattgtgagaaaaagtagcaactgccctaacacatgaatttgcaagatgctctttactgcgttctctcatttgctcctcacgccaggaaggtcatctaagaaacaaactgtttctcagttgaaagtccagaggggaaagctgacaggctcagctaggatcaagtgcccaccatggccccatcagcagcttctgtgagatggacacaggtgcctggtccaacctcctctgctgcggcaaccacgtgcagacctgcactgctgtcgggaggacagatgttaacaaatcagggtcattcttgtcccctgtaggaaagcctgtgggagactgagccgtcactagaacatgtttgctaaatagagatgcagagaaaagggagcttgggggccagaggccggcttggttgcagggcggagggagtgcaaag

SEQ ID NO: 301977 - DNA, 544 bp, Homo sapiens
agaataacagattcatccagggatgaaaataaatgtctccaacatgttctgcatccacttggccgcccccgccttttgttgtcaccccctactccatctcatcartttgtcttgagaataattgtgagaaaaagtagcaactgccctaacacatgaatttgcaagatgctctttactgcgttctctcatttgctcctcacgccaggaaggtcatctaagaaacaaactgtttctcagttgaaagtccagaggggaaagctgacaggctcagctaggatcaagtgcccaccatggccccatcagcagcttctgtgagatggacacaggtgcctggtccaacctcctctgctgcggcaaccacgtgcagacctgcactgctgtcgggaggacagatgttaacaaatcagggtcattcttgtcccctgtaggaaagcctgtgggagactgagccgtcactagaacatgtttgctaaatagagatgcagagaaaagggagcttgggggccagaggccggcttggttgcagggcggagggagtgcaaag

SEQ ID NO: 301978 - DNA, 544 bp, Homo sapiens
agaataacagattcatccagggatgaaaataaatgtctccaacatgttctgcatccacttggccgcccccgccttttgttgtcaccccctactccatctcatcaatttgtcttgagaataattgtgagaaaaagtagcaactgccctaacacatgaatttgcaagatgctctttactgcgttctctcatttgctcctcacrccaggaaggtcatctaagaaacaaactgtttctcagttgaaagtccagaggggaaagctgacaggctcagctaggatcaagtgcccaccatggccccatcagcagcttctgtgagatggacacaggtgcctggtccaacctcctctgctgcggcaaccacgtgcagacctgcactgctgtcgggaggacagatgttaacaaatcagggtcattcttgtcccctgtaggaaagcctgtgggagactgagccgtcactagaacatgtttgctaaatagagatgcagagaaaagggagcttgggggccagaggccggcttggttgcagggcggagggagtgcaaag

SEQ ID NO: 301979 - DNA, 544 bp, Homo sapiens
agaataacagattcatccagggatgaaaataaatgtctccaacatgttctgcatccacttggccgcccccgccttttgttgtcaccccctactccatctcatcaatttgtcttgagaataattgtgagaaaaagtagcaactgccctaacacatgaatttgcaagatgctctttactgcgttctctcatttgctcctcacgccaggaargtcatctaagaaacaaactgtttctcagttgaaagtccagaggggaaagctgacaggctcagctaggatcaagtgcccaccatggccccatcagcagcttctgtgagatggacacaggtgcctggtccaacctcctctgctgcggcaaccacgtgcagacctgcactgctgtcgggaggacagatgttaacaaatcagggtcattcttgtcccctgtaggaaagcctgtgggagactgagccgtcactagaacatgtttgctaaatagagatgcagagaaaagggagcttgggggccagaggccggcttggttgcagggcggagggagtgcaaag

SEQ ID NO: 301980 - DNA, 635 bp, Homo sapiens
ttttagcttttattaacagattaatttaggcacagtaatattttaactagtttgtttgagcataagtgattcctgaattgaatatcattagaacacaagcagttcagtgttctacttaaggagtgggagggggaaacttatgaagtatttaaagaagcaagacaaataaaatacttgactggaacaagtgggaagttcttagttagaggtgagttggcggtttctgattggctaagcttaagttttgtttttactgtttacggtgagttgagtttccatttgctcgtataggaaccatctttgctgaaggcctcccaattcattattactgttttttgagatggagtgtcactcttgtcacccaggctggaatgcagtggtgcaatcttggctcactgcaacctccgcctcccgggttcaagcaattctcctgtctcagcctcctgagtagctyggattacaggcacccgccaccacgcctggctaatttttgtattttcagtagagacggggtttcaccatgctggccaggctggtctcaaactcctgacctcaagtgatctgcctgcctcagcctcccaaagtgctgggattacaggcatgagccagcgtgcccagtcccaattattttagca

SEQ ID NO: 301981 - DNA, 635 bp, Homo sapiens
ttttagcttttattaacagattaatttaggcacagtaatattttaactagtttgtttgagcataagtgattcctgaattgaatatcattagaacacaagcagttcagtgttctacttaaggagtgggagggggaaacttatgaagtatttaaagaagcaagacaaataaaatacttgactggaacaagtgggaagttcttagttagaggtgagttggcggtttctgattggctaagcttaagttttgtttttactgtttacggtgagttgagtttccatttgctcgtataggaaccatctttgctgaaggcctcccaattcattattactgttttttgagatggagtgtcactcttgtcacccaggctggaatgcagtggtgcaatcttggctcactgcaacctccgcctcccgggttcaagcaattctcctgtctcagcctcctgagtagcttggattacaggcacccrccaccacgcctggctaatttttgtattttcagtagagacggggtttcaccatgctggccaggctggtctcaaactcctgacctcaagtgatctgcctgcctcagcctcccaaagtgctgggattacaggcatgagccagcgtgcccagtcccaattattttagca

SEQ ID NO: 301982 - DNA, 562 bp, Homo sapiens
  misc_feature (1)...(562): n = A,T,C or G
tggaacttgctggcattagtcctagagaaagaaggatgaggctgagcatggtggctcatgcctataatcccagcactttgggaggccgaggcggatggatcacgagatcaggggtttgagaccagcctggccaacatggtgaaaccccgtctctactaaaaatacaaaaattagccgggtgtggtggcatgcacctgtaatcccagctactctggaggctgaggtaggagaatcacttgaacctgggaggcggaggttgcagtgagcctagactatgccattgcactccagcctgggtgacagagtaagactctgtctcaaaaaaaaaaaaaaaaatagagtgagagrgagaaagaaggactattggatatacaaatttggatttagccagagttatcctgggtagggaagagtcagacagacatacccataggcacgcccacactcatatatagcctcctgtgtccaaaaaagtgatggcaaaacagacactgtgatgctgtagtgaccaagggattaaaatttccctaatctcttgatgtttctgcangntcaattttta

SEQ ID NO: 301983 - DNA, 575 bp, Homo sapiens
tccctctgttcccctgctttgccatccgcaaagttggcttcatccacatggtagccccgtggcgtaggttctcccctcacatttgtaaacatggttgcagtagttccagacttcacagcagcatcccacactgttcaaggaaagacattgttcaggctactcytgaagaataaggaagcatctgtttcccagaagacatctactggtttcttgttggctctgattgtttaatgtgcccattagcttgaacaagttaagaaccacccctgaaatggggtaggggccaattccacccaaatggcatggataaaatggggaagttgtagcttttgaaaggaagtttaaggaaacttctagaaagaaggggaatggaggctaggcaataaattatggaagtcctccacacctcctgaagggataagggaattaaacttcagatacattttctttggggaatcctttgtgtgagggagtaactcttagcacaggcattagtcaaggtaataggctaagatactgcaaaagacataataatgtgacaaagaacaagagacttgtcttcctctcacatagaa

SEQ ID NO: 301984 - DNA, 588 bp, Homo sapiens
tctgggcacctatctagctgtattagtcagtcttcacaccgctaataaaggcatacctgagacagggtaatttataaaggaaagaggtttaatggactcacagtttcacatggctggggaggcctcacaattgtggcggaagataaaggaagagcacacggacatcttacatggcagcaggcaagagggcatgttctgggaaactcccccttataagaccatgagatcctgtgagacttattcactatcacaaatacagcaagggagagactcgcccccatgattcaattacctcccattgggtccctcccaggacacgtgggaattatgggagctacaattcaagatgagttttggatggatcacagccaaaccatatcactagccttgaaaagtaaatgaacaactygataagcaagaagttaatagtagcttaaaacaggagccacagaagctaaagtcaggagatgtttgattccctatagaaactaaagatatcttaacatatgtacctgagttgtttttcagaaacccagacctccaccaaacagatccactggcacacagatgtcaaatatgagggacttg

SEQ ID NO: 301985 - DNA, 528 bp, Homo sapiens
ttgttggttgaataacccttgcgcagtgctgccctcaagtgattaycctgggtattgcaataattaatttcaaacggttgtcacacttaggacggcaggatcaatgagaacagagtcctgaatgagtaagtcctgagcaatgggatgcaagattcataaattacccgcaagaaatgaaatgtgaacttctgaagttcaggcctcaccctggacactgtgctgggcttagactcccgcttcttccttcctgccacacagatacttccttcacccaactctggcttcagtaactgcctggacactggcctcacccaacatctctgctcctcatccccttttgatctgttgtccagagtgtcctcttgcttcctgcacatctccccacaaaggtcccaagcaattccatccaaatatggatttgtcattttctctctgggttctttccatcatgaagtcccctaatatgttcagggaattgggaaaagcaaatgacatgttttctgacttctcaagaaacccaagataaaa

SEQ ID NO: 301986 - DNA, 528 bp, Homo sapiens
ttgttggttgaataacccttgcgcagtgctgccctcaagtgattatcctgggtattgcaataattaatttcaaacggttgtcacacttaggacggcaggatcaatgagaacagagtcctgaatgagtaagtcctgagsaatgggatgcaagattcataaattacccgcaagaaatgaaatgtgaacttctgaagttcaggcctcaccctggacactgtgctgggcttagactcccgcttcttccttcctgccacacagatacttccttcacccaactctggcttcagtaactgcctggacactggcctcacccaacatctctgctcctcatccccttttgatctgttgtccagagtgtcctcttgcttcctgcacatctccccacaaaggtcccaagcaattccatccaaatatggatttgtcattttctctctgggttctttccatcatgaagtcccctaatatgttcagggaattgggaaaagcaaatgacatgttttctgacttctcaagaaacccaagataaaa

SEQ ID NO: 301987 - DNA, 513 bp, Homo sapiens
agtatctgttaaatgaacgttgttggttgaataacccttgcgcagtgctgccctcaagtgattatcctgggtattgcaataattaatttcaaacggttgtcacacttaggacggcaggatcaatgagaacagagtcctgaatgagtaagtcctgagcaatgggatgcaagattyataaattacccgcaagaaatgaaatgtgaacttctgaagttcaggcctcaccctggacactgtgctgggcttagactcccgcttcttccttcctgccacacagatacttccttcacccaactctggcttcagtaactgcctggacactggcctcacccaacatctctgctcctcatccccttttgatctgttgtccagagtgtcctcttgcttcctgcacatctccccacaaaggtcccaagcaattccatccaaatatggatttgtcattttctctctgggttctttccatcatgaagtcccctaatatgttcagggaattgggaaaagcaaatgaca

SEQ ID NO: 301988 - DNA, 398 bp, Homo sapiens
tagacatatacaaatgatcagcatgcttttaaaatgtttgctcttttctaaacctatgcaatatacatgaatatagtatacatacttgcatgtgtatataaataaatgtctatatatgtgtgtaaatgtatatgcgtatatacatacatacttgtgcatgaacggatggggtatttytgacatcacatacaagcaacagtgttcatcagtgttaaccgtatttatttttgggaagtgggacacaacaccagaacaaagggatgccttgactgtggatgtgatactcatctgtggtattaaaacattttataaaaagcatgtgccatttttataatttaaaaaaacccctaaatattattaataaaattgacatgtaataaaataaagatgctgtgtca

SEQ ID NO: 301989 - DNA, 457 bp, Homo sapiens
gcctctggcccttcaggcacagcacgcagcccttggttgatggccactcggcctgcagtggagtatctcctgagaacccaagttcaaagaaccaggccaacacccactctgctctatccactttagattctgtgtgagtggcaggtggaaggagggggcagccacagaggatatctgagaggcacagtgagaccctgggagagtttgagagccagggctctccccaggaggcagcaggcttgaggccagccactcagtgtgggaaggagcaagggaaactggccatttccccatcactgacaggctctatagggaggagggtattcctatcctgagcccaaaggcaccaagatgcttaacgccaaagtgtttcrggaaaaatcaatagcagcctttagagaaggcaaaatggggtaagtgatggcaccacttataatcttgccaataggatgtgctg

SEQ ID NO: 301990 - DNA, 583 bp, Homo sapiens
cgagggccattggaaaagggactgccccagtttccaaagggagccttggttacccaaacccatcatttgcagaggatttaaacagcccaatatcccccatgactcccattagacaccttaccatctctacagaggaaccttgcgcaacccttagtgtggcaggtaaaaatactaagttacaatgtgctctttttgtgaaagactgtttttgcccaacttaaaagtacttaaaggttaattaaaattatggacatgagaaggtgacttatgaaataaggtagaaattaactagtaagtaggcaagagatatatgaagaaagataaggatatgaaggtrtatttttggtaaaggatgatataaatgtaaaagaatgttgtatgagaaaggatcttgtaagataaattattgtcctacagtaaagtgactggttatttataaaagaggtggtataggactagtcagaaagttcaagcatgttgtagatggtctgtgtaagtcatgatgaggttcatgatgggggatttatgaaggaattttgtgtatgattaagttggctgtcattcaaaggcaattgtttaaaat

SEQ ID NO: 301991 - DNA, 487 bp, Homo sapiens
actcttatcaaagggtgttggtgccccgacatttgctgtcagctctgaaaaggtggctgcgaaactcattgtatccaattctggttggcttggggcccagcatacagtgggatttctggccaatggcctcatacagtgggatggctggcrcctggcccagggattagagtgctttcatttctttgtctcattgatattagtcacagaatctcccttttcatttacaacccaacacccacccccaccccgcgccaccccatgcaggctggggacaagggggtgcagaagcagaagttgctgcaaactctgagctcttgtaccccaagagaaagaagaaaatgtccatttccaactcagctatccaacatctgtatgtattttgttgtgcacatttaccaggaagttgatagtatgttatgtccttgaaaggagaagtgccctaaagatataagatactgtaagttaaccttggataaacaaggtattc

SEQ ID NO: 301992 - DNA, 577 bp, Homo sapiens
tagtacttgaagatgtcaatatttaacggggtgtgttcctgcgactgtatctttaagggcttctaagttcctaaaattgtaataaagtgtctagtttcatactcagaacagcaggaattttaaatattgccagtcttgtcatattttagagataagaaaatgaaggtcaagagccattagtgatttatccaaagtcagaaaacaactcaacagcagatcaagggaatcctacttcagctgatttttaactccagattcttgtatctgtatgcctttcaaaggacaactcactgtttgtttttttaaataaagagtgagctctgagagaggtagtgccatactgggcagctcartgtggccaagtaaccctagaaaggctttatagtttagggagaacttgactaaagggtagcgtttacgtacatgtagcagatcaggaaagcccttataggtatggaaaatagcaagaacctatgaggcctgaaaaagcatgttgtgtaccgaggccactggggagagttacctggctatgagaaataatgcactggagattgtacaaaaaacatgtgcattagta

SEQ ID NO: 301993 - DNA, 647 bp, Homo sapiens
gaagtaaaatttgtaatcttgtcacagcagtaaaaaacaaagtaaargatttgtttttatcacctttcaaatatttcagagagggggagagagatgtattaatggggcttctagaacgctgtgaaagtttgatgaattgtccttttacattctagggatattaaagaacctagagtggtaatcaagactctaaacatcctgtcaagtaggcaatccaagagacaagctgacaaatttttcatcaggttccttcacctttttaaacttcatgctgatcacacttctccttgcatttgccactgcaaaatcagcagcctcattttcaaaatacccttaggagatgttataatttctgtgatttcaaatcaccttgcatagttatattttggcctggtaacactcatgcaaggggcatgttcattacacctggagaggctgagaactgacattagcaagccaaagtcactgctgacaggagcttgtgtgggcagagaaagtgctaaagggcaagtttggagttaattattttgcacaagaaacaggaagaaggggaagacttttggggagtgggttagtgcagtagcctcctactgggctctctgcttccaccctcatcctcctgtgctctattcagcatagcagagagg

SEQ ID NO: 301994 - DNA, 546 bp, Homo sapiens
caaccttcaagaataaatttaaggggctcatgacttcagtgcaggaagcaattgcagatgtggaaataacaagagaactagaattagaagtggagcctgaaaatattgctgagttgctgcaatctcatgatcaaacttgaacagatgaggagttgcttcttatgggtgagcaaagaatgtggtttcttgagatggaagcttctcttggtggagatgtgagcattgttgaaatgacaacaaagtatttagaatattaataaacctaggtgataaagcagtgggaaggtgtgagaggagtcgcttagattttgaaggaagttctcctgtgggtaaaatgttatcaaacaccatcacatgagacagagaaatcattcatgaaagagtgaattgatgtgamaaacttcattgttgtcttattttaagaaattgccacagccaccccagacttcagcaaccaactgccctgatcactcagcagccatcaacatctaggcaagaccctctgctagcaaaatgatcatgtctcattgaaggctcagatgctca

SEQ ID NO: 301995 - DNA, 576 bp, Homo sapiens
gacgatttctctgtgctaataagttgactggggaagtataaatgactaaaggagtagggttacaaaatcacattattgaacacaaaaacaactttttttttcagcatcaccttgatttattttcctagtatttttttcctcagatggaaaaataatttcatcaagaaaacaaatgcttctgccaaagtgaaagaattttatgtcttaatgcttttctttaaaaaaaaaaaaagtcaacattgaactaggacatgctctgcttccccacccccattttgctgactacattttaaaaaatctattggcagaaaacaagatattttcttcaaatagagtgattatgttttattgctattttgtttagtatatatttttctcaattgggaaaaaaatctaggtgaaaaaaattacctaacaagagaagtagtttacatagtcataacatttaaattgctgcccaaaaaatgtaaaaaaaatttaatgtaaamtgtcacataatttcaaaaaacttacctcaattgtctatcatttatcatgtactataagtcaacttcctaaataagattacagtccttt

SEQ ID NO: 301996 - DNA, 432 bp, Homo sapiens
acaagagctctgcttagcccctcatttcccccattccctttccgtaggactctttgatagtatattttctgagcaaacaattgcaaagtggttccactccaggtcggccctctgcttatatatttggccagctatctatgtaaaaagaaccggctataaaccatatgtactctctctggagctttgcctacaggaactcctagtytggggtaaaacaaatggaatgtgtcaacataggctgtaggaaagtaaaacattgaggatttcaatcaaaagactccattcttttccattcaaccatctttccacttctcttttcctaacaggagaatgcaatgtagaatagaacacatctaatttggctccaaagacaaaaatggtcagaatcactgggttagcaagtgaggggatattgctaaatatttctgagcc

SEQ ID NO: 301997 - DNA, 544 bp, Homo sapiens
aaggagggaagaattcatatttgcaataaggtcagtttagttttttacataacaaagtgttcaaatttttgtgaaaaaaaatcaggtcagtaatattgcttccaatcgaaagcagttttttgtgacttttatgtacattcaactgamagactaaatgagctttgtcactgcttatctctgtggcctcaaaaacttattaacaacctctcaatctttacctagtatacatgatgggtttaaaatagtatcacaaaatctatgacctagaaagaacgtggtccaacgcccttacgtaatagatgaagaaactgaaacattcacattgcccctctttacttccatcttcatacttatgcttattttagttccccaaatacatcttttctctttgtctgtttttctctctagtctctggccttcaaattcactcttcatttcatcaaccccacacttccactacgacatgtctcattaatgcctcccatccttcaggtaccagcattgacatcacttctagtttgctgacctcgcagtgtgagttaga

SEQ ID NO: 301998 - DNA, 544 bp, Homo sapiens
atttaagtctaatcattcctgccagtatctgctttattttgactctagcggtctctaacactttcatggaagtagatcatgatgaacaacatctggaacatagtaaatgctaagttagtatgaattaatttattatcattattgtactttttcttctaatgttcatctaaagccatcagatccatgattatatccacatcagagcatatagtatatgctgataataaggtctttgagaggaaaagggtgaggggaaggactgaaaatatatcagtaggataatggctccatctactttctctcctcatcgaagcaacaactgtatcagtagcttctccctaaaacagagtatttcatctgaatattctctgattcaagggttctgcttcaagtcttgatgatgacttagggagctgcagtctcatttttttcagagcacttasattccagcttatgttttttcttctccctttatctttctctctcctctaccctcctttcttccctgtttatcttccttccttcctcactccttcattctgtt

SEQ ID NO: 301999 - DNA, 563 bp, Homo sapiens
atttgaagctgaaagcatttctaactatttctaaaagtggaggtcacattttaaaatgaaacttatcatctgaattccttcatgacttttttctgtttcaaaaggcaaataaacacgatgatttatttcccacagatcaaaatgttatatgatgtggcmaacatgtaataaaaaaattgggaagataactaaaaagaactggagtacattctgggtctattgggctcaaactccagcttgactgcttctggctgtttgacctcaactgaaagttagtaataatcagagtcatttacatcataggattattgtgagaattacatgtgatatttttaaattgctaacccccatgcctgggagattacaatgattgtaccctgttgttattatataccttgaattaattgcaaaataaatgttcaatttttatagtcattttctttatatcaaatagtatttttttccagttttctaggaagcctttatttgcttcttaaatgtactaattttctctttcttgacaaaactcccattagtgccacatttttttctgagtagttttc

SEQ ID NO: 302000 - DNA, 563 bp, Homo sapiens
atttgaagctgaaagcatttctaactatttctaaaagtggaggtcacattttaaaatgaaacttatcatctgaattccttcatgacttttttctgtttcaaaaggcaaataaacacgatgatttatttcccacagatcaaaatgttatatgatgtggcaaacatgtaataaaaaaattgggaagataactaaaaagaactggagtacattctgggtctattgggctcaaactccagcttgactgcttctggctgtttgacctcaactgaaagttagtaataatcagagtcatttacatcataggattattgtgagaattacatgtgatatttttaaattgctaacccccatgcctgggagattacratgattgtaccctgttgttattatataccttgaattaattgcaaaataaatgttcaatttttatagtcattttctttatatcaaatagtatttttttccagttttctaggaagcctttatttgcttcttaaatgtactaattttctctttcttgacaaaactcccattagtgccacatttttttctgagtagttttc

SEQ ID NO: 302001 - DNA, 289 bp, Homo sapiens
gggacttgtttcctggtcatgaccccactgatggaagcaagatctggtcaaaacagatacagtaaagaagttgaggccgggtgcagtggctcacacctgtaatcccagcactttgggaggctgaggtgggtggatcacttgaggtcaggcgtttgagaccagcctggccaatatggtgaaatcccatctctactaaaagtrcaaaaattagtcaggtgtggtggcatgcacctgtattcctagctactcaggaggatgaggcaggagaattgcttgaacctgggaggaa

SEQ ID NO: 302002 - DNA, 616 bp, Homo sapiens
tttctaagctgtacaatgacccttcttcccacagaatactgtccttcctgtcctcatgggaagaaggacaggttccttcaccctcctggatgckggcagttaagtaatctgggaacttgtaagcaggacagactaaccagaaactggctgattagtagctggttgcctggctgaattggctggtttctagtaggtcagcttggtggaaggacagatcagctgtgctagcagaccgagccttaatcagccagattctaaaggtcagagtggaaacaaaaatcatgcaatttacccaaattttagagactgaattcaattgtaggatttggtctggaaataagaatgaattattttcaatggagtggatccttttttcctccctgccagtttctctactatgctatagagaaagcctaagatatatcattgatattgttatagaaatattgtctacctgcacgtactacagtataggctgtaatgaaataattaaatcgaactactttcaaccttctgcatattctcaatggaagcttggtgcttttattccacattatgcttttgtgaaaaggctgcactcttactattctagttagaattactgtgtgactgttat

SEQ ID NO: 302003 - DNA, 602 bp, Homo sapiens
aatatttttggggaactttattatgaaagtgtggaagttctaaagtttcaaaaacatttattttgtatcacgatataattttaagcttcagctggatgagtacatatgatagaaatgctacacaaattttgaagaagaaagagtggttggggaagatttgccctatgagatagtacagtatgtcatggaccaataaaagtgagagaatttggtgccagtgctgaggcaggcaggtcatagaaacgacgggaaggctgggaaacacacaggaacataggacagaggtggtgtttctgaccatttgagaagatatggattactctactccttcaaaataaatttcagaggaataaaatacgtaaatgtttaaaaacgaaactgtgaatacwccagaacaaaatactgatgactattttaataatcttgtataaagagatgcttttaagtttgacaaaaaagacaataaaaagcaaaaattttgttaacatggctacaatttgatacaatttcttgaaatgtaaaacttttgtatggcaaaagcactataagtaaaacttaaaagagaacaaaatgaacctgggaaaagtattttttggttgatg

SEQ ID NO: 302004 - DNA, 515 bp, Homo sapiens
tcttgctcacctcttcagtctgctctcctgtctcactctagtctttggctttacattcctgcagctctatcttctggttccaactatgtgtgctccctgtggttctctgtgcctgtgcmtttgcctgtgctgacctttctccctggaatagactatccatatccttctggataatccattctttaacagccagctcaggctaggtaaccttgccctccacccagctgggctgcttggctctcctttctgcccatgtgtctgtctgtcagactggaccgtaagctctttgcaggcaaggtctgggctttagttacctatgtacaaccataacttcctgtttgctggtagataacaggtgcacaataaacaatgatagatccaaacagaaggaagaatggtgactagttgactattttgagtttcatttcatttctttatggaagcctgagatggaataaaatggtcaaaatgccatgaccagaagggaggcaggaaggaggcaggaaggcaaaggc

SEQ ID NO: 302005 - DNA, 649 bp, Homo sapiens
tgtcagcagggggcgcactgactcgtcttagcgagtgctgagtaaaatgtagctgtttcaaaagcaaatctgctcttccaaacttgccaaaggaacaaataccgctacctttctatgcatattcacaacgaggagtgaattcattgcataacacagggttttaaaatatgaagacaatgacttccccatcccycacccgcccatgtctgtgaaatggcccagaaagaaatatagttcaaaaactattcctccatttcagtgaagtgtattctgggctggaaaacagaaatgagatgtgaaagcaagaatagtttttgaaaattattactaaggggatttaataggctacttaagaagctacctttcagggttttttgttgttgttgttttaacagtcaagaaaatgaaatgcatcctagggtatgatctgtttaaataatgaaagttcttcaacctgatacatgctttgacttctaaatgcatctctgggtcctagagatttagtccgctggcccaggatcacttttactccatttgatatttagtggctactttcattcttgttaccacttatgattttagaaagattttggatttatccttgaaaggcttggcagagaaaagaaaatacaaaatagccacgggttag

SEQ ID NO: 302006 - DNA, 599 bp, Homo sapiens
tctcaagttaaaagttacttgtctgatgttgctttgaacgctcacctctctccccaaaatttcggtagggagcctggctactcagtgaagcccaagggaaggagctcaggcttacagtgccatttaatacacgtcaaatgttaatttagtattaaatcagggtgcaaagagcctctagaagtccaggcatatattgttcaaatggctgcgttcccttcatttttaattcacatcacaaaaacaaacaagtaaaacttcacttggaaaaacactaactgttaaagtatcctaaattcgaaaatactatgattatattggaggggtctggsaagcaattccttttctgggttagaaagtaagatgagaacttttcccagaaaggtttgctttggagtctccagcgctgaggtccccattccacagcggcgaggtcctcctctcacccccacccccaacattcctgtgatttgtgggcacgagaagcgacttctcccgaatctccggccattttgggggccccagggctaagctcggcttccttagatcgcattctaacggcgttttattttatttagggcacagtttgcataataaaatta

SEQ ID NO: 302007 - DNA, 577 bp, Homo sapiens
cctaccgcgcgggaaagttcacagccaaggagaggcacaaaagaaggtctccgcgctggttctcaagggcgaggagacgcatcccttcttgacagtgcgcctccagactggcattaaggagaggactagggaatgggatcacctatcgtcaagtcacttattttagaggggtttggagaagaggtgaacttggtggtggagagaaagcgcgctccctaatcacctgttaaacagttattttaaaattagctgtcgcatctgacgccctagggtccccaagggccttttcataagggagtctgtttaacttcactggctttgggagcgagaaagtttgccctttgtttctggaaacacgcccacgcagtacgcttaggtaaccttacactgaacaatttccttggagcggctaaaaccgcaacaaccaaacttgcacctgcgccattctcttaaaaacagggcagcggctgtgagcgctgggccggtaagtaagggcagagaaaggggctgtcgtgtgcrtcccagctctccgacccgcacgtccgggacccctttccgcccgcgcaccgcggtcact

SEQ ID NO: 302008 - DNA, 559 bp, Homo sapiens
taaaggaaatttacatttataaaggacatttccattagtaaagttatctgtaccaatgacagagctgttcggagaaaacttttaacacctgagttttatctgcataatgaggcaacctttatttaccatgcaatttctcccttcacgctgtcataactcatctccatcccagcactccactagacgtctcaagcctctattcctttctggagctcaggatgctatataagcttcaatcatctggcccttttttgagtctcacatttttgctggactcccatgcatacgtacataattaaaatggtttatctcatcttcatctgttttatgccaatttaattcataacccagccaaagaacctgggcaggttagacagaagccatttttcctcctctgcaatatagataacaaaaaatayggacagcaaatttctcattttttaaaaaaggtacaaaaccaaagtcaataaaatatctttaaagtaattaaaagaaattaactgtcattgtaaaatcatacatgcactgaaaatatgttttaaaaattagtcaaaataag

SEQ ID NO: 302009 - DNA, 559 bp, Homo sapiens
ctcaaaatatttgtcttcaggtttccaccaataaactcactaggcccatgtaaattctgaattgtgacctcagctcagctgagacctccactacaayaaaatggatacttttctacaattgaagcagcaaggctgatatagaggaaagacccttgacacacggggtttcaaatctagtctctgtcacttaccacttgtgtaaccttaggcaggctacttaacgcctccaagtctttggttacttatccataaaatggatcagaatgtctattttatttgatggaggactataaaacagctcagtgcttgaaataactgtatgtattcaacaagtattggctcgtttgttcttttgcaagcctccaagaattatgtagaggtgtagactttaacattgcaccctgcatctgaattgccatgggtgccacagaaactgacatcctcctctgtctgacacttggctttctttcaagtctgttcaagtcaagcaaagaagatttacattaggctatattttcattaaaatatcactccagatactaccacctttgaaaacccc

SEQ ID NO: 302010 - DNA, 622 bp, Homo sapiens
taacgggtgcagggttttcattttgcaagatgaatggagttttggaaaactgttgcataataatgtaaattactcaacactattgatctattcacttaaaatggctaatttggtatatatttatgttatgtgtagtttaacacaatttttaagaagtcaaggaggaaaagaaaaaaaggcttttgtctatctgttggatcaaaacctttaactcctattctctagtcttttgaaaccattcctgacaatagatgcccaggtaggcatacttctaatgcagcactagatgatctgctccagggatgcagtgtaaaccagttgggagcacctgtgtctggctgcagacagcagagacgaatctgtgggtggtgccattgacgaggtgccactttgagggagagagagattgaatttggctgtgtccaataccacaaaaggcacttgattttaaaagtccaaatcagggctttcaactaacttgacaagtgacacayattgtagcaaggtctatcttatcagatgtaccattcagggcagaaaaatgtaatggtatagacacaactttgggttaaaacaaatgcgtcaagaatggtactcagaccacagcttcctgctgcccact

SEQ ID NO: 302011 - DNA, 578 bp, Homo sapiens
ccctgttgacatctctcttacattaaaaaacaaacaaacagacmaacaaaatacataaaattagctgagtgtggtggtgggcacctgtaatcccagctactctggaggctgaggcaggagaatcgcttgaaaccgggaggcagatcttgcagtgagccaagatcgcactattgcactccagcctgggcaacaagagtgaaactccatctcaaaaaaaaaaaaagaaaaaagaaagaaaaaagtctgtaagaatgtctgaaaagcctaacacactttggcacaggttttcagagtccctgacaagcctgtgttcatagcatgcccagtgcaacgtgtgctgctacagaggaattgtttttatagactgtgtttgttttgttttacattcactttaaaaacctaagaaaagctgggggaaggattaaaggttcataacaaattttacaagcctggacagtgaagaaaaaccccagagtgttatgaggtgttaaataaattgaattgactaaactttctgccccattgtcatgatggcctttacacatctcacaatgtggagactattaggtgttagcctg

SEQ ID NO: 302012 - DNA, 507 bp, Homo sapiens
aaaatggaggagctgtgttcaactaaaacaatggcaggaaaaattccaaaactggtaaaagatgtgtctccttagattggagaaatgtaacaacatcccaaacagaataattacaaatacatctattacatggaatatccaaaaatatgtatccaaaaatatatattcygtaaacagaaataacaagagaatttagcaaagtcactagatgcaagatcaatatttaaaaatcaattgtctatctttatgagcaataaactttttaaaaatatcatttataggtcaggcgaggtggcatatctttatcagcaataaattttttaaaaatataacttataggccaggtgaggtggttcacacctgtaatcccagcacgttgggaggccaagacagaaggatcacttgagtgcaggagttcaagaccagcctgggcaacaaagtgagactctgtctctacaaaaaaaataaaaaattagctgggtgtggtggcacatacctgtggttcca

SEQ ID NO: 302013 - DNA, 576 bp, Homo sapiens
atacatggataagttctttagcagtcattactgagattttggtgcactcatcacctgagcagtgtacactgtagccagtgtgtagtcttttatctcttgcaccctgctccccttccccccgcatccccaaagtccattgtatcattcttatgccttcgtgtcttcatagcttagctcctacttataaatgagaacatatgatatttggttttccattcctgagttacttcactcacagtaatggtctccaactccacccaggttgctgtgaatgccattatttcrttcctttttatggctaagtagtattccatggtgtatacatatatatatgcgtatatatatatgtgtgtgtgtgtgtgtatatatatatatatatatatatatgattccactttttgaagttcaaaaacttgtaaaagtgatctatgaagttggaaacttgaataatgattacctataggacaatgattgcaagagaggcttctgcggtgatggtgatgtcccatatcttattctagcggtaaacaggtgtgatggttaatattgtgtcaacttgattggattaaaggatgc

SEQ ID NO: 302014 - DNA, 228 bp, Homo sapiens
ttagatattagaacgtggcctgtgtwcatccctagtctctgaggactgaacactgaagcccctagatttgttaagggtttgaaagcagaaaatgcctttgttcccaaatagaacctgtggaagtggcaaatgtcctagagaagtgttccaggaccttccatgacaaacatagtgttggagcaatacagcggaaatggccacaagggcagagctgagaaagccagagtg

SEQ ID NO: 302015 - DNA, 581 bp, Homo sapiens
ggtttctttgatgaaaacattctaggattagtggtaatggttgcacaactttgattatactaaaaaaccaatgaattgtctactttataagggcgagtatatgaattatatttcaatttttttaagaatgaacaattcctccatagacaactatggagtgatcccaaggatatgctgtgaagcgagaaaagcaaatcaagagtactatgtacagtatgccaccatttctctaaaaggggtataaatatatgaacatcaatataggtaataagagcaattgactgaaacatatcaaatacattaaaatacttaacttcatagtaatacaaataacatttaacaggtcccctttggaggatattaggaagtcaaaccattattctgaaaactggtataataaatggagaacaagaaacaagcatttatcctgcctatgctattcaaactttatcacayagttaatgagaggagcttctctttatagaggtattcagtattaaatgaaaaagtaatgagagaattagaatatcaccatttgccgccatatcaccactaatgaatgaaatatgtgatgactgtgg

SEQ ID NO: 302016 - DNA, 238 bp, Homo sapiens
tggcctggaggaggggagcagtgtgtcaggacaccccggatgggrcctgtgacagcaatgacacctgccagcctgatgccgcttgactccctgccaggtacttcctaagcaggagcacgctgactcctcatgtgctctattacccaccaccagatgaggcagcaagttaactttggcagtcaggagtggagacctttgggctccaagctcaaggtccaccccaagacacacagcccat

SEQ ID NO: 302017 - DNA, 546 bp, Homo sapiens
tgatgcagtggaaaaaactctgaccagaaagaagaaaacctggatttgaagccgtggcttatatgtgtggratcttggtcaagggattcccatcccctgagcctgtttcctcatgtgtaaaatgagaaactggatccatctggaggatttgtgagtctttgggctgatgaagaccgcctagggctagagtggtaagagaagccagacagatgacatcctccctggcatgacccaggcatcccccaaacagagtatccctggagcagcagaatttgatgaccctgggagaaggttcaaatggctcttccttggactgaatcagagctctggggatccagggaaactgccctctttggggaagctgctgatgagcatgagggtaggaggcttccatacccacctggctcacaaagatgtttccagccacactcagggtctcagtggctgtggtgcccatggtgacttgcatcagccaggcaatctagaaggaagcagaatgttctttgtgggctgacatcagcaaaccccagagtcagagggggctgg

SEQ ID NO: 302018 - DNA, 645 bp, Homo sapiens
gagttgtgtagctgtctcatattgaataggagaagaaaagtgttttaaaaaaatatatatttatattatttttatttttgcatttaatggtgttcagtttttctttttaaaattaaaaacaaatttgtgggtatactgtaagtgtatatatttatggggtacatgagatgttttgatatgggcatatgtacggtatgaaataagcacattatggggaatggcatatctatccccggagtattcatttttctttataaggattcaagttactgtttagtgacctttcatattagccctagggatctcctttaatattttttatactgctagtggtaaattctctcagtttwctctgtgtcttaatttctctattatttttgaaaaatagttttgctagacacagaagtcttagttgatagtgtttttcttttcatggtttctgctgagaagtcttttgttaatctcactgagtactgattacacatgatgacttgcttttctcatgctgctttcaagggtctttatttttcaacagtttgactgtaatgtgtctcagtgtggatctccttagtttattctacacggtgttcattgaactaattggatatgtagattaatgtttgtcataaaatttggtaagttttt

SEQ ID NO: 302019 - DNA, 550 bp, Homo sapiens
tttctggttctttagttagccctaggggcattacatatccactcgtccatctatttattcatccacttattcatttgttccacaagttcttgttgaaggaaaagatgtggaattctggacctagattcaaagggaaatgaaggtattaggaagatacatgaagtctgggaaacgtaatgagacactgtctctacaagaaattataaaaaaaataaacagacttggtggcacttgttgtcctagctactcaggaggctgaggtggaaggagcttgagcccaggagtttgaggttagagtgagctatgatcatgccactgcactccagactggacaacaaagtgagaccttgtctctaaaaaaataaaaaataaaaatgaaaaaatttaacaaacagacttgagagccagttgcatagagatgaacacgaaagactgaagacttctctgcaaaagagaaggaaaayaaaaacgtataaagaatgaatcttgaggaatgctcagatttgaaaggatgagggaaaaagctgttatttaaaaacaaagcccactt

SEQ ID NO: 302020 - DNA, 564 bp, Homo sapiens
gcttttgggccattcaaacctatttctgatgtaaaactattagttcttgattggagctgtgatggagaataggggtgagctgaattttagtagcacggaaaccctacaaagtatgtccacattcctgcttgtgacctccagcccattgtaggaaattcagagcttcggagagcagcttttttttttttttttttttctctgtgaacatcttcttttatcctactgctactgatatgcatattttatatgtctggaggagcttactctagatgagtggctggcaaacttgctacaaagggccagatggtaaatattttaractttgtggttatacagtctctgccacaacgactcaattctgccagtgtagtgtgagagaagccataggcaaaacataaacaaatgagtgaggctgtgttcgaatcatactttatgtataaaagcaggcagtagtcagattttggcccacaggccacagtttgcagaactttgcacttgacgctggttttgcttaccaagctgttttcctactaacagtcatagaggaccaacatgtaaatccat

SEQ ID NO: 302021 - DNA, 573 bp, Homo sapiens
agcatctaatcagctttctctgttagcacaagcacmcccagcagcactaatcttggaggagtcctcacctgagatctgacttgctgcaactaaaatttttgtcctaatcccatgagtgaattgtccatgtggagctcaggagtagtttgtttctgacttgtccctgttccccccaaaatttggtccactagggacacattcctttttccaaccaaaacaatgatttgaaagtgtttctagatttgaaaatactgtcaaagtgagaagcaagtgtaaagttctatgagaacatcaggctgaggggagtgagctgtgaacaggggatggactccagccattggaacaatctcctgaaagctggcttcatttccctcgcaccacatgctggcatcggcttctgtgtaagctgcagctaaagcatttactccagttgctatttgaaaacaacctcgctgacaaacagggacagcccaggctgtctttatccaactttgccatttgtttgccatagacaaattaggcttggctagagtcccatttgaatagtaatataatattctgttaaagattaaa

SEQ ID NO: 302022 - DNA, 603 bp, Homo sapiens
tatgatgctgcagaatctcacctttgacctggctggtatcagacatttgagtgcatagcacgaggattttcatagagtttacattgacaccgtgtttgggagtccttgaagaagcaggaaccaggtggcttcagtccccacctcatataaatgtctctrtaatcaacaccaatccccattcattactcatttaaccaagagctgggcaggcacccaggccatatctgaatgatttagctgggccatcacgcctatctaagaaggagagcaaagataccagaaaaagtttggctgtccatcaatggtcacaagttaacatgtgaccctaaggagaccaaaaacacagatatgaaataaaaatttaccttgaaaagaacataaagtcaaatcagcaatataaaggtaaaattgatgaggaaaaagaaaaacatgaaaatgagagaataaattgtcacttcagaagataatttgtgaagatctagcttaagaactaacaatactagatagagcaaagtcagtagccaatgtacagtagcaaaaattttttaattaaagagaaaatgttgaggtgatgagaatgagattcatacaggcaaatgtaca

SEQ ID NO: 302023 - DNA, 554 bp, Homo sapiens
gctttcacatgacttttctttccaagttcagcccaaattcacccctttagaggagttatttgtgactaattagctattagttttcattctctaacataccacagattttcttttttgcattttatcacaatctgtaattgttttaagtatttatttgtttattatctatttccctgacatttatatatgctccagaaaggaggaaatttcttaatgtattttattattttatccaacaattagcacaaatcagtagtataaaatcagctctcaataaatatatatttactggatgaatcagcatggatgtttttgtttcccataaactcttgaagaatagaagctgatctatttttcattaagtacttaaagtatgaatagtccactcatcatatacaaacacatgctaattaataaaatgacataaggacctctagttgaacttgtctaggcaataacrtagagcctgtttctgaaagctccctatgtttctttgctctgcttttcctcatttttgaaatttggcatgaagatacgtgttctgttgttacaaa

SEQ ID NO: 302024 - DNA, 329 bp, Homo sapiens
tttaactaaaatttaaaacattgtatcctttgtgttttcattgcctctaggcaaatataggatatgtgtttttaaatgttcatgaataataaaaaataaaacaagagcatccagagaatgctagcttttcttttcaaataattktttatttatagttcataaaagatctagaaagacttaaagagcaaggtgaagtcccgacatatgtcatttaaaagcaggatggcatagtagttaagcatttgggctctggaatcaaactcagcttgagttcaaatctcagatcagtcaactactgacagggtgtaattggataaaagaaagactta

SEQ ID NO: 302025 - DNA, 659 bp, Homo sapiens
tgctgtgtctagacaaggggaagatggaggcaaatataaatcattttcatagtattcatgctgaagtactattgccttgwttacctcaatagattaattaaagtattttgggaatctctgcgacctaggtaattgacttcataccctagttaccttttaggcagaagcagacacataaccacaaattttagctcagactgagatatttgaaactctgagagaattggcgagagcattgcaagcctcaagctcggctttgctgctgtctccacatctagatcgcccccagaatatctctggttgtcatgaataactcttctttttgtgaaagtttagttctaggaaagttctgtgataggttctactctcagattttaccatcagtacattctagaaccaggtactgagatcaggaaattgtgcccccaaaacaactgtcacttccaaaatctgaaattttgatcagataattcagccattctaaacctcagttcccttatctgagaaaagcatcaacacctactatataggattattatgaataataaatgatatgatgccaatagaacaatatagtccttttaaaaatgaaacatcaattgatagagtactgttttcataggagtccaaagtaagtcgttttgcattttgttgtttgg

SEQ ID NO: 302026 - DNA, 612 bp, Homo sapiens
tttttcctaaccttagtttactgcacctgccaactgcctgagaggaatagcctctgttgtctatggtcagaataagtgatacatatgtgcgtttaatttctccttaatcacctttactgatggggaccacatgacctttaaagtcttatgagccattaagtagctctcatgcctagaaagtgtttttttgttgttgttacatgcacacagagatacacacaccacacacattgaaatattttctcatcagcatctactcatgataaacagcatcctctgtktattatatctttcaggtaaaataacaatatggacctctcagtcttttctctataaatggcaccctccctatctctgtcggtgtcctttgcttaccctttagttgaatccatgttaccattaaaatgtaatgtccagaattgcgcactaatctttagaagagatctgacggagcagcataaagcaagcctatctgcagactcagatgacccctgggtaagaaacaacaaatgccaatgagttgatagaaaacatcttatttgaaacagaaggtctttctaaaacctgtaaaatcaccttgtatgagtttgagctctgtcttcaaacccagga

SEQ ID NO: 302027 - DNA, 313 bp, Homo sapiens
ttgtacagcaacatgtgtagagcaagatatttattaaaataaattatatagcttaatatataaatcctttctcacttytcatgaaatatatagatattaaatgacctaaaaattttgttttttggaatatctatggaaactattcaataaaaatgtgggtcttggctacaagtcatttctagttaaatttatctgaagaattttgctgactacttaccatttttaaactttgattttacagtaggaactctgacctgcaaaagaaacacttgttactgtttttaatgccttagctattaacacatcagctaac

SEQ ID NO: 302028 - DNA, 491 bp, Homo sapiens
tatttgaaaattatttaaccaggcctttaatacaagcatctactattgcattgtaatttgtttattgaatgtgaatttttcattaaaatcataggactttcattgtaataggcagaaagtagagagaaaaatatattttgcagtgtaaggatgtaggcttttaagtggggatcagaatccaagtggcctggcttctgcttcatttccttccccaatcaaaattagctgccttgctaccttataaactgcatatttgcttgctaatttttatttaaattatataaccaacccagagtttgcaatccttatgtttggataagtgaygcagaacagtttgaaagttcactcttgtttttaatgattttagtccaaaacaactcaaaacctttatacagctcttccagtagctttcatttttacctacaattaacttgtttcctataaggattaatttatatagtgctcatacaataacttattactctgtgtag

SEQ ID NO: 302029 - DNA, 631 bp, Homo sapiens
taggctttgttatgccagtattacagaattgtttgttttgagagcaccttcggatataaaataaggtgatgtagcaaaataaaagaacagatagacaagactggtcttttctcatcgtgttctacttgactttttctgatgtcagttgcaatagaaatctctgtgtgccagggaaggacaatctctgagctgagaatatatatcaatagaaacttcaaaactgtaattcagtgaagtaattgatacaatggagggtcagtgaaacatttagagggagcagaggagaagcattctgtactgcttagtgagctctgggaaaagtcacagcaattcagctgagatctgagggatgagtaggggctcctcaggtggagacgatgatggaaggattccagcaggtagaagaacatgtgcgaagctgaagagtggggagcaagcttggcatrctggggaacatccttagaattgtttagaatcactggagagtagagactattctgaagagtgatacgtgatgcaggaagtggcaggagacagtcagataggcaggctagtgtcagataaaagatgttgtatgctatgtggttatgtcagagttttaccgtgaggggaggtattatgcaatagaaac

SEQ ID NO: 302030 - DNA, 563 bp, Homo sapiens
aaagacaaatatccaaactatatcacctagtgatataggtaagatacttttgaagyaatgcagtgaatttgagaaaaagggagtattttatttgagtagaaaatagaattgagatccagagagttcattgctattccactgcctggctttcaagaataacatatgctcaagtaatccattatgtggtatcctttaaccatctatctgttagtaagtcccagatgccctgaaatctcctccaaatttggaatttggaatgttactatttttctactgttcagactctagatgttttttaaaaataaaattcaaaagcctcttgaagtagtaagaactaaataataaatgtttgtctagtacaccacagttgttagataacagctcactaaggattaggacaatcttttaggccatagggaaggtaaatgaaggtgggggaaaaagttaaattttgggttaggattaaccttttctatgtgtaaaatgaagacaggaatgaactgaagcaaaattttccccttcatcttgctttgtataacatgtggctgtgtttacttggtgtt

SEQ ID NO: 302031 - DNA, 538 bp, Homo sapiens
atgtctgtttattgttttacattttttaggctcaaaactcaagttacatcaaacataacttaatctaagaaatgaaacttggagtcatgtattatccatctgtccattaactggagactcacattaactttctgaagagtatcttgatctacctataagtactcctttggtttaccacaaagcaaaaatagcacggttttctgttcagtcattatgttcttcttagggtcctcagctttcmcagaatatgtttattgtacactcgtctatgtgtctgctatccctctgtacctatcatagcatatctcacactgcattacaaagatctatttgtctatattccccagtagttaataaaagctatgtaaagatggtccatttctgtcttctttacaattgcattttaattttctagaataaagtgacatagtgcaggttctcagtaaagttagttgaatgaatctagtaaataagatgatgtgtgtgaaaaaatgtacaaaatgtaatatggcacaataaatattcaattcaaatgatc

SEQ ID NO: 302032 - DNA, 545 bp, Homo sapiens
tggttacttcctaggtacaatgagggtgcgggcattgggtaaatacacccatttcaaatgggagaagttggccaaaacaaaggggctacaggctccacgcaagtccaaaatccagtggtgcggtcaaatcttaaagttccgaaatggtattatttgactccatgtctcacatccagggcacactgatgcaagaggtgagcaaccatggccttaggcagctctgcccctgtggctttgcagggtacawcccccctcctggctgctttcatggctggcattgagcgtctgtggcttttccaggtgcatggtagaagctgtaggtggatgtaccattctggaatctggaggatggtggccctcttctcatagctctactaagaagttccccagtgggaactctgtgtgggggctccaaccccacattttccttctgtactgccccagcagaggttctccatgaggactctgccccgatagaaaacttttgtctggacatccaggcatttccatatatcctctgaaatctaggtagagtttcccaaatc

SEQ ID NO: 302033 - DNA, 537 bp, Homo sapiens
aggtgaaggggaagcaaggcatgtcttaccatgccaaagcagagagagagaagggggaagtgccaaacacttaccaagcaaccagatttcatgagaactcactatcacaaaaaccgcatggggggaaatgcccccatgatccaatcacctcctagaaggtccctacctcaacacatgcagataacaatttgrattacaatttgagatgatattttggtaggcacacagtcaaaccatatcatagtgtttcaatttttatttgtttccaaaaattgttaaatttttaaattaatttattcactgacccaatggttgttcaagagcatgttgttcaatttctacatactaatatttgtacagtttccaaagttttactccgttgtggtctgagaagacactatacatatatatatatatatacacacacacacacacacactatatataatatatatacatgcatatatatattaactttgttgagacttgttttgagtcctaacacatgatgtatcttggagaatgttccatgtgtta

SEQ ID NO: 302034 - DNA, 598 bp, Homo sapiens
taggtgagtttcttgtagacagcaaatacttgggccttttttcattcattcagctagtttatatctcttaggtggagatttaaatctgatttcattaaaagtcattatcgataggtaaggactaaggacttattcctgacattttgttaactgacatttttattgtttttgtttatcttttgttcctttctcttttattatttatcattggagtgttttttttttttttttgtagtggtaaaattggagtcatttctctttctcatttgtgtgactgctctaccagggtaatacttatgtgtgttttcatgatggtagatatcatcctgttactgtcaaatgcaggatgtttttaagcatttcttgtagggctggactagtggtgatgaattccctcmgttttttttgttttgttttgttttaaaaatattatttcatttttgagggttagctagtatagtattattgactggctgggtttttttctttcagcactttgaatatatcatcccattttctcctgtcctgtaatgtttctgctgaaaaatttgctgttagagtgatggagtttctcttatgtttgacttgacacttttct

SEQ ID NO: 302035 - DNA, 587 bp, Homo sapiens
tgttactgtcaaatgcaggatgtttttaagcatttcttgtagggctggactagtggtgatgaattccctccgttttttttgttttgttttgttttaaaaatattatttcatttttgagggttagctagtatagtattattgactggctgggtttttttctttcagcactttgaatatatcatcccattttctcctgtcctgtaatgtttctgctgaaaaatttgctgttagagtgatggagtttctcttatgtttgacttgacacttttctcttgctgtttttagcattctcttygtcattgacttttgaatttgactacagcgtgctttgaataagatcttttgggtcatatctgtttaggaatctttgaacttcctgtgtttgaatagctgtctcttgtgagactggggaagttttcagctattattccattaaataggttttctatgacattttccttctctacattttatggaacaccaaaaatttgaatatttgctcactttctcgtgtcccatatgtcacatagcctgactttattcttttttattcttttctttcttatttttgtctgactgagttactt

SEQ ID NO: 302036 - DNA, 553 bp, Homo sapiens
agctgtttcccttcacttctctgctgaattttagtgttctctcttcaatgctctattcaaagtgttatcataaactcactgttttggatattctttgtggaggaggcaagccatctcaaagcctctccccaaacgtttttaagaatccttgaaatttttttcccctttgtacttaagaactggagtcactcaggctgatttatttcagttctttcttaagacattacaagagccactgtctcttgttttgtaacatgaataagattttattgaacactctactataaaggaattcaaaacaacctaaagaacttaaattgttaccacatatgattgttcttagagcttatgggttgcatttatgtcttttctgtaaaggcattccttttctacctttctgtctacttatgatagatttgacccctactcacaccatacacaaaaattaatttgacatgggtcatacacctaaactaagtggctaaarctataaaaaattttaaatatagaatatatttgcaaatatgggcaggcaaagccttatgaaaaatca

SEQ ID NO: 302037 - DNA, 547 bp, Homo sapiens
gagtggggctgaatgagcatgtgacccaaccacgtatggagatggtctgttcaccaatcttacagcaatttaaactctttgtttctgtgagacagggtctcaatctctcactctggctggagtgcagtggcataatcataactcactgaagcctcaaactcctgggctcaagcattcctcctacctcagcttccagaatagctgtaaactcttgaaataaagccagggcagccctagggctgtgttgatgcccaatctccctcttggcctttacaggaaagaagcaggtgtaaaagatatggggcaggcctaacagagacctcataagtatttaacccttatcaaaatcagaagtgtccacttaaatatggttacctgggttacaggttgcattaagacgtgcatttgagatctcagacccattaaatgtgacagaaactctccttgaccaaactttagtcaggcttctctgaggcctyttgtcaactaagccttcccagcccagtcttagcaagaaattctgctgtcatcctcccaccctgatcgc

SEQ ID NO: 302038 - DNA, 610 bp, Homo sapiens
tcttcctcttcttttaaagaatatcacttcaactgaatgtctgatcacagactgaaagtgccaatttagctgtaaagctgatttattcttcttcctttcattacacacatatatawttttttctgaaaaaataaaaattacgttttataggtttctaaactgaagtttcccaagaatgattacatcattttttattaaaagtcattatgtattcccctaaaagattacaggtacatattaataatacattaatgcgagcttatttattatactctctgaagagatattttgaatgttctttattaacgaatgaataagcaacaaccctgtaatgtggaaaaaagaaaacaaccaacgatgggaatagtcacgtttttctagagaagtgcctttgataacaatggagacctttactgacaactcatcatattccaagcctttagctgaacacattacacaggttattgcattttgcatctcgccattccattatatgacgaaatagaaccatagataggaaatttctccattatcacatagcaagaaatggaaattgaaacattagtctatcatcaaagacaatgttatttcttgactgccagggaagcca

SEQ ID NO: 302039 - DNA, 596 bp, Homo sapiens
cccaaagtgctgggattacaggcgtgagtcaccgtgcccagccaaacaacccactcttttaagtggacaagagactgtaacaggcatctgacaataaaggtcatttgaaagccagtaagcacaagaaaaagtgctcaacatgcttaattactacgaaatgcaaatcgaaaccccagtgctaaccaacgcacaccaaacaaaatggctaaaagctgttgtgcagtgacaccacatgctggtaaccaaggaacaggaaaaggctcccacgtgctgcatactctgaaaaactgttgggcatgcgagggagaccccatgggctcaccacttgycctaccaccccgctgtgccaccctgtttaaatactcaacaggagcacacacagatgtacaccaaagcctgtggcaagatgttcaaaactagtttgttgtcattgccaaaaatgggaaataatcaaactcctttaacagtagaagaatggacaaaggaggtacgttcggggaacaaggtattactgttggaagcatagttgacttctcataggcttgacattgagcatgagaagcaaaccccccaagagggagggcactgcccgggag

SEQ ID NO: 302040 - DNA, 596 bp, Homo sapiens
cccaaagtgctgggattacaggcgtgagtcaccgtgcccagccaaacaacccactcttttaagtggacaagagactgtaacaggcatctgacaataaaggtcatttgaaagccagtaagcacaagaaaaagtgctcaacatgcttaattactacgaaatgcaaatcgaaaccccagtgctaaccaacgcacaccaaacaaaatggctaaaagctgttgtgcagtgacaccacatgctggtaaccaaggaacaggaaaaggctcccacgtgctgcatactctgaaaaactgttgggcatgcgagggagaccccatgggctcaccacttgccctaccaccccgctgtgccaccctgtttaaatactcaacargagcacacacagatgtacaccaaagcctgtggcaagatgttcaaaactagtttgttgtcattgccaaaaatgggaaataatcaaactcctttaacagtagaagaatggacaaaggaggtacgttcggggaacaaggtattactgttggaagcatagttgacttctcataggcttgacattgagcatgagaagcaaaccccccaagagggagggcactgcccgggag

SEQ ID NO: 302041 - DNA, 519 bp, Homo sapiens
actggctaattttttgtatttttagtagagatgagacttcgccatattgtcctgtctggtctagaactcccgacctcaggtgatttgcctgcctcagcctcccaaagtgctggcattacaggcatgagccactgtgcccagcctctcctagagttctgatcagccctgttctgagctcctaatttcttcaaaaccttgtatttccctcttttgaatctgtycaagttcagccagagacaggggcaagcatctgctgcattttctcctttacctctcacttccctgtaagaagggtatgcctggcactctcttttcttttcttttttttttttttttaatttgagccatggtctggccctgtcgcctaggctggagtgcagcagcatgacctcaactcactacaacctctgcctcctaggctcaagcaatcctcccaccttagactcccaagtaaccgcgactataggtgtgtgccaccatgcctggtaattttgtaatctttttagagacagagtttca

SEQ ID NO: 302042 - DNA, 529 bp, Homo sapiens
taccaccatgactggctaattttttgtatttttagtagagatgagacttcgccatattgtcctgtctggtctagaactcccgacctcaggtgatttgcctgcctcagcctcccaaagtgctggcattacaggcatgagccactgtgcccagcctctcctagagttctgatcagccctgttctgagctcctaatttcttcaaaaccttgtatttccctcttttgaatctgtccaagttcagccagagacaggggcaagcatctgctgcattttctcctttacctctcacttccctgtaagaagggtatgcctggcactctcttttmttttcttttttttttttttttaatttgagccatggtctggccctgtcgcctaggctggagtgcagcagcatgacctcaactcactacaacctctgcctcctaggctcaagcaatcctcccaccttagactcccaagtaaccgcgactataggtgtgtgccaccatgcctggtaattttgtaatctttttagagacagagtttca

SEQ ID NO: 302043 - DNA, 628 bp, Homo sapiens
cgggtgcggcggctcatacctgtaatcccagcaccaggggaggccgagacgggcagatcatgaggtcaggagatcaagaccatcctggctaacacggtgaaaccccatctctactaaaactgtgtccaaaattggtgggttcttggtctcactgacttcaagaatgaagctgtgaaccctcgcggtgagtgttacagttcttaaagatggtgtgtccggagtttgttccttccgatgttcggatgtgtttggagtttcttccttctggtggggttcgtggtctcggtggcttcagaagtgaagctgcacaccttcgtggtgaatgttacagcttttaaggtggcacgtctggagttgttcatttctctcagtgggttcgtgctctcrctggcctcaagagtcaagctgcagacctttgcaatgagtattacagctcacaaacgcagtgcagaccaaagtgtgagcaacagcaatatttactgcaaagagcgaaagaacaaacctaccatagtgaggaaggagaccccagcaggttggcactgctacctcaggcagcctgcttttattctggtatctggccccacccacatcctgctaattggtccatcttacagagagctgattggcc

SEQ ID NO: 302044 - DNA, 397 bp, Homo sapiens
gacgcccttgactgaggagtgtttttaataatcatctggccgacttggaagctggaggccgaaggcatagctgtcaattttcttgcgttccttctgcttcctcggggcagagatggtgaaatctacttgttaggacagttgcaaacccgattgcagtctgggctctggatgctgaaattatcctgtgatgattcatyatctttaacagaaagccgaggttacagagcccagagtgatttttgacgttccacaatattccacgaacattttctgattgctcactatatgcatagattgactgagtctctgggggaaagatgtagaagacaggagttctaaaccctaggaagtgcatcaccggtagtggcgccggctgtagtcccagctacttgggagg

SEQ ID NO: 302045 - DNA, 620 bp, Homo sapiens
tccagtaacctttgccttggtggccaaagatagagcatatttgtcctattttatcatgggcagaaatcataactagattatgtcaacagcaggagagttctcagaaaatggcaagggcaaaagatgaaagaagatgatggtaatggcasctttcacaggtgagacacctggataaacatcatccaacccttaaagtcttaggtctaaggtctaaggttttaatttactaaattttatttttattctcctattctgactaataacaactcacattcatactaccatactcccaactttagaatcaatttaatggtactagatgttaaagaaatacattataacattagaaaaaaactcacatatcaagagcaaaagaaattataaattggattaaattattttacatattgatatgtataattttaaaaactcaataaattaatgactccatatttgctatataatatgatgagttgggcttcagagtgaggacattttattcaaccatcaattttttttctctctctctttatatacatgtgtgtacatataaaataaagttataaaatttttaaaagcaaacagcaaaaattgttaaagctgttgtgttttagttatag

SEQ ID NO: 302046 - DNA, 620 bp, Homo sapiens
tccagtaacctttgccttggtggccaaagatagagcatatttgtcctattttatcatgggcagaaatcataactagattatgtcaacagcaggagagttctcagaaaatggcaagggcaaaagatgaaagaagatgatggtaatggcagctttcacaggtgagacacctggataaacatcatccaacccttaaagtcttaggtctaaggtctaaggttttaatttactaaattttatttttattctcctattctgactaataacaactcacattcatactaccatactcccaactttagaatcaatttaatggtactagatgttaaagaaatacattataacattagaaaaaaactcacatatcaagagcaaaagaaattataaattggattaaattattttacatattgatatgtataattttaaaaactcaataaattaatgactccatatttgctatataatatgatgagttgggcttcagagtgaggacattttattcaaccatcaattttttttctctctctctttatatayatgtgtgtacatataaaataaagttataaaatttttaaaagcaaacagcaaaaattgttaaagctgttgtgttttagttatag

SEQ ID NO: 302047 - DNA, 478 bp, Homo sapiens
cagattacctgcagtgatgtttacagtcagaaagcccctcctgcccactcagtgtttcaaactggggtttttcatcaccgactctaaaatatgagctgacaatcaaggcttataaatctaagggtgacctttaacataaaagatgcagatcaaatagctaaaagtaaaaaactatgaggtcgaaacggagattctgcagagagaaaatcataaaaatttgcataatatttttagagagatgtctatagaaacaaaggaacagaatgctataataaagacatattaagataataaaaatgagattttagtaatttaaattattacaaagaaaagataattgtaagagctgagaaagttccctcccaaataatcraacaataacaaaaaaagacaacaaaaactaattcaccatcaccatcaccgtcaacaacaaaaaacagaataagaattcaagtgaggaaatattggaagagagcac

SEQ ID NO: 302048 - DNA, 509 bp, Homo sapiens
ttgcaagattttatctctttctaatgctaaaaagttactgaactggaaaaagtataatttaatatgttactcgcttgccaaaaaaataaaagatgcctggcttggattttatccaggaagacatctgtttgcctggaactaataatagcacaatcctaatgatgtgccaaacaagttattttaatagaatgctttgttttgggaggttaagtttggttactcagcaaaactgctgtgtttgtaaaggtattgtgtttgaatcttcaagtagggaagctggtgggaaagttggtgrgagatgctgaacattttaaagataaagctaaactgatagggtatgcttcatttctaaatgacttttcaagattagagaatggatgcaaggtagtagcaaatcacaattcaagttttaaaattgatactggagattctccattgtttcaaaaggcaaagatattcattccaatgtctagtggctatttctcaaaacctattcaaagtaaaaattc

SEQ ID NO: 302049 - DNA, 542 bp, Homo sapiens
aagactctaattcttatcttgtttttgcccatttgtatctttttttcattttgtaaatggctaggtttttctctttattttcaacatttcaaaatttctcagccacatatctaggtatgaatcattatccatttgtactgctcagcatttgacaagccctttttatttgaagatatagttctcccaattatcctaggaaattttttctattatcatctttgataatttccttcccttcactctgccttttgaaaatcataatggtctaaatttgtacattttagcttagccctctttctttctttttaatattttccatcttttttctttttgctctacatctagataattgactttatctttcaaaatttctgttgagtttcttaattaaaaaatcatttctagaacaacaraaaaacccttcttattctgattgtctttttaatatcttggtctttcggcttgtcaaattgtttgaattctcctgcccccttatccattttggtaactctccaatttttttctaccacctttctatgttc

SEQ ID NO: 302050 - DNA, 575 bp, Homo sapiens
cctgggcattttttggttaaagcttrgctaactttctcaaaaccctctcataataagcagatgttatcattttttggcctttcaggaagtcaacaagcaaaatgccttaagcatctctaaaattgttgctatgacctttgctcttgaccagtccccttgtgctttgactggaacacttccaccttttggtagccattgctttgattgtgctttgtcttcacgataatactggcaaagctatgttttgtctcctgatacaattcttcaaagcaatgcttcaggagctttcttctacttgtttaaaatttccattgaaagctttgctcttctctgcagttgatctgggtgcaatggttttggcaaccatcaagtggaaagtttgcttaactttaattttttagtaagaattgtgtaaactgggccaactgagatgtctataatgttggctattttttctattattaatcattggtcttcttcaattatgccatgaacaagattaatttcctccttgcaaattgatgtgaatggtctgctactgcaggcttcattttcaacatgtctgatctctcctt

SEQ ID NO: 302051 - DNA, 575 bp, Homo sapiens
cctgggcattttttggttaaagcttagctaactttctcaaaaccctctcataataagcagatgttatcattttttggcctttcaggaagtcaacaagcaaaatgccttaagcatctctaaaattgttgctatgacctttgctcttgaccagtccccttgtgctttgactggaacacttccaccttttggtagccattgctttgattgtgctttgtcttcacgataatactggcaaagctatgttttgtctcctgatacaattcttcaaagcaatgcttcaggagctttcttctacttgtttaaaatttccattgaaagctttgctcttctctgcagttgatctgggtgcaatggttttggcaaccatcaagtggaaagtttgcttaactttaattttttagtaagaattgtgtaawctgggccaactgagatgtctataatgttggctattttttctattattaatcattggtcttcttcaattatgccatgaacaagattaatttcctccttgcaaattgatgtgaatggtctgctactgcaggcttcattttcaacatgtctgatctctcctt

SEQ ID NO: 302052 - DNA, 573 bp, Homo sapiens
cgattatagaaaatgcaaaaagctcatataattctgtttaaaaacacattttgaaatagtcccaactatactcacccctgggtktctttgaattatagaacagatgtttcaacatccttaaggaagaacttgattcttagggcaaagttaatgttgcaagagcaaggaacaatttgttagagtacttatcatggtcctcaggaacattattctgtgccctcttggacccaaagacattacattttgttattactgagtctgcttgattcctcctcctcttatttttcctcctccttttccttatcttcttctccacctcctcctcttcatcttctttcttcttcccacccttcactacccccatcctcccttaaagaaaatacttgataattaaatttaaaaactttatatacaatgatgctgttgatttccaaagtatcttactaggaatagaatactacaataagaataataaaaatgtaacagattattgatgatatagtatttatgaaactattgtagtcaatataatttaatctaatagaattctatttttataactataaaaaccaa

SEQ ID NO: 302053 - DNA, 674 bp, Homo sapiens
atttatgttaaaaattcatacctgcaaaatgtcatttgcctatacacacaactgcttctgttctgtattctatgctttctaggtcacaggtacaatactacctttttccccactgaagaggtcaatgaagtcctctgaattgattttatcaataccaccgatttacctttacagtttatctcattttatattttatacataataatatgaaatgtattaacattttataaattcatataagatattaagttttagatttgtttaaggagttatgttatataatttgtaaaggggatcatcaacttctggtttctacttgtcttttaaatcaaagattaacttaaactagacaactgactccccactccaagtttggccgtcaccttgggtagcattttctatgtagatggcccatctgcttctccgctcgggtctttaatccccacatctgtggtgtcctttacttccagagtacttcatccagctgttctctaagctacattctagactttttttttttttaatagttcattacttcttctcctttccaatgttagagccaagcaaccaattatcaattccatatccattacagctcaatrgttctcagtcttggttgcactttagagtatctggagacaatttcaaaatttctgcatttcagattcattaaa

SEQ ID NO: 302054 - DNA, 575 bp, Homo sapiens
cggtgccagcactggttcttcattttcaattgcacctgggttctcagtgttggttatttcatgttcccattctccacaatacatatttgaaacatgctttacttttctcagactacaaattacctggctttaagaattcagagtaactttatttttcctgacatatcaaatgttctcatttttcctcccttcccagccttaaactttctactttattgttttgtatctcacaacttgtgttttcattcagttaccaaaacccgaacatctcctctgagttatgttttctatccctccttatatcaaagatctcaaaaaccatgtggtttatatattttaagactttgtcaatttctcagtattgctgcaattatgaccttcaattgggcatccacttwttttcttgattgctgaaatagtctccaataggtctccctgcctctagtctgcctctttctgagcaattctctagagtgatatatccaaaacgcataccatattgtgtctttcttttgctagtcagtttatcagctttacctttattataaagtctaaattgccagacacactggcta

SEQ ID NO: 302055 - DNA, 599 bp, Homo sapiens
gatcctcctgcctcagtgtcccaaattgctaggattacaggcatgagccactgcccctggccagcaaataattatatataattatatacagtgcatataatgttcttaggtatgtattaaaatgatggctctatgtaaaaagaaagtttcggctgggcgcagtggctcactcctgtaatcccaacacttgggaggccgaggtggatggatcacttgaggtcaggagtttaagaccatcctggccaacatggtgaaaccccgtctctactaaaaatacaaaattagctgggtgtcctgtcaggtgcctgtaatcccagctgggaggctgaggcaagagaatcacttgaacctgggagctggagattgcagtgagctgagattgcaccattgcactccaacctgtcaacagagtgagactccgtctcaaaaataaataaataaatacataaatamataaataaataaataaataaataaataattttacacaagagaactttgctttagtaccacaatcactgtaaacacaatctgtagcccttggtgttcggagtatatttcctgttttccagtcactgggctattttggttttatttct

SEQ ID NO: 302056 - DNA, 601 bp, Homo sapiens
ttcttggtttccatctagatataaagagaatggaatataaatagaatatcttatagaactaataaaaataacatcctttgaacacaatttaatggtataaagaggcgatcacaatataccattaactgcaaaaaaaagacacaaaactgttcacagtatgtatacatgcagaaaaaaaagattagtagaaaatacaygggaaatattaacagcgattctctctagtggtaaaattatgcgagacttttactcttaatacacttctatattttggacaatgaacatagagtccttttaggatcagataaaagttccatatacgcatatgtacctacttttggtcttttctctcaaaatctccattccccattctgacattagcacttccctctcaacttgggtctgaactgtcagcttgaccaagggctattgggacagcaagcagggtgtcccaaaggcctccatcagccctggcacagatgacagtctcctaagtggagtctgccctgcccctggattttggcataaaagagctggttaaaaatttgagctatgcttttgaatgcatgcttttgaaaaaaatgcatcttgggaagttact

SEQ ID NO: 302057 - DNA, 584 bp, Homo sapiens
cagtctttgattgcccttttgtcttctaggaataatggccttatattctggactgaaacctactatgattcgagcattccctgacaatggagcactctttttggcctacgaatatagcaggaatttgatgatgagccagttggaagcatactgaagtgtcttggagggcctgagccaagcacaggtgtttgaggactacagttcatttcagggtttcttgtagtacaagaccagcgtgaagtcattctgatttcttgggaattttgcctttctgtcttctcttataccctatatcttaacttgtttggaagaacctctattttacatcatgtcatttctgcccataattgtactgaaatagagaagtcactgctctttcccttggtaaaatagagagtggtcagtagccttatgcacctaattcaaaagactgagtacagttctgtcagggcttttacataaacctctacttgcacattcaatttggacagttatgtgttgagggaaatacagtttggttccatgtttatttcaaatattrccagaaaaacccagaggtgatcatttctcataaagatgcttat

SEQ ID NO: 302058 - DNA, 578 bp, Homo sapiens
atgtggatatattgtatgattctctggacttttgtatatgattaaaattctctataacaaaatgtttctaaaagaaaaaacagagtaacagtgtatatttcatataggtgttatgggtattaaatgakatatgtaaaagtgcaatactgtctgggatacagaaggggttttgaaaagtttatttctccttttattttctcttttaaaatacacctcccccacaacacacagaaaagacacacacacacacacacacacacacacacacacacacaccaggagtcatccaaaaacagtctttgtaatgttctgcaagggttgaattgccctagtaagggtttgtgaaagacttggatcttttttacattgaaatcaaaggctggtgattttagatacacttcagggtcctggagccttgggtactggaccttcctactttgggaaaataatcaactcctgagctccataaacaataaccagtatagaatagaaagcaggattctctgaggagaagccagagtccccagcatgtgggcagcacctaaagcgtgaccctcagactcagggagggaccaagg

SEQ ID NO: 302059 - DNA, 556 bp, Homo sapiens
tgtttttaccattctgttttcttcctttgaatgggtcatgtttttctgttccttggtgtgccttgtggtatttttgttgaaattgggcatttgagaaaatagctrccttcccttgtctttgcagactggctcttgatgtaacagtccttcactgagtggttgtgtgtgccctgagccttgagatcagcctgaggtcaggcttaagatcttctcagatgttttctgagcatgcatcttgcctgggcctcagtgtggctttttcaattcccctgtatatataactgcttttatatgccttaatgtcctaaagagtctgagctcagattctcctccaggccttagatggtctattgtatgtctctacttataatctcctgccttccacaaaatttgcttttctctaattatgtatacatagcttttaactataatacatttcagttcaatttaatgcctcatttaccatgttatatgttaattttatcaacaagtgaaagtaccctttcagatacagttcagttactgtttgcctcatttaaccatattatgtaaaatt

SEQ ID NO: 302060 - DNA, 556 bp, Homo sapiens
tgtttttaccattctgttttcttcctttgaatgggtcatgtttttctgttccttggtgtgccttgtggtatttttgttgaaattgggcatttgagaaaatagctgccttcccttgtctttgcagactggctcttgatgtaacagtccttcactgagtggttgtgtgtgccctgagccttgagatcagcctgaggtcaggcttaagatcttctcagatgttttctgagcatgcatcttgcctgggcctcagtgtggctttttcaattcccctgtatatataactgcttttatatgccttaatgtcctaaagagtctgagctcagattctcctccaggccttagatggtctattgtatgtctctacttataatctcctgccttccacaaaatttgcttttctctaattatgtatacatagcttttaactrtaatacatttcagttcaatttaatgcctcatttaccatgttatatgttaattttatcaacaagtgaaagtaccctttcagatacagttcagttactgtttgcctcatttaaccatattatgtaaaatt

SEQ ID NO: 302061 - DNA, 462 bp, Homo sapiens
ctggcagtgggtcagtggctattgaataatcatgcccaaaagattcagattaatgtccatggtgggagtttctagtgacttattcatggttgtaccatatacctctgtattcatagcttatatctctgtatttttaaacagatgttatccccaagaaaatgaaattagacagaatgttcaaaagaaatataataacaaaaaggaactttcttgttacgatacatacccaccgctagaaaagaamaaggttgacatgtctgtcctaaccagtgaagcaccaccacctcctttgcaacctgagacaaatgatgtacatttagaagcaaaaaacttccagccacagaaagacgttgcaacagcatcccctaaaaccattgctgtgttacctcagatgggatctagccctgatgtgataattgaagaaattattgaagacaacgtggaaagtaagttaaaatgtaa

SEQ ID NO: 302062 - DNA, 643 bp, Homo sapiens
tgctctaatctttattatttcttctgctacttttgggtaattttctctttttctgttgtcttatggtatatagttaggttcttaatttgcaatattttaaaattgtgtatatagctataaatttccctcttagcactgttttattgcatctcatgagtttggtatgttttgttttcatwttcctttgtcttgaagcattttctaatttctcttaggatttcttctttgacctgttggtagtttgtggtgtttagtttctacatatttgaattttgcagtttttctcgtttttgatttccagtttcctttcattgtcatagagacaaatacattttatgatttcaattttttgaaatgtattaagacattttgcagcctaacatatggtctattctgagaatgttctaagtggccttgtaggaaaaaaaaagaaaaggtatattttactattggctagagtgttttgtgtatgtctgttaggacctgttggtttacagtgttattcaagtcttctgtttccttattgatactctgtctggatgttttatgcactattgaaagtggaatattaaagccttctatttttattattgaactgtctattttttccttcaattctgtcaatgtttgcttcatatatttg

SEQ ID NO: 302063 - DNA, 548 bp, Homo sapiens
tctgcttcctaaaataaaagaataatatttgaattaattttggtatatccaagtgatctcaaagttatttttaaggcaaattatagataaatctctaaagccttagaatgatttaatcagaagagcacaattgctgaccttcagctgtttttgcttcagttcttgctcttccaactgaatttgttcttctaagtaatcttcaaaggtctgtttcctttctccaatagcagctttaatgggcctaattagaaacagaaagttatttaacatgcaaatcataatgtgtgaatattttacacttagtgtgcctggtatagaaacccttgacaacatggagaactaacttttcccaaaatcagtgcctccctttgagaacctaacaaaagccacaatccctctccacaccttaaaataaagaaacatacaacactcttcacatgactttggagtcctaagaacccttctgaagtccatctatcgaccacagattaacacatggagtaacatattcatcaaataacttyaaaatgtatttcaaaaatagatca

SEQ ID NO: 302064 - DNA, 645 bp, Homo sapiens
attcacttgttaagtagttaggtctaagcaatagtatttggtagccatttgaaaattagtaaactcataaatggaaataaaaaattattttattcttaaataaccataattactaataatatgtgtgtacttcttgggcccggcacaacttctcaaattttgaaatcagacaagatagccaccttcatttcttgtaccacactcagttttatgtgattattattatttttttgagaaagggtctcactgtgttgcccaggctggagtgcagtggtgtgatctcagcycactgcaacctccacctcttgggttcaagcaattctcatgcctcagcttcccgagtagctgggattacaggcatgtgccaccatgccaggccaatgtttgtatttttagtagagacaaggtttcgccatgttggtcaggctggtctcaaactcctgacctcaagtgatccacctgccttggcctcccaaagtgctgggactactggcgtgaaccaccgtgcctggcctgatttttatttttttaaatttatataaaaggaactggcaaaaatttagctttgcaaaggcatgacatcattgaaatgaatgtagctatcttatgttgaagttgtgaaatgcctcaagttagcagcttgcc

SEQ ID NO: 302065 - DNA, 645 bp, Homo sapiens
attcacttgttaagtagttaggtctaagcaatagtatttggtagccatttgaaaattagtaaactcataaatggaaataaaaaattattttattcttaaataaccataattactaataatatgtgtgtacttcttgggcccggcacaacttctcaaattttgaaatcagacaagatagccaccttcatttcttgtaccacactcagttttatgtgattattattatttttttgagaaagggtctcactgtgttgcccaggctggagtgcagtggtgtgatctcagctcactgcaacctccacctcttgggttcaagcaattctcatgcctcagcttcccgagtagctgggattacaggcatgtgccaccatgccaggccaatktttgtatttttagtagagacaaggtttcgccatgttggtcaggctggtctcaaactcctgacctcaagtgatccacctgccttggcctcccaaagtgctgggactactggcgtgaaccaccgtgcctggcctgatttttatttttttaaatttatataaaaggaactggcaaaaatttagctttgcaaaggcatgacatcattgaaatgaatgtagctatcttatgttgaagttgtgaaatgcctcaagttagcagcttgcc

SEQ ID NO: 302066 - DNA, 579 bp, Homo sapiens
tttttgtgtcttaaggaataggaagacctgaagagagggagagagacaagacgacaactgstgggcagattagtcagaacacacttaacatttattaagttccctgtctcatatgggagcagtttgtggcaccccaaaatgattagtaacatcaaagatcactgatcacaaatcaccataactgatataatactaatgaaaatttgaaatattgctagacttaccaaaatgtgacacagatatgcacttggaaaaatgacaccaatagatttgctctatgcagtgttgccacaaatcttccatttgtaaaaatttataaaaaatgaaatatttacaaagtgtaatctagtgaggtgtaatatactaaggtgtgtgtgtatatatatgtttagtcatacacacactatatattactatatatatacacacacacatatgtatatatacgccttacacaaatgtttcacctccttggagtattctaaacagcacccaagattgagaaaatgaatgaattaaaatgggaaatttttgcaggccgaaagagtgagggtaacgatcaactcagtataccactgg

SEQ ID NO: 302067 - DNA, 579 bp, Homo sapiens
tttttgtgtcttaaggaataggaagacctgaagagagggagagagacaagacgacaactgctgggcagattagtcagaacacacttaacatttattaagttccctgtctcatatgggagcagtttgtggcaccccaaaatgattagtaacatcaaagatcactgatcacaaatcaccataactgatataatactaatgaaaatttgaaatattgctagacttaccaaaatgtgacacagatatgcacttggaaaaatgacaccaatagatttgctctatgcagtgttgccacaaatcttccatttgtaaaaatttataaaaaatgaaatatttacaaagtgtaatctagtgaggtgtaatatactaaggtgtgtgtgtatatatatgtttagtcatacacacactatatattactatatatatacacacacacatatgtatatatacgccttacacaaatgtttcacytccttggagtattctaaacagcacccaagattgagaaaatgaatgaattaaaatgggaaatttttgcaggccgaaagagtgagggtaacgatcaactcagtataccactgg

SEQ ID NO: 302068 - DNA, 579 bp, Homo sapiens
tttttgtgtcttaaggaataggaagacctgaagagagggagagagacaagacgacaactgctgggcagattagtcagaacacacttaacatttattaagttccctgtctcatatgggagcagtttgtggcaccccaaaatgattagtaacatcaaagatcactgatcacaaatcaccataactgatataatactaatgaaaatttgaaatattgctagacttaccaaaatgtgacacagatatgcacttggaaaaatgacaccaatagatttgctctatgcagtgttgccacaaatcttccatttgtaaaaatttataaaaaatgaaatatttacaaagtgtaatctagtgaggtgtaatatactaaggtgtgtgtgtatatatatgtttagtcatacacacactatatattactatatatatacacacacacatatgtatatatacgccttacacaaatgtttcacctccttggagtattctaaacagcacccaagattgagaaaatgaatgaattaaaatgggaaattkttgcaggccgaaagagtgagggtaacgatcaactcagtataccactgg

SEQ ID NO: 302069 - DNA, 572 bp, Homo sapiens
tacaacattattgatgatatcctcctgatttatgtttacagcatctgtggataataactccatttgtcagggagaccctcatgaatactaatttggggtggcaattcaaccatgaccagactggctttaggtratgctctttcactcttatgtggtttgctgggaatgtagtacttggagtgtccttaatctctctctctttttttttaaaggcacactggattcaggagatttgaggtatagtaatttttcagaagttcacaggtgtttgcaagatcacatttaataaaatagaggatgtgcagtatttttgaaatcaaatctgtgtttctgaaagagattctgagtttaattctaatgtctctgagtaccaaagagaagcttaactccaacctctactttggatgaaatatgacaaaagagcaaagtccttaaacttattttctttaaagcataaatacatgatcttgttttctcctaatgtttgctaaaatacatttgttaggctgttagagacaatgtcttagatctcaggaaggtacacactgtaaagatagggaatggaactaaca

SEQ ID NO: 302070 - DNA, 549 bp, Homo sapiens
aagcaatgggatcagcagagacaggccatacttttgcctttagtgggaaggagagatgatggggcaatggaagaatagtgtatggaggaggtatttggagtacagatttcaaaagtctccggaaattatttacttatagaaagaggaccccacctaagttgaaactaccatatgagggtcttagrtgaaatgaattgttttgttttgttttgttttcttttttgagacagagacagagacagcctgctctgtcacccaggctggagtgcagtggtgcaatctcagctcactgcaacctctgtctcccgggttcaagtgattcttatgcctcagcctcccaagtagctgggattacaggtgtgcaccaccatgtctggcaatgtttttgtattttagtagagacggggttttgccatgttgaccaggctggtctcgaactcctggcttcaagtgatccaaccgtctcagcctcccaaagtactgggattacaggcacaagccaccatgcccaggctgatcaaatgagatttttgtgctacacaaagtgga

SEQ ID NO: 302071 - DNA, 578 bp, Homo sapiens
aggactaatttcacctggacaacctcctggaaactgattttttattttggaaattatgagaaaataattcgttccattcataagtggtgtgcacatgtgtgtgtttgtgtgtgtatttatgagcttgtgaataatgaagttacacaaaagtattagcagcaaccagatcttatggagtattggcctgcctgtggttctcaagtaaatcttagatgcttttgataaaagcagtttggattctgtgtatttaaatctggcatttaaaaaagtccgtattggtgatgatcttagttatgatcaagctccctttaagattttagacatttactatacgatctacatatcrggttataaaacttcccaagcaactgaagtcgctaaagacaaatgatggagaggttacacaaggaaaaattgcaaacactggaagtgaacatgtccttgtttgcatactagcaaatgagaattcaggtttcatgtcaatttcagtatgaataattccagcctataacaagaacagatggtgaatgagtcagttaatttgaattgttttgaaaataagaatgttttccataaag

SEQ ID NO: 302072 - DNA, 635 bp, Homo sapiens
tggttgtgttttcttctttgctatacttgattgcaaactcagaacccaatttcagccaataaaaagtatataatatatcattgtgattttgcttttaggtattagccttcgttatggctttactattatttttattcctcaatttctttattttgtttttaaccctttattgacggaggaggtatttatttctgtatatccttttaggtcctttcaggaacatagggagtaaaaataaatgtatttttccaattttcttgttaagatgcactacaggaatggaaatttctagtagaaagcactttatagttctgaagttgttttgcatatttgtttatctygtattggaaagtgagtttagtaagagatcataatcaaatttacttccagtgatttcccattttaacttaaaaaaatttttagaagattatcctttacatttgaataatgttttttaaaaatgcgttttattatctgtccatcttgcgttaagtcacacagtactgatgaggggctagtgtgagataatcttctctacttcagtgttttttttcttttatgggatcttatttgtaaattaaatggggacaactaacacttttgcagcatttagtctcttcattattgatttattc

SEQ ID NO: 302073 - DNA, 635 bp, Homo sapiens
tggttgtgttttcttctttgctatacttgattgcaaactcagaacccaatttcagccaataaaaagtatataatatatcattgtgattttgcttttaggtattagccttcgttatggctttactattatttttattcctcaatttctttattttgtttttaaccctttattgacggaggaggtatttatttctgtatatccttttaggtcctttcaggaacatagggagtaaaaataaatgtatttttccaattttcttgttaagatgcactacaggaatggaaatttctagtagaaagcactttatagttctgaagttgttttgcatatttgtttatctcgtattggaaagtgagtttagtaagagatcataatcaaatttacttccagtgatttcccattttaacttaaaaaaatttttagaagattatcstttacatttgaataatgttttttaaaaatgcgttttattatctgtccatcttgcgttaagtcacacagtactgatgaggggctagtgtgagataatcttctctacttcagtgttttttttcttttatgggatcttatttgtaaattaaatggggacaactaacacttttgcagcatttagtctcttcattattgatttattc

SEQ ID NO: 302074 - DNA, 601 bp, Homo sapiens
ataaatttaacaaaagtgtaaaacttataatctgaaaatcataaaacattgttgaaacaaattaaaggggatgtaataactggaaagatatcttatggtcatggattacaagacttaatattgttaagatagcagtgctcttcaaattgatctacaggtttaacacaatctctaccaaaatcttagctgttgtctttgcaggaattgacaagcttatccttaaatttgtgtgaaattaaaagaacrcagaatagccaaaacaatcttggccaagaacaaagttggaatactcacactttctaatttcaaaacttgctacaaagcagcaataagttgttacttacaataatattaagttatagtaattatagtaagacagtgtggtaagcatatacatataaacgaatgaaatagaatggagagtccaggtaaaaaccttcacatttgtagtcaggtgattttttgacaagggcatcaacataactcagtagtggaagaatagttttcaacaaatgatgctggtacaactggatattcacattcaaaagaatgaagttagtcctctctctcacaccatatgcaaaagttaactcaaaatgaa

SEQ ID NO: 302075 - DNA, 527 bp, Homo sapiens
acactttcattttagcccatattatacaatcaatttctgtaatttttatgtttacttatgtattaagccttgaagattcagtttaaggagatttatttttttctttttactgaacatgaagttacttcataagtgccttgattggatgattggaactattagtaatttacccctcaaattatatctaataatctaagcattcattgtgctttcctaaaaacaatcaagtcctgatcttttctggatcatttgaacttaaatggagaaaaggcagagcatctatgtattatgagtcactgccaatcaaagatatcagaaatacttctctaaaattaatgtcatatttaatatatgataatttgcttctataattcctttcaggagcawacctattgaataaaatatagtgtatgtgtattgatttttgataatgtatacacatatttcagttgttttgaatctacctttataaaaagcttttggtactattttattacagttattactttttaattttttttttttta

SEQ ID NO: 302076 - DNA, 592 bp, Homo sapiens
tttgtttttctgcaaccaagtcaaggaatagttcctgaaaaacaattgcagctgggaattcttcaactgaccattaaagaccacctgatgccaacccaccaaccacctggaaccagccaactaagagaggctggtgatttggggtttaagttttcccatcaagactgttcctcactgccctgactacagttctttgcactgcagtttgcctttataatttctaactctctgccacccagcttgggagtgcacttctgttttacagaaggctgcatctccctaatctgaagattgattttttttaagaagataaagctgtcttttttctccatagatctcgtggtcttttgttaacaagctttagtttataggccaagtttttgttatctgtatgtcaaatcagcagacatcttgggtcacttaaattttgtttttcaaattttgaaatgaatagctttattgctttagctcataaacttaagtcttatttttttttcttatgggtgcatagtagrtgtatatatttatgggacacatattatattttgatacaggcttgcaatgcataataatcacaatatgctaaatgggg

SEQ ID NO: 302077 - DNA, 418 bp, Homo sapiens
gagcctggtagatttgctgggtggctagacttagaagagagacaacaatcaccgcaatgcagttcttgggaagccacatccataggaaaagggagagagtgctccatcaagggaatccccccaaaggacaaaagaacctgaacaacatccttcagccctagactttccctttgacagaggctacccaaatgagaagaaaccagaaaaccaactctcrtaatatgacaaaacaaggctcttataaacccccccaaaatcacactagctcatcagcaatggatcagaaccaggaagaaatccctgatttaccggtaaaagaatttagaaggttagttattaggctaatcagggaggcatgagagaaaggcaaagcccaatacaaggaaatccaaaaaaaatgatacaagaagtgaaggga

SEQ ID NO: 302078 - DNA, 572 bp, Homo sapiens
aatcaaaacttcaggaaacattggacacactaatagaaatacaaaatgctctggaaagtctcagcaatagaattgaacaagtagaagaaagaaattcatagcttgaaaacaagttcttcaaattaacccaatgcaataaagacaaacagaaaaaaataagaaaatatgaacaaagcctccaagaagtctgggattatgttaaacgactaaacctaagaataatctgtgttcctgagaaagaagagaaatctcaaagtctggaaaacatatttgcgggattaatcagggaaaacttccccaaccttgccagagacctagacatccaaatccaagaagcacaaagaacacctgggaaattcattgcaaaaagatcatcgcctaggcacattgtcatcaggctatttaatgttacgatgaaggaaagaatcttgagagctgtgagacaaaagcacccggtaacctataagaaaaacgtatcagattaacagcagatttctcagcagaaaccctrcaagctagaaggaattggggccctatcctcaacctcctcaaataaaacaattatcagccaa

SEQ ID NO: 302079 - DNA, 568 bp, Homo sapiens
ttttccgtgattggtaaataagacacccacaagcctcttggtcattaggatcatcatgctaatttaaagcatcctgtgaccgtaaaggaagaccctgctgacagtatggcagaacaaaaggacagaaggaactaacatctgtgatgatgtcattaagctgccaaattcttcmaccctgaagctgcccagatcacttgctgttgcttgatgaaaaaaatcaatccctggtacttaaactacttttagtgggttttctgttaattgtagccaaaagccttctgggagtagcagtcatagtaattgttgttataattgctaaaattccaccgtccagagtagtgtaaaaagcaaaaattgttagttaaagaactgagctcaaatcctagtaactccctttagcacactatacttcagtttcctgacaattaaaatacagatctacctctgaaaatgccttgaaaagtcataagaacctacaaaatcttagagaaatattattactacccactctgcaattggtagtctctagggaaagcattggtagttgagagtcagcagatcggtttct

SEQ ID NO: 302080 - DNA, 577 bp, Homo sapiens
ctgtcaccccagggaaactaggaattttggagattcttccagctccttttcctgtcattcctttgtctctgaatcaaccaatgggcatctcatacactcaactctgtggcatctaagttatgttcctataaattatctgccagctctgatttttagtactgatgggctttctaaggctgtgtctcctctctctgctgccaagtgagtccccaggcttataacagaacrgttgggcaggtggtcctttgtgggtatatatgtgaaagagtccaggcacacaggggatgcagggtgaggagagaaagatggaaggaggtatgggatataactgaataaataatagctagaagaaaaaatttgaaatgtttctaacacaaagaaatgataaatgctcaaggcaatggatatcctaaatcccctgacttggtcattacacattctatacctgtgtaaaatgtcacatgtaccccataaatatatacaaatatgtatcaataaaaaagaaatgtataaatagatatattagtcaatcagttgatcatttgattgatggccagggccttggactctactgtat

SEQ ID NO: 302081 - DNA, 595 bp, Homo sapiens
taattgtttgggagctgcattttgttaaaaaacaattagatattgctgaactctaagcaatatctaactctgtatcattaggctttccttgtcaaagtcaggctactgctagatatctccctttggtggaggtggagaaggagagttataaatcagagatgggagaggggagagaatagtgtggatgatttcttagytctgggaattagccaaaccagcgaaacaggtttggaagagagttggatagaatgtctgttctcatttttgcaggggtttccctaaaggcccaatcaggtccttctcacatctacacatccactttaagtcacttcccattagaatcctattctcctaacaaattgctgagttcttggttttatactcaagaaacagtaactcaaaaaaaaaaaacaaaaaaccttccaaaatttaaaccagtaattaatggtgagaacatcaggcaattcagatggcaggggtggcacttagttatctttatacttgctctcacatcccccccataatagaaatctactttgcactgcaagtaacttagatttgaagccagaccttaccctccattacctgtaagata

SEQ ID NO: 302082 - DNA, 575 bp, Homo sapiens
atgccaccgctgatctgacaggaggcaaagctcagacagtgatgcttcacctgccactcaactcctgctgtgcagcccggttcctaacagaccacaacctggtacaggtttgtggtctgggagttggcagcccctgctttagatcatgcatttcttaagcacagaattcgttgctgtttcatccctgaggctgactgaaacattcattcatttaacatctagctatattgcacccagtacatattgtggagattctggtgccaaamtgactgtgtgtgaatccccattctgtctctttccagctgagtttcccagggcaaaaaatataacttctctaagcctcattctctagttgtaaaatggaatagaaagtttcttcttcaaagggttacttgagttctaactgaggttatagatatgagatgcttagcaaaaagctgagcacagaatacatgatcagtaaaaactagttataattggttgttgctggggctgggaatgtaaaagtgagtaagacctggtctccaccctcaagaacttctcagtgtaataggagacagataagtaaagaattg

SEQ ID NO: 302083 - DNA, 575 bp, Homo sapiens
atgccaccgctgatctgacaggaggcaaagctcagacagtgatgcttcacctgccactcaactcctgctgtgcagcccggttcctaacagaccacaacctggtacaggtttgtggtctgggagttggcagcccctgctttagatcatgcatttcttaagcacagaattcgttgctgtttcatccctgaggctgactgaaacattcattcatttaacatctagctatattgcacccagtacatattgtggagattctggtgccaaaatgactgtgtgtgaatccccattctgtctctttccagctgagtttcccagggcaaaaaatataacttctctaagcctcattctctagttgtaaaatggaataraaagtttcttcttcaaagggttacttgagttctaactgaggttatagatatgagatgcttagcaaaaagctgagcacagaatacatgatcagtaaaaactagttataattggttgttgctggggctgggaatgtaaaagtgagtaagacctggtctccaccctcaagaacttctcagtgtaataggagacagataagtaaagaattg

SEQ ID NO: 302084 - DNA, 565 bp, Homo sapiens
ttgcactccagcctaggtgacagagtgtgactcctactctgaaaaaaaaaaatgacagatgagaaraaaggaaagccataccatggagctatcactgtagtccttgttcattttcctttgcaggagtctctggctcctgagggaagacaatatataaaatacacacacatttttgaggagtggtttcatagggagtgctgatcctttggaagcattaaaggagaaagaaatgaaagtggcaattgatatagttcaatttggctgagccaagggaaaagaaatgactataaagaaaagaaataagaattgtgatggtttccaacattttgcaagcaatggctagaatttggaacactatgctaaagcaaaggcaaaccagaaaagaaagaagttgagggtgattttactttgaaatgggggtggggagaaagaaatcatagtgtttaactctgtggtaaaatgtgcaaatggaatcaacaccgttcgttcattgacaggaatgcgcattcacctcaagggctgacaatggataaagcctcctcaatgacagttcagacttcaaaac

SEQ ID NO: 302085 - DNA, 551 bp, Homo sapiens
gattagaacctgatataaagaaatgtcaaacacacatggaaatgattgtcttatagagcactgagcttgccatcacragaaatcttcaagcatagagcagaaattgcctgttgcaggctttatagaaaatattcccatataacagtgggtctagatgacccctacagtgttttccaacctaagatcctataaatgtgtgatgttacggcaggcccagccagtctgatctcacgggagatcgctgagtcaaactgtgccagaagcacagcctcaggactctgagtgatgcatagccagtctgttccttcacctctccctgacattgggagtaatgttaatacatccctatatgcgtcctgacagctggagcctcctttctcataacaatgataacccctgacccctctggagggctcttgctccttctcagtgagtgtattgctaagagcatcacatttcatcatttgtgtattattcagaggggtctcatgcttacagcacgtgaaatgagcatctatttgaggtataaaattaatctctctaaaatgtat

SEQ ID NO: 302086 - DNA, 551 bp, Homo sapiens
gattagaacctgatataaagaaatgtcaaacacacatggaaatgattgtcttatagagcactgagcttgccatcacaagaaatcttcaagcatagagcagaaattgcctgttgcaggctttatagaaaatattcccatataacagtgggtctagatgacccctacagtgttttccaacctaagatcctataaatgtgtgatgttacggcaggcccagccagtctgatctcacgggagatcgctgagtcaaactgtgccagaagcacagcctcaggactctgagtgatgcatagccagtctgttccttcacctctccctgacattgggagtaatgttaatacatccctatatgcgtcctgacagctggagcctcctttctcataacaatgataacccctgacccctctggagggctcttgctccttctcagtgagtgtattgctaagagcatcacatttcatcatttgtgtattattcagaggggtctcatgcttasagcacgtgaaatgagcatctatttgaggtataaaattaatctctctaaaatgtat

SEQ ID NO: 302087 - DNA, 581 bp, Homo sapiens
gcccctggtttctttacaagaagtctccaactccttctcagarccctacaaatccagggaagagtgaccattgcttagcctcagatttcctgtgttgaattgcacgtccacactgagtcagctcagggaccttgtgcaaggcacctaaccttgtttcctcatcttgtacataagagtaacaggacctaccattgatacaggtaaatcggaaaatcattcaagttagtcctcacagaaaaagtggatccactgcaaagttacttagtcactacctaaacaaacacattgtaaaggtatttattttcaaatccacttcgccagccaccttttagagaccagagcttctcaaattttagaatgcatcagaattacctggagggtttcttaaaacagattgatgagccccatctctggattttctgattttaatggggccggagaattggctttctaggaagtttccagagaactctgatattgctggtttggggaccacacattgagatccgccgttatataggtgattagctttgttaaatattctctctattagataaactcctttgttctaaataagttaa

SEQ ID NO: 302088 - DNA, 601 bp, Homo sapiens
gttatactggtaaatatttgacaactatctgtttaaaaagtcctaactgtagtgtttcctatttacaaagtataaattctcctaccatagtcaattttatgatactaacattccccttgttccctaactcgttggttttatgtgcaaactgaatcaagtaatattttccctctccttagaaagatatcatattgctatctatttctaaaaatgttaccttcacaggacaccttggattctgttcaattaaaaatatagttctttggaaattagttactattcacaaagttataaaattctggccctttaaccttattaaacttcctacattaacaaatcccagcagagtgaagaagactcattctttccttaytgcaggacttcagttttctggagttagggaactagaggacttgcccattgagtggtcccttacagaggcagattccaagcagatcaagtagctcccattttccaaaacatctcaccaatccccaccaggaaatacgctttctggatattttgcttccaactgcatatccttgaaagggaaacaaagtatcctgttattattaactagtacctcacctctagagaattt

SEQ ID NO: 302089 - DNA, 565 bp, Homo sapiens
aagtatcctgttattattaactagtacctcacctctagagaatttcatgactcatcaatttcactgagaactttagacaacagcgtcctctgggaagaggaaatagaagagtgaatcatttgggagcagtggaaggtgggctcaggaatatgcctgcagcaagggacatggatgaacacaggtgtatgacrtagaagcagtatgaagctcctctgaggaagaagaattatagaaaaaaaggaggatacagaaaatcagtgtcaccaatctaaatgagaccagcagcaggtgatcagcaggggcttggaaagatattaaacttcctccaaggtcacacaagtgacagattttggggacacaagctcaaatctagggctttcctctctctgtctctcctccctctctactaggcttgtcgaaacaatattttcccctgagattgtaagcttatgaatcatgcgaaaggattaaatcttactcatcttatgtttcctgacagcacatggcatacaggaggtgttaagagttgtttgtggtgtagaatttactttttcttaatcttgag

SEQ ID NO: 302090 - DNA, 532 bp, Homo sapiens
tgctttcttgaaatcttcacaccccattaaaggtagagcattctgtcacatggagctcctgctgctgtgaagagagaaaaaaagatccccagcaagattctgaggagacttcggagtgtggaaaagcagatggtgtcctgcacatgggctgatgtgctcccaggtgggcctaygcgtagtgctcgtgtctgggagtgacatcattgcctaagatgggataaagttcgcatctgcacattgcagaccctcaaaaagtacttgttggattaattaatcttaaaaaaattttcctgtggacctgaatctctggcttctcttgtgtgtatgtgagcaacacaactccttatggaatttattaaaaagagtttactggtcataaacgggctagaccggcagcttccagttacaatgaatctcagttttgacattgagtactctgctgttagtgacaaattaagagaatgtcagcctgagtgttcactctatccggtacctgtcaactcattcacttaacaggtagaagggaaaagca

SEQ ID NO: 302091 - DNA, 529 bp, Homo sapiens
ctcattttcatttcttcatacatcctgtatttcagtcctcatctaccactggggtttccctatgtttaaaatgcaaataaaacaacaaaaaattgccattgagggtcttgatttaactgccatctagtaatataacgcaattatactaggtgtgctcaaacaatgaatcaatgatcattttcttccgaagagaatttagaaagccactgttacggtctttagggttttagtctcattggcacaattcttaamgcttttttctatcctgggaatacaactttgctttctctcaatttccctctgtgttggggctaaatgctcagaatttgagttttaagagctctccaactcccttgagccctttccccattcaattctcatagcatgcaattttatccatttctttaaatatagatcccacatctgccagccttatcttcccaagcaatcaaaaattttccaaagtgatatagacactttattcaaagattcctctaacttccttctctgcaattaaactccccatgtt

SEQ ID NO: 302092 - DNA, 529 bp, Homo sapiens
ctcattttcatttcttcatacatcctgtatttcagtcctcatctaccactggggtttccctatgtttaaaatgcaaataaaacaacaaaaaattgccattgagggtcttgatttaactgccatctagtaatataacgcaattatactaggtgtgctcaaacaatgaatcaatgatcattttcttccgaagagaatttagaaagccactgttacggtctttagggttttagtctcattggcacaattcttaacgcttttttctrtcctgggaatacaactttgctttctctcaatttccctctgtgttggggctaaatgctcagaatttgagttttaagagctctccaactcccttgagccctttccccattcaattctcatagcatgcaattttatccatttctttaaatatagatcccacatctgccagccttatcttcccaagcaatcaaaaattttccaaagtgatatagacactttattcaaagattcctctaacttccttctctgcaattaaactccccatgtt

SEQ ID NO: 302093 - DNA, 527 bp, Homo sapiens
agatataagtgcagcaacaacaaactaaaactgaaattctgatgtataaaagcagtcttaactaaatgaatattcatcatgttaaataagaaatataaacaatgtgatgtatgtttaatatatagttaataatattgtaagcaaaatctattctttgtacatgttttagaaatatccttggttccatttaagaagaaagagacattttgaaaatagacatatatgaatagaactgctttagaaaatattaaaacgctttttwaaaataacaaaaaaagcacattaattaatgtgttacaggtggaaaaagatcaacagagcagaatagctcagataaagaccatgtttttatttaataaatataaaggaaattttatgtcagtgagtttggattgattagtcaataaattttatggggacaattgataagaagttttgacaaaaatttattttgattatgccttgatctacataaaaattcatctaagaaaaaatgtgatttctggatgtgtaataattcattaagc

SEQ ID NO: 302094 - DNA, 527 bp, Homo sapiens
agatataagtgcagcaacaacaaactaaaactgaaattctgatgtataaaagcagtcttaactaaatgaatattcatcatgttaaataagaaatataaacaatgtgatgtatgtttaatatatagttaataatattgtaagcaaaatctattctttgtacatgttttagaaatatccttggttccatttaagaagaaagagacattttgaaaatagacatatatgaatagaactgctttagaaaatattaaaacgcttttttaaaataacaaaaaaagcacattaattaatgtgttacaggtggaaaaagatcaacagagcagaatagctcagataaagascatgtttttatttaataaatataaaggaaattttatgtcagtgagtttggattgattagtcaataaattttatggggacaattgataagaagttttgacaaaaatttattttgattatgccttgatctacataaaaattcatctaagaaaaaatgtgatttctggatgtgtaataattcattaagc

SEQ ID NO: 302095 - DNA, 527 bp, Homo sapiens
agatataagtgcagcaacaacaaactaaaactgaaattctgatgtataaaagcagtcttaactaaatgaatattcatcatgttaaataagaaatataaacaatgtgatgtatgtttaatatatagttaataatattgtaagcaaaatctattctttgtacatgttttagaaatatccttggttccatttaagaagaaagagacattttgaaaatagacatatatgaatagaactgctttagaaaatattaaaacgcttttttaaaataacaaaaaaagcacattaattaatgtgttacaggtggaaaaagatcaacagagcagaatagctcagataaagaccatgtttttatttaataaatataaaggaaattttatgtcagtgagtttggattgattagtcaataaattttatggggacaattgataagaagttttgacaaaaatttattttgattatgccttgatytacataaaaattcatctaagaaaaaatgtgatttctggatgtgtaataattcattaagc

SEQ ID NO: 302096 - DNA, 534 bp, Homo sapiens
tttggccattcttatcatctccctttaactcttcttctgaagaaagggagaaaaaaaagagatgaagagaactggccttgtctgctcctgaaatataaagtgaagactataggttcaaatgactttagttgcctctaaatggtttcccacttatttgttcatagataccaaaagaaataggttaaaaatttaggtcaakggataagcacatttaacataaacatttttaaataaccaaaataaaattattcatacttctatgcatttatttttatgtattttctcctagcctttatcagcttagtaggaattgagtaactgtaaacctcaaatctatgagcaatgccaacttgtcattagtgcctcagaaactaatggtttctaaagagagaaaatggtactttaatgaattttattatctctgctaccttcagcttatgcaagaggcctttacagcttgcttgagaaaaaaaattaagtagctacaaatatcaaaaatagcagctctctctatgccattcgtatttcaaaact

SEQ ID NO: 302097 - DNA, 438 bp, Homo sapiens
cagaacccattttacgaagcactttgtcccttggtggaragggtgtattttgctggggagaaactcactcatgtgggctgcctggattcctcagaactaccaggaggagaggttaagtctgctggtccccaaagagtgcagccacccctcccactaggggctcaggcccaggaaaatcctaattctgtccctgaacctctagctggagttactggagatcctgccaggaagccccgcccactgaggaaggatgggtcagagttaggcctgaagaggcactttggccacagattaccacagcgggtgtgttgggctatggagacaagtcttgggaccaagacttacagcctccttggctccagcagagaaaaagcacagcatggagctatagaaatgcgtgccacccttcccccacccagggagcttagcatgttaggc

SEQ ID NO: 302098 - DNA, 571 bp, Homo sapiens
aggcactttggccacagattaccacagcgggtgtgttgggctatggagacaagtcttgggaccaagacttacagcctccttggctccagcagagaaaaagcacagcatggagctatagaaatgcgtgccacccttcccccacccaggragcttagcatgttaggcagttgtgagtcccatggcttagacagcaggcagccacagggcctgctgatctcccctccccctaggagtttggtaggcttaagcagattccagctgagaggctataagaatctgcacgttctggggttgggacactaggcgccggtggtgtgggttcgcgagcgggatcttccaatctgtgggtcacacagttccacagcaaaagcgcagtttctcctgctgggtggcacgctcactcactgcctcccttggctggaggagggtgttccctttcctgtgtggctctcagttgggccctctgcaccacactgttcttccttctctccatggatcatgccagccttctagtcaattttgatgagagaacctcgataccttggttgctgctgaaagcttgacatgctta

SEQ ID NO: 302099 - DNA, 565 bp, Homo sapiens
ggttaaaaatttaggtcaagggataagcacatttaacataaacatttttaaataaccaaaataaaattattcatacttctatgcatttatttttatgtattttctcctagcctttatcagcttagtaggaattgagtaactgtaaacctcaaatctatgagcaatgccaacttgtcattagtgcctcagaaactaatggtttctaaagagagaaaatggtactttaatgaattttattatctctgctaccttcagcttatgcaagaggcctttacagcttgcttgagaaaaaaaattaagtagctacaaatatcaaaaatagcagctctctctatgccattcgtatttcaaaactgtatcaaacacctttaaaaatgttttatttctagaatttrgttctgttagttcatatgtgttttttttctaaaataatgactgatgactatgaagattaaaaggtatttttctaaaataatgactgatgattatgaagattaaagggtataatgtaagtttttgtgaaagtgcccaagaatgatttctaaataaaattatcacgattctt

SEQ ID NO: 302100 - DNA, 565 bp, Homo sapiens
ggttaaaaatttaggtcaagggataagcacatttaacataaacatttttaaataaccaaaataaaattattcatacttctatgcatttatttttatgtattttctcctagcctttatcagcttagtaggaattgagtaactgtaaacctcaaatctatgagcaatgccaacttgtcattagtgcctcagaaactaatggtttctaaagagagaaaatggtactttaatgaattttattatctctgctaccttcagcttatgcaagaggcctttacagcttgcttgagaaaaaaaattaagtagctacaaatatcaaaaatagcagctctctctatgccattcgtatttcaaaactgtatcaaacacctttaaaaatgttttatttctagaatttggttctgttagttcatatgygttttttttctaaaataatgactgatgactatgaagattaaaaggtatttttctaaaataatgactgatgattatgaagattaaagggtataatgtaagtttttgtgaaagtgcccaagaatgatttctaaataaaattatcacgattctt

SEQ ID NO: 302101 - DNA, 658 bp, Homo sapiens
tcatacatgactctttcacctctggaaagaggagaaatctggaaagagtgatttgtctaggagcagggatgcaaaccaagtcagtccttcagyatgtttttctggaatttttcacatgagagaaggctattttccagaaggcaaagttggaaataaacgaactcctatctcctatcagctattgttctggtactttgcagaaagtagatttgatattgtagtagttggtataggaagatatcccataaataggataacttgattctgaccctcccaggacagcacacattgcatgtattaatatttgtgagtgttaattttgtcatgtattaatacaatgaaccctgtaaaactgagtatgaacaagaaccagctatagaagaggaagctgttgagttacttctcagattttctggactgagcagagattcttgagttcggtgaccttaccagcttggtcaaacctccttcaatctcatccaagtcatctggtcagtgtttctgcagggttcagaagtaccaagagcactgtataaatcttctcatctgtacctatgtccttgaggctagggaaaccatggattgcctgttctaatatttatgtggcactgataacattgtatgcaaaacaactttctactgaagagaataaggccaa

SEQ ID NO: 302102 - DNA, 560 bp, Homo sapiens
acaaatctaaccaggccaatcaccacagaaataaaccctgtttcactcccatcccaaccagccagaaaaagccaagtagaaagtgagatttccaacctggccaggctgtaatgagaaatccctttcattcccaaggcatgtgtcccccctgttttttcttaccatttttttttcttgcaggtggtgaattactttattttagaaaagcaaaagtttacaatttgtgccataggcagaatatcatgaattcaacaagttattaatacagactttcaaaaacctttacagattagtccaaagtagaaaattattttttcccactcttagactcaagcgcattcagaaaaaatacacaatttataaaaataaaatggcaagcctaatcacaccaattaattgatagtkttaacatcccacactggttcatttgaacaattaatacataataagaatagctgaattactttttcaagtcctacctccatgttacatgaaacaattatgaaactatttgttactttttataaaaccaaagtaaaaaatgccccaaacaaaacatg

SEQ ID NO: 302103 - DNA, 598 bp, Homo sapiens
tgggactccccagccataaagaactatgagtctattaaacctctttcctatatagattacctagtcaagggtaatctattagcagtgtgagaatggactaatacagtaaattgttaccgggtagtgggaagctgctaaggaatgcccaaaatttggaagcaactttggaactgggtaatgggcagaggttggaacaatttaraggactcagaagaagagagaaaaatgtggaaaagtttggaacttcctagagacttgttgaatggcattgaccaaaatgctgatagtgatatggacaataaggtccaggctgaggtggcctcagatggagatgaggaacttgttgggaactgaagcaaagctgactcttgttatgcaaagagactggtggcatttcactcctgccaaagagatctatggaagttgaacttgacagaaatgatttaaggtatcctatgaaagaaatttctaagtagcaaagcattcaagaggaagcagagcataaaagtttgaaaactttgcaacctgatgatgcaatagaaaagaaaaacccactttttgggaagaaattcaagcctgctgcagaaatttgcgtaag

SEQ ID NO: 302104 - DNA, 492 bp, Homo sapiens
atgtttagaacaattattttataaaattatacaaatactagtatttacaagctcataattttttctttctttccaaatagataagatgtaaattttatgttaatttccaagcaaatgtaatcatgtctttgatgctcacattcaaagcattaccctctttttaaaaaaattggatctaacatactttttaaaaacacatacaaaagaataatgaataggattttcacagtggctcccattttcttatttataagttgcataattaactcttttacgatttcttgcctattattaggttacttcacattttcattttataagattgggaaattattaagcatttacaagatccagtgcctttaaggaaactaccgactgtgaaatagtgggatgctaagaaaacctccagcgtctttattcaaagtcatctccctgaatctagctttgtgatggttctattctttayaacaattgcacaggattcctttttat

SEQ ID NO: 302105 - DNA, 608 bp, Homo sapiens
atttccgttttttaatctgaggagcttcatagtactctctctctttaggttgtctgaaatgttgctattgtrtttctaatggcattttaaaggaacagctctgagagtaaagtgaaacacaaaaagggaagaagtcaaaattagtgcttccacatatttttggagggaagattgcataagatgttatgttgaaaattagagaaacagttttacactgttgatataaagtatattaggttttccattattgaaaaaaatatttattttgttactccaaagtgtaatcataatgtagaaaactgatcttaagaactgccccacagtatcctcattaatacaaagagagattagaatccacgagtccagtttttcttagacttttaaaagttaatgctagataagtatttaagtacctatataccagacttgaataagttcaacaactcattgcagttgattttaaacttttaattatgtaatagggttatcatgaataggacccttttcctaatattctggccctaagggagtggtacttcttatctgataattgatgtatttaacaaaaaatatctgttcgacactatggttactcaatgttgatatgc

SEQ ID NO: 302106 - DNA, 495 bp, Homo sapiens
gtattcctcctgtaacattctgtaagaccacactgataggagcactgcccttagcatccaacatccaggaaaagagagaatagtgtgaatcgtattttccagctcttaagataaagttacacatactcatcttttagatctatttattgccaccttctatgctatgaatctttaagtaaaataattatactttggtttttagtaattaaatcttaaggaatagaattgctccttttaaatttatttttaatgactcaaatcatctgcttttaatgaaaaagttgaaagctgctatttcaaaaaraaaggttgtgttgagttttattgttattatttgatatgaaatttattaaatttacaaattcaaagacaattctttattaaaaatcaaatattaagtttacaaattttattccatttatagacaaatgttgttctaagtcactgtgataataagtgttatggtatgcagcaatgtatgtgtagtacaacaca

SEQ ID NO: 302107 - DNA, 575 bp, Homo sapiens
aaataagtgaaaattccagaaggaatgcatattttctgcacctaatgacctacaattcattggctctcagaggtaaagtcttagtgagcccattcctcttataggtctacattttcctaagttttgtgtgattaacagagctgtcattttgatctacacctaactgacttctgtctctctctcaaaggttttaaactttgaggaagaggggtgcaatttattgactccatatacaattccaaccaaccaaagaattcatatggcaatgagtgtgtgcccggaggcaatacgctgacgtgcagttagaactgacaattggctgkataatactgatattttacatggatttgtcctttacaaaaatcttcacctaaatattattttacatagtttacattgatttcaaaaccatcataaaatgcaggctgtgtaggggcagaaaatctctgagtaagataacatttttttgccaactattgaaaaaatatattttaaaaactgtatttgctgtttaggcaatgtatgaaatgcatgattatttctactctactgtgatgctaggtaagaaaaaaaag

SEQ ID NO: 302108 - DNA, 622 bp, Homo sapiens
gggtaattgggctcccatctggccctggtcaggtacagaaatgtcatctaagagcaaaggccttgaattggggaccctaaaaacctccttggtgctctcccccactgtggccaagctggtacccaagctgatttttggttctcatgaaggtgctttttgggttgatgagtgttcaatttggtcttcctttggggtggatgatcagtatagacttccattcagccatcttgctccccatcatcccaacttttattttagatatgagggtacatgtgtagktttgttacatgggtatagtgtgttattgtattagtccattctcatgctgctaataaagacacacccaagactgggtaatttataaaggaaagaggttagttgactcacagttcagcatggctggggaggtatcaggaaacttataatcatggcagaaggcacctcttcacagagtggcaggagagagaatcagtgatgagtgaagggggaagccccttataaaaccatcagatttcatgagaattcgcccactatcatgagaacagtatagggggaaactgcccccatgattcaattacctctcaccaggtctctcccacaacatgtggggattatgggatta

SEQ ID NO: 302109 - DNA, 622 bp, Homo sapiens
gggtaattgggctcccatctggccctggtcaggtacagaaatgtcatctaagagcaaaggccttgaattggggaccctaaaaacctccttggtgctctcccccactgtggccaagctggtacccaagctgatttttggttctcatgaaggtgctttttgggttgatgagtgttcaatttggtcttcctttggggtggatgatcagtatagacttccattcagccatcttgctccccatcatcccaacttttattttagatatgagggtacatgtgtagttttgttacatgggtatagtgtgttattgtattagtccattctcatgctgctaataaagacacacccaagactgggtaatttataaaggaaagaggttagttgactcacagttcagcatggctggggaggtatcaggaaacttataatcatggcagaaggcacctcttcacagagtggcaggagagagaatcagtgaygagtgaagggggaagccccttataaaaccatcagatttcatgagaattcgcccactatcatgagaacagtatagggggaaactgcccccatgattcaattacctctcaccaggtctctcccacaacatgtggggattatgggatta

SEQ ID NO: 302110 - DNA, 617 bp, Homo sapiens
ttgttttgcatgtacaacaatatccctaggctgtttgccgaaaccaatcagcaattgttatttaacatggtggttgcctgaggtggcattaccaattgttggtaacaagaggcttaccaaaaaagttagagtaactaaaaacataaataatctgtctacagcagactttgaatgccactaatatatgcctgggagtctagaatgccacacacatgtgcgatactctggcatayccaagaaagatctgggaaagccaaaatgttttacttttgaataaccttgctgtgctgtgtaagaaagaagagaaagataaagtagagatataaactgtcccaatgtagtttttaaagcattccgtaacacacaaaggacttcagaatagaatggtagacatatttgttcaaaggacgtaagaaaatttctgtaagctaagataaccaatcataaaattcagtagctgcacaaaacaaagaatatagattttacagcatgtgtcccagaaagttattaaacaagcagcaaaagtaagctttggggagagagatatcttatttccagagttgacacattatattatgtaaaatatacagttcaaaataagaaattatgacacttaa

SEQ ID NO: 302111 - DNA, 590 bp, Homo sapiens
tgacacattatattatgtaaaatatacagttcaaaataagaaattatgacacttaaagaaacagatatgtatggcccatacacagaaaaaaagtcaatggaaacagtctataagaaatacagaygttagacttactagacaaggagtttaaatcagctgttgtaaatatgttcaaagaactaaatgttatcatgactaaagaattaaagaaaagtataagaacaatgtctcatcaaatagaaaatatcaataaatagaaattacttttaaaaataaatattctggggctcaaatgtacaaaagctcaaatcaaaaaatctgaaaataacaaaaactgaagcatgtttaacaacacattcaaagtggccagtagcaacagcacattcagcaaacttcagcatcaagtgcaaattattcaatatcaagcaacatcagcaagcacagcaaaaatggacaaaacctcagcagcacctgtgaaaaacacattatgcatatgaatatcatgcataatgggcattctcattcatggataaacaaaataaaattggcaaaacagaatacgtaaagcaataatgcatgaaaacttctcc

SEQ ID NO: 302112 - DNA, 567 bp, Homo sapiens
ttgtgaataaaaggggccaatgtccagctcagaccattgcttcagagggtgcaaaccccaagccttggtggcttacatgtggtggtgtatctgtgggtgaagagaagtcaataattgaggtttgaaaacttccactagactacacagaatggatggaaagcctggatatccaggcagaggtttgctacaagtctgagccctcatggaaaacctttgctaggscagtgtagaaagtaaatgtgggtttgaagcccccatacagagtccccaaagggccactgcctactggacctgtgagaagagggccactgtcctctagacctcagaacagtagatccactgacagtttgcactatgcactggaaaagccacaaacactcatcaccagcctgtgaaagaagccaggagaggagctgtaccatgaaaagccacaagggcagagctgcccaagtccatgggagcccatctcttgcatcagcatgacctggatgtgagacatgaagtcaaataactttaaagttttaatgactgccccattggatttcagacttgcatgggacctgtagt

SEQ ID NO: 302113 - DNA, 567 bp, Homo sapiens
ttgtgaataaaaggggccaatgtccagctcagaccattgcttcagagggtgcaaaccccaagccttggtggcttacatgtggtggtgtatctgtgggtgaagagaagtcaataattgaggtttgaaaacttccactagactacacagaatggatggaaagcctggatatccaggcagaggtttgctacaagtctgagccctcatggaaaacctttgctaggccagtgtagaaagtaaatgtgggkttgaagcccccatacagagtccccaaagggccactgcctactggacctgtgagaagagggccactgtcctctagacctcagaacagtagatccactgacagtttgcactatgcactggaaaagccacaaacactcatcaccagcctgtgaaagaagccaggagaggagctgtaccatgaaaagccacaagggcagagctgcccaagtccatgggagcccatctcttgcatcagcatgacctggatgtgagacatgaagtcaaataactttaaagttttaatgactgccccattggatttcagacttgcatgggacctgtagt

SEQ ID NO: 302114 - DNA, 550 bp, Homo sapiens
catcaggactgactaggcagctggcatgacccatggagaggatggaagagcagggtggtgctgtgacccaactgagagccacatggggcagggacaccttgacccttagccaacggaagcagtgagtgagcatgctaccgagcctggaaaaccatgtgtttttttctcagaactgtgcaacccatggattggaagattccacttgtgagctagaaccagaaataycatttgacccagcaacctcattactgggtatatacccaaaggattataaatcattctaatataaagacacatgcacacgtatgtttattgcagcactactcacaatagcaaagacatggaaccaacccaaatgcccatcaattatagacaggataaagaaaatgtagtccacatacatcatggagtactatgccgccccaaaaaggattgagatcacgtcctttgcaaagacatagatgaaatcggaagacattatcctcagcaaactaacacaggaaccaaaaaccaaacaccacatgttctcactcatatgttggagctgaac

SEQ ID NO: 302115 - DNA, 550 bp, Homo sapiens
catcaggactgactaggcagctggcatgacccatggagaggatggaagagcagggtggtgctgtgacccaactgagagccacatggggcagggacaccttgacccttagccaacggaagcagtgagtgagcatgctaccgagcctggaaaaccatgtgtttttttctcagaactgtgcaacccatggattggaagattccacttgtgagctagaaccagaaatatcatttgacccagcaacctcattactgggtatatacccaaaggattataaatcattctaatataaagacacatgcacacgtatgtttattgcagcactactcacaatagcaaagacatggaaccaacccaaatgcccatcaattatagacrggataaagaaaatgtagtccacatacatcatggagtactatgccgccccaaaaaggattgagatcacgtcctttgcaaagacatagatgaaatcggaagacattatcctcagcaaactaacacaggaaccaaaaaccaaacaccacatgttctcactcatatgttggagctgaac

SEQ ID NO: 302116 - DNA, 550 bp, Homo sapiens
catcaggactgactaggcagctggcatgacccatggagaggatggaagagcagggtggtgctgtgacccaactgagagccacatggggcagggacaccttgacccttagccaacggaagcagtgagtgagcatgctaccgagcctggaaaaccatgtgtttttttctcagaactgtgcaacccatggattggaagattccacttgtgagctagaaccagaaatatcatttgacccagcaacctcattactgggtatatacccaaaggattataaatcattctaatataaagacacatgcacacgtatgtttattgcagcactactcacaatagcaaagacatggaaccaacccaaatgcccatcaattatagacaggataaagaaaatgtagtccacatacatcatggagtactatgccgccccaaaaaggattgagatcacgtcstttgcaaagacatagatgaaatcggaagacattatcctcagcaaactaacacaggaaccaaaaaccaaacaccacatgttctcactcatatgttggagctgaac

SEQ ID NO: 302117 - DNA, 550 bp, Homo sapiens
catcaggactgactaggcagctggcatgacccatggagaggatggaagagcagggtggtgctgtgacccaactgagagccacatggggcagggacaccttgacccttagccaacggaagcagtgagtgagcatgctaccgagcctggaaaaccatgtgtttttttctcagaactgtgcaacccatggattggaagattccacttgtgagctagaaccagaaatatcatttgacccagcaacctcattactgggtatatacccaaaggattataaatcattctaatataaagacacatgcacacgtatgtttattgcagcactactcacaatagcaaagacatggaaccaacccaaatgcccatcaattatagacaggataaagaaaatgtagtccacatacatcatggagtactatgccgccccaaaaaggattgagatcacgtcctttgcaaagacatagatgaaatcggaagacattatcctcagcaaactaayacaggaaccaaaaaccaaacaccacatgttctcactcatatgttggagctgaac

SEQ ID NO: 302118 - DNA, 466 bp, Homo sapiens
tgtggtgttagagaatcctgaggaatagaaggttttaagaaaaataaaggttgagatgaggggtgaatagtaacatcatatgaggactaagtagtctcattggaattggaaccattgggatcaaatgacctttacaagaacagwtttggcagggctatgaggagaggctgaaccttgtgtgttgaagaatggacatgaaatggaaatgcggcgaaaggagggtaagctgctttctggaggatatttttggtgtacagaaagtaaaattgtgcaggagacggagaggagtgcagtgtggggaaagggacaccaactcagtgtccaacacaaagctccctagtgaggacattgcgtgtagctcactttccaatcccaggctatagttttcaatatttgttcatattgttctttacaggaccccaaatattgtgccaggtacttttctgcttctctgcttcctttactc

SEQ ID NO: 302119 - DNA, 563 bp, Homo sapiens
aagtgtctaaactacactcttyttttaaaaccctagagtagcctctgttgcaatagttattaatgaagaaaacagaattcagtcaacggagaagaaaacaaacttttgctcaaaaggaagacaaggtcctgggagagaaaaaaacaaacatgaaggtcttttaaatacaaacatgcacagatacacacacaaacacacacacacatcttggatgttagcttttaattaagctgacttttaaccattgagctcctttttttaaaaaacgtcttttaaaatctcattactatatttcagctaggacaaattgctgctatttcagaagtaccaagtatcaaaccaaaaagggcttgattgaggaatcaaagccagactgttttggtggaacagagggaaggcagaaccttagctatcgaactgcagtgtggggtgacagccattcctttcagtttggtctggctagcaaaaaggtggccttgttatataaataaaacccctttaggagtcaaaataaaaaaatatgtcctcttttctttttcgcctagcacaccacctaccaccct

SEQ ID NO: 302120 - DNA, 589 bp, Homo sapiens
tctgtaggggctctgcacctgtggcaggcttttgcctgggcacttagactttcccgtacatctgaaatcaaggagtaggctgctaagcctccatcactcttgcattctgcacacctgcagacttaacactacaccacgtagaagccacaaaggcttatggtttgtgccctctgtagcatyatgccaaactatagttggggagctttgagccatggctggagttagagatgcagacatatggggagcagtgtctcaaggctgtaaagacaacagggccttgggcctggcccctgaaaaacattatttcctcctaagcctctgggcctgtgatggaaggggctgcctcaaagactttgaaatgcctttgaggcctttttctcattgtcttggctattagcacttggattcctgttattcatgctaatttccctagcaagtgtttgctctacagcctgcttgaattcatctactgaaaacgctttttccttctataccacatggctaagtggtaaatgttccaaatttttgtgctttgcttccctttaattgtaagttccaactttaagtcattcctttgctcccacatctg

SEQ ID NO: 302121 - DNA, 613 bp, Homo sapiens
tttgttcctacatgattcatcccatgagtctttcacctcttgtaaaaaacacagctcttgccttttgctactttctgtggtttttaaaatttstttttgattcccactaatttctgaggattctaatcattcacaagacttgccagcacatgtttgcacaaactccattttgtagcagcaaccttattttcctctgagaggcagaattgtttacccaaatactcatcgtaggccactttaaaaaatatgttgtctaggtgaatcagaagcttaaattgttccagttgcaatgttaactcttacttaaataaaagcactgtttttcaccaagtagaaatattttttttcctttggacatggaatctctaattaagattcccggagattaagaaatctttttcaagtgggaaagtatatgtaataaaagagaaatattgttcattgactttaagcatacacagcactctatagggtagcctcccagtttcatatagttgaattgtccagatagctctgcacttgaatcttcttgggccatcccacttttctatatatcacgaactactttcatttaatgaattacattataagatcaatgaagagttgcatgggt

SEQ ID NO: 302122 - DNA, 567 bp, Homo sapiens
tattcttcctaaagactgaatgtgaaaggactgaaaaggtatttcacgcgaatggacaccaaaatagagcaggagtagctatacttgtatcagacaaaatggattttaagtygaaaattatataaaagaggcaaagaagtttattatataatgataaagggattagttctcaagaggacataattataaatatatatgtacaacaaaattaaaatacctatatacatgaagcaattattaaataatctgagaagatatatagactataaccctccaatagtagaggacctcagcactccactttgaacaatagacagaccatctagatagataattaatagagaaatattggacctgaattacattctagaccaaatgaacccaacagacatttacaaaacattccatccaatagcagcacattcttctcaagtatgaacagaacattatccagaatagatcataagttaggctacacaacaaatcttaacaaacttaaagactgaagttacatcaggtaacattttgactcacaatggcatgagactaaaaatcaataaccagaga

SEQ ID NO: 302123 - DNA, 569 bp, Homo sapiens
catttaccatgtattcaaatccttttttaaagtttccaaataattatgggaatgtgtgtgtgtgtgtgcatagaaaattgtgtgtatgtatattttttcacatactccgtaagtttattcaatgttacgtttttattcatatggtgaataagtttttttccaatctattatctatgtggctcttaatctaaaaagaagatttttgattggaatctttgatttttactcactacttcattgtaatctataatcattaaaacaattcttgaattcattttcctgtgttctgtagatagaaaattatgtattttaggattgatgatattcttgctactgcctgttagattgttgtgtttgtgaatttattggctagcactgtctgaacacarttaattaacagtagtgacactaggacccctgggattgttttactttaataggaattatcctatttctttaataaattctttcatcaattttatcttactgatgacaatattttgaaaatttatgtcagaaatgttttattttacttaaaaattgttattgaattttataaaatatatttt

SEQ ID NO: 302124 - DNA, 577 bp, Homo sapiens
gagtttttagtacagtaaatgttctttttgtttttttcccatcataatttcactttccaggttaatttccgaatctttgcttatatgttgctaagtagaagctacaatatttttaccatggaaatatttgtttggttatttgatacacaaacatagcctgaaacaacaaatataaaasaagacatatgcacgtatgatatttcccagaacatgaatcttgtcatattgaagtgaactgaattcattatttttggatgctctactctctttcctctagttattactgagccaaaaaaggtttagttggtgtaagaaaattggtacaacagttcagaaaagcatagttattcccaatgcagaaactttagaaaagcatgatttcaaaatgagtcaagtttaaattgtctgacatagttactccaaacgcaaaaactcatcctaaggaaataatcctcctttgaaggaaatatttttcgctcagaattattgactacgaagttattaacaatggtgaaaacttcaaaaccatttcagtgaatcaccatgattatgaaaaatgagggaaactcattcgtta

SEQ ID NO: 302125 - DNA, 544 bp, Homo sapiens
gatacattcgacagcttgtgcgcatacctttttttgtggcaaagctctataaacctgcactggctctgtgtcagtgagaaattcatgtgtgtttcccgttgtacatatctttatctgaaacatgattttgtctgaggttctttccataaagaatgatcttctgttctattaattctattatagtctattagtccatttggcattgctatcaaggagtactggasactgggtaatttataaagaaaatagatttatttggctcacagttctgcaggctgtacaagcatggctccaatctgctcagagtctggtgaggcctcaggaagcttttactcatgttccaaggtgaagtgggagcaggcgtgtcacgctgagagggagcaagagagcaggacgtgtcagactcctttaaacaaccagctcttgcatgagctaacagagaactcacttattaccatgaggagggcaccaagcctttaatgagggatccactgccaggacccaagcacctcccactaggcttacctccgacattggggatctc

SEQ ID NO: 302126 - DNA, 494 bp, Homo sapiens
aactcacccttattcccagtcccaatcatcctgcacataagcaaggctgagtttcagggggctgagtccctgccttaatgtgagattgcagtttattctctaattaactatgcagaaacatctttggctaataaagtctaaacaaagaacatttaatccaactcatcgtttttttctccattatgagcagcctgtcaaacacaatcagattccgcaagcaaagcagagaggaggcaggcatcagccacacctgcttagcagggttgctagcaggaatctcacagtcagagaacagttggctgtgcagatggcagagatgggaagatttgaagggaaatccactccctgactggagctcagtgcaggaaaakggtcatttgagagttgcaggcagagaaacacctcctcattcttctgacttagcccagccaatggaagagaactcagaaaaaacaaaagcacaaatatttacaaagagcttcctatgtgttcga

SEQ ID NO: 302127 - DNA, 617 bp, Homo sapiens
aattgcaaagggtcatcataactatgtgcaaatatacccttggtaacccttaaaggtgaagaccatgtctgataaattggtctgcccaatgttttgatcactgtcaggaaataattgttgaagatgtaaataaaaattaaccttaatgtataaagaaattcagacatcaacttctctctatatatttttacttttactttttttttaacactttcttttattttattttcgtttttatttacttttattttttgagacagagtcttgctctgttgctcaggctgcagtgcagtggcgtgatctcggctcactgcaacctccacctcctgggttcaagcgattctcgtgtctcagcctccgaagtagctgggactacaggcatgccaccacccacggctaatttttgctatttttagtasagacggggtttcaagatgttggccaggctggtctcaaactcctgacctcaagtgatccaccagcctcaacctcccagagtgctgggattacaggtgtggactcccagagtgctgggattacaggtgtggccatcttctatatattttagatgaggagtgtcatgaactcctttcagaaatttataagagctatgggaa

SEQ ID NO: 302128 - DNA, 495 bp, Homo sapiens
taaaatgatataattacaacaacaataataacaggaaaaatatagagtggtacagtatgctggccctgtgttaggcatcctagatacattgtctcaattgattcttgtaacagccctataaagttgatataatgacatgcccattttataaatggggaaatggaggcagagggcaaatgagcaacatgtgccagcctgcagaactgacaagcaactgagctgggatttaaatctagctgcccctgtctcaaagcttggactcatcaacgtttctctatgctaatcctgcttcggttacgaccttactttgtgaacttgagaaagtcacttcctttctamgtttgtttatctgtaaaatgagattgatttaaatttgtggaaatcacattttgttaaagtgtgtgagccttttttaaaaaaggccaaaacattttttcaagcatccaaatatgtttgtttttttaatggtcattgagaaaataaagaaaatacaac

SEQ ID NO: 302129 - DNA, 559 bp, Homo sapiens
tcagtgttgcatactttttattaaagcacccaaaatgtcaataatagagatcagggatttgcttccctggaattctccagaaataagccttccatttttctgccctggaaggtgagtgcctgatggctggtattctggaggtagagaaactcagctctcaactgtgccctatgtccctgcctctagaggctctctgtaaaatttcttcagtaaatcagtcttcaaactctagtagtggccatgaagatccatggcataaacagactgtctaatcatggtctataaaagctgtctcctttcagcctcagtcctcaggtgtkttttttttttttttttttttgacagagtttcactcttgttgcccaggctggagtgcgatggtgagatcttggctcattgcaacctccacctcctgggttcaagcaattcccctgcctcagcctcccaagtagctgggactacaggcatgtgccaccatgcctggctaatttttgtattttaagtagagatggggtttcaccatgttggtcagactggtctcgagctcttgacctaaggt

SEQ ID NO: 302130 - DNA, 559 bp, Homo sapiens
tcagtgttgcatactttttattaaagcacccaaaatgtcaataatagagatcagggatttgcttccctggaattctccagaaataagccttccatttttctgccctggaaggtgagtgcctgatggctggtattctggaggtagagaaactcagctctcaactgtgccctatgtccctgcctctagaggctctctgtaaaatttcttcagtaaatcagtcttcaaactctagtagtggccatgaagatccatggcataaacagactgtctaatcatggtctataaaagctgtctcctttcagcctcagtcctcaggtgttttttttttttttttttttttgacagagtttcactcttgttgcccaggctggagtgcgatggtgmgatcttggctcattgcaacctccacctcctgggttcaagcaattcccctgcctcagcctcccaagtagctgggactacaggcatgtgccaccatgcctggctaatttttgtattttaagtagagatggggtttcaccatgttggtcagactggtctcgagctcttgacctaaggt

SEQ ID NO: 302131 - DNA, 578 bp, Homo sapiens
cagaccaccaatgggctgtctttttgtgcagctggggtgtcttgttggtgtaataaacctaagtaatctccgatgatgccttttcactatatacccatgtattcgtcttgccaactgatctgtgagatccttgaggtcagaggctgtgtttaattcatctctgcctaagcattcaacaggagggtctgattcacaatagattttcaggccgtgtttgttaaatgaaaactggattttattagtggtctccaaacctggctctgcatcagaacatcagagtcactgggtgaaaatataaccctacatttctgggcttaastccagatctcctaaatgagaatgtctagggacaaaaccggagaatcagttttacagacaagatcactggttgtttcttatgcatccagccctctgctgctctatggtccaggagatggaagccatcgctttattttatgacaatcatttttatcctgccagtgtcctggagtggcaaatatgacctattccttaaggaaagaccctatgttcagatggttccaaccagttccctcttgtcagagactgcagggggattt

SEQ ID NO: 302132 - DNA, 464 bp, Homo sapiens
aaaaattgcttcatcagggaaagggttgttagcacaggcttccactctgaaataaaagacatcctgaggtccagtttatcatctggtgaccatagtctcttgtctctgttttttgtaattatccaagaaaccaatagctgagtaatgtccaggtaggcacattaaaaatattgggctatccttctctctctatgaacaggtagaatgcaagcattttaaataatatgaattctatgatgttagtaatgtgcacagtggcatacctggattttctcaatcaccatatgtagtagggagggaatggactattgtcatctctcccaatccccaaccctgagagttgaagatcagagatctcagagttaaacrtttttaccactgaccacatggtaataaatggtcaagctggaactggtacccaggtcttcttactatagatcttactttttaaaagtttcactagt

SEQ ID NO: 302133 - DNA, 331 bp, Homo sapiens
cgacacccgtaaagggtctgtgctgaggaggattagtaaaagaggaaggaatgcctcttgcagttgagacaagaggaaggcatctgtctcctgcctgtccctgggcaatggaatgtctcggtataaaacccgattgtatgcyccatctactgagatagggaaaaaccgccttagggctggaggtgggacctgcgggcagcaatactgctttgtaaagcattgagatgtttatgtgtatgcatatctaaaagcacagcacttaatcctttacattgtctatgatgccaagacgtttgttcacgtgtttgtctgctgaccctctccccacaat

SEQ ID NO: 302134 - DNA, 331 bp, Homo sapiens
cgacacccgtaaagggtctgtgctgaggaggattagtaaaagaggaaggaatgcctcttgcagttgagacaagaggaaggcatctgtctcctgcctgtccctgggcaatggaatgtctcggtataaaacccgattgtatgccccatctactgagatagggaaaaacygccttagggctggaggtgggacctgcgggcagcaatactgctttgtaaagcattgagatgtttatgtgtatgcatatctaaaagcacagcacttaatcctttacattgtctatgatgccaagacgtttgttcacgtgtttgtctgctgaccctctccccacaat

SEQ ID NO: 302135 - DNA, 331 bp, Homo sapiens
cgacacccgtaaagggtctgtgctgaggaggattagtaaaagaggaaggaatgcctcttgcagttgagacaagaggaaggcatctgtctcctgcctgtccctgggcaatggaatgtctcggtataaaacccgattgtatgccccatctactgagatagggaaaaaccgccttagggctggaggtgggacctgcgggcagcaatactgctttgtaaagcattgagatgtttatgtgtatgcatatcyaaaagcacagcacttaatcctttacattgtctatgatgccaagacgtttgttcacgtgtttgtctgctgaccctctccccacaat

SEQ ID NO: 302136 - DNA, 514 bp, Homo sapiens
tctgctgcaaagattgctgactttggagctcacagaccacagcgtgtgtgcaggtcctgtctgctgcgtcctgagttaactgggacatgtgaactcgcttctcggaacctcagcttcatgttctgcaacatggggataatagtgccgtttgtacacacaaggtcatattccaaagccatagtctccctctccataggaaatattgaacagcatatttcatttggtataaaggcaaggatattgagattatatatcaggacattttctttaatctaaagttgattctttttttttctgtttttaaaagacatgaaaacattttcatacrctccgaaaattattgtgagccgtaggcactgtgcctactgtacctaatggataagttggctccgtgtgtgtgtgtgtttgaaatgaaataccgtggatgaaagcatccggcataattgttagcaatagcacagcaaggtggttaaactcacagtctagaaactggaatttctttcttttttttttt

SEQ ID NO: 302137 - DNA, 603 bp, Homo sapiens
taagtacagaactgctaagggagtgggagagggtaggtgtctgcccctaactgcagaaggaggagaagaggactgagaaaagcctccctggagttggtgatgatttaactgcatctcaaataatgatcagayatccatcagatgagggagcggggagagtgcctcaggcagggtcaaatgtgagcagagccgggagtggagagtgtcacgatggaggctgagctacctgtgggaaagtcaaaggtgggtctgatgggagatgatgctaggtgaggtcagtggggccacacagtgtatagcaagtgaaggaatgtgggttccatctggatgtgatgggatacacccgtggattttaagcaggaggccgactggtaactgcgtgaagggcacctctgaggggaaggagaaaattcaggagctgttcagtagaccaggcaagatggttctcaagaccaggtgaaggctggaacttggacatatagggtagagattggagaagaagggacagatatgagaagtattaggacttccttcttgttcgggttggttgactagatagacgatagtgcctggtgtacactagacagtgagtttctcagttat

SEQ ID NO: 302138 - DNA, 603 bp, Homo sapiens
taagtacagaactgctaagggagtgggagagggtaggtgtctgcccctaactgcagaaggaggagaagaggactgagaaaagcctccctggagttggtgatgatttaactgcatctcaaataatgatcagacatccatcagatgagggagcggggagagtgcctcaggcagggtcaaatgtgagcagagccgggagtggagagtgtcacgatggaggctgagctacctgtgggaaagtcaaaggtgggtctgatgggagatgatgctaggtgaggtcagtggggccacacagtgtatagcaagtgaaggaatgtgggttccatctggatgtgatgggatacacccstggattttaagcaggaggccgactggtaactgcgtgaagggcacctctgaggggaaggagaaaattcaggagctgttcagtagaccaggcaagatggttctcaagaccaggtgaaggctggaacttggacatatagggtagagattggagaagaagggacagatatgagaagtattaggacttccttcttgttcgggttggttgactagatagacgatagtgcctggtgtacactagacagtgagtttctcagttat

SEQ ID NO: 302139 - DNA, 474 bp, Homo sapiens
aactagaactctgacccattaaacactaactytcgattccaccccaccctgcctctgcctcctggcaaccatcattctactttctgtccctatgattttgactactctatgtgccacatttaagtggaatcatatagtatttgtcctttgtgactggcctatttcagttatcataattgtcaagattcatccatgttagagcatgtgctagaattttcttcctttttaaggctgaataatattacattgtatgcacatgcacattttgtttatccattcatctgtcaatatacatttgggttgcttctaccttttggttgttataaatgctgccatgagtatgggtgtgcatatttgagtccctactttcaattcttttgtgtatatattcccaaaagcaattccagaagtggaattcctagattacatggaaattttatttttaattttttgtggaactgccatattgttttc

SEQ ID NO: 302140 - DNA, 474 bp, Homo sapiens
aactagaactctgacccattaaacactaactttcgattccaccccaccctgcctctgcctcctggcaaccatcattctactttctgtccctatgattttgactastctatgtgccacatttaagtggaatcatatagtatttgtcctttgtgactggcctatttcagttatcataattgtcaagattcatccatgttagagcatgtgctagaattttcttcctttttaaggctgaataatattacattgtatgcacatgcacattttgtttatccattcatctgtcaatatacatttgggttgcttctaccttttggttgttataaatgctgccatgagtatgggtgtgcatatttgagtccctactttcaattcttttgtgtatatattcccaaaagcaattccagaagtggaattcctagattacatggaaattttatttttaattttttgtggaactgccatattgttttc

SEQ ID NO: 302141 - DNA, 633 bp, Homo sapiens
cttgtctacattacctcagaaaattgaggacagaaattgacaaagtgccaagcacctatacttgtattaatcacttgttagaatatcatgaagagtcaaactacaaggcaggttagcctagaagaactctaaagcagtgattctcaaactttgttgcacactagaatcacctggagaccttttaaacctctcaaatcacaggctatacaccagaccaataaaataagaatgaggggaggaggagaacagacccaggcattagtaatttttaaaattccccaggtgataccaattacagctgaggttaagaattactgctctatcactggtcctcaaactttagtgggcatcagagtcacctggaagatggtaacaatggaggggaatagggtctagcctgattcaacgaacccgggtctctccaagtgactctaacacccaccaaagcttgaggacagctactctaaagtaactttcggctcccrtattctgattttcaccactcattcatttctctctttattcaaacaactgcactagatgttggagagataaggatgcataaagaagacatgacttctgatctcaagaagttcacagcttgacacgctgttcttttctctctcaaagccc

SEQ ID NO: 302142 - DNA, 582 bp, Homo sapiens
atcctcctgttcttttccttcaagatgcgctgttcttatactggttaccattactaagaatataattagtgagaatataattgtttacttaatttctgacttgtccattacagtgtaaatttcatgaaagcagatgtcatgtccatcttgtttatgaacagtgcatggcccatagcagatgttcaagaaacatttgatacaaaataaasgaataaactatttttctgacctcaaatagtctgtcctcttcaacaaataatgtctcttcaaagttagcttttcatgttaaacctaagcctgaacccacaaagatcttgaacccaagacactccagcagttacttagcactaatatatagtttaactccgctgtgcttttgcgttatttgtcctgtgttaccccaccagatggtttgtttctcagcacagggcttacttctgtcacttcctctgtctccctgaggtgttctgtacactgggagtggtgttcagcaaacaccgaagccttgctctcgtatcacctacatgctgtaaagtggcattcagtgtgtacccaaggagaccttgttgtggcactgttcca

SEQ ID NO: 302143 - DNA, 545 bp, Homo sapiens
gttacttagcactaatatatagtttaactccgctgtgcttttgcgttatttgtcctgtgttaccccaccagatggtttgtttctcagcacagggcttacttctgtcacttcctctgtctccctgaggtgttctgtacactgggagtggtgttcagcaaacaccgaagccttgctctcgtatcacctacatgctgtaaagtggcattcagtgtgtacccaaggagaccttgttgtggcactgttccacctgcatcactaactcattaatcccggacttgtggaggagaaggctaaaggccttggctagtacagttatgtcccccaagctagagctcccctttttgttaccagttacatgctgctacatgcccagtgtggctttaagtgtgaccttcattggtgaccatagagatggtcacacakttgggcattttgctctcgaggaccagatcagcccatctgtccagggagcctgatgagtctccaggccacttgaccaatacccattctccccccgccatttccatttcattccaatcaggagg

SEQ ID NO: 302144 - DNA, 525 bp, Homo sapiens
tcagccaaccaagaatgggagtcagggatgggagaggtcatcctcagagccatgtgcattgggcacctctggctcagacagcatgtggacacttttaagggcatcatttatgatgtctgaagacaagagagggtaaacaggaccacctaaatgtcttcaacaagcgcaaagagaaattttcaggctgtcagattaaaacaagataaataaggccattttgttattaaaacaaaataaaggatggcacatcaacagggtcactgtgcgaggcctgcctcgcaaagcctctggctggctcctgctcctggggcctgacctttcagagctggctggtgggcctgtgtccggcacaggctctcagaggctgttagaggcctggctaatgggaagcggtaaatcggcatccgcagtcagcactttctgcagcatccygaaggagcaggcagaggcttctggggcatgtgtggcggcaggtacaggctttggcaagtccaagagctgccagaaacaggcaaattagatgtt

SEQ ID NO: 302145 - DNA, 618 bp, Homo sapiens
tttcaagcttccacgaaccatcttcactttctttaggaaggatgagtgatttgtgccacaaactaacccccaacctcctgttgaagttattttcttgacgttcagaaccaaggagcctgtcttttgctaagaaacctgcacacactgagtgatgggcagctatgtgctcgtctgtctccccgtgaaaccatgagcaacttactcaacttgatgatgataacaactagtgtgtgccagatgctttagatgcactgtctgtaaagtaggtagcaccattattttcctcatattagagatgaaacggaggcctacagcggtyggataacatgcccagcattactcagctaagtagtgccagagccagatttagaaagcaggtcaaactaattcctgtgactccttatgatgttgtactgcctcataagggttgaatgaatgaatgtccaaatgaatgaatgatcaggaagtattcaggatattgcttgagtgtttgctttcgtccttgctgaggagacttgggaaacaaaaggtttaaatcaaattggaaatgactagtctccttgcctcccagctgcctggttcactcagctgctcaggatgtgatagtaatgaaaccag

SEQ ID NO: 302146 - DNA, 535 bp, Homo sapiens
gctgctctggggcctaaaaacaggcacgctcaccttactgctgccaccacgggggcccaaacaaagactggctcaattggcattcaagtccccarctaaacttcacaaaaactcaactaataattgtaccttaagacaccaaggaaatgacagagaccactaaccctgcatacttccagagatgtcatacacaaagatcacactacaacaggcacccaaaatcaaagccaaagtatcctaatcaacaacatacatcctcaagaaaaaattctcccctacaaaagcaatttcaataacttgagggggttgggcccaaattgtggactagaaacagctcatgtgtgctgctttcgtagggagaaagcataagggctagggaacactgtccctgcaggccgatcatctgagaaatcatgtcaggacctgtcaaggcagcaggggcacatagaggacagtgaggggtgaagctgggcaccagcctgtctgggctcagcatggagccaggagaacctctccaacatgggaaagggttagt

SEQ ID NO: 302147 - DNA, 581 bp, Homo sapiens
cgggcccattttacaagaagtactgaaagaagttcttcaggctgatagcgggtgaccccagacagtaatttgaatctatacaagaaaacaatgactactactaaaggtaattatgtaatyataaaagatagtatgaatgtgtatttgttatcccttttctcttaacagattcaaaaaataattgcataaaagaatatgtatgtaattacattatttgacctaaaacatatagaaatatattttaaaacaatagaacaaattgtggtagcaaagccatcctggagtaaggagatgacatgtgatgacaattcaaattcacaagaacaaataaagagtctgaaatggcaaaaaggaaagttaaaataacaaactctataagtatatatttcctcccctttctgctcttgacttctttaaaaacattaaattatataatgtatataattataaaaatatgtttaagggtttgtaacatatttatatttaatagcatcaaaagggaaaagagagaacagaactctatgcaacaatgttactatatctcactgaaattaaataatatgaatcagaagtagattctc

SEQ ID NO: 302148 - DNA, 581 bp, Homo sapiens
cgggcccattttacaagaagtactgaaagaagttcttcaggctgatagcgggtgaccccagacagtaatttgaatctatacaagaaaacaatgactactactaaaggtaattatgtaatcataaaagatagtatgaatgtgtatttgktatcccttttctcttaacagattcaaaaaataattgcataaaagaatatgtatgtaattacattatttgacctaaaacatatagaaatatattttaaaacaatagaacaaattgtggtagcaaagccatcctggagtaaggagatgacatgtgatgacaattcaaattcacaagaacaaataaagagtctgaaatggcaaaaaggaaagttaaaataacaaactctataagtatatatttcctcccctttctgctcttgacttctttaaaaacattaaattatataatgtatataattataaaaatatgtttaagggtttgtaacatatttatatttaatagcatcaaaagggaaaagagagaacagaactctatgcaacaatgttactatatctcactgaaattaaataatatgaatcagaagtagattctc

SEQ ID NO: 302149 - DNA, 539 bp, Homo sapiens
tgaatcttgaaaacattatgctaagtaaaagaagtcagatacaaaagaccacatattgtatgattccatttatatgaaatgtccacaataggcaaatccatagaaatagaaaggagattagtgggtggtcttctggagctggacagttggggagaaaygagaagtgacttagtatgtatggagtttctttgtggggttatacaaatattctaaaattaattgtgatgttggttgtacaaatatgtaaatatctttaaaaccactgaattgatttccttagaaatacaattctcagtatataagaatatgaattcaaggatgcttattacatcattgtttacactaacatgataataattagaattaaagtcatagaaacatagtgactgtccacctgtggggatatctggattaatataatacattcataccatgaaacatgatacagccactaaaaagcatgaattcatgcccgaacaagtgccttgatgggatttccatgtgttgttatgagtagaaacatcaactacataatcatg

SEQ ID NO: 302150 - DNA, 539 bp, Homo sapiens
tgaatcttgaaaacattatgctaagtaaaagaagtcagatacaaaagaccacatattgtatgattccatttatatgaaatgtccacaataggcaaatccatagaaatagaaaggagattagtgggtggtcttctggagctggacagttggggagaaacgagaagtgacttagtatgtatggagtttctttgtggggttatacaaatattctaaaattaattgtgatgttggttgtacaaatatgtaaatatctttaaaaccactgaattgatttccttagaaatacaattctcagtatataagaatatgaattcaaggatgcttattrcatcattgtttacactaacatgataataattagaattaaagtcatagaaacatagtgactgtccacctgtggggatatctggattaatataatacattcataccatgaaacatgatacagccactaaaaagcatgaattcatgcccgaacaagtgccttgatgggatttccatgtgttgttatgagtagaaacatcaactacataatcatg

SEQ ID NO: 302151 - DNA, 562 bp, Homo sapiens
taagctgaggaaggaggattgcttgagcccaggagttcaaggctgtagtgagctgtgatcacgccgctgcactccagtctgggtgatagagcaagaccctgtcttaaaagaaaaaaaaagatactaaagaggcaggtctaagtcacagtgtatagacatagccttggcctctaaagctactttccaaaaccatgctccatgccrggatggtgctgggagctgaggaacacagtgctgtggctgcatctctgaactgattgcagctggagactgcctctcctctcctggtgggtcaggtcacctcaggaagctttgtgtttgtagataggagcgacagactccttgtaattaagaactaaggctttagtacagaataatcaagaaagagacaatcctacttgaaatgcctcccatcttaattggcttaaactagtattaacagcaaaaaaaaaaagaaagaaagaaaagaaagaatgccaaagcataattagctcataaaagatggggctctagggaccaggaaagaagtagatccagcagaggctaagacctgagtgggggc

SEQ ID NO: 302152 - DNA, 578 bp, Homo sapiens
agtggatccagcaaagctttaatgtgtatagatgtgtccccggcactgtgctgtgcactgagaatttgatgatgaaaaaagcaaagaagctatgccctcatgaagcttggaatccagtggggagaaaagacaacaaaacaattacacaaaaaaagctatgattaaagtgctaggaagaagaggggttatgagaacctctatcaggggctcagtctagcctgggaggtcaagagaagactttcctatagatgcaacatgtgagcagaaatctgaaagatgagtaggaaccaactaggccagtggttcttgcaacctcttaataggtcaaggaaattatttagagtgtcacaactacatcttttaaaatgaagtaacagactggactgcaatacaatagaagagaacagaacagaatggaaaaaaataaggaatagatcaaaatgtattgaaaattagcaaaagttagcattacttcgtgaaatgtttgtygagcattacaatataaaatgtatttcttactacgggttgtgaactagacagtggaggaagcagggaggatggacacacttcccaaaaag

SEQ ID NO: 302153 - DNA, 550 bp, Homo sapiens
cacttttcaagttgcaaaacttgctctcagactcagcagatacatttgaaacaattttatgaccagcagttaaacaggaggaaattaaaggtgaaaaatcaaggatacagcttcatgcataaaactcagccacacaattaatggagcccacattaatcacacatcagttaggcctcagtggtttgatagttattcgttggcagaaacaaaccgcattctgataggcaaagaggactgatgcaagtataactgaaagacttaaatgtagggttcctatcattaattaatcaagtaatcactctctttgtggtacttgtgtgacatttcgtaattagtttttcagtgtttctctcgctytagcttagttctttattacaccccacactcctttatctaaacgttccagtggaagatgagatgtgtttttaataataataagaccttgtatttgtagatcactttgtactttataaaatggctcaccggagtcttccagcagcctttggagataagcaggacaaatattattctcccaagtatctactgaagt

SEQ ID NO: 302154 - DNA, 563 bp, Homo sapiens
ggatgaaatcctaatttcatatgaaagagacttcaaaccaacaaagatcaaaaagacaaagatgaacaagggcattacataatgctaaagtgttcaattgaacaagaagacctaactgtcytaaatattacatgcacccaacataggagcactcagattcataaagcaagttcttagagacctacaaaaagacatagacttccacacaataatagcaggagacttcaacattccattgacagtattagatggatcaccaaggcagaaaattaacaaagacattcagaacctgaactcaacattgtaccaaatggatctaatagacctttacagaactttctacccaaaaacaacaaaatacacattcttttcattgccacatggcacatactctaaaattaaacacataattagacataaaagaatactcagcaagtgcaaaatagccaacatcctaccaaacacactgtcagactatatcacaataaaaatagaggtcaaaactaagaaaagagctcaaaaccatacaattacctggaaattaaacaacatgctcctaaatt

SEQ ID NO: 302155 - DNA, 594 bp, Homo sapiens
ttccatttccttgattgctttgtgatctcagttctctgattggctcaaatacaattacaatttgtagacttttttctactttttctcattgcttgggtgaaagtgatgtgatttttcaggcttctatatcctaactggcttatcttgaaattttcttgaagaatatagatcatttaattgtagatatctctcaatttgggtgtttcatatgtttgtgtgtatcagcatggtatatggcatctattaatcacattacttgtgacgttaactttgattccttgattgctacatttccgaactgaaaattacattttttccactttttacataatgttgctatggggaaatactttgtatatttgtaaatatcctatattctctcaaattttatccactagctttagcaagtattgacacattttgcctggatcaattattatgctggttgacaacttgtaattttrtaattttatatttccttatccatttcgttatccactgggaggacaaactttccattttttaaatttatatatttacatattttatttatatcagtgtgaacttaagaattctttattcatgggctataat

SEQ ID NO: 302156 - DNA, 319 bp, Homo sapiens
ttgtttggaattcttcggcaggggagatttgtttatgttatttcattctaattaaattaatgaccaaactaataaactaattctagttagttgaattttttttataatttggattataatataataattttttacttattttgctgctcagataatttcagttttggtcattgaagttctttccagttgccccatatccgtytgacatactcaatagttgtgaggtggtgtttttttttttttttttttcagcattcccttattttctggcactataaaatcctctggaatcatcttttatattttctgtcttagccct

SEQ ID NO: 302157 - DNA, 319 bp, Homo sapiens
ttgtttggaattcttcggcaggggagatttgtttatgttatttcattctaattaaattaatgaccaaactaataaactaattctagttagttgaattttttttataatttggattataatataataattttttacttattttgctgctcagataatttcagttttggtcattgaagttctttccagttgccccatatccgtttgacatactcaatagttgtgagktggtgtttttttttttttttttttcagcattcccttattttctggcactataaaatcctctggaatcatcttttatattttctgtcttagccct

SEQ ID NO: 302158 - DNA, 319 bp, Homo sapiens
ttgtttggaattcttcggcaggggagatttgtttatgttatttcattctaattaaattaatgaccaaactaataaactaattctagttagttgaattttttttataatttggattataatataataattttttacttattttgctgctcagataatttcagttttggtcattgaagttctttccagttgccccatatccgtttgacatactcaatagttgtgaggtgktgtttttttttttttttttttcagcattcccttattttctggcactataaaatcctctggaatcatcttttatattttctgtcttagccct

SEQ ID NO: 302159 - DNA, 616 bp, Homo sapiens
tgtcaacaactgcctgagagaagcacagacaattgagagataggctggattacacagatgagtagccaagtaagtcagagcatatccctcctcttcctggggtttccaagtamctaccaggactccaggaggcttcatgctaagtaggcttggaggtggcacatttatttaggcatactcattaaattcatcgttccaggaattatataaagttagatctggaagttcctggaaggttattttatggatctcatatgtaatatgttataaaattatcattatttattcaatttctgctgtgcttttaggtattattcttatattcacaacccaaatctggtattttgcatttttcagataaagtatttaaggctcgaaagttttaagtgctttccaaatgtcgtagaattagtacgtactagaaccagaatctgaacttctatctgattctgaatcccagacagctttctataccatagggcttctctgtattagtcaaaataatttaatattttggcaaatagtttgttaacataaataattgaagacccacaacttgagtttaagccctttcccatttttctaaattctcctagtcccagtttatttatttata

SEQ ID NO: 302160 - DNA, 616 bp, Homo sapiens
tgtcaacaactgcctgagagaagcacagacaattgagagataggctggattacacagatgagtagccaagtaagtcagagcatatccctcctcttcctggggtttccaagtacctaccaggactccaggaggcttcatgctaagtaggcttggaggtggcacatttatttaggcatactcattaaattcatcgttccaggaattatataaagttagatctggaagttcctggaaggttattttatggatctcatatgtaatatgttataaaattatcattatttattcaatttctgctgtgcttttaggtattattcttatattcacaacccaaatctggtattttgcatttttcagataaagtatttaaggctcgaaagtwttaagtgctttccaaatgtcgtagaattagtacgtactagaaccagaatctgaacttctatctgattctgaatcccagacagctttctataccatagggcttctctgtattagtcaaaataatttaatattttggcaaatagtttgttaacataaataattgaagacccacaacttgagtttaagccctttcccatttttctaaattctcctagtcccagtttatttatttata

SEQ ID NO: 302161 - DNA, 554 bp, Homo sapiens
ttcatcttgtagtttctctgctccagcccatgagccagtcatttctccaatgagtgctcatttcatttcatggagaatggtatttagaagtcaagatatgggcagtcatttttatttttaaaataatacccataaactaggaaaagacatgaaacaaattgataataaggaattaacctacaacttgcctggaacataagagatcctcaatataagtttattgaatgagtgaacagtatttaaaaagtagattttagtaggtagtctgcatttgacaattttatccaatcccgcagtttttctcctctccccaaatctcttgcaagaataattttaattcccctaagtttcagatttaagtctgtcactcagttatttaaatatgctcttatattatcatttgcacaaaatctaagcttcttgacttaacgttacagctcagaccctaattcataygtaaatatctacgcttccattaactgtgtgttccaatgagaatttgctaacaacaaaagacgtcttactctatccctatatctttcttatattgttcc

SEQ ID NO: 302162 - DNA, 644 bp, Homo sapiens
ggacaactgcaatgctgcaatgcataggcaagcacactcttatacacacacacrtccctggtctcacagagcaaacaccctccccaaccccagccacactcccacactaatgcctctgctcttacagagttaacagactttatctgtgtacatatatttgtttacattgctgttacatagaacttatgcctactattattttgtgtaacatagtattttattatctgaatttagtaatgattacactgaatatgccatcaaagagaagtctcaaaatatatataattattcccctatagttgggcatttggggtatgtacacctttcccctttaatggatctgtaatctagtgagttgttagtgtctacacataaatcgttgaggatgctaagaagaaaattagggatgggatcccagagatgtttcctacaaatcctcttaccacacagacagaccctagtgaagaaacagctatgttaataccttctgcttcttgtgtacctcctataagccaaacactttgcatttgcatctcttttaattgtcacagtaacagtacagtactagtatccttattttaccagtgagaaaagagaattcagaaagattttgtaaggaggaaatgactcaccatcacttcaaa

SEQ ID NO: 302163 - DNA, 620 bp, Homo sapiens
aatacttatttaacacccattataaaccagatagtttgctagacactgaggatatagaattaaataagatgaaaattatttctgccttcctgaagcttatcatctagcagggaaaataataattaaacacaagactatgtaattaaaatttcatatctgttctgcaggaaaatcatagggcattgtgaataattattttaaaaagctctgacttcatcatatgggttaaagaaatctccttgaggaagtaatatttaggctgatatmcaaataatgggcaaaaattaagtagaaaaaaatgaccagggatggtgatggaggtgggaagatgggaaagaatttcagacaaagagaactaaacccagaaaagtagtcagcatgttttatagagccaagttgttcaataatgagtataactgtaattctcagtggtacgtaaatcctggccttttgctcagtattcccggacctgaaacctattttcaatatttcccttcaaacctatgcctgatccccatggaccatgttcctactcagactcttctttctggttgcaatgttccatctctcagtttcaaattttacccatccttccagagccaattctaatcctgaggttc

SEQ ID NO: 302164 - DNA, 620 bp, Homo sapiens
aatacttatttaacacccattataaaccagatagtttgctagacactgaggatatagaattaaataagatgaaaattatttctgccttcctgaagcttatcatctagcagggaaaataataattaaacacaagactatgtaattaaaatttcatatctgttctgcaggaaaatcatagggcattgtgaataattattttaaaaagctctgacttcatcatatgggttaaagaaatctccttgaggaagtaatatttaggctgatatccaaataatgggcaaaaattaagtagaaaaaaatgaccagggatggtgatggaggtgggaagatgggaaagaatttcagacaaagagaactaaacccagaaaagtagtcagcatgttttatagagccaagttgttcaataatgagtawaactgtaattctcagtggtacgtaaatcctggccttttgctcagtattcccggacctgaaacctattttcaatatttcccttcaaacctatgcctgatccccatggaccatgttcctactcagactcttctttctggttgcaatgttccatctctcagtttcaaattttacccatccttccagagccaattctaatcctgaggttc

SEQ ID NO: 302165 - DNA, 489 bp, Homo sapiens
aactgcaatcgtttggttctccagtccgatctggtagcrttatttttaaaatttatttttattttttattactattttactagtgaagatagatgagctcagagactctcgaggatatagcatgaagttttctctttttgttagatggtgggaaagggactttctgcccagcgattttggtttgagcgggtgttgatgagtactagaaaacggctagtaccactctgcattgtttcatgcattgcaaggaggtaaaaattttttaaaaaattaataacaaagaaaacttaactctgaacctagtaattagaaatgcccagagtctgcacaatgtttggctcatggaaggctctcaataaatacctagtgtttgaacatactggagatattccatatgccttcagataacatggttacccctagaacaaagaacctagtgaagggggtggggtggaaaaaagacaatcactagttagaagagtcacactg

SEQ ID NO: 302166 - DNA, 512 bp, Homo sapiens
gatcaggatttgcactgccctgtcacatgcaatctcccatgtcagagcattaatctcaaacatggaaaaactttaaaatacacaactctccagatggacacagctgaatcattttcaggaaggctctgcctataaaattacctttggccttaattcagtaattaaaggcacccacaggtctgagccctcatctatgaaggttaaacgtatcattcctatcagcactaattggttttataggatacagacctctagtttgctgaataaactttggaaggattcagattatgaggttctaaactgtagagcctttgaggagaaaggtaccccatttcttctccgaatagatcattttgtgtcttctcctgggcttarcacattgtcttccttaggatctgatagtctgtttatttatctttttgttgtcataccttttattcttgcatttcccacttttgactagcattttgccttttctccgtttctggaagcctgtaattttcaacattccc

SEQ ID NO: 302167 - DNA, 231 bp, Homo sapiens
gcatccaaactgtattcatgcgtattaaagaaagccctacagtcagactcactaaggagaaagaacaggagaaaagaggwcagtgtccaaggacaagattctctcatgcaaagagtgttgacttggagtctaccaacctgttcttgtaaggctggttccatccagcctaaaaccagctttatctgctgctgccaccagtgcttgtgcaaaactgccgctggcaaagataga

SEQ ID NO: 302168 - DNA, 534 bp, Homo sapiens
gggtaattaggaaaggggtttaattgactcatatttccacatggcttggkggggtgcttaggaaacttacaatcatggctgaaggggaaggggaagcgggcactttcttcacaaggcagcacgagagagtgaaatgctgtgaagggggaacttacaaacacttttaaaaccgtcagctctcatgagaattcactcactatcacgagaacagcatgggggaaacgcctcttatgatccaatcacctccgtcacttaacacttgggaattacagccccttccctctacaggtggggattgtagttcgagatgagatttgggtggggacacatagccaaaccatatcaagcattatctcttaggacttaaaaaatgagaggcaggaggtgatagagaatgtaattatctaggtctaaaattgtcaaagatgagcgccaggcatggtggctcatgcctgtagtctcagcactttgggaggctgaggtaggtggatgacctgaggtcaggatttcgagacctgcctggccaacatggca

SEQ ID NO: 302169 - DNA, 534 bp, Homo sapiens
gggtaattaggaaaggggtttaattgactcatatttccacatggcttgggggggtgcttaggaaacttacaatcatggctgaaggggaaggggaagcgggcactttcttcacaaggcagcacgagagagtgaaatgctgtgaagggggaacttacaaacacttttaaaaccgtcagctctcatgagaattcactcactatcacgagaacagcatgggggaaacgcctcttatgatccaatcacctccgtcacttaacacttgggaattacagccccttccctctacaggtggggattgtagttcgagatgagatttgggtggggacacatagccaaaccatatcaagcattatctcttaggacttaaaaaatgagaggcaggaggtgatagagaatgtaattatctaggtctaaaattgtcaaagatgagcgccaggcatggtgkctcatgcctgtagtctcagcactttgggaggctgaggtaggtggatgacctgaggtcaggatttcgagacctgcctggccaacatggca

SEQ ID NO: 302170 - DNA, 614 bp, Homo sapiens
cacactacatatatgtagtcacggtccacattagcatttaatggttctgagaagtactacaataaagaaatctgtatgacttatttaaactagtttttcccaaatttacttgatcacagaggttttgtcttgaataatgaatattggcatattttaaaactacatttccagaaaatatgtactgtgaaactctgatttacttatttattacatatttgcaagatcaggattctaaagatttaaattattgttttagattttttaaatacatatattttgttttaaatctgtccatgatccacatagaatgaagataatatatgccgaaatatttttgcctcctccctttcttttwcaaaaaatatcattccaagaatgaaattggccacatctgttatactgctctctaccactttaagttaggggaagaaaatgaccttttttcttctttaaaaagaaaacaaacaaaaaagaagtcaatcaaatatctccccatctgtttaccaattatacataatggtgagtcattttttttcctgtgaacaacataattaccaatgcgtaaacacaaaatatgtctgcttttaatcaagaatctgaactctgccagaata

SEQ ID NO: 302171 - DNA, 637 bp, Homo sapiens
aaaatatgtactgtgaaactctgatttacttatttattacatatttgcaagatcaggattctaaagatttaaattattgttttagattttttaaatacatatattttgttttaaatctgtccatgatccacatagaatgaagataatatatgccgaaatatttttgcctcctccctttctttttcaaaaaatatcattccaagaatgaaattggccacatctgttatactgctctctaccactttaagttaggggaagaaaatgaccttttttcttctttaaaaagaaaacaaacaaaaaagaagtcaatcaaatatctccccatctgtttaccaattatacataatggtgagtcattttttttcctgtgaacaacataattaccaatgcgtaaacacaaaatatgtctgcttttaatcaagaatctgaactctgccagaatattctcagatatcttttttattaatgctatgacmaggctttttaaagagtttaggagatatatatagatagatagatatagatatagatatagatatagatatagatatagatatagatatatatatatatataatcctagtttttctttttagaatcagatttgaaaatattagtttagatgtcagacactaaa

SEQ ID NO: 302172 - DNA, 637 bp, Homo sapiens
aaaatatgtactgtgaaactctgatttacttatttattacatatttgcaagatcaggattctaaagatttaaattattgttttagattttttaaatacatatattttgttttaaatctgtccatgatccacatagaatgaagataatatatgccgaaatatttttgcctcctccctttctttttcaaaaaatatcattccaagaatgaaattggccacatctgttatactgctctctaccactttaagttaggggaagaaaatgaccttttttcttctttaaaaagaaaacaaacaaaaaagaagtcaatcaaatatctccccatctgtttaccaattatacataatggtgagtcattttttttcctgtgaacaacataattaccaatgcgtaaacacaaaatatgtctgcttttaatcaagaatctgaactctgccagaatattctcagatatcttttttattaatgctatgaccaggctttttaaagagtttaggagatatatatakatagatagatatagatatagatatagatatagatatagatatagatatagatatatatatatatataatcctagtttttctttttagaatcagatttgaaaatattagtttagatgtcagacactaaa

SEQ ID NO: 302173 - DNA, 475 bp, Homo sapiens
ttaccacctaaactaagtaaacatgttttctacaaataacgttcttgtgaatttagctttctatatcaaacgttcatacccttaaagttatgtcaactaaccttctaacaacaacaacaacaamaaattataggaaagtcttttatcattgtggcaatcagacttaaaagttaagatttctaatgacaagacacaaaatgagtatgattctacataaatacattgtacctgatatatacacctttgttagcttcttgtcttatcaacataaacaagggcttattggtaatccagtaatttttattttcaaaatcacttgtattttctcaaaactttcaattaagtttctcttaacctaattttaatcaaggaacaattaaaaatatttgggacttctattttttatttttgtaaaagttacaccaaaaagtatttacaacatgttatccacaaaacggagaaggatgagttgcct

SEQ ID NO: 302174 - DNA, 518 bp, Homo sapiens
tttccattcctatacatacaaatcactgctgtctggccacaatgtcgtgaagggagaaacaggtcatcaaaatggaataaacatccgacaaacattgaatgaggaccgaactgtgtactagacacaatattatatacttagaatacagatattattctttccctaaggagccactaactagtgtggagaaagctgagaaccatgctgactattatagtagatatacacagaatattttggtgatacatgaactatagtatagtagaaagtacagtaaatagttaaatatgtacagggtcacatctcaactctgctacttaaattcctttaaaaatttatttaaagacagggtcttgctctgtcatycaggctggagtgcagtggtgtgatcatagctccctacagccttgaacttctgggcttgagtgatcctcctgcttcagcctcccaagtagctgggactacaggggcaggccaccacacctggctttgctaccttatatttgactaaggaaatg

SEQ ID NO: 302175 - DNA, 552 bp, Homo sapiens
gggtagtgccaactttacattttatctatttgttgaaacttgctttaggtttcctataatctggtggggggaagtcctcaaactactcctttgtaaatgtgtagtatgtccttttctttcttttttttttttctttttttttttttttttgagacagagtctcgctttgttgcccaggctggagtgcagtggcacaatctttgctcactgctgcaacctccacctcctggcttcgagcaattctctgcctcagccttccaagtagctgggattacaggagacygccaccacgcctggctaatttttgtattttatttttagtagaaatggggtttcaccatcttggccaggctggtcttgaactcctgacctcatgatccacccgccttggtctcccaaagtgatacgtccttttcttaatacgtgcatacatacaaagcgtgagtcccaaatttatgaaaaatcaaacttgattacacaatcatctttcatagctaatttcaatgataaataattgagcaagcaattcttttttaacacacactttttggc

SEQ ID NO: 302176 - DNA, 625 bp, Homo sapiens
tatggaattacatggcaagaactgttctaaagcaacatgtctttccacattattttagaggtgaaattacttttgttttgcttctctataatgtgtacttcaaatgaaacaccatacttttttctaaaaaaagatgttcaatttactaatttttttaaatctcataatttaaaaagcatttgttgtgattttaaagtgttgcaagaaaagggattttgtggccgtgggtagactttttatactttgttttatagatggattttttttaactgtagtttgtttaagtcaccaagcagcatccaaaatcttaatgtgtttcatttgatgttgttagatcagagaagaaattggcataaaatcggttaatagtattgtcaaagaattgtgtattgtgtactcactgggaaaaaataaaatatattcacatttcaaatttgtagaaaagccatttatgtaaaacaaacctgtttgtagacatgcyaaaaaaagaccaggtagccacttttagaactctgcattaatattttgtgactaaatgcataatctcagttttctcactcagttatggtttgaatagtgataaataggaactggtgttgacttttagtagtgactaacagacgct

SEQ ID NO: 302177 - DNA, 589 bp, Homo sapiens
atcaaaatgcctgagtgctgtgtttaatgaaagaaattgcctttaagatcaaaatggttcctgaatgtgctcccaggaaagatcttatctctaaagaagctcagcttatgtcatagaatatgtacttcaatctgttgagyacaccagaaatcatccaatacactctcaaaacaaacaacaaaaaaaagcagctcatcagttgaatgagtgaatctaagagactccatttagatgttgataattgtgcacactaggtttgtttggtacagcgactgctcaacaacagttctctggaagcaaggctacgctcattaacaatcattctggttttatgcttactataataagagaatacacatctatttttttctaataatttgtccaagttgttaaggttcatattcaaaaaaggtataagtttaaaaatgtatacaattttcattttaaaattgtcattagaatactccttgtatattggttaatactttggatgcaagaaataatctgcccaaaaagtacaggtttaaaaatacagattaatataacttaacacaagctgtcagatatttccagggcggttgcagtgaat

SEQ ID NO: 302178 - DNA, 538 bp, Homo sapiens
ggggattaaattaattgatatgtgtaaagagcaggggaaaagtgaacagaaaatctgcaggaaactgaaaagttccttctgctgtagtaaggtaagtaagcaaatctggaaacccaggggcaccaggcacagtggctttgtgctcatcctctgctgtggctcacagattccctatcatccggaagaaattcctaccgttttagtctccaaaatatagcccctccctgtagctagtcacaaggaatttactgtaatgggttaatgcagccttcttctcatrtggaggcagagaactgattgactctcttccctagcccagttttcttcacaaagtggggaggttctttttcaataatggagcttgccttactccaagagcccaggacttagcccgtgaatctcacctcagcattgtgctagaattcctcattgctcttcttgtcccttggacacaagtttttggaaaatttgctttcaatattaccatttttccaactgaagtttaaccagccaacttcttttttttaaaaaaaattat

SEQ ID NO: 302179 - DNA, 601 bp, Homo sapiens
ataatagcaaacttggggtgagcagaaagactattgtgatggcaaacctcatcataaatcctgtgcaactcattttagagacctaaagacacagtagggtttccgcaagtattatagaccatttattgaagttagactgccaaggcagtcggatcacctgaggtcaggagttcaagaccagcctggccaacatggkgaaacccagtctctactaaaaaatatacaaaaattagctgggcatggtggcgggcacctgctaatcccagctatttgggaggctgaggcggggagaatcctttgaacccaggaggcagaggttgcagtgagctgagatcacaccattgcactccagcttgggcaacagagagagactctatctcaaaaaaaaaaaattaattaaacaaggttccacaataggctgtctacaagctgaggagcaatgagagtcagtccgagtcccaaaactgaagaatctggagtccaatgttcaagggcaggaagcatctagcatgggagaaagatgtaggctaggaggctagtcccatatcatcactttatgtttttctgcctgctttataattcattggtggctgattagatg

SEQ ID NO: 302180 - DNA, 599 bp, Homo sapiens
ggtacttcattgtagctgccctgactgactaaggactcaaagtagccaccagtcaattgatgtcggcttgagttctcctaccaattctctctgtggattccttttctccttctcagttaaagatgtggtctcacttgcttctttacagaacctatcatcttccggcattttctaagaggtatctcctgtgaactacccttggaaaattcacacaaatagttctatcttacagtagtgttcttattctgtcgtttgggggccaagttcaatttttctctttctcttttyttctgagagggtaattcaacaaatagcactttgcaaagatttattaaataaattcatggcaaatactaggtacactttttttttgtaccttacaataacacttgtcatagtaatgtcttgccacgtttagttctgtggcataatttgatgaaggtacagctagatattgtgtcacatataataatattgcaacaaattgcaacaactctaagccagggagcttatgagaaatagtttcattataagcaaaaaaattgtagtaaatttaattatcacttttcttaaagcaaaacactaaatgttgtaactca

SEQ ID NO: 302181 - DNA, 629 bp, Homo sapiens
ataaattcatggcaaatactaggtacactttttttttgtaccttacaataacacttgtcatagtaatgtcttgccacgtttagttctgtggcataatttgatgaaggtacagctagatattgtgtcacatataataatattgcaacaaattgcaacaactctaagccagggagcttatgagaaatagtttcattataagcaaaaaaattgtagtaaatttaattatcacttttcttaaagcaaaacactaaatgttgtaactcaaacaacaagtttcacaaatgttgatgagacataacttgctctgtttgttcctgggcttagtctgctgatacagaggccttattccaaggccctcagaagatactgtgtggatrgcactatgctcaagagagagcattcctgttaaaccttactattggcccactcccagtatttttccttggtcctcttatctcttttgttcatattccccaccaagtttctgcctcctctaatgcctggcctctagcttggattatcaggctttttctgtttcattcatatctgcttatcaatgggggcagaaatagaatgaaatggagaaagatgctcctgaatgttgggagaatctgataaggtatctactg

SEQ ID NO: 302182 - DNA, 570 bp, Homo sapiens
atttcatgtctaggaacactgtgattaattagccartgccagagctctacatgagtcagactattctgattgccactttgcctctgctgtcccttatgtagctatgctcaccttgtctttaatggttgagtgctgccacttggcccctgccaccttgggatccaattattcccattatatttgaattttgtagttgagtgactgcggttcccaccattagatatggcatacagagaaaagccattacagggctcttcaaagatgcaagttctgtcctcacaaatctgtttcacaaagcattggtcaagagtgtatcttcgggacacttccagctgtgatgagtaggtccaacgtgactaatccactccaccatcccaatctccctaagcctttggatcccttgctctacattaaaccaagagagatcaggcatttccagctggctcacagtgggccatcttttaatccatatttcagctaaccaagaaataaactattagagcctttttaattcccagatctgcaacatgaaatgcagagaccctatttagtgtgcccaaatcaataaat

SEQ ID NO: 302183 - DNA, 462 bp, Homo sapiens
gtttctaaatctctgtgctcctgacatctctaacattccaagactatatccaattgtctgttggttagatgcacacagcattattgatgcttaatgatttcattaacaacagaagcctcattaaagtgctaaaaataaaatgcactattccttaataaccagtaaaataatcggaaataggcttaattcaatttagctttaargaattgtagggctgtatagcgagctgtgaataatctgctttagatcactgtaaaagtgctgtgtattcaaatcggggagagagaacattttagtctcatcagtggatatagattagcgtggtcattagcatggctttataaatccactggtttagagttacagaaggctagaaggtcacacgttgaaatttctcggagtccagcccatcagagccattgcagaaacagtttcggagtttcccattgaactcatgtgcct

SEQ ID NO: 302184 - DNA, 521 bp, Homo sapiens
tctgttgatagttaaaataaggcttgagaacactaaggatgccatagtatctctgcagagtttcaaacatactactttctgctcttttataaagaagtaattctacttcrttataatgatcagagttaattacacttgccaatataactcttttcttctctgttggtcaattggcttaagaatctcaaaatgaccaaatggaagccatagctttagaacactaggcctgtcaaattttaacttttaaggacaaaagcacaaattctctaaatgagtcactgggaataatgataacaggggccactcctgcttctatctcactatttttagactcaaatattctaactatcaggaacacaggaaatattaccattggttacagtaatataccacatctaagggaaattctacaaactagtaaaatgttgtctataagttggaacttcagccatgtctttgattgcttattgcaacattctatcaggcaggcaggctctgagtgatccagaaaatagtagggc

SEQ ID NO: 302185 - DNA, 546 bp, Homo sapiens
aggtttgctgacctcactccagggaggaaggaaccttcaccacagctggtcaggcaggggcaggtgcttccaaggtggctttgttcatttagttaatatyccctgaacagctactctgtccatgtcctctgtattgtgggtgtcagtctgttagtttccgcaactcagtgaataaattaactttgtctatgaacagaatggctgtccctatgccaaggccgtgtggattaataggagtctcacttccaagtggtagaaacccaactgaaattagtttaaacacaagaggaagtttattggttcaagtaggtgggaagtttgggggccggtgtttttggtattgctgaatccagaggtgcagacccgaagactgtccttctccaggcctcccagaagtattcggcttcattctgagctgtggcttcaccacctttcagcaaagatggccatagcagctgcagacttccacggtgctcaaagcttacaattccaggggctcagggaggctctgccttccacatttgaaaccctgcagagaaggacttg

SEQ ID NO: 302186 - DNA, 624 bp, Homo sapiens
cattgctatagataaaaaacaaatggcagatagccatgcccacgtgtataaataaaatgtacatattatgtatggatatattctacatatgtttatatttctataaatttgcattttaaatatttttaaagtgcaaaaatatatccatcaaaattatcagactgattgtcctgagggagggtaaagaaaatatgatttggggtcttaatcaaaaggtgtgttattttgtctataatttatatttctttttcttcttttttaagcctggaaagataatatgtaaaattataaattttacaagtttaaaaagctaacaggtctttattgcaaaaactgagatatagggttagtttttaatctatctatctatctatctagtctatatgtttggatttttaaaatttctgaaataagtatatatttaaccaagaaaaaggagatctstttagactatatacacacactcatcaaagtatcttctaataactgtacaaaacaggagtgggcaattttggggggtaaatcctgcctgatgccaggtgatataaataatgtatattggaaaatagccactttaaacatattgtttatggctgctttcctgatacaatggcagagttgagt

SEQ ID NO: 302187 - DNA, 624 bp, Homo sapiens
cattgctatagataaaaaacaaatggcagatagccatgcccacgtgtataaataaaatgtacatattatgtatggatatattctacatatgtttatatttctataaatttgcattttaaatatttttaaagtgcaaaaatatatccatcaaaattatcagactgattgtcctgagggagggtaaagaaaatatgatttggggtcttaatcaaaaggtgtgttattttgtctataatttatatttctttttcttcttttttaagcctggaaagataatatgtaaaattataaattttacaagtttaaaaagctaacaggtctttattgcaaaaactgagatatagggttagtttttaatctatctatctatctatctagtctatatgtttggatttttaaaatttctgaaataagtatatatttaaccaagaaaaaggagatctctttagactatatacacayactcatcaaagtatcttctaataactgtacaaaacaggagtgggcaattttggggggtaaatcctgcctgatgccaggtgatataaataatgtatattggaaaatagccactttaaacatattgtttatggctgctttcctgatacaatggcagagttgagt

SEQ ID NO: 302188 - DNA, 424 bp, Homo sapiens
tgtatacatatgatatatatatgtatatacacacacatataattagtttgggtgctctatagaaccctgactaatacagttgaagaaactgaataacaaaatgacatttcttccaatatagagtaatttttctaaattgtttctaaaagcataaggaataactyacaagtttctatatactcattattttaacgctctttaattgcattcacttcaccaattctcctttcttttccatgatatgggaaacagatggattgataaaaatgtacaggaatctaaaatatgatgtatttataaaaaaggatatatatagaattgaatttgtgggctacacagaaatatatttcagaaaaggatttaagaaaagaagagaaaaatgacacagggcaccaacatttactcagtacctattgtgtgccag

SEQ ID NO: 302189 - DNA, 424 bp, Homo sapiens
tgtatacatatgatatatatatgtatatacacacacatataattagtttgggtgctctatagaaccctgactaatacagttgaagaaactgaataacaaaatgacatttcttccaatatagagtaatttttctaaattgtttctaaaagcataaggaataactcacaagtttctatatactcattattttaacgytctttaattgcattcacttcaccaattctcctttcttttccatgatatgggaaacagatggattgataaaaatgtacaggaatctaaaatatgatgtatttataaaaaaggatatatatagaattgaatttgtgggctacacagaaatatatttcagaaaaggatttaagaaaagaagagaaaaatgacacagggcaccaacatttactcagtacctattgtgtgccag

SEQ ID NO: 302190 - DNA, 570 bp, Homo sapiens
cttcaacacttctgtaagtttctcctgtgagacattgcgtttcattttatcatctacaaaaagcaagggaaagagtttacaattttgtattggttgtcaactgcagcataacaaaccaccccacagctcaaaaaaaaataatcatttatcctttcagctcaagtatctggaaacatctaagaccacgctgatcaagattgaacttagttgggcttgactgaacttgtgcttctgcagtttactgactcgacagagttctattctttactggcttgcattgggcaaattctctagtgaggatcggcaccacctttctttcacyttcctggacccaagaaactagctaagatatgtttgtctcatggtagtgaaagaggcacaaatcaagtcaaattatgcagactccattaagccttttcttgtgtagtgcctgctgaagttccagtggtcaaagcaagccccaggggtaaacataggtcaccaagccacagtagaaggacactacacgtggagtggattcagagaagtgtgaacattttagtcagatgtgtaatctcccaaagactggca

SEQ ID NO: 302191 - DNA, 570 bp, Homo sapiens
cttcaacacttctgtaagtttctcctgtgagacattgcgtttcattttatcatctacaaaaagcaagggaaagagtttacaattttgtattggttgtcaactgcagcataacaaaccaccccacagctcaaaaaaaaataatcatttatcctttcagctcaagtatctggaaacatctaagaccacgctgatcaagattgaacttagttgggcttgactgaacttgtgcttctgcagtttactgactcgacagagttctattctttactggcttgcattgggcaaattctctagtgaggatcggcaccacctttctttcactttcctggacccaagaaactagctaagatatgtttgtctcatggtagtgaaagaggcacaaatcaagtcaaattatgcagactccattaagccttttcttgtgtagtgcctgctgaagttccastggtcaaagcaagccccaggggtaaacataggtcaccaagccacagtagaaggacactacacgtggagtggattcagagaagtgtgaacattttagtcagatgtgtaatctcccaaagactggca

SEQ ID NO: 302192 - DNA, 491 bp, Homo sapiens
gtaatacatatacaaaataagtgttaatatactgtttatgttatgagttaggcttctggcaaatagtaggctattagttttggggaagtcaaaagttgtatgcagatcttttgaccatgcaggggtatcagtaccctcaggttatccaggggtcaactgcatatgtgtgatgtctgcatttgtaacagtctctctgcaaccacraaggacaggcatgactgatcccctgaaccacatccaacaactacctgttatgagctttcttgccatgtgattaaaaaaaaaacaacattgagaccatcctggctaacatggtgaaaacccatctctactaaaaatacaaaaaattagccaggcgtggtgtcgggcacctgtagttccagctactcgggaggctgaggcaggagaatggcgtgagcccgggaggtggagcttgcagtgagccaagatcgcgccactgcactccagcctgggcgacagagggagactcc

SEQ ID NO: 302193 - DNA, 590 bp, Homo sapiens
atagtgcatgtgcctaggagttgcctgctgttatgtctcctcacttaggtcaggtcttcatccattttgatatattawtagtaatcataatgatcacgtattgagcatgtgtttgtatgaaatgcttgttccctggtgccttaaagaaatagcacttgaacataaatttaatttactcagcaaggccatttttacttcctgcagaaatggtgcagaaagggtacactcaccagcagtgttgccacgagagtacactgatcaaaggagacagggtcatttataacctgatgcgtccaccctactgctgtgtccggtttccattggctggaacaggacctcacattctgcatttgtcccgattggcgagcaacttagaactttttaaaagagacaaaggcagaggagaacaaaggaaggaggaagtaacttgtggaaggctgagaaaggtaaaaacaccttcaaatgaggaataggaacaggctataacctaatgcttgcttggaccagcataagcacgccagggaaaatatttaggctaaattgtagaagctaagaacataaagtacattgattttttttttaatcacaat

SEQ ID NO: 302194 - DNA, 590 bp, Homo sapiens
atagtgcatgtgcctaggagttgcctgctgttatgtctcctcacttaggtcaggtcttcatccattttgatatattaatagtaatcataatgatcacgtattgagcatgtgtttgtatgaaatgcttgttccctggtgccttaaagaaatagcacttgaacataaatttaatttactcagcaaggccatttttacttcctgcagaaatggtgcagaaagggtacactcaccagcagtgttgccacgagagtacactgatcaaaggagacagggtcatttataacctgatgcgtccaccctactgctgtgtccggtttccattggctggaacaggacctcacattctgcatttgtcccgattggcgagcaacttagaactttttaaaagagacaaaggcagaggagaacaaaggaaggaggaagtaacttgtggaaggctgagaaaggtaaaaacaccttcaaatgaggaataggaacaggctataacctaatgcttgcttggaccagyataagcacgccagggaaaatatttaggctaaattgtagaagctaagaacataaagtacattgattttttttttaatcacaat

SEQ ID NO: 302195 - DNA, 558 bp, Homo sapiens
acaattttaatatctaggtttagtgaaacatttagaaaggttacaccattcaggctgtgagagaaaaatcatgtggttcttgtcattgaagactatgtaaggggagaaatagtaaattcagtgagcattaatcacaaaataatagccyatacatagaaagaacgtgaaagacagaggggatggggtgtggagagggagcaatgagaatagagagggaaagaaaaaacaatttttgaactattgagtgattatttgtaacatatgtcatgagttatttgtagagagacaatctgtaaaaaaaaaattagcatattatttatttaaatgtgtgagtttctcttttacttttaaggaaatacatagccctttaaataatgtatttctgtctcaaaaagcaacataaattttaaaagcttatttaactaatatatagttctttatctaaatcaattgagaaaatgttgccataatttaagctgaaacaaaaaacatgtttctttaatcttaatgggaaaattaaattggagcctcattgaactttagaaattattctcagat

SEQ ID NO: 302196 - DNA, 597 bp, Homo sapiens
aatttattgtttcaaacttgatggtttccacagctttttctgtaacagtgatcctcagtggtataatccttctagactttcacgatgttctgttgggttctcttccatagtgttgacagttgtttcctaagaatgccatgtgtaatgaaccataaaggtccttgtgacctcctgttctagaggctgaattagagaagttgcgtttgagggcarttagaccacttcaacaccctcagtgttgaactcatgaagctctgggtggtcaggagcattgtccaattgtaaaagaactttaaaagttaatctcttactgataaggtacttcctgactttagggacaaagtatcaatagaaccaatccagaaaaaggattctttttgtccaggccttcttgtacaaccaacagacttgcagctggtgtttgtgttttcctttcaaggctcaggggttagcagctttatattaatagataagggcagtcatgatcataaacccaactgcatttgcacaaaacagtagagttagcctatctcttcctgccataaatcctagtgctcacttctcttccttgctaataaatatcctttgtggcttccc

SEQ ID NO: 302197 - DNA, 566 bp, Homo sapiens
attctaaaatctatagaaaatgtaaacaaacaagaatacatgagacattcttaaagaggggaagagagatgataataatgataatgatattaaaagacttataagtaagatggtcttttccaaaaactggtcttagatcaatcaactgatgctcatatggacaaattaaccctgacttctacctcaaaccayacaaacaaaccaattccaaatgaatcctagacaagacctaaagatttcaggaagtttaaaaagtttctagaagattacataagagagcatcttcctgactgggtcgatgtaaagacttactgcaccaaacaaaaatacacaaaacataagaaaaatagtgacaaaatgaactacatcaaaatttaaagacttgtgcttatgaaagccaccactaagagaattaaaagccaaacttcagagagagagaatatacttggaaaaattacaaccaacgaggaactgctatcttaaatatattaaaaagcctcttacaaataaaagaaaatgatcacaatttttaaaatgggaaaagtacacaagcacttcacaaaaga

SEQ ID NO: 302198 - DNA, 558 bp, Homo sapiens
tttctgccattctatcactttgtttcgatctctattaggctcacatacaytattttaatttgactccagctctgtcagactctctcttctatccccaaactgtcttccagctactttagaagttaatgcaatttcttatctatgattttggggtgacatcatcagggtattttttttcaaatgctattaaacagtactcatttaggcattacagacaaaaaccatccctagtgtaattttaaaacccactaatgaataacttcctctgattctacgatagaaaaaacaagggctttcaagagtacagatgtgaaatactggtttgggttcttaatttccctctagagacctaaaaccacattgtgaatttaacatcaatatattgccttgtactttcaaacattaattgaattgattagtcaatggcacactatcctactagtccccaaacaagtaacctcaaagttattctagtctcttccctcttctctaccaccttccttcaggcccctaatcaatcaataagtcttgtcaatatttcctttgtaatattctcag

SEQ ID NO: 302199 - DNA, 536 bp, Homo sapiens
tctaaaatgaaaatctgataatcactgtattgttgacaaggtatcagccgtcagccatcttcccatgatctacaaaagagactaaacacctttccatggcttataaatcagtctcattgttgttaaacttttatactctaagaactccaggtcaggaactactctctcaaacattacaccctgttactgtacactcctttgcctctgttgctactgtcccaggaatgacctcacttcatattctatctaacctaccttcaaagctaaaccaaagtaaaggttcactacagaaccttttctgatcccacacctgctttccctccacagaagtaatcccctaccaacgtgtatcagtctcttctttagtacttattactttgaaactttctgtataacacaatttcaattatgtrtttacaaatctgtcttccatttgacactgcaccaaccatttataatttatctttacacaaccaaagcatagaacagtgcctggggacccagcagtgcttataaggaaaagaaactttgactat

SEQ ID NO: 302200 - DNA, 641 bp, Homo sapiens
ctgtcctcagcccctggttgggtttctgtgccttttggagttggttaaaggtacagctgagtctctctgcctttcctagtaggatcagcagaggggaaagggaagattgactataggaacacaaggcagtccttaggtgaagggaagactgctgggccctggagcctcctgttctcccatgtgtctctccatgtgggactcagtgaaaaaacgggttgtcgggtagacgccctccatggctgcgtggtctccatgacctggcctgtcccagcaggactgccgatacctgaggatcctggtggagaatcaaggacgagtcaatttttcatggcaaatacagaatgagcagaaaggtgggctctggctgtggcttctcctcagttgctcagaaccgaagacccgggctatgcactggagtcgggggcgggagagggyggggaaaccagccgctcagcagtgggctacccaggccctgggagcagagatgcaaaatcggcccctcgcccttgtcttgccttctctgatctccagggccagagggtggggccagtgtgttcggtgctggcttgtcctcaagcagggccagtctccttttgggaatttcaggaaaagttccagtactaagtgggggaactttcttg

SEQ ID NO: 302201 - DNA, 570 bp, Homo sapiens
ttgtggacaagaaccctctagtattcatctttatatccctagaagtataagtggcttccctagtattttctcaaagtgtttgttgagtgaataggtgatgtatttcttcctcttcttccatcctaagtgaagtagcagagcagaagttacctgcattcgacagctgagaaaataggtagtgagagatttgaatagtgtaaagatactgagggaaaaagwctaactcagtgtctcctatactctcactcaacaatcaacactgaagacttctgtgaccaaatggtagataacagggccagttactgccatccaaattagatttgatggtatttacagtagggaactgtcataagcaaaaccaaaagaaggagtgagataacttttgctgtggtctataatgacctttaaaacattactggaaatttggaaagaaacaattgtatttttcagatcttctttcaggcagcatattccatgtctttggaaggaatgctgtgcatagccacttagggtacagagaccccctccttcagggtcaagttcaagtgacaaaagatgatgaccagattg

SEQ ID NO: 302202 - DNA, 543 bp, Homo sapiens
ggggcctcagacctttcttgcaaaatcttttactaagaaataaatgcaacatagtttttctttaattcagcagttatagctctgttcacattatgtgtttttcttcctcaaaaaaatgctacaattttttttccaataaaggcctcaacaaaaattacattgaatataaattttcaaatagctttttatactaggaagccaaggtaggaaagatagtctcattgtatgataaaaataaaaacttccaaatattcttgtatttattgcctgactttagaccctagaaaggaaaaaaaaaaacaaaaacagagctttgatcctacatagactacttaaacacttaagaaaaataagccttcctcctgcttgtgagcrcacacacaggatggccacacgttgcttgttgtcagtagcttgagggagtctcttcattggcctgtggaacccactcctagtggcagctggaaaagtgcatggattccttctctttgttgagacttccctcccagttggaactgcagtgtctttttctccctattactg

SEQ ID NO: 302203 - DNA, 520 bp, Homo sapiens
gctttctcatagtattctgtttctgaaaaggaaattcaacttacccagggttgatatggcttcaaagtacattacttatggacttgctcatagtacgtgaagattctattccaataaagtgttaaaatggagaaagggaatggcttgtacactgttggtagggatggaaagtagaacagccactatggagaacagtatagaggttccaaaaaactaaaagtagaggtaccatatgaggcagcagcctcgctgctgactgtatagtcaaaagaaaggaaatcaggatgtcgaagacatacctgcactcccatgtttattgcagcactgttcacaatagcaaaatttggaaacaaatgtccatcagtggatgaatggtaaagaaaatggggtgcatatacagtggagtacttttcatctataaaaagtgaaatcttgtcatctgttgcaacatggatgaacttggaagacattatattaagtraaataagccaaacacagaaagacaaagattgtatgttct

SEQ ID NO: 302204 - DNA, 582 bp, Homo sapiens
acaattttttttttgagatggagtcttgctctatcgccaggctggagtgccgtgccgcaatcttggctcactccaacctccgcctcctgggttcaagcgattctcctgccttagcctcccgagtagctgggattacaggcatgcgccaccacacccagctaatttttgtatttttagtagagacagggtttcaccatgttggccaggatggtctcgatctcctgacctcgtgatccaccygcctcggtttcttaaagtgctgagattacaggcgtgagccaccgagcctggccctaaatacttccatatgcattattcttaccacaaatttgtttcctctttggcacccagaaagccttgctattctagggcattgtggtcagtaaaagccccgtgtggctggaagctctccgtgtccatatggacccggtagggggacagggggactgccgcgtggacagggggactgccgcagtggacgggggactgccacagtggtgcggtaaacagactggagcagcatggctctgtgcatctccaccgcagcaattccaggttagtaacccacaccagaagaaagcg

SEQ ID NO: 302205 - DNA, 431 bp, Homo sapiens
aggtcttcacgtgaaagctttatttgggtaggaaaacctagcctacgagaaacgggtccgtgcggtcacgcctgactgcctgtctccgggtcaaggctgccaggaccagctccagccctccgcccgagaaggctgtcctttcccctcggaactctggcttccctaaagcggccgcgcctccttcyaggcctcacctcctgccggctccgcccggcccggcccacctcgcccccacctcggcgcccacccattgtcccctcgcgcagtcaccgagcgcagatcccgcgctctcgattggaacgcctccccatcactcagccacactcaggggctggacgcctcactcccgtttccgagccataaaaggtctaggaccgcttcccccgagccagcaggtaaagccgcggcggcgggagggaggccgggagggg

SEQ ID NO: 302206 - DNA, 411 bp, Homo sapiens
gggccaaggtgcccagaacaaacttggttctggacgttttggggagggttttttggggrggatgagtttcacattaaaatctatggactttgagaaaagcagatcacagaagctcagcagggtcgggcctggttagcacttggatgggagaaaagcagatcaccctccataatgtgtgtgggcttcatccaatgggttgaaggcctgaacggaacagaaggctgaccttccctcctgccaccagcaagaagagaattctcacttgaacagcaacattgcaacatctccctcctgtagctcccgcctgctggccggtcccacaattttgggtttgccagcccctgcagtctcttaagtcaattccttaaaataaattctctctctctctctgtttctctctctctgtattcg

SEQ ID NO: 302207 - DNA, 411 bp, Homo sapiens
gggccaaggtgcccagaacaaacttggttctggacgttttggggagggttttttggggaggatgagtttcacattaaaatctatggactttgagaaaagcagatcacagaagctcagcagggtcgggcctggttagyacttggatgggagaaaagcagatcaccctccataatgtgtgtgggcttcatccaatgggttgaaggcctgaacggaacagaaggctgaccttccctcctgccaccagcaagaagagaattctcacttgaacagcaacattgcaacatctccctcctgtagctcccgcctgctggccggtcccacaattttgggtttgccagcccctgcagtctcttaagtcaattccttaaaataaattctctctctctctctgtttctctctctctgtattcg

SEQ ID NO: 302208 - DNA, 411 bp, Homo sapiens
gggccaaggtgcccagaacaaacttggttctggacgttttggggagggttttttggggaggatgagtttcacattaaaatctatggactttgagaaaagcagatcacagaagctcagcagggtcgggcctggttagcacttggatgggagaaaagcagatcaccctccataatgtgtgtgggcttcatccaatgggttgaaggcctgaacggaacagaaggctgaccttccctcctgccaccagcaagaagagaattctcacttgaayagcaacattgcaacatctccctcctgtagctcccgcctgctggccggtcccacaattttgggtttgccagcccctgcagtctcttaagtcaattccttaaaataaattctctctctctctctgtttctctctctctgtattcg

SEQ ID NO: 302209 - DNA, 618 bp, Homo sapiens
ggcttctttgggagactccaaaatgaaagagatttaaggctctcaaaagtgctcagtcataagaaatgctggaatcacraccagttgctaatttaacattgtccatagggattaaaacaagaaaggtgaagctcctaaattctgaaggtgggaagagaagatgtccaagttgagacctctgaccctcctcccctcaccctccttgtttctcaagacagaggagttctgatatccccacatcgacatggtcattctttcagctaagccatccaccaaagggcccagtaaaataagttaccatctagtctctgtgagccacatttatctgcccaagggcacagcacacacccatgggcaggtcaccaaaaaaatgtagcaggcacagccttcactttgggatggaattctgctccttgcagtagcaactgaggataaccaagcagaggcaatcgggtcaaactctgggcttcaggaaacctacagggggtgctgaggctggaaggagcttgcaggagagaaaactacttgtgaagactatcctcttggggagaaagggtggagagaggcatccacagactgcctggggaatgctatccctgctcctcatccctcagctgc

SEQ ID NO: 302210 - DNA, 562 bp, Homo sapiens
gtctccattcatacatcaattcactcatccatccaatatatcttattgaacacctaagtatgtcaacactgagcttggcatcacacatctagaatatagtgaatataccattcattgtgcctggatctctctttccacgtggttagttccctctagtcrttcaaatttctgtttcaatgttaccttcacacctaggctttccctgacctcagcctcctacctctgcctaacactgtcactggatttgcaaactgcaaggtcctaaccaaagcaggtcctatagatgccatctttgtagcagctttctaatcaatgtacttctctctagcccatctcgtgccttcactcaggttatctttcacccagactaccaacaaagacttttctactcctctccctgcttctactcttcccactcctcaccagagtggcctttctaatagacattctgattcttttctcactgtacactctctccccaggtgatcacataccacaccccagccccacccccatgatctcatttcatcttcaacaacccctaactaagagatgtctcaaa

SEQ ID NO: 302211 - DNA, 623 bp, Homo sapiens
ggctgggtgtgtgcaaataaaataaatttagaaaaaaagttgactttgtaaaggaaacttaaaaaatctggcaaaccaaatatatttaaagacttcatggatctctggtggcaaatgctaaggctacccaaatgagaagaacacgtgctaaacttaaacaggcattgttgtttcacctaaaaaaagggggtggatctttaaggaaaacacagytggatttttaaaacaaattgagtgtggacttaggttccatctctaatgatatctaaccatattattttagaaaatgtaaccactctagtaggttaaatgtttatcacttacttacctgggatattgtcaaaagaatcagtgaaagacattctgcaaagtatttgtgatgtaatcaccttcgtggttattggtccaagatttgaagaactctgaagttttaagttagctgagcctcgcagagcaagaacaagtagagggtacacattacaggaacctaagccttcagaaagaaatgagtacaattaaattgcaacacttctcttgttcccttccttttaatgggacaactctcttggcttacctctaatagagctcatctttgatgagtagattgtatgatgtacaacaat

SEQ ID NO: 302212 - DNA, 623 bp, Homo sapiens
ggctgggtgtgtgcaaataaaataaatttagaaaaaaagttgactttgtaaaggaaacttaaaaaatctggcaaaccaaatatatttaaagacttcatggatctctggtggcaaatgctaaggctacccaaatgagaagaacacgtgctaaacttaaacaggcattgttgtttcacctaaaaaaagggggtggatctttaaggaaaacacagttggatttttaaaacaaattgagtgtggacttaggttccatctctaatgatatctaaccatattattttagaaaatgtaaccactctagtaggttaaatgtttatcacttacttacctgggatattgtcaaaagaatcagtgaaagacattctgcaaagtatttgtgatgtaatcaccttcgtggttatyggtccaagatttgaagaactctgaagttttaagttagctgagcctcgcagagcaagaacaagtagagggtacacattacaggaacctaagccttcagaaagaaatgagtacaattaaattgcaacacttctcttgttcccttccttttaatgggacaactctcttggcttacctctaatagagctcatctttgatgagtagattgtatgatgtacaacaat

SEQ ID NO: 302213 - DNA, 623 bp, Homo sapiens
ggctgggtgtgtgcaaataaaataaatttagaaaaaaagttgactttgtaaaggaaacttaaaaaatctggcaaaccaaatatatttaaagacttcatggatctctggtggcaaatgctaaggctacccaaatgagaagaacacgtgctaaacttaaacaggcattgttgtttcacctaaaaaaagggggtggatctttaaggaaaacacagttggatttttaaaacaaattgagtgtggacttaggttccatctctaatgatatctaaccatattattttagaaaatgtaaccactctagtaggttaaatgtttatcacttacttacctgggatattgtcaaaagaatcagtgaaagacattctgcaaagtatttgtgatgtaatcaccttcgtggttattggtccaagatttgaagaactctgaagttttaagttagctgagcctcgcagagcmagaacaagtagagggtacacattacaggaacctaagccttcagaaagaaatgagtacaattaaattgcaacacttctcttgttcccttccttttaatgggacaactctcttggcttacctctaatagagctcatctttgatgagtagattgtatgatgtacaacaat

SEQ ID NO: 302214 - DNA, 600 bp, Homo sapiens
tagacttgctcagcctcagctcatcattctttcccaaataacccagccagagaacagctgcagggtcaggacatcaaagccaagctgcggtggatgcacgactgcagctctgccgttaccakggatgactctagagacaagaaagtcacagctgggtgctcagatctcaagagggagctgcaatcctggcaaattacagaatgtatcaaggagttatatgatgagaaaatgtcttctggatgtcagggagaaaaaacacagagaaaaccccaggatcttgtgttttacagactcctttgtgactggagtcaaactcacaataacccctttgctttctgcagccacttcttctgggacatgatgctacttgatgtgtttatttaggtttctttgcgcattatttaaaagcaaatctctaaagcaagttacacttgaggagatatgggctgggcggattttttagaaagagaattcacttaatcctcaagaactgctgttgacttttctgcctgtgcttctgcttatttatcccatttacaatgcatgcttgctcaacaaaagaagcagacaatcatccttacacattcatatctgtgacac

SEQ ID NO: 302215 - DNA, 600 bp, Homo sapiens
tagacttgctcagcctcagctcatcattctttcccaaataacccagccagagaacagctgcagggtcaggacatcaaagccaagctgcggtggatgcacgactgcagctctgccgttaccagggatgactctagagacaagaaagtcacagctgggtgctcagatctcaagagggrgctgcaatcctggcaaattacagaatgtatcaaggagttatatgatgagaaaatgtcttctggatgtcagggagaaaaaacacagagaaaaccccaggatcttgtgttttacagactcctttgtgactggagtcaaactcacaataacccctttgctttctgcagccacttcttctgggacatgatgctacttgatgtgtttatttaggtttctttgcgcattatttaaaagcaaatctctaaagcaagttacacttgaggagatatgggctgggcggattttttagaaagagaattcacttaatcctcaagaactgctgttgacttttctgcctgtgcttctgcttatttatcccatttacaatgcatgcttgctcaacaaaagaagcagacaatcatccttacacattcatatctgtgacac

SEQ ID NO: 302216 - DNA, 633 bp, Homo sapiens
aacctatttcctatttggagaaaataaccatcatcataataaagcaaaaatagcacttattgaacttgttctatgtggtaggcattgtgccaggcagttatattatcagtaaattctcataacaatcctgaatattttcactgttccgtttgcatatatgacagctgatagaggtaagatcctagcccatgtcacacattagattcatggttatttggctccaaaagccatgatctttcccaaccacatatccatatccaaccttcacattcagggcactgttgtgggcacttctattcactgatttagtgaatcctatgcaaargaattatggtttcctctttaaaattctggactaaaatttacaatattagctgttttatcaacttcagaggtttctgtgaagtggctcacttcaagacctaggctcctctgcatttgagagtcacaaagtgataccaaaataaaaacagatcaattactttgaaaaattggtgaattcttgattatttaatggagtctagagtagtaattgattgggcaaactccagaggtacatcatctggctttacagccgtattttaccatttcctagattagtcaccttgaataaatttcttaatttccatgcat

SEQ ID NO: 302217 - DNA, 633 bp, Homo sapiens
aacctatttcctatttggagaaaataaccatcatcataataaagcaaaaatagcacttattgaacttgttctatgtggtaggcattgtgccaggcagttatattatcagtaaattctcataacaatcctgaatattttcactgttccgtttgcatatatgacagctgatagaggtaagatcctagcccatgtcacacattagattcatggttatttggctccaaaagccatgatctttcccaaccacatatccatatccaaccttcacattcagggcactgttgtgggcacttctattcactgatttagtgaatcctatgcaaaagaattatggtttcctctttaaaattctggastaaaatttacaatattagctgttttatcaacttcagaggtttctgtgaagtggctcacttcaagacctaggctcctctgcatttgagagtcacaaagtgataccaaaataaaaacagatcaattactttgaaaaattggtgaattcttgattatttaatggagtctagagtagtaattgattgggcaaactccagaggtacatcatctggctttacagccgtattttaccatttcctagattagtcaccttgaataaatttcttaatttccatgcat

SEQ ID NO: 302218 - DNA, 633 bp, Homo sapiens
attctcagaccacaggacaataaaaatgtatagcaatagcagataaacaactcaaaaycatataattgcatgggaattaaacaacctgcttctgaatgacttttgggttaaaaaaatgaaattaaggcagaaataaaaaaaaaattgaaactaattaaaacaaagatacaactttccagaatccctgagacacagctaaagcagtattaagaggaaaggattttttgtataatttttttaaaaacttcaatagttctgggggtacaggtggattttggttacatggatgagttttttagtagtgaattctgagatttttagtgcatccatcacctgagcagtgtatactgtatttaatatattttcttttattcctcactctcctcccaaccttcctcctccaagtccccatagtccattatatcaccctgcacgtttttgcatcctcacagcttagctcccacttataaatgagcatatatgttatttggttttccattactgagttacttcacttagaataatggcctccggttccatccaagttgctgcaataaacattattttgtttctttttatggctgaatagtagtccacggtgtaaaataacacattttctttaaccacttgttg

SEQ ID NO: 302219 - DNA, 633 bp, Homo sapiens
attctcagaccacaggacaataaaaatgtatagcaatagcagataaacaactcaaaaccatataattgcatgggaattaaacaacctgcttctgaatgacttttgggttaaaaaaatgaaattaaggcagaaataaaaaaaaawttgaaactaattaaaacaaagatacaactttccagaatccctgagacacagctaaagcagtattaagaggaaaggattttttgtataatttttttaaaaacttcaatagttctgggggtacaggtggattttggttacatggatgagttttttagtagtgaattctgagatttttagtgcatccatcacctgagcagtgtatactgtatttaatatattttcttttattcctcactctcctcccaaccttcctcctccaagtccccatagtccattatatcaccctgcacgtttttgcatcctcacagcttagctcccacttataaatgagcatatatgttatttggttttccattactgagttacttcacttagaataatggcctccggttccatccaagttgctgcaataaacattattttgtttctttttatggctgaatagtagtccacggtgtaaaataacacattttctttaaccacttgttg

SEQ ID NO: 302220 - DNA, 633 bp, Homo sapiens
attctcagaccacaggacaataaaaatgtatagcaatagcagataaacaactcaaaaccatataattgcatgggaattaaacaacctgcttctgaatgacttttgggttaaaaaaatgaaattaaggcagaaataaaaaaaaaattgaaactaattaaaacaaagatacaactttccagaatccctgagacacagctaaagcagtattaagaggaaaggattttttgtataatttttttaaaaacttcaatagttctgggggtacaggtggattttggttacatggatgagttttttagtagtgaattctgagatttttagtgcatccatcacctgagcagtgtatactgtatttaatatattttcttttattcctcactctcctcccaaccttcctcctccaagtccccatagtccattatatcaccctgcacgtttttgcatcctcacagcttagctcccacttataaatgagcatatatgttatttggttttccattactgagttacttcacttagaataatggcctccggttccatcyaagttgctgcaataaacattattttgtttctttttatggctgaatagtagtccacggtgtaaaataacacattttctttaaccacttgttg

SEQ ID NO: 302221 - DNA, 359 bp, Homo sapiens
agccaaattagcatcaacagtaaccacaaggaagtccaagtgacttccttggaatcagccatttgctaccctcagaaggagtcacaaggaggcccatcaagcagtgaatggtwctgctatgtctctcaaaactagggtgtagggagatccgaggaattcttaccctgggacatatatgaaaactagcatttcattgcaagaagttttaattttcctgtggccactgcctaaggggattttaaagcactgccgggtactgcagacatctgcttttgatggattgccagtagcatttcccactctaagagtcctcagtacaacacagccagctgtgtagtctatttaaccacagtgtgaaa

SEQ ID NO: 302222 - DNA, 637 bp, Homo sapiens
tctgcccagttttatatcacaatcttgccagattcccaactttgtctcttcagctcttgatttagtgtttaccctatacccacagcaatgggggcagctgactcacatttgttaaataagtttcagggctgaagcttgatacagttgaatcctgtataattattctttctctgcttggattctgaacctcaggtctggttggtcctctgaagtcaccacatctgcatgcctcttccttctgtatgtacccacctccattgggctctgctgtgtgaatataatgctgtgcaatggagctatcatcttagcctgatgccccagtctcccccacttccattgctctttcttgagtcaagactcgacctggcatttttggattcacaagcccacgttttgaactactgctaagagctctacaaatatcattcctaggtctctgactctgaagaagttacttaatctctccgaatctcagcttccttattgtttcatggaaataataataccaaatttgcactactattgcagagatttggaagygattatatacttagcaccattacttatttccccatgctcctgtttcacttgcaaacagtcacaaaaaatagctattcctggtgtttgttttattata

SEQ ID NO: 302223 - DNA, 571 bp, Homo sapiens
gagaaacaagcaaagttacagttaacacaccataaacaaatacagaaagggcggacagtttgagcacatgaaagactgcttggaggaatgtattgtgtatactctctctgcacctgtttattagcacagttttgtttggaagggaagacgattttgtcttactctctgaatgttctaacttaatgcctgattctataaatgaagaactgctcgtctgtgcatggaaagtctcttaaggaaaggagaaatgattctgctggcaatctacaagcaacccargagctttagtgatggagtgcttctctgtttctcacgtgcatgtttatgcacacatatggattaaaatgtggtttcaaccttcctctttcagccagcctaaaattattctttcccattcctcattctctctgatttaattagctctccataccatgcaccagcaggtctacagaagtaacaactataaaatataataagagctagcatgttctgtgcacctgctgagtgccagaccatcttcttaggtactttatgtgcatgattccatgtacacctcacagaagccttatga

SEQ ID NO: 302224 - DNA, 583 bp, Homo sapiens
tgattcaaatacctcctgatagttgttttccgtttggggctgttaagaataaggcttccataaactttcttgcctaagtcttgcatgcattgatgtttttatttctcttgcgtacatagctgggattcaaattgttggcttataggttgtatctatgcttagtttatttttaaaattgccagagtttttgaagcctgcctctacaagcagtgtgtgagaagtttagctacttcattacctccaaaccatttggtattatcagtctttttatttwtctcaattggaaaatattaaatggctttatattatggcttaaagttgcatttacctggtaactgagtgccttatcttgagcttcttgtctattcatgcatttttttggtgattatgtgtttaagtcttttgcccatttaaaattggattttttttgttatggctttataggaatacatcatgtattctgcatataatttatttatccaatattatatattgaaaaacttttcttcttgtctgtaatttgccagtttattttgttaatggtgctttttaatgagtgtatctttttaattttgatgaagtc

SEQ ID NO: 302225 - DNA, 524 bp, Homo sapiens
ttttttcccctttcactttgcttccaagacactatgctttcttgattttcttcccattacactggccatttctcagcagccttggctaatacctccccttttctccagtctcttaatttcaggatgatattccagggctccaatcttgctcctctttcttatctaccctcactcccttggtgctccatacagtctctttactttaaacatcatgcacatgtcaaggactctgaagcttatatttccagtgtgagcctctctcttagacttgagactcctgtggccacctttccatgtctccgttaagayatccaagacaaacctcaaacctaacatgtactccccatcttctctcaccctaatctcctgctgcatcccaatctcctcatctcagttagccctctttaggccgaagtccttgcagccctctttgattatttcctttctctcatatcccatatccacgctattattcaaacatgtcctgcaaatttccacatcagagtaatgactcttctggttca

SEQ ID NO: 302226 - DNA, 557 bp, Homo sapiens
gttacagctctaattcacattaacttccaaagaaggcactttagctattaggcagttccactaaaagtcatattcctaggactactccagagaatttatcctgcttaccacgctttccttgggttatacattttggtcccatccatcccacttataggcacttgagaagcttagagaattacagtattttctcttggaaatgcttttaagtagcattttaaatacatgattttccaacatccctcccacttatggcacccatatagtacccmgtgtacatatcatttccctgctgattggctttcatgtgttccaaatgcttttctaaattgacctgatacctattaaacctgaagtggacttttaagatctgaagaacatttaatcaatgggacattaaagtaaataaatcatagctgagaggagttccttcaaatgatataatctttaatgagcattgcacttgatttaataatttattaaatatataaaaaatgattggtaaattgaacacttgtctcagagcaagcaattagggctatttttattcaatttgt

SEQ ID NO: 302227 - DNA, 558 bp, Homo sapiens
tttgagtcagactgattctaaagatgatgtgtcattaacgaatatgcacagcactgagggaagagatagcatgggagggaagagaagctcaattttttaacaaactaagtttgacatactagcaaaaaaaaaaaaaaatctacgtgcaaaggccagcagcagttggaatttacgaatagagctctgggagataagggaggcagggggggccaggtgcrgtggctcatgcctgtaatcacagcatttcaggaggccaaggcaggtgggtcacttgaggtcaggagttcaagaccagcctaggcaacatggtgaaaccccgtctcagctaaaaatacaaaatttagctaggtgtagtggtgcatgcctgtaatcccagctactcaggaggctaaggcaggggaattgcttgaacctggtaggcggaggttagtgagctgagatcacacagttgcacaccagcctgggtaacagagcgagactccatctcaaaaaaaaaaaaaagcagcgagagagccagaggagacatatttggaagtcatctgcttagagaacatagct

SEQ ID NO: 302228 - DNA, 540 bp, Homo sapiens
cacaatggaggtatacgtcaacgggaagttggttaaataaattctaatacattcataaagtaaaccactatgtcatgtaaagattaaattttttaaagaaacaaacttttcaggactatgtacaacatgattctgtttagaagatttgatagataagtacttccaatttttttccctgctttcttccttccttccttcctcccttctttcctttcttccttctcctttcayttcctctttttactttcttcctttttttcattaaaaagaatgtgttatgttcatagtaaaataaacaaaaagatattttgttttgattgaagaaatatctcctagattttggaaacctcttttaccacagtgggaagaacataacccaatgtatgcagtcatcccaatgtgattgctgcacaaagcataaagtgacccccaaaaggaacacagccataacacttcttcacagagtcaacttctagttgtagaatatggaagattgtattttccaaagattgctgcacaaagcataaagtgaccccaaaa

SEQ ID NO: 302229 - DNA, 352 bp, Homo sapiens
gggtaggagtgaggaatgagggtgaaggagaagtcatgtgtagtttaggtttccagtatgggaggctgacatggaagagaagagagagtttgggggagaagatagtttggtttttgatatgttacatttaaggagactgtgggacatccagggttgagtaataagtggacagataagaatatagatctggagctcaggaggggcctgggaaggagaggtagatctggattaggaagtatttcaaaaggatgctggtggatgggcaacgggattcttttagaagacgttggaagagtgtgcagcatcaatagaagcaaggcagaggaagagkaagtgctcaagagcctggcat

SEQ ID NO: 302230 - DNA, 626 bp, Homo sapiens
aattagcagtctgacaaaacacccgtggtataagtagcatattttagatagcacacttgaaaacttgcttcaacttgcttcatctctgaggtcagtgctattgtggatataatttataaccaacatagactccaacctgaaacaatttggtttgtctacaaagtctcacartttgaaggcaccaatttcctgttcctcgtatgcaaatgacttaggttttgaactctagttcctggaagcaaatagcatttgatttttcgcaaaagctagacaacagcaattcagggtattgtagagctacaaggaagtttcctataatgtaacaatttattctgtaatactttgtgaagacagattatatgcaatctttaaagctatttctaataagaactttaaaaacaaaaaacagtatacattattaaacactaaataataaaaccatatataagaacttgggagaaaattattggtcagtcatgtcttttctttggaaaaaaaattacataattgttcaaaagcaggttcctaggaggaagagattcaaaaaaactgttttctaaacttggtatggtaaagtagcatattactttaagatgtctcagatacttctgtttcttttgtgaaat

SEQ ID NO: 302231 - DNA, 626 bp, Homo sapiens
aattagcagtctgacaaaacacccgtggtataagtagcatattttagatagcacacttgaaaacttgcttcaacttgcttcatctctgaggtcagtgctattgtggatataatttataaccaacatagactccaacctgaaacaatttggtttgtctacaaagtctcacagtttgaaggcaccaatttcctgttcctcgtatgcaaatgacttaggttttgaactctagttcctggaagcaaatagcatttgatttttcgcaaaagctagacaacagcaattcagggtatygtagagctacaaggaagtttcctataatgtaacaatttattctgtaatactttgtgaagacagattatatgcaatctttaaagctatttctaataagaactttaaaaacaaaaaacagtatacattattaaacactaaataataaaaccatatataagaacttgggagaaaattattggtcagtcatgtcttttctttggaaaaaaaattacataattgttcaaaagcaggttcctaggaggaagagattcaaaaaaactgttttctaaacttggtatggtaaagtagcatattactttaagatgtctcagatacttctgtttcttttgtgaaat

SEQ ID NO: 302232 - DNA, 515 bp, Homo sapiens
gggttatcttgcatttatttgagtttcctcgaaacagctatttgaattctctgtctgaaaggttacataaccttgcctctccaggattggcccctggtgacttatttagtttgtttggtgaggtcatgttttcctggatggtcttgatgcttgtgaatgtttgtcagtgtctgggcattgaggagttagatatttattgtagtctttgcagtcagggcttgtttgtacccatccttctttggaaggctttctgggtattttagggaacttgggtattgtgatctaagtttttggtcactgtggccatatctacatgagggggcattccargcccagtaatgctgtagttcttgcagatttgtagaggtactatgttggtggtcttggataagatctgggtaaattacctggattaacaggcagagactcttgttctcttctcttactttctcccaaacaaacagtctctctctctctccctctctttctctctctctctctctgtcctgaattgc

SEQ ID NO: 302233 - DNA, 571 bp, Homo sapiens
aagggtatgttcgcaagatgctgagatttgggctcgtattgatcctgtcgtctagacagtgaatatagtactcaataggcagtttttttaactcttgccccctccctcctccagagttcccagtgtctattgttcccaactatatgtccatgtatacacaagattttagcttccacttataagtgagaacatgcagtatttggttttytgtttctgtgttaatttgcttaggataacagtatccagctgaatccattctgctgcaaaggacatgatttcattctttttttatggctgcataatattctatggtgtatgcaccatattttctttatccagtctactgttgatgggcacctagattgactccatgtctttgctattgtgaatagtgctgcaatgaacatgtgagtgcatgcatctttttggtagaacaatttattttcctttgggtatatacccagtaatgggattgctgggtgaaatggtagttctagttttagttttttgagaaatctccaaactgctttccacaggggctgaacaatttacatccccactaaccatacat

SEQ ID NO: 302234 - DNA, 571 bp, Homo sapiens
aagggtatgttcgcaagatgctgagatttgggctcgtattgatcctgtcgtctagacagtgaatatagtactcaataggcagtttttttaactcttgccccctccctcctccagagttcccagtgtctattgttcccaactatatgtccatgtatacacaagattttagcttccacttataagtgagaacatgcagtatttggttttctgtttctgtgttaatttgcttaggataacagtakccagctgaatccattctgctgcaaaggacatgatttcattctttttttatggctgcataatattctatggtgtatgcaccatattttctttatccagtctactgttgatgggcacctagattgactccatgtctttgctattgtgaatagtgctgcaatgaacatgtgagtgcatgcatctttttggtagaacaatttattttcctttgggtatatacccagtaatgggattgctgggtgaaatggtagttctagttttagttttttgagaaatctccaaactgctttccacaggggctgaacaatttacatccccactaaccatacat

SEQ ID NO: 302235 - DNA, 594 bp, Homo sapiens
ttgttgtctttctaaaaaagaaaaaaaaatttagctcatgttccaaattattggtgtattattttctttttactttgctcaagtttattttaaattatctttaaatatactcccccacttttactttcatagaaaaacctgtctcactcatttccacgaaactccttctataacttccatactcagtagtacctcattgttgactgcatcttccagtcagtagaggttaatgcagtggtgaaccccaccccaaaatacaggcatacttcctcatctttggttgttctcccttaataattttttaaaagcagtgataggacttaaaccctcaactcaatagtcaaactcatcaaatacaactgtcaacayactttgaaacaagtttcataaaatccccaagtctttgatgtctttactaagcaataaaatacccagtcagtataacatttctctccaaaatttcatgccaggaggaagcaatggtttaaaaatcaattttacaaggataactcttaaatctgaaataagctctgaaaagtagaaagctgactggggaatttttaaaaagtaaccagtgaggaagcaataaaaatc

SEQ ID NO: 302236 - DNA, 571 bp, Homo sapiens
acatatgattgtaaaatttggaattatctgctsaaatcatgtcatcaaattaaatgaaataaaaaatgtaaataaaaactatattcttatttctgtttgggggatgcatttcaagccactaagcgacatgcttttgtttaaaccttatgaattacactgaaaaaaagggatctttcatagtgaaaattttattaggtttaaaatgttcattggtatgaacattgagaacatcaggtgataaacctaatgatgttttcaaggagaaacaattgaaactctttttcataatccttggtagtggcactaaaccatgtttactaataggagaaaaatagatcagaagtagttgttcatagttatattaattgacatgttatctattgaactagacttattacggcaacttaaaataacagcagagattagctctcaaaatgagtttatttgaatgaaggtctggaatcaggaatacaccgggtataacaagtgacaggtgtatcctgagaggttagggtaaggggaaacttttaaggcaaaaagaagtccacagaagctgctttgaaataaattt

SEQ ID NO: 302237 - DNA, 571 bp, Homo sapiens
acatatgattgtaaaatttggaattatctgctgaaatcatgtcatcaaattaaatgaaataaaaaatgtaaataaaaactatattcttatttctgtttgggggatgcatttcaagccactaagcgacatgcttttgtttaaaccttatgaattacactgaaaaaaagggatctttcatagtgaaaattttattaggtttaaaatgttcattggtatgaacattgagaacrtcaggtgataaacctaatgatgttttcaaggagaaacaattgaaactctttttcataatccttggtagtggcactaaaccatgtttactaataggagaaaaatagatcagaagtagttgttcatagttatattaattgacatgttatctattgaactagacttattacggcaacttaaaataacagcagagattagctctcaaaatgagtttatttgaatgaaggtctggaatcaggaatacaccgggtataacaagtgacaggtgtatcctgagaggttagggtaaggggaaacttttaaggcaaaaagaagtccacagaagctgctttgaaataaattt

SEQ ID NO: 302238 - DNA, 559 bp, Homo sapiens
ttgaggacgaggggatggctgaagtkggtgaatggcagtagtctccatacgagcagatagaattgatcttgtgtttcacctgtctacttccatttatcattttctctcatatcccagatgtgacagacaatctgactgtggccacatttattagttttaaggcaaatgaaggattctagagacaggctgtagagaagctaaagaaaatatttcatcagagagaagttaaatacttctgaagtatttcagcaaaatacacatacaaatcctttaaaaatttcttattaactttagagactgaaacttgttaagaacctgtgaaatttctgacttaaatttcaatgcatgaacataggatgtgtgacagatacgagaatgcctgtattgggttgcagcccacggaggtctgagattggtctccaggttggaaggacaacttggatgatctcaggaactaagggacttgagcagactgaactttgaaattttctcttccctaatctccaggacacactgggacctgcagtgaaacaaaggacatctgtagcaaagcctttca

SEQ ID NO: 302239 - DNA, 559 bp, Homo sapiens
ttgaggacgaggggatggctgaagtgggtgaatggcagtagtctccatacragcagatagaattgatcttgtgtttcacctgtctacttccatttatcattttctctcatatcccagatgtgacagacaatctgactgtggccacatttattagttttaaggcaaatgaaggattctagagacaggctgtagagaagctaaagaaaatatttcatcagagagaagttaaatacttctgaagtatttcagcaaaatacacatacaaatcctttaaaaatttcttattaactttagagactgaaacttgttaagaacctgtgaaatttctgacttaaatttcaatgcatgaacataggatgtgtgacagatacgagaatgcctgtattgggttgcagcccacggaggtctgagattggtctccaggttggaaggacaacttggatgatctcaggaactaagggacttgagcagactgaactttgaaattttctcttccctaatctccaggacacactgggacctgcagtgaaacaaaggacatctgtagcaaagcctttca

SEQ ID NO: 302240 - DNA, 559 bp, Homo sapiens
ttgaggacgaggggatggctgaagtgggtgaatggcagtagtctccatacgagcagatagaatygatcttgtgtttcacctgtctacttccatttatcattttctctcatatcccagatgtgacagacaatctgactgtggccacatttattagttttaaggcaaatgaaggattctagagacaggctgtagagaagctaaagaaaatatttcatcagagagaagttaaatacttctgaagtatttcagcaaaatacacatacaaatcctttaaaaatttcttattaactttagagactgaaacttgttaagaacctgtgaaatttctgacttaaatttcaatgcatgaacataggatgtgtgacagatacgagaatgcctgtattgggttgcagcccacggaggtctgagattggtctccaggttggaaggacaacttggatgatctcaggaactaagggacttgagcagactgaactttgaaattttctcttccctaatctccaggacacactgggacctgcagtgaaacaaaggacatctgtagcaaagcctttca

SEQ ID NO: 302241 - DNA, 559 bp, Homo sapiens
ttgaggacgaggggatggctgaagtgggtgaatggcagtagtctccatacgagcagatagaattgatcttgtgtttcacctgtctacttccatttatcattttctctcatatcccagatgtgacagacaatctgactgtggccacatttattagttttaaggcaaatgaaggattctagagacaggctgtagagaagctaaagaaaatatttcatcagagagaagttaaatacttctgaagtatttcagcaaaatacacatacaaatcctttaaaaatttcttattaactttagagactgaaacttgttaagaacctgtgaaatttctgacttaaatttcaatgcatgaacataggatgtgtgacagatacgagaatgcctgtattgggttgcagcccacggaggtctgagattggtctccrggttggaaggacaacttggatgatctcaggaactaagggacttgagcagactgaactttgaaattttctcttccctaatctccaggacacactgggacctgcagtgaaacaaaggacatctgtagcaaagcctttca

SEQ ID NO: 302242 - DNA, 595 bp, Homo sapiens
gcaatatgaaaaatgcaggcgacccaatagaaaaatgagtaaaagactgaaaacttcctaaaagaatatattcaaatagtaaacatatggaaagstgcttactttattagaaatcaaggaaatatacgttaaaaccacaagaaaataccattacacacccatagaatagctgtaattaaaaagaccaaccaaagtattgatgaggatgtggaataatcaaactctcctacagtgttggtgtgggtataaattggtaaatcacttttgaaagctgtttggaagaatatgtgaaagctgaatgtatgcatagcttatgataaatcaatttcattcctaggtaatactcaacagaactgcaaacgcattcataaaagatatatatttgagtgttcacagcaacactatttataatagttccacacttgaaatgacctaaatatctattaatgatagaatggataaatatatagtggtatattcatccaaggaaaaattatgcagcaatgggaatgaatacattatagctatatgaagcaatatggatgaatctcacagacaaagtttagtgaatgacaaatgagtacctactctatgg

SEQ ID NO: 302243 - DNA, 516 bp, Homo sapiens
attgatgaggatgtggaataatcaaactctcctacagtgttggtgtgggtataaattggtaaatcacttttgaaagctgtttggaagaatatgtgaaagctgaatgtatgcatagcttatgataaatcaatttcattcctaggtaatactcaacagaactgcaaacgcattcataaaagatatatatttgagtgttcacagcaacactatttataatagttccacacttgaaatgacctaaatatctattaatgatagaatggataaatatatagtggtatattcatccaaggaaaaattatgcagcaatgggaatgaatacattatagctatatgaagcaatatggatgaatctcacagacaaagtttagtgaatgacaaatgagtacctactctatggttctaattatagaaagttcaaaaataggcaaagttaatctgtgggattaaatagtgattatcactgaggggatagattgactgaaagaattcatggkttttttttggggggggggg

SEQ ID NO: 302244 - DNA, 636 bp, Homo sapiens
gaggcactagccaacaagtgctgaatggtgagctttggggagatgtgggggaattagagtttggtttgcaatatagatttaatatcttgcagagtcaccatgtgagatgctyaggagataaatggagatgtagtcctgttttaaggagagaagttggaaagaaagtgtagcctgaaagtgctatgtgagtttattagaacagatgagctcacacactgcactttgacctccatggaataacatgattaaccctggggttctggaagtttatgatgctctgcctgacccttcaggggatgcgcctcaagatatgtcagcctccaccttctgcccccaatgtgggagtacttcagagtacttggccctatcataacaagtttcatagtaggagggctgaagaagagatatttaagaggaaagttccttctaattgagtttatggccacaggactgttttgaaggtagggccagaataaaacatgcaagctttaagcagcttataaagtgaaagtagagttggtaaagaagcagattaacaaaattgaatgtgtctggtaaactactatcttgtttaccagttcttaatatcaagaactattgactacttcctttaagccagttcatcttcataggaaa

SEQ ID NO: 302245 - DNA, 594 bp, Homo sapiens
tgcaacaccagcacttctggtcagtctaccttcctcctcactggttttccaggcctggaagcctctcatcattgggtttccatccccatcaacctcttctgtgtggtttccatcctgggtaataatatcatcctcttcctgatccacacagatccagccttacatgaacccatgtatatcttcctgtccatgttggcagcctctgatctgggcctctgtgcctctaccttccccacyatggtgcgtctcttctggctgggagctcgtgagctgccctttgatctctgtgcagcacagatgttcttcatccataccttcacctatgtggagtccggtgtactgctggccatggccttcgatcgctttattgccatccgggaccctctgcattatgccataatcattacctgctcagtcacagccgaggtgggaactgccattctggtgagggctgttctgctcaacctcccgggacctatcctcctgcagcagctgctctttcccaagatcagcgctctctgtcactgctactgcctgcactgtgaccttgtggggttggcctgctcagacacccagatcaatagcctggttggc

SEQ ID NO: 302246 - DNA, 602 bp, Homo sapiens
ttggcagcctctgatctgggcctctgtgcctctaccttccccactatggtgcgtctcttctggctgggagctcgtgagctgccctttgatctctgtgcagcacagatgttcttcatccataccttcacctatgtggagtccggtgtactgctggccmtggccttcgatcgctttattgccatccgggaccctctgcattatgccataatcattacctgctcagtcacagccgaggtgggaactgccattctggtgagggctgttctgctcaacctcccgggacctatcctcctgcagcagctgctctttcccaagatcagcgctctctgtcactgctactgcctgcactgtgaccttgtggggttggcctgctcagacacccagatcaatagcctggttggcctggtttccatcctcttctcactgtgccttgactccttcctcatcatgctttcatatgccctgatcctatgaactgtgctgggcattgcatcacctggggagcggctcaaggcactcaacacgtgtgtctcacacctctgcattgttctcatcttttatttgcccaaacgggctgtctgtcttgcaccgagtaaagaagc

SEQ ID NO: 302247 - DNA, 594 bp, Homo sapiens
tgcaacaccagcacttctggtcagtctaccttcctcctcactggttttccaggcctggaagcctctcatcattgggtttccatccccatcaacctcttctgtgtggtttccatcctgggtaataatatcatcctcttcctgatccacacagatccagccttacatgaacccatgtatatcttcctgtccatgttggcagcctctgatctgggcctctgtgcctctaccttccccactatggtgcgtctcttctggctgggagctcgtgagctgccctttgatctctgtgcagcacagatgttcttcatccataccttcacctatgtggagtccggtgtactgctggccatggccttcgatcgctttattgccatccgggaccctctgcattatgccataatcattacctgctcagtcacagccraggtgggaactgccattctggtgagggctgttctgctcaacctcccgggacctatcctcctgcagcagctgctctttcccaagatcagcgctctctgtcactgctactgcctgcactgtgaccttgtggggttggcctgctcagacacccagatcaatagcctggttggc

SEQ ID NO: 302248 - DNA, 591 bp, Homo sapiens
tgtacaggcacctctctccttccctcccctcccctggatttttctttctcatttgatttataagcctaaggaagagctatagtaaactatattcaccttaatactggccttcttttcccaaatttaattttaaccagctcatataacaagaatcagaaaaagggtggtgggtggtagggaaacatgtatggcaacagtgtacatgccaaatttatttgcagttatttacagattaaggagtggtagtttcctcttgattctttatgcatttctgatygtgcattacagaaagtttggcattgccaagcctagggaagttgctcactataatttctggatagtgctagtttctcaggtaccaatgataagggtggactagtagtccactttcacagttgatgatctgctaggatgtcagctccatgagtccagggatgcagggctattttgtgcactgatatattcccagctccaagttcaatgtctatcatacagtaggtgctcaatacatattgtagaataaatgggtagggtagatgcaggagcaaaaaattcttgacagtggatcctcaggaaggtaggggactgagc

SEQ ID NO: 302249 - DNA, 591 bp, Homo sapiens
tgtacaggcacctctctccttccctcccctcccctggatttttctttctcatttgatttataagcctaaggaagagctatagtaaactatattcaccttaatactggccttcttttcccaaatttaattttaaccagctcatataacaagaatcagaaaaagggtggtgggtggtagggaaacatgtatggcaacagtgtacatgccaaatttatttgcagttatttacagattaaggagtggtagtttcctcttgattctttatgcatttctgatcgtgcattacagaaagtttggcattgccaagcctagggaagttgctcactataatttctggatagtgctagtttctcaggtaccaatgataagggtggactrgtagtccactttcacagttgatgatctgctaggatgtcagctccatgagtccagggatgcagggctattttgtgcactgatatattcccagctccaagttcaatgtctatcatacagtaggtgctcaatacatattgtagaataaatgggtagggtagatgcaggagcaaaaaattcttgacagtggatcctcaggaaggtaggggactgagc

SEQ ID NO: 302250 - DNA, 609 bp, Homo sapiens
aaaattattgcccagaccaatgycatgaagcttttcccccattttctactagctgttttagagtttctagtcttacagttaagcctttaatccattttgatgtaatttttgtatgtagagtgagataaggatctaattttattcttttgtttgtggatattgagttatcccaataccatttattaaagagactgattgtcccccttgtctgttcttgccacctttggcaaaagtcaattgacagtaaatgtgtggaattatacctaggctctttagtctgctccattggtctttgtgtccttttgttaatgttagtaccttgctgttttaattactatagctttataatatattttgtagtatattttgaagtcaggtattattatacctccagttttggtttttgtattttatttttcatgttttacttgagagtgctttggctattcaaggtcttatatggttccataataattttaaggttgtgttttctacttctgtgaagaatgtcattggtattttgatagggactacactgaatctgtagattgctttgggtagtgtggatgttttaacaatattaattcttccaatccatgaacagaggct

SEQ ID NO: 302251 - DNA, 609 bp, Homo sapiens
aaaattattgcccagaccaatgtcatgaagcttttcccccattttctactagctgttttagagtttctagtcttacagttaagcctttaatccattttgatgtaatttttgtatgtagagtgagataaggatctaattttattcttttgtttgtggatattgagttatcccaataccatttattaaagagactgattgtcccccttgtctgttcttgccacctttggcaaaagtcaattgacagtaaatgtgtggaattatacctaggctctttagtctgctccattggtctttgtgtccttttgttaatrttagtaccttgctgttttaattactatagctttataatatattttgtagtatattttgaagtcaggtattattatacctccagttttggtttttgtattttatttttcatgttttacttgagagtgctttggctattcaaggtcttatatggttccataataattttaaggttgtgttttctacttctgtgaagaatgtcattggtattttgatagggactacactgaatctgtagattgctttgggtagtgtggatgttttaacaatattaattcttccaatccatgaacagaggct

SEQ ID NO: 302252 - DNA, 610 bp, Homo sapiens
actctggaggctgaggtgggaggatcacttgaaagcaggaggggtggcaggggcagtggtggaggttgcagtaagccaagagctgagatcgcgccagtgcactctagcctgggtgacagagcaagaccctgtctcaaaaaaaatctaaattttagcggagcttaacatttgaatgtgatcagagaaagagacatggcccagcgagcaagttggtcagttgaaaacaaggcagttctggaatggcaaaaaacctgagggtcccacagggcactcttgggagtgctaattatttacaagagccaaaggatcttgtggaacacacccaaaggatcttggaggatgctaagcagatgtggggmactttaacagtcatgccaatgggtcatgcagtactagcagaatgtttagaaaaaccgttcagctccaagaaagaccatcctcctatttatccctcaactaaattcacttggtgggtcaaattcaaaatccagcagaaggcctctaaaagctcttcacggtaaacagttttctagcctctgctcgcagttcaaccaagaccagagatggtcagagtccccaccagccaaatcattagcacccaattactatt

SEQ ID NO: 302253 - DNA, 484 bp, Homo sapiens
aattttgccctcttcttcagttttttgaaagwgtttgagaaggactggttttctttcttctttaagtgttttgtagaattcatgagtgaaaccatcaagtcctggacttttcttttaaacagctttaaagatataatttacatatcatacaattcatccatttaaagtgtatcatccagcctaaatgcccatcaaccaacaagtggataaagaaatgtagtatatacaccatggaatactactcagctataaaaagaaatgaaataatggcatttgcagcaacctggatggagttggagaccattgttctaagtgaagtaactcaagagtggaaaattaaatattgtatgttctcacttacaagtgggagctaagctaggaggatgcaaaggtatgagaattatataatggactttggggatgtgggaggaagggtgggaggaggtgaatgattaaagactacacattgggtatagtatacgca

SEQ ID NO: 302254 - DNA, 484 bp, Homo sapiens
aattttgccctcttcttcagttttttgaaagagtttgagaaggactggttttctttcttctttaagtgttttgtagaattcatgagtgaaaccatcaagtcctggacttttcttttaaacagctttaaagatataatttacatatcatacaattcatccatttaaagtgtatcatccagcctaaatgcccatcaaccaacaagtggataaagaaatgtagtatatacaccatggaatactactcagctataaaaagaaatgaaataatggcatttgcagcaacctggatggagttggagaccattgttctaagtgaagtaactcaagagtggaaaatyaaatattgtatgttctcacttacaagtgggagctaagctaggaggatgcaaaggtatgagaattatataatggactttggggatgtgggaggaagggtgggaggaggtgaatgattaaagactacacattgggtatagtatacgca

SEQ ID NO: 302255 - DNA, 484 bp, Homo sapiens
aattttgccctcttcttcagttttttgaaagagtttgagaaggactggttttctttcttctttaagtgttttgtagaattcatgagtgaaaccatcaagtcctggacttttcttttaaacagctttaaagatataatttacatatcatacaattcatccatttaaagtgtatcatccagcctaaatgcccatcaaccaacaagtggataaagaaatgtagtatatacaccatggaatactactcagctataaaaagaaatgaaataatggcatttgcagcaacctggatggagttggagaccattgttctaagtgaagtaactcaagagtggaaaattaaatattgtatgttctcacttacaagtgggagctaagctaggaggatgcaaaggtatgaraattatataatggactttggggatgtgggaggaagggtgggaggaggtgaatgattaaagactacacattgggtatagtatacgca

SEQ ID NO: 302256 - DNA, 593 bp, Homo sapiens
aactaatggggagaggtactcagaaaaaaagaagggttgggcgtcagtgcacagatggagggcttagcctccagcaggaggaagaggaaaaggacaacttgagtacaaataaatttgtaggtggcagagtaaaggcggtggaatttaagggaatttataactgccgactttgtttttctccttgaaccagcagtcaggaaatcaccatcacccgatgaatgggatcgagtggcatagggcagacatgaagtgattaaaacctggtctggaaaggcaaattccagctccatcatttgctagcccagcgaccttgggtaggggtgctacttaaattctcagagctctgtgtgctcccctatcagcaaaaygggggaaatgacaacagttatctcaggctgcggtgactgtaataatgcacataaagcctgcagcacagtacccctcctaaatgatccctgtctcattctccagtctcctccgttccccatccatcttacacaatactgccggagagaaagctacctaaaatgtaaatttaccatgccattctctcactacagatccttcagtgactctcactacttcaacatcaa

SEQ ID NO: 302257 - DNA, 444 bp, Homo sapiens
tggggtttcaccatgttacccaggctggtctcaaattcctgggctcaagtgatccacccgctttggtctcccaaagtgctgggattacaggcatgagccactgtgtccagcctcaaataatatcattttattataatattaacttaaaaaattgacttctggcaggccaatgtctgcgtggggtttgcatattctccccatgtctttgtggtttttctctggatactcttgtttcctcccacatcccaaagatgtgcacattagatgaactgacacctctatggtcccagtatgggggtgtgccctgagccccggatggggtcctgtcyagcgttgattcctgcctcacaccttgagctgccgataggttccagccacctgccactctgaactggaatcagcaggttggaaaatgaaggaatgaatacaaattattgaaaaata

SEQ ID NO: 302258 - DNA, 444 bp, Homo sapiens
tggggtttcaccatgttacccaggctggtctcaaattcctgggctcaagtgatccacccgctttggtctcccaaagtgctgggattacaggcatgagccactgtgtccagcctcaaataatatcattttattataatattaacttaaaaaattgacttctggcaggccaatgtctgcgtggggtttgcatattctccccatgtctttgtggtttttctctggatactcttgtttcctcccacatcccaaagatgtgcacattagatgaactgacacctctatggtcccagtatgggggtgtgccctgagccccggatggggtcctgtctagcgttgrttcctgcctcacaccttgagctgccgataggttccagccacctgccactctgaactggaatcagcaggttggaaaatgaaggaatgaatacaaattattgaaaaata

SEQ ID NO: 302259 - DNA, 523 bp, Homo sapiens
cctggcaaaacctggaagttaggaataggggatcagtcaaaagtgaaaaagaattaagagcattgcaaaactcttgttttcaaataagtactagagaaacgtgttctratcaggaaggcagagaaagcgcaggtaaccatttaatggggtgggtaatccaagtagaatttcaagttaggtacaaaatggagtatataacaacttgacaaaaaccaagggcagaaataacaatataaaataaagaagatgtgaggaatgtacagtaaaaaagtcattacaccaaatgtgtatagactaaattctagcattaaataaattttgaaatgtgggtgggtgaagggatcacaggaataagaaataaaatcaggatgaacataatccatgcccagagattttgattcatttgatctggggtaggtcccagacattggcatcttataaaagtttggtagaaaggtcttgaaatatccagccacagttaacaatcactgaactggaaaatcactcttagcagattccagaa

SEQ ID NO: 302260 - DNA, 535 bp, Homo sapiens
aaataacaatataaaataaagaagatgtgaggaatgtacagtaaaaaagtcattacaccaaatgtgtatagactaaattctagcattaaataaattttgaaatgtgggtgggtgaagggatcacaggaataagaaataaaatcaggatgaacataatccatgcccagagattttgattcatttgatctggggtaggtcccagacattggcatcttataaaagtttggtagaaaggtcttgaaatatccagccacagttaacaatcactgaactggaaaatcactcttagcagattccagaactggaactgttattgatgcctgtgtytcgaggtgcctagaagccagaatacctttgccatgttctccctcagaatcttgagatttattcatttctcttcaggtcctgtataacttgtgatatcgcaatagcagcggaaacatttttctctgtctcatcacgttgtttttctaatacacttctccaggttttgtcttgtgtgtgttcccctatacttggacttatgtaatcaaga

SEQ ID NO: 302261 - DNA, 524 bp, Homo sapiens
ttgtgatatcgcaatagcagcggaaacatttttctctgtctcatcacgttgtttttctaatacacttctccaggttttgtcttgtgtgtgttcccctatacttggacttatgtaatcaagaagtctggtgctttgaaaagcaattagtgtttaaataaattatgtctacttttatgtctctgagttggtactctaccatcagctcaacatctaatccaattaaccacatactgtttccctggatttttttstttgtctcactttgtgccttcacttggaggcagaacatagtaaatgcccttgtcatttcccctgaggacataggcagtacccgtagtactacctctaagaagtgtttcaagtagaaattcacttatatgatacatttagtatttcatactgatcctcccggtattatccttttatttctgttgaaattatatgcaaccactttgtgtatcagtcttcaaggtttggtttaacactgtttctcaattctttcaaaacacacaaaacatcttcct

SEQ ID NO: 302262 - DNA, 524 bp, Homo sapiens
ttgtgatatcgcaatagcagcggaaacatttttctctgtctcatcacgttgtttttctaatacacttctccaggttttgtcttgtgtgtgttcccctatacttggacttatgtaatcaagaagtctggtgctttgaaaagcaattagtgtttaaataaattatgtctacttttatgtctctgagttggtactctaccatcagctcaacatctaatccaattaaccacatactgtttccctggatttttttgtttgtctcactttgtgccttcacttggaggcagaacatagtraatgcccttgtcatttcccctgaggacataggcagtacccgtagtactacctctaagaagtgtttcaagtagaaattcacttatatgatacatttagtatttcatactgatcctcccggtattatccttttatttctgttgaaattatatgcaaccactttgtgtatcagtcttcaaggtttggtttaacactgtttctcaattctttcaaaacacacaaaacatcttcct

SEQ ID NO: 302263 - DNA, 586 bp, Homo sapiens
gattatttcaattagttaggagcccattatcataatctaatcaaccataaggtgattgattataaagtgacatgattatccttattgtttggaacccctttcataattttaaaatctcttcattttcttaataaattttacaaacttttaaagaaaaataattctaaacattgtatttcagtaccgaaaactaagacacaactgtacctgaaggcatawtaaagtaggcagaggcttgcagcagttgctgccttctctggagaatcattatgatttcagtaatatcaaaggcagaaaatgttgtgtagaataactcttaaaataccataagcagatatgttgttgagaatgggttttttttggattggtgaaaaattttgtgaatttctggacaaaactatgtacaatggtcctgtgatttatgcaattgcatttctcgaacactatgaaaattaaaacaagcaacatcacttgtaatttataattaaatagggtgcagccttggacattgtcaatatgtttatcatccaatttaatgtctgaaggtcactggagagtcctatgacatgcttgcaggtagcttaat

SEQ ID NO: 302264 - DNA, 586 bp, Homo sapiens
gattatttcaattagttaggagcccattatcataatctaatcaaccataaggtgattgattataaagtgacatgattatccttattgtttggaacccctttcataattttaaaatctcttcattttcttaataaattttacaaacttttaaagaaaaataattctaaacattgtatttcagtaccgaaaactaagacacaactgtacctgaaggcatattaaagtaggcagaggcttgcagcagttgctgccttctctggagaatcattatgatttcagtaatatcaaaggcagaaaatgttgtgtagaataactcttaaaataccataagcagatatgttgttgagaatgggttttttttggattggtgaaaaattttgtgaatttctggacaaaactatgtacaatggtcctgtgatttatgcaattgcatttctcgaacactatgaaaattaaaacaagcaacatcacttgtaatttataattaaatrgggtgcagccttggacattgtcaatatgtttatcatccaatttaatgtctgaaggtcactggagagtcctatgacatgcttgcaggtagcttaat

SEQ ID NO: 302265 - DNA, 445 bp, Homo sapiens
agagactattaccaagaaaatattttatgggaaatgagaaggactaacatttttaaaagcactgaaaaatgsttggcattgtgctaggtgcattacatgggataactaatttcatgcttatatcattctacaaggaagctagcccaccatgacgccattttccagatgagcaaaccgagctgataatggactgcttgaaaaatgatttgtttaagggtattcagcagataaataacattgtatagataagcaccttttaaataaacttccttttctcaatttgagtggtttctttttaattttttaagtaagttgagaccaatggagtgtggtatgttaacttaaatgttgttcttctttaataagagtacaatattacatgtttgaacagataactgtttttacatataaattatatcttttttactaatgctcactttaatgg

SEQ ID NO: 302266 - DNA, 445 bp, Homo sapiens
agagactattaccaagaaaatattttatgggaaatgagaaggactaacatttttaaaagcactgaaaaatggttggcattgtgctaggtgcattacatgggataactaatttcatgcttatatcattctacaaggaagctagcccaccatgacgccattttccagatragcaaaccgagctgataatggactgcttgaaaaatgatttgtttaagggtattcagcagataaataacattgtatagataagcaccttttaaataaacttccttttctcaatttgagtggtttctttttaattttttaagtaagttgagaccaatggagtgtggtatgttaacttaaatgttgttcttctttaataagagtacaatattacatgtttgaacagataactgtttttacatataaattatatcttttttactaatgctcactttaatgg

SEQ ID NO: 302267 - DNA, 445 bp, Homo sapiens
agagactattaccaagaaaatattttatgggaaatgagaaggactaacatttttaaaagcactgaaaaatggttggcattgtgctaggtgcattacatgggataactaatttcatgcttatatcattctacaaggaagctagcccaccatgacgccattttccagatgagcaaaccgagctgataatggactgctkgaaaaatgatttgtttaagggtattcagcagataaataacattgtatagataagcaccttttaaataaacttccttttctcaatttgagtggtttctttttaattttttaagtaagttgagaccaatggagtgtggtatgttaacttaaatgttgttcttctttaataagagtacaatattacatgtttgaacagataactgtttttacatataaattatatcttttttactaatgctcactttaatgg

SEQ ID NO: 302268 - DNA, 324 bp, Homo sapiens
gtcaggatcatgattggggatggggtgaggatatttggcatagataattgttttaaaatatgggaatacaaacctgagtgtagttttttgtgagagctcttctgaagataaaagtgagactgtcccatagatactamtttttccagtcaatcaatttggaaaaacatgacaaggtggttgagtttctcttttctgtctgtttggacatggacaatgcaaatgtgacagaagagcaaggtgcagaaaagcttcgggagtttgaaagggtgtaattatagtgataaaccatgaaacctggttttggaccagaaagggtaaatacat

SEQ ID NO: 302269 - DNA, 324 bp, Homo sapiens
gtcaggatcatgattggggatggggtgaggatatttggcatagataattgttttaaaatatgggaatacaaacctgagtgtagttttttgtgagagctcttctgaagataaaagtgagactgtcccatagatactaatttttccagtcaatcmatttggaaaaacatgacaaggtggttgagtttctcttttctgtctgtttggacatggacaatgcaaatgtgacagaagagcaaggtgcagaaaagcttcgggagtttgaaagggtgtaattatagtgataaaccatgaaacctggttttggaccagaaagggtaaatacat

SEQ ID NO: 302270 - DNA, 491 bp, Homo sapiens
accctgaaacttaaagtacaataaaraaagaaaaagaagaccttgtcttttgctaggcattcagcatgggtattgatcaatctagtcaggagttgagatggtttaggctttgtttttgttataatgatcctgaataaaccacatgtttaatggcctctagtgttactctcttagtctatttctactgttataacaaaatgcctgagactggacaatttataaataatagaaacttattcctcacagtttttgagcctggaacgtgcaaaatcaaggtgcttgcaggtttggcatctggtgagggcctagtctgttcttccaagatgccaccttgaacactgtatcttcacaagacaaaagaaacagaagagcaaaaagggcctaggctagttccctccagccctttgataagttcactaattccatgtaggaaggctctgctctcacgacttaatcacttcctaaaagccttgcctcttaatattatcaca

SEQ ID NO: 302271 - DNA, 491 bp, Homo sapiens
accctgaaacttaaagtacaataaagaaagaaaaagaagaccttgtcttttgctaggcattcagcatgggtattgwtcaatctagtcaggagttgagatggtttaggctttgtttttgttataatgatcctgaataaaccacatgtttaatggcctctagtgttactctcttagtctatttctactgttataacaaaatgcctgagactggacaatttataaataatagaaacttattcctcacagtttttgagcctggaacgtgcaaaatcaaggtgcttgcaggtttggcatctggtgagggcctagtctgttcttccaagatgccaccttgaacactgtatcttcacaagacaaaagaaacagaagagcaaaaagggcctaggctagttccctccagccctttgataagttcactaattccatgtaggaaggctctgctctcacgacttaatcacttcctaaaagccttgcctcttaatattatcaca

SEQ ID NO: 302272 - DNA, 491 bp, Homo sapiens
accctgaaacttaaagtacaataaagaaagaaaaagaagaccttgtcttttgctaggcattcagcatgggtattgatcaatctagtcaggagttgagatggtttaggctttgttkttgttataatgatcctgaataaaccacatgtttaatggcctctagtgttactctcttagtctatttctactgttataacaaaatgcctgagactggacaatttataaataatagaaacttattcctcacagtttttgagcctggaacgtgcaaaatcaaggtgcttgcaggtttggcatctggtgagggcctagtctgttcttccaagatgccaccttgaacactgtatcttcacaagacaaaagaaacagaagagcaaaaagggcctaggctagttccctccagccctttgataagttcactaattccatgtaggaaggctctgctctcacgacttaatcacttcctaaaagccttgcctcttaatattatcaca

SEQ ID NO: 302273 - DNA, 594 bp, Homo sapiens
ttttgttataatgatcctgaataaaccacatgtttaatggcctctagtgttactctcttagtctatttctactgttataacaaaatgcctgagactggacaatttataaataatagaaacttattcctcacagtttttgagcctggaacgtgcaaaatcaaggtgcttgcaggtttggcatctggtgagggcctagtctgttcttccaagatgccaccttgaacactgtatcttcacaagacaaaagaaacagaagagcaaaaagggcctaggctagttccctccagccctttgataagttcactaattccatgtaggaaggctctgctctcacgacttaatcacttcctaaaagccttgcctcttaatattatcacattggtggttgagttttaacatatgaattttggggaatatcttcagaccataactttccatccttagcccaccaaattcatttccttctcamacacaaaatacgttcattccatcttaatagccccaaaaagttataactcattccagtaccaattcaaaattctaaggtctagagtctcatctaaatcagatatgagtgagacccaaggtacaatt

SEQ ID NO: 302274 - DNA, 594 bp, Homo sapiens
ttttgttataatgatcctgaataaaccacatgtttaatggcctctagtgttactctcttagtctatttctactgttataacaaaatgcctgagactggacaatttataaataatagaaacttattcctcacagtttttgagcctggaacgtgcaaaatcaaggtgcttgcaggtttggcatctggtgagggcctagtctgttcttccaagatgccaccttgaacactgtatcttcacaagacaaaagaaacagaagagcaaaaagggcctaggctagttccctccagccctttgataagttcactaattccatgtaggaaggctctgctctcacgacttaatcacttcctaaaagccttgcctcttaatattatcacattggtggttgagttttaacatatgaattttggggaatatcttcagaccataactttccatccttagcccaccaaattcatttccttctcacacacaaaatacrttcattccatcttaatagccccaaaaagttataactcattccagtaccaattcaaaattctaaggtctagagtctcatctaaatcagatatgagtgagacccaaggtacaatt

SEQ ID NO: 302275 - DNA, 527 bp, Homo sapiens
cctggcaaaacttggaagttaggaataggggatcagtcaaaagtgaaaaagaattaagagcattgcaaaactcttgttttcaaataagtactagagaaacgtgttctgatcaggaaggcagagaaagcgcaggtaaccatttaatggggtgggtaatccaagtagaatttcaagttaggtacaaaatggagtatataacaacttgayaaaaaccaagggcagaaataacaatataaaataaagaagatgcgaggaatgtacagtaaaaaagtcattacaccaaatgtgtatagactaaattctagcattaaataaattttgaaatgtgggtgggtgaagggatcacaggaataagaaataaaatcaggatgaacataatccatgcccagagattttgattcatttgatctggggtaggtcccagacattggcatcttataaaagtttggtagaaaggtcttgaaatatccagccacagttaacaatcactgaactggaaaatcactcttagcagattccagaactgg

SEQ ID NO: 302276 - DNA, 527 bp, Homo sapiens
cctggcaaaacttggaagttaggaataggggatcagtcaaaagtgaaaaagaattaagagcattgcaaaactcttgttttcaaataagtactagagaaacgtgttctgatcaggaaggcagagaaagcgcaggtaaccatttaatggggtgggtaatccaagtagaatttcaagttaggtacaaaatggagtatataacaacttgataaaaaccaagggcagaaataacaatataaaataaagaagatgygaggaatgtacagtaaaaaagtcattacaccaaatgtgtatagactaaattctagcattaaataaattttgaaatgtgggtgggtgaagggatcacaggaataagaaataaaatcaggatgaacataatccatgcccagagattttgattcatttgatctggggtaggtcccagacattggcatcttataaaagtttggtagaaaggtcttgaaatatccagccacagttaacaatcactgaactggaaaatcactcttagcagattccagaactgg

SEQ ID NO: 302277 - DNA, 570 bp, Homo sapiens
gtgtgcttgatgctactaaggtaccagtgttttctgtcctgcctccttcggctacatttaaattttttccctttgtcttaattttcagtttgattgtgaggcatctacatacaactttctttgtttttargcctccttgaagttctgtgagctttttcaatctgtaatattttagctttttccctaatttgaataatttcacaattattgcctcaaaaacaaaaatcagtcccattctttctctcatttcattttgagacccaaactacacatctggtagaccttttgatattgttcctcaagtacctgaggatctctttcttttcttttttgttctttttttctcacttcttcagttggataattctgctgatagaccttatggttaatttttagaagtaggattactgtggtcaaagagatgtataggccagaaacagtggctgatgcctataatcccagcaccttgagaggctgaggcaggagaatcgccttgaggccaggagttcaagaccagcctgagcaacacagtgaagccctatctctacaaaaaaattaaaaatagaaatt

SEQ ID NO: 302278 - DNA, 503 bp, Homo sapiens
tcttcaataaccatgtgaacacccatttgcctctttctctggctacttcctcaagaaatcattgtattttcattacagtaaatctaagtctttatttcccactctacatagtatatagtcagatacgcgaggtcaccattacgacttccaatcagagctcccctccctctacccaataaaccaatactagaggtgttcaacaacctagaaagtcttcttaccatatctgcccaacatatmatcgtgccccatacttcccacaccctggatttttagtgattatataagctctcacttctcatgcttcctcacaaccaactactgccacagttcttagcaattccagcatccacacagattatccacccagcaccctcaacactctcacttcttctccaattgcacttgtctacaccccaccagacatacccatggtcatagtcatcaagaacctcaccactagatcaaaatctgaaacagtcatgccccaactataagaccac

SEQ ID NO: 302279 - DNA, 503 bp, Homo sapiens
tcttcaataaccatgtgaacacccatttgcctctttctctggctacttcctcaagaaatcattgtattttcattacagtaaatctaagtctttatttcccactctacatagtatatagtcagatacgcgaggtcaccattacgacttccaatcagagctcccctccctctacccaataaaccaatactagaggtgttcaacaacctagaaagtcttcttaccatatctgcccaacatatcatcgtgccccatacttcccacaccctkgatttttagtgattatataagctctcacttctcatgcttcctcacaaccaactactgccacagttcttagcaattccagcatccacacagattatccacccagcaccctcaacactctcacttcttctccaattgcacttgtctacaccccaccagacatacccatggtcatagtcatcaagaacctcaccactagatcaaaatctgaaacagtcatgccccaactataagaccac

SEQ ID NO: 302280 - DNA, 503 bp, Homo sapiens
tcttcaataaccatgtgaacacccatttgcctctttctctggctacttcctcaagaaatcattgtattttcattacagtaaatctaagtctttatttcccactctacatagtatatagtcagatacgcgaggtcaccattacgacttccaatcagagctcccctccctctacccaataaaccaatactagaggtgttcaacaacctagaaagtcttcttaccatatctgcccaacatatcatcgtgccccatacttcccacaccctggatttttagtgattatataagctctcacttctcatgcttcctcacaaccractactgccacagttcttagcaattccagcatccacacagattatccacccagcaccctcaacactctcacttcttctccaattgcacttgtctacaccccaccagacatacccatggtcatagtcatcaagaacctcaccactagatcaaaatctgaaacagtcatgccccaactataagaccac

SEQ ID NO: 302281 - DNA, 337 bp, Homo sapiens
acttattcaccctttctggtccaaaaccaggtttcatsgtttatcactataattacaccctttcaaactcccgaagcttttctgcaccttgctcttctgtcacatttgcattgtccatgtccaaacagagagaaaagagaaactcaaccaccttgtcatgtttttccaaatggattggctggaaaaagtagtatctatgggacagtctcacttttatcttcagaagagctctcacaaaaaactacactcaggtttgtattcccatattttaaaacaattatctatgccaaatatcctcaccccatccccaatcatgatcctgactgcccactgccag

SEQ ID NO: 302282 - DNA, 337 bp, Homo sapiens
acttattcaccctttctggtccaaaaccaggtttcatcgtttatcactataattacaccctttcaaactcccgaagcttttctgcaccttgctcttctgtcacatttgcattgtccatgtccaaacagagagaaaagagaaactcaaccaccttgtcatgtttttccaaatggattgrctggaaaaagtagtatctatgggacagtctcacttttatcttcagaagagctctcacaaaaaactacactcaggtttgtattcccatattttaaaacaattatctatgccaaatatcctcaccccatccccaatcatgatcctgactgcccactgccag

SEQ ID NO: 302283 - DNA, 640 bp, Homo sapiens
gctttttatttacattttttatttcatttaatttgatgacctatgatttgagcwgataattccaaattttacaatcatatgtagttcattatccaacttggattttacctattaaagtgagcattagtaaaaaagatataatctatatgtaaaaacatttatctgttcaaacatgtaatattatactcttattaaagaagaacaacatttaagttaacataccacactccattggtctcaactaacttaaaaaattaaaaaattaaaaagaaaccactcaaattgagaaaaggaagtttatttaaaaggtgcttatctatacaatgttatttatctgctgaatacccttaaacaaatcatttttccagcagtccattatcagctcggtttgcttatctggaaaatggcgtcatggtgggctagcttccttgtagaatgatataagcatgaaattagttatcccatgtaatgcacctagcacaatgccaagcatttttcagtgcttttaaaaatgttagtccttctcatttcccataaaatattttcttggtaatagtctctttccaggtgatgtgtacaaaagtcacacaaacagtactcagtggaaggtctttgcagatgcttctcacaataaatccgg

SEQ ID NO: 302284 - DNA, 640 bp, Homo sapiens
gctttttatttacattttttatttcatttaatttgatgacctatgatttgagctgataattccaaatkttacaatcatatgtagttcattatccaacttggattttacctattaaagtgagcattagtaaaaaagatataatctatatgtaaaaacatttatctgttcaaacatgtaatattatactcttattaaagaagaacaacatttaagttaacataccacactccattggtctcaactaacttaaaaaattaaaaaattaaaaagaaaccactcaaattgagaaaaggaagtttatttaaaaggtgcttatctatacaatgttatttatctgctgaatacccttaaacaaatcatttttccagcagtccattatcagctcggtttgcttatctggaaaatggcgtcatggtgggctagcttccttgtagaatgatataagcatgaaattagttatcccatgtaatgcacctagcacaatgccaagcatttttcagtgcttttaaaaatgttagtccttctcatttcccataaaatattttcttggtaatagtctctttccaggtgatgtgtacaaaagtcacacaaacagtactcagtggaaggtctttgcagatgcttctcacaataaatccgg

SEQ ID NO: 302285 - DNA, 640 bp, Homo sapiens
gctttttatttacattttttatttcatttaatttgatgacctatgatttgagctgataattccaaattttacaatcatatgtagttcattatccaacttggattttacctattaaagtgagcattagtaaaaaagatataatctatatgtaaaaacatttatctgttcaaacatgtaatattatactcttattaaagaagaacaacatttaagttaacataccacactycattggtctcaactaacttaaaaaattaaaaaattaaaaagaaaccactcaaattgagaaaaggaagtttatttaaaaggtgcttatctatacaatgttatttatctgctgaatacccttaaacaaatcatttttccagcagtccattatcagctcggtttgcttatctggaaaatggcgtcatggtgggctagcttccttgtagaatgatataagcatgaaattagttatcccatgtaatgcacctagcacaatgccaagcatttttcagtgcttttaaaaatgttagtccttctcatttcccataaaatattttcttggtaatagtctctttccaggtgatgtgtacaaaagtcacacaaacagtactcagtggaaggtctttgcagatgcttctcacaataaatccgg

SEQ ID NO: 302286 - DNA, 640 bp, Homo sapiens
gctttttatttacattttttatttcatttaatttgatgacctatgatttgagctgataattccaaattttacaatcatatgtagttcattatccaacttggattttacctattaaagtgagcattagtaaaaaagatataatctatatgtaaaaacatttatctgttcaaacatgtaatattatactcttattaaagaagaacaacatttaagttaacataccacactccaytggtctcaactaacttaaaaaattaaaaaattaaaaagaaaccactcaaattgagaaaaggaagtttatttaaaaggtgcttatctatacaatgttatttatctgctgaatacccttaaacaaatcatttttccagcagtccattatcagctcggtttgcttatctggaaaatggcgtcatggtgggctagcttccttgtagaatgatataagcatgaaattagttatcccatgtaatgcacctagcacaatgccaagcatttttcagtgcttttaaaaatgttagtccttctcatttcccataaaatattttcttggtaatagtctctttccaggtgatgtgtacaaaagtcacacaaacagtactcagtggaaggtctttgcagatgcttctcacaataaatccgg

SEQ ID NO: 302287 - DNA, 556 bp, Homo sapiens
ctctttccaggtgatgtgtacaaaagtmacacaaacagtactcagtggaaggtctttgcagatgcttctcacaataaatccggactaaagtcccatgcctaagttcttactgaggaaggggacaaagccagcccagatgttcagtagaagcagacggtgtgaagaaagctttttcctgccttctcctccatttgcaacagcagctcctccagattgtcttctatgtcgtctgactgctgcaggcactggcaaatctcacagatgaggaaagctcccagggtggcatcttccagggtatcttggatgtccatgttgatcacgtgcacaggctgaaaggtctgctgttctctggaacacagatcttccaccactgtgtcatagacactctcctcacaggtgaagatgacatcaaaggaatcagtgcactcctgaaatctttctggaccgggcttgattctctcatttcttcccaagatgtgtaagattccgttgcgggtgtagcgttctctatctttcctgaggaggtcattgtacatctgcttatatgttgttgcaa

SEQ ID NO: 302288 - DNA, 556 bp, Homo sapiens
ctctttccaggtgatgtgtacaaaagtcacacaaacagtactcagtggaaggtctttgcagatgcttctcacaataaatccggactaaagtcccatgcctaagttcttactgaggaaggggacaaagccagcccagatgttcagtagaagcagacggtgtgaagaaagctttttcctgccttctcctccatttgcaasagcagctcctccagattgtcttctatgtcgtctgactgctgcaggcactggcaaatctcacagatgaggaaagctcccagggtggcatcttccagggtatcttggatgtccatgttgatcacgtgcacaggctgaaaggtctgctgttctctggaacacagatcttccaccactgtgtcatagacactctcctcacaggtgaagatgacatcaaaggaatcagtgcactcctgaaatctttctggaccgggcttgattctctcatttcttcccaagatgtgtaagattccgttgcgggtgtagcgttctctatctttcctgaggaggtcattgtacatctgcttatatgttgttgcaa

SEQ ID NO: 302289 - DNA, 556 bp, Homo sapiens
ctctttccaggtgatgtgtacaaaagtcacacaaacagtactcagtggaaggtctttgcagatgcttctcacaataaatccggactaaagtcccatgcctaagttcttactgaggaaggggacaaagccagcccagatgttcagtagaagcagacggtgtgaagaaagctttttcctgccttctcctccatttgcaacagcagctcctccagattgtcttcyatgtcgtctgactgctgcaggcactggcaaatctcacagatgaggaaagctcccagggtggcatcttccagggtatcttggatgtccatgttgatcacgtgcacaggctgaaaggtctgctgttctctggaacacagatcttccaccactgtgtcatagacactctcctcacaggtgaagatgacatcaaaggaatcagtgcactcctgaaatctttctggaccgggcttgattctctcatttcttcccaagatgtgtaagattccgttgcgggtgtagcgttctctatctttcctgaggaggtcattgtacatctgcttatatgttgttgcaa

SEQ ID NO: 302290 - DNA, 556 bp, Homo sapiens
ctctttccaggtgatgtgtacaaaagtcacacaaacagtactcagtggaaggtctttgcagatgcttctcacaataaatccggactaaagtcccatgcctaagttcttactgaggaaggggacaaagccagcccagatgttcagtagaagcagacggtgtgaagaaagctttttcctgccttctcctccatttgcaacagcagctcctccagattgtcttctatgtcgtctgactgctgcaggcactggcaaatctcacagatgaggaaagctcccagggtggcatcttccagggtatcttggatgtccatgttgatcacgtgcacaggctgaaaggtctgctgttctctggaacacagatcttccaccactgtgtcatagacactctcctcacaggtgaagatgacatcaaaggaatcagtgcactcctgaaatctttctggaccgggcttgattctctcatttcttcccaagatgtgtaagattccgttgcgggtgtagcrttctctatctttcctgaggaggtcattgtacatctgcttatatgttgttgcaa

SEQ ID NO: 302291 - DNA, 444 bp, Homo sapiens
tatttttcaataatttgtattcattccttcattttccaacctgctgattccagttcagagtggcaggtggctggaacctatyggcagctcaaggtgtgaggcaggaaccaacgctggacaggaccccatccggggctcagggcacacccccatactgggaccatagagatgtcacttcatctaatgtgcacatctttgggatgtgggaggaaacaagagtatccagagaaaaaccacaaagacatggggagaatatgcaaaccccacgcagacattggcctgccagaagtcaattttttaagttaatattataataaaatgatattatttgaggctggacacagtggctcatgcctgtaatcccagcactttgggagaccaaagcgggtggatcacttgagcccaggaatttgagaccagcctgggtaacatggtgaaacccca

SEQ ID NO: 302292 - DNA, 542 bp, Homo sapiens
agctagcccaccatgacgccattttccagatgagcaaaccgagctgataatggactgctgraaaaatgatttgtttaagggtattcagcagataaataacattgtatagataagcaccttttaaataaacttccttttctcaatttgagtggtttttttttaatttttaaattttttaagttagttgagaccagtgaagtgtggtatgttaacttaaatgttgttcttctttaataagagtataatattacatgtttgaacagataaatgtttttacatatagattatatcttttttactaatgctcactttaatgggtaaaatccaagttggataatgaactacatatgattgtaaaatttggaattatctgctcaaatcataggtcatcaaattaaatgaaataaaaaatgtaaataaaaagcatattcttatttctgtttaggggatacatttcaagccactaagtgacatgcttttgtttaaaccttatgaatttcactgaaaaaaaaaaaacccaagttggataacaaaccacagat

SEQ ID NO: 302293 - DNA, 542 bp, Homo sapiens
agctagcccaccatgacgccattttccagatgagcaaaccgagctgataatggactgctggwaaaatgatttgtttaagggtattcagcagataaataacattgtatagataagcaccttttaaataaacttccttttctcaatttgagtggtttttttttaatttttaaattttttaagttagttgagaccagtgaagtgtggtatgttaacttaaatgttgttcttctttaataagagtataatattacatgtttgaacagataaatgtttttacatatagattatatcttttttactaatgctcactttaatgggtaaaatccaagttggataatgaactacatatgattgtaaaatttggaattatctgctcaaatcataggtcatcaaattaaatgaaataaaaaatgtaaataaaaagcatattcttatttctgtttaggggatacatttcaagccactaagtgacatgcttttgtttaaaccttatgaatttcactgaaaaaaaaaaaacccaagttggataacaaaccacagat

SEQ ID NO: 302294 - DNA, 542 bp, Homo sapiens
agctagcccaccatgacgccattttccagatgagcaaaccgagctgataatggactgctggaaaaatgatttgtttaagggtattcagcagataaataacattgtatagataagcaccttttaaataaacttccttttctcaatttgagtggtttttttttaatttttaaattttttaagttagttgagaccagtgaagtgtggtatgttaacttaaatgttgttcttctttaataagagtataatattacatgtttgaacagataaatgtttttacatatagattatatcttttttactaatgctcactttaatgggtaaaatccaagttggataatgaactacatatgattgtaaaatttggaattatctgctcaaatcatasgtcatcaaattaaatgaaataaaaaatgtaaataaaaagcatattcttatttctgtttaggggatacatttcaagccactaagtgacatgcttttgtttaaaccttatgaatttcactgaaaaaaaaaaaacccaagttggataacaaaccacagat

SEQ ID NO: 302295 - DNA, 511 bp, Homo sapiens
taaacagttatgcaaagactagcagtctgatggtgctggggagtcagaggctggaggtcagggcctgaggaggtagagcaacccttgtaaataaacactgaaacactaggaagctttgaaacactagaagggctgtactctaggagtaaggacaacccagaaaaagatcaacgctagcactagcaaaagttaagcgtcctctcagatggatcaagatctgccagtacccttatctgcctgaattctttctagagaaacgtaacagtttcagagaacagagtctctagttttttcatataaaatcactatccattcacacacaccaagcatgccaagaaactamcaaataactaaaaaaaaaagtggaaaaaaatagcgacagaaccacaggtgatctaaacattggaactatgagggattttaaaataaaatgattctccaggtcctgttagaaaatattggttgcatcttctgaaaaagagatgcccgcatctaagaactccaggagctc

SEQ ID NO: 302296 - DNA, 558 bp, Homo sapiens
cttcaacgtactgatttcatatatttggatatatacacagtagtgagattgctggatcatagctagttctatttttaatttttttatgactgtccatactgttttccataatagttatactatctaacattcccaccaacaatgtgcaagggttccccttctccccattctctccaacactttttatcttttgtcttttcgttaatagtcattctaacatgtatgaggtgatatctcattgtggttttaatttgcatttccctgatgattaattttgttgacctttttcttttcttcatttacctatgggycatttgtatgtcttatttgagaattgcctatttaggtgctttgcccattttttaagaagtttattccctactattgggttgttggaattatttatatattttggctattaaccccttatcagataaaggtttgcaaatattttctcccattccatagattgcctttttcttctgttatttcctgcctatgcagaagtttttctagtttcaaataattctgccaattttcatttttgttgcctatgct

SEQ ID NO: 302297 - DNA, 533 bp, Homo sapiens
ccattgatattttgatagtgattgcattgaatctgtaggttgcttcgggtagtatggacattttaacaatattggctcttccaatccatgaaygtggaatatctctccattttttttggtatcctcttcaatttctttcatcagttatttgtttccttcccctgccactttcagaatctttatttttgaactttgacagtgtgattataattcatattggggtaatcttacttggatttaatatgacatagataatgtatattaaatacatttctactttaaatgtcttcaacttatgattactttgttgggacgtaacctcatcatacatcaaggaacattcatatgataaagcaagtagagttaaaatttaatgaaagaatcttggtggttgactatataattggtcatcataatttttttttaattttctgtatatttgaaactttttataataaaataataaaaaatttatttacttgaataagtcatggtgactctttaagaatagccaatacagaataatggaaata

SEQ ID NO: 302298 - DNA, 512 bp, Homo sapiens
acgtggctctcccagtttcgttcattttgcttaggatggctttggctattctgggtcttttgtggttctgtatacattttaggattttttttatttgtgtgaagaatgccattgatattttgatagtgattgcattgaatctgtaggttgcttcgggtagtatggacattttaacaatattggctcttccaatccatgaacgtggaatatctytccattttttttggtatcctcttcaatttctttcatcagttatttgtttccttcccctgccactttcagaatctttatttttgaactttgacagtgtgattataattcatattggggtaatcttacttggatttaatatgacatagataatgtatattaaatacatttctactttaaatgtcttcaacttatgattactttgttgggacgtaacctcatcatacatcaaggaacattcatatgataaagcaagtagagttaaaatttaatgaaagaatcttggtggttgactatataat

SEQ ID NO: 302299 - DNA, 512 bp, Homo sapiens
acgtggctctcccagtttcgttcattttgcttaggatggctttggctattctgggtcttttgtggttctgtatacattttaggattttttttatttgtgtgaagaatgccattgatattttgatagtgattgcattgaatctgtaggttgcttcgggtagtatggacattttaacaatattggctcttccaatccatgaacgtggaatatctctccattttttttggtatcctcttcaatttctttcatcagttatttgtttccttcccctgccactttcagaatctttatttttgaactttgacwgtgtgattataattcatattggggtaatcttacttggatttaatatgacatagataatgtatattaaatacatttctactttaaatgtcttcaacttatgattactttgttgggacgtaacctcatcatacatcaaggaacattcatatgataaagcaagtagagttaaaatttaatgaaagaatcttggtggttgactatataat

SEQ ID NO: 302300 - DNA, 512 bp, Homo sapiens
acgtggctctcccagtttcgttcattttgcttaggatggctttggctattctgggtcttttgtggttctgtatacattttaggattttttttatttgtgtgaagaatgccattgatattttgatagtgattgcattgaatctgtaggttgcttcgggtagtatggacattttaacaatattggctcttccaatccatgaacgtggaatatctctccattttttttggtatcctcttcaatttctttcatcagttatttgtttccttcccctgccactttcagaatctttatttttgaactttgacagtgtgattataattcatattggggtaatcttacttggatttaatatgacatagataatgtatattaaatacatttytactttaaatgtcttcaacttatgattactttgttgggacgtaacctcatcatacatcaaggaacattcatatgataaagcaagtagagttaaaatttaatgaaagaatcttggtggttgactatataat

SEQ ID NO: 302301 - DNA, 512 bp, Homo sapiens
acgtggctctcccagtttcgttcattttgcttaggatggctttggctattctgggtcttttgtggttctgtatacattttaggattttttttatttgtgtgaagaatgccattgatattttgatagtgattgcattgaatctgtaggttgcttcgggtagtatggacattttaacaatattggctcttccaatccatgaacgtggaatatctctccattttttttggtatcctcttcaatttctttcatcagttatttgtttccttcccctgccactttcagaatctttatttttgaactttgacagtgtgattataattcatattggggtaatcttacttggatttaatatgacatagataatgtatattaaatacatttctactttaaatgtcttcaacttatgattactttgttgggaygtaacctcatcatacatcaaggaacattcatatgataaagcaagtagagttaaaatttaatgaaagaatcttggtggttgactatataat

SEQ ID NO: 302302 - DNA, 549 bp, Homo sapiens
ttgtcttggattttgtttttgttttttaactaattgcaaagagggagaccagaggaacaatggggtgtctcaacaaacaaatgaaaagatttagttattataggatttagggtacagattagttttaggcaaaataatcaacattttaataaggttaaaataaagcaggggtatctctaaagagattaacataaatactgaaatcttattttagaacycagctgcctgatctgagaatgggtggctaaactcccccattcatcaaaggttggcctgtgatgtcgttcttttatgaattttggcttgaaaatctttcattccctatttacgtacatgtactcaaaattggctagccagagaacttttcactgagaacaggatatgtggactgaaacttacctaataagcagtaagccatagaaaaataggcagtgagagtatttggggcacaggaaaaagaaatttcaaaaagccgacttctaaaattagatgaaggagttcaaagaatagaaatggttgtagcagagtatttgtggaggtgaagcagaa

SEQ ID NO: 302303 - DNA, 549 bp, Homo sapiens
ttgtcttggattttgtttttgttttttaactaattgcaaagagggagaccagaggaacaatggggtgtctcaacaaacaaatgaaaagatttagttattataggatttagggtacagattagttttaggcaaaataatcaacattttaataaggttaaaataaagcaggggtatctctaaagagattaacataaatactgaaatcttattttagaactcagctgcctgatctgagaatgggtggctaaactcccccattcatcaaaggttggcctgtgatgtcgttcttttatgaattttggcttgaaaatctttcattccctatttasgtacatgtactcaaaattggctagccagagaacttttcactgagaacaggatatgtggactgaaacttacctaataagcagtaagccatagaaaaataggcagtgagagtatttggggcacaggaaaaagaaatttcaaaaagccgacttctaaaattagatgaaggagttcaaagaatagaaatggttgtagcagagtatttgtggaggtgaagcagaa

SEQ ID NO: 302304 - DNA, 549 bp, Homo sapiens
ttgtcttggattttgtttttgttttttaactaattgcaaagagggagaccagaggaacaatggggtgtctcaacaaacaaatgaaaagatttagttattataggatttagggtacagattagttttaggcaaaataatcaacattttaataaggttaaaataaagcaggggtatctctaaagagattaacataaatactgaaatcttattttagaactcagctgcctgatctgagaatgggtggctaaactcccccattcatcaaaggttggcctgtgatgtcgttcttttatgaattttggcttgaaaatctttcattccctatttacgtayatgtactcaaaattggctagccagagaacttttcactgagaacaggatatgtggactgaaacttacctaataagcagtaagccatagaaaaataggcagtgagagtatttggggcacaggaaaaagaaatttcaaaaagccgacttctaaaattagatgaaggagttcaaagaatagaaatggttgtagcagagtatttgtggaggtgaagcagaa

SEQ ID NO: 302305 - DNA, 557 bp, Homo sapiens
tcatgcctgaaaattcactgattctataggtagctcacaagtaatttatggtgtttattctacttggtgtaagccagcaataactctgtatgctcttaatagcctacttttttattgtgttgatgttttggttgaccgagacagactacatctaaatggctctttacgcttaaggaacagccygccaatctttccaaagagggatgtttgtctgcaaatagtcagattactattgagtgatcgccatgtagctaagcaccatgatacatgcttgtatatgaatgactcatttaattcttacagcaatcctgtgggacatgtattattattgtcagctgcattttacagatgagcaaactgagacatagatattatatggccttcccgagtcacatagatagtaagggggagaatcttgagcttttaccctatgtatgttactacactagactgctgaactaaagattactataacagcctctgtggattttatattttgatcactgtattacggatagctaaactataactcttaaattatggataactatactata

SEQ ID NO: 302306 - DNA, 397 bp, Homo sapiens
tctgttgcctcgtttgaggtaggttccatgatcagagccagtcacgaactccttctcactttgaggaagtgagaggcaagcttccctctattctgtagttgaaatggaagaagcaagcacacaccccaaagcagctttgcaaaatatcctatatatttgcatacaacatatcttccagaaatgctacacatagatctttgtatagtttataaccagtctgtccattcccttgtcttytaaggaaacgttaaaaaaaaaaaaaaaaaaaaaaaaaacctttacctgaaaatgtcaggtggtttcttgaagggtctttcataaaatttggaacttcaaatacaagttgtcctgagttcaaagaaaacctaattctaagtttaataattcagagaatcca

SEQ ID NO: 302307 - DNA, 617 bp, Homo sapiens
ctctttcccctaaaggtagttggatggcatgctttctaaaccctatagttcagtcartaaatgctacgttctaggcctccatgacttgttttgtgatttttccaaaccagtgctttttggaacttaaaaagataaacaatttctttcactctggggtcctgctttttcaaatcaaaagcactttgcctttcaaattatgaagtaaatacacctgagagcgataacatcagcataccccaaaatgaccctgggtggcacacacaccccaatgtggctgggaaatctgagctacggaatctgggagtggccagcccagagatccattccttgtctatgaggaagacctgacacccaggtcggtcccgtggaacacgggccgtagaggggattgaggccctttgtttttggattaaatgaaggttgccaggtggaggttgtcagtgggagagtactaagtgaagatgctttataaactgcatgccttttgcaagcggttgcagttctcttgcccagccctctacccccggactctctgccctgtacgtaggtcctcaatgaaacctcatgtctcacttgctggctgtttttcagcctcttgaacatgctgccatccccaa

SEQ ID NO: 302308 - DNA, 617 bp, Homo sapiens
ctctttcccctaaaggtagttggatggcatgctttctaaaccctatagttcagtcagtaaatgctacgttctaggcctccatgacttgttttgtgatttttccaaaccagtgctttttggaacttaaaaagataaacaatttctttcactctggggtcctgctttttcmaatcaaaagcactttgcctttcaaattatgaagtaaatacacctgagagcgataacatcagcataccccaaaatgaccctgggtggcacacacaccccaatgtggctgggaaatctgagctacggaatctgggagtggccagcccagagatccattccttgtctatgaggaagacctgacacccaggtcggtcccgtggaacacgggccgtagaggggattgaggccctttgtttttggattaaatgaaggttgccaggtggaggttgtcagtgggagagtactaagtgaagatgctttataaactgcatgccttttgcaagcggttgcagttctcttgcccagccctctacccccggactctctgccctgtacgtaggtcctcaatgaaacctcatgtctcacttgctggctgtttttcagcctcttgaacatgctgccatccccaa

SEQ ID NO: 302309 - DNA, 582 bp, Homo sapiens
gttacagtgaaccgagattgcaccactgcagtccagcctggtgacagagcaaaactccatctccaaaaaaaaaaaaaaaaaaaaagaaagaaagaaagaaaaaatatttagtgaaattattttttctcaatgttttcttggaaatacttttggactcacagaaaagttgcaaaaaaatagtagacccttataaactcttcccccagctccccctcatgataaacatcttatgtaaacatagtacaatgagctattaatgaatcaatggacctattcgaaattctatcgaatttcaccatttgtccctctacagttcttatttctagtcccatgattcaatctgggatcccatgttgcatttagttatatttccttactctcttccaatctgtgactgatgatgctgayggtagaatatgtgctgattatatgatattcaagagattgttatccatatacccagcaagtatgtgttgagtgacttccatgtgcctggcactatgctagatgttgaggatacagcactgaattaaacaaagatcctgctctcacgggcccgaattaaatcaaattctagctcta

SEQ ID NO: 302310 - DNA, 378 bp, Homo sapiens
gtttcacatttatctcattttctcttcatcatagacagctgtgagcacagtcacaacgcagaatcattattccaaccgtgcttgggttgggactagcctcagaagatcatgtagtgtatcaccctgccttctggccatatcaaaagcactgtccacaaacagtttaatttagaatttatgtaataagggacttggattgatttgatgggtttttttgttccaatcagacctatttagactaatgggccatactgaaaatgaccaatatttctagtttgaaattttaattctaatttaatgaaagtttacagctttccctaatgacccaagtatactttgtaattagctgtrggcctgcaagtgatcctaattctatgc

SEQ ID NO: 302311 - DNA, 563 bp, Homo sapiens
ctatttatttatcctatcataaaatttcccaactctgctgcaattgtgtgtttccactgctgttataattgcttagaattacttgttacrttgttaaaataattaagaattcagtgaggacaaggggtctcatttgtcaggcctggtaaatagtgggtacacagttaatattttcagtgaatgaagaacactctaagagctataaatggattagaacaagaatgtcccagaaactgcagaggaaaataatctagaaatgtccataaaaagtcattgttcctcttattaacgagaggaaataatgcctaaaaaaagaaaaagggtggaggggatgtgaaagggagaaaaaactctttgagtgatgtcaaagaactatttccagaaaactggggaaaaactgtacatataacttttaacctttaggtgagatttaaaaaaaaaaatttactatagaaactaaatccttgaatgtaattcaagggacatatgaggacttacggaagatttttctgggttttgttctttctgttttcatgactgagttaataatcccaacacaaagc

SEQ ID NO: 302312 - DNA, 567 bp, Homo sapiens
gaaaaagaaaagaaaagaaaagaaaagaaatatgtgcaaaaaattgaacaagaatttctctgcacaggaagaataaagagtcaacaaagattaaaaagctgctgaatctcatttaggaatcaggggaccgcaagttaaaccttcagtaaggtaccatttcttgtccaccagactggctcaaaaaccagatcatgttgagagttagctgatagtgtgggayaacagaaacttcacccacttctcacaggagtgtaatttggcataagtattttgaaaaagagtttgatattatgtagtaaagttaaatagagcatactctctgatcctgaatttccacttctaagtatatcctctgctgacattcttccccctgtgtactggaagatatgtacaaaaaacaattgcaaaaaggaaaataataaaagccctgcattttcatccagagtagaatagataaataaattatggtatattttggccgagcatggtggctaaggcctgtaataatcctagcactttgggaggctgaggtaggcagattcacctgaggtcaggagtttgagacca

SEQ ID NO: 302313 - DNA, 567 bp, Homo sapiens
gaaaaagaaaagaaaagaaaagaaaagaaatatgtgcaaaaaattgaacaagaatttctctgcacaggaagaataaagagtcaacaaagattaaaaagctgctgaatctcatttaggaatcaggggaccgcaagttaaaccttcagtaaggtaccatttcttgtccaccagactggctcaaaaaccagatcatgttgagagttagctgatagtgtgggataacagaaacttcacccacttctcacaggagtgtaatttggcataagtattttgaaaaagagtttgatattatgtagtaaagttaaatagagcatactctctgatcctgaatttccacttctaagtatatcctctgctgacattcttccccctgtgtactggaagatatgtacaaaaaacaattgcaaaaaggaaaataataaaagccctgcattttcatccagagtagaatagataaataaattatggtatattttggccgagcatggtggctmaggcctgtaataatcctagcactttgggaggctgaggtaggcagattcacctgaggtcaggagtttgagacca

SEQ ID NO: 302314 - DNA, 591 bp, Homo sapiens
tccatttcaggaacatacactttcagttgttagtccgtgcatagatgctgggctgtggtagtttgaagtgagcatggacccttggagttctgcacctgtcccagaatctcagagcttctgcttatctggaagaggcaagaatggtgtgttcagggctgggtatggtggctcacacctgtaatcccagcactttgggaggccaaggtgggaggatcccttgaggccaagggtttgggaccagcctgggcaacatagcaagacccagcctctactttttaaaaaaagaatgctgtgttcaggtttcctgggccaaaacccctgctgagtcttagcaytggggtctgtggcagctcaagcctgagcttagttagcccttagcaatactatcttcagtgttcatgagtcagcactttttttgtttgttcggagacagagttttgctctgtcactcaggctggagtgcagtggtgcaatctcagctcactgcaacctctgcttctcgggttcaagcaatcctcctgcctcagtctcccgagtagctggggctacaggcacatgccaccatgcccagctaatttttgcatttttgta

SEQ ID NO: 302315 - DNA, 589 bp, Homo sapiens
cactagggaagcatctgtttccaggcrtctctcccagcttctgggagtctcaggtgttccttggcttgtaaacgcagtacatggatactccctcatcacaccgtgttcccatgtgtcctcacgtcatcttccctctgtgaggacctggatccatgtttccccgttttataaggacatataaatcatattaaattatggtcagccctaaattttctcatttcaacttgattacttctgtaaagaccctctttccaaatgaggtcccattctgagataccagagggtaggacttcaacatatcttttggaggggacacaattcaactcataacatccccctaaaagtgtatattctaggtcggacatggcgattcctgcctataatcccagaactttgggagactgagctgggaggatcacctgagcccaggagttcaaggctgcagtgagctatgattgcaccaccgcactccagcctgggcaacagagcaagaccctgtttctaacaataaaaataaaattcctaagtatgtgaattaaggataggatgaagattttaaagaggatatctttacatcagtctattgatt

SEQ ID NO: 302316 - DNA, 589 bp, Homo sapiens
cactagggaagcatctgtttccaggcatctctcccagcttctgggagtctcaggtgttccttggcttgtaaacgcagtacatggatactccctcatcacaccgtgttcccatgtgtcctcacgtcatcttccctctgtgaggacctggatccatgtttccccgttttataaggacatataaatcatattaaattatggtcagccctaaattttctcatttcaacttgattacttctgtaaagaccctctttccaaatgaggtcccattctgagataccagarggtaggacttcaacatatcttttggaggggacacaattcaactcataacatccccctaaaagtgtatattctaggtcggacatggcgattcctgcctataatcccagaactttgggagactgagctgggaggatcacctgagcccaggagttcaaggctgcagtgagctatgattgcaccaccgcactccagcctgggcaacagagcaagaccctgtttctaacaataaaaataaaattcctaagtatgtgaattaaggataggatgaagattttaaagaggatatctttacatcagtctattgatt

SEQ ID NO: 302317 - DNA, 589 bp, Homo sapiens
cactagggaagcatctgtttccaggcatctctcccagcttctgggagtctcaggtgttccttggcttgtaaacgcagtacatggatactccctcatcacaccgtgttcccatgtgtcctcacgtcatcttccctctgtgaggacctggatccatgtttccccgttttataaggacatataaatcatattaaattatggtcagccctaaattttctcatttcaacttgattacttctgtaaagaccctctttccaaatgaggtcccattctgagataccagagggtaggacttcaacatatcttttggaggggacacaattcaactcataacatccccctaaaagtgtatattctaggtcggacatggcgattcctgcctataatcccagaactttgggagactgagctgggaggatcacctgagcccaggagttcaaggctrcagtgagctatgattgcaccaccgcactccagcctgggcaacagagcaagaccctgtttctaacaataaaaataaaattcctaagtatgtgaattaaggataggatgaagattttaaagaggatatctttacatcagtctattgatt

SEQ ID NO: 302318 - DNA, 513 bp, Homo sapiens
tggggggcaggagggtgataggggcccgttgcaagagcccctggtgagtgatgctgaggccctgaactgaggcagtggaaatggagagaggaagataaattttggagaagtttagraaatagaatagagacatgatgactacacagaggttacatggagaatgctctttggagaagaatggggtggatgggtgctggtaacactgagactggggattctagagaggaggtacatttgagaagtcatggagacaagggttttgggtatgcgaggacgggcgtggctctcagacacccagatcatgcctttaaggcttgaattcagtaagggagggctgagatgacaggaggcacttaggaattactggaaatatgatcatgcaaaaaattaaatggatgagagagaagaggagggggctgggatggaatcctggggaacaggggcattgaaaggatgggcagagagaaatcttagatgagaatttctaagaagagaccatccaaatggcagaaa

SEQ ID NO: 302319 - DNA, 607 bp, Homo sapiens
ggttaaattctttaatttcttttcccagctctcttctaaagttcctccctccttcaagttttatgctatggagtcatggctgtcttttctgtgagaacgttgaaatgttttattaaattttaaggagatccattgaatatatctagactttttctttatttgtggccatcacaaactctgagctgacatggtcactccttgcattttctccttgattctgataagccctggaatccttcatttaggtattacttgtctttgtacaagtcaaaggctactgttattcagtcacttttgtcctcctgccccattcttaatcttttttcttttgccttacccctcttttccacttcttctaaaagttatctagtattctagtataatctgttgacttttgctttctaaactatctactgtttgctctcatttattccattgctttgggatgcttattcagtgaccatagctaaactgataaactacttagtcttcaggtattaaggaatgatagtgtgtggaagtggtaagataacatrtttgtgttttgtcaggagtctaggatccctgtttttcccctttgtttccctattcaccatccattggatca

SEQ ID NO: 302320 - DNA, 496 bp, Homo sapiens
acattaaatatacacctttggggtagaggaagggatctgactagagttgtcagtatattatctgaaatgtcaagttttcaacaaaaattggactttacgctccaattaaaagacaaagattaggctgggcactgtgactcacacttgtaatcccagcactttgggaggctcaaagtgggtggatcacctgaggtcaggagtttgagaccagcctggccaacatggtgaaaccccatctctacaaaattcaaaaatacaaaatacaaaaattarccagacgtggtggtgggcgcctgtaatcccagctactcgggaggttgaggcacgagaatcgcttgaacccgggagacagagattgcggtgagccgagattgtgccactgcacttgagcctggacgacaaagcgagccttcgtctcaaaaaaaaaaaaaaaaaagtaatcttctgactgctcattggttgatgtccaaattatactgatccccccagggatgac

SEQ ID NO: 302321 - DNA, 577 bp, Homo sapiens
aatcctataccctgatatgacggtattgggaggtaaggcctttgggaggtaattaggtcatgaaggtggatycttcatgaatgggattagttcccttataaaagaaccccagaaaactctctttcccaccctctttcccaccgtgtgaggatacaatgtgaaatcggtagtctgcaatactggaacttggccaggctggcaccctgatatcagacgtccagcttccctaactgtgagaaataaattcctatttttttataagccactcagtctgtagtatccaattatagcagcctgaactaaggcattttacaatgggtagattttaatggtatgtaatttatactcaataaagtttttaaaaagaacaataatttattaagtgtcatatttctttgggtggactagcctcaactgggagattctcacctgaggactttgatgagattgcagtcagtgcagtcagatattggttggggaagcagttatctgaaggattgattgggcagaatttccaagatgggttactcatgtgccttttggctattgaccagtccatctaaatatgacccctcca

SEQ ID NO: 302322 - DNA, 586 bp, Homo sapiens
agcagttaaaggaagagccacatgcagagataagaaagaaccaatgcaagaactccagcaacctaaatggtcagtatcttatgacctccaaacaaccacactagttcttaaccaggctgagctggctgaaatgacagaaatagaattcagaatatggataggaacaaagataatcaagatcaggagaatggcaaaacccagttcaacaaaactaagaatcacaataaaatgatacaggagctgacagatgaaatagccagtatgaaaaggaacctaactgatctgatagagctgaaaaacacactacaagaattttgtaatgcaattccaagtacagcaaaagagaccaagctgaggaaagaatcttgaaacttgaagactgactctctgaaataagaaagtaagacaaaaattattttaaaaagaatgaaaaggaatgagcaaaacctctagaaatatgggattrtgtaaagaggccaaatctacacatcattgacatccctgacaggagaaagcaaacaacctggaaaacatatttcaggatatcatccatgaaaacttccccagccttgctagagaggccaac

SEQ ID NO: 302323 - DNA, 519 bp, Homo sapiens
tactctcattaattactttcatatcttatttatgaaatgcaaaaacgtaaggataaattttgtgaaatatataagttcatttaattgaagttcttagggataaaaatgtgataaacttagtattgttttgaattttgtttttaatacccaggactagattagaatagaattcacatgaccttcagtaaattaggaataaaaagctaaggagaagaatggaaaaattaaaaattgggacatgatatgtatggtaagccttctttaattttcagtggctttagggtgacatcttccattctgatttttttgaaagaattaattgtaggcaagttttaaataaattattaaagacgtatattaatacatggttaacattccagaawacaaatcacaaaaacattatactcagctacaaatagaaattctgatttttaaagtaaactttattttaattgacatttaggttatgtataccttatttcaagacactggtttattggaaatatttaaaattcccac

SEQ ID NO: 302324 - DNA, 545 bp, Homo sapiens
actatatcctttgtaggttatcctcttcagtttggccagttaatattggagttcctcaacttctaggccttcttctcttctcactccctctcacaaggcattcttaaccattacatcaattaccatatatttgcccattccttgaacattcttatctctggcctggagttctgtgtgatccaatctaatacaggttgagtatcctgatctgaaatgcttgagatcagaagtgtttcatatttcagaatttagaataacataattccattacactggctgagcaacgctaatccaaatatccaaaatctgaaatgctccaaatgagcatttcctttgagcatgaccttcaagcatcttataggcattcaaaaagcktcagattttggagcatttctgattttggattttcagattagggatgttcaacctgtacatctttctcaacattccaaacttggatgtctcaaacatatctcaaattcggcaaaagctaactaatgagttttaccaccaaatgtgtcccccttcctattaatgttctgtac

SEQ ID NO: 302325 - DNA, 545 bp, Homo sapiens
ccttgtggctgtcctcacttttaaataaactgtggctgagcaagtctaagcaacttgcccagacttacagggcaaggcagtagcagagccagaatcatactgtggtttctctaactacaaaatcyataactttaacaacaatattatattgcaatactcacaatttatttttaggttgagaatctctattatgtaagtctctttcatcctataaaaacgaccagtttataaaaatctcaaaataatgaattttcaactgataaacaatagcaatgcattatttaacttctgggcttcttactacttagcctcctcctgaagctgagctctaaaccacttaaaacaatatctgtagccgggcacggtggctcacatctgtaatcccagcactttgggaggccaaggcgggcagatcacaaggtcacaagatagagaccatctgggccaacatggtgaaaccctgtatctactaaaaatacaaaaattagctgggcgtggtggcacacacctgtagtcccagctactctagaagctgaggcagaaga

SEQ ID NO: 302326 - DNA, 459 bp, Homo sapiens
ggggatgtttgaaggggcaaagactatgtgcatttttaaagctccctgaattttttttataggattataccacaattcagaaaaaagagcacacttaatttaatgtttctttttcatacgtcaatatgtgagtgatatgctttctttgaacatgaaagtaatgcacaatgtgtatatatatattttgtttgtttgtttgctttttactttaagttccaggatacatgtgcagaatgtgmaggtttgttacataggtatgcatatgccatggtggtttactgcacctatcaatccaccatctaggtttaagccccacatgcattagatatttgtcctaatgctctcgcttccctcacccccaccccctgacaggccccagtgtgtgttgttccccaccctgtgtccctgtattctcattgttcaactgtcacttatgagtgagaacatgtggtgtttggt

SEQ ID NO: 302327 - DNA, 524 bp, Homo sapiens
caattgttagaagattaaataaatgtcctgcaattgtaacagattctaattggtgaatgctacatagtttatttcaataatataaacaaataaaaatatcctctaataattccagtctttgaaaacaaacaaaactacaaagaatccacaaataggtccccaytgattaccaaatccggaatgtgaaaagctttcgtttatataatacatccaggaaatagataaatcatttgtagagacacccatcaatcaacttaaagaagacccaaacaaattttttgtatgcacaaagaacacctgggtgtatacttaccttttatcatagatcaaaccaataaaactttgcaagcatatcatgccttaggtagacacaatattacaaagcaaatatgggttgtgtgagggagctatgcagggttggcaattcattccatgaggagatatccaaagacaatctaacaaaaatttcctaatcaagtggatgatcaaccaaattctatatatatatatattttcatttcatt

SEQ ID NO: 302328 - DNA, 593 bp, Homo sapiens
tgggcaaattggcaaatatctgggagatggagaattctctaaaagattgtttaaacatcagacacaacggagctttaaacagcastggactgaatgaagttaatttcttcctggtccacaagtaggtagaggttcctgaaaaagaccttgtaagtctagacaaagaacctgattcctctgtgtatctaagcatgatgtaagtgaatctgaggcttttattacttcagtttgtccccataaaagagctagagagaaatattttctatttgcactcaactctaaaaaatcattttttacaacacagaacactcctataacaccaatcccacagaaagattatttccacatcctttatttcacccagaaatttaaatgtaagccaaagcaataatgtcatgcatcaagcagttatcctacatgtaattaagaggctccagaagttttaagtctatatgcaaggagctgggcagggaatgcgcgctgtttgctggtagaggtttcctttcttgaggaatcatttaccatggtgatcttaagaccaattaccttctttgcactgatgataccttatcactttacaaaaaaacaagcaa

SEQ ID NO: 302329 - DNA, 593 bp, Homo sapiens
tgggcaaattggcaaatatctgggagatggagaattctctaaaagattgtttaaacatcagacacaacggagctttaaacagcactggactgaatgaagttaatttcttcctggtccacaagtaggtagaggttcctgaaaaagaccytgtaagtctagacaaagaacctgattcctctgtgtatctaagcatgatgtaagtgaatctgaggcttttattacttcagtttgtccccataaaagagctagagagaaatattttctatttgcactcaactctaaaaaatcattttttacaacacagaacactcctataacaccaatcccacagaaagattatttccacatcctttatttcacccagaaatttaaatgtaagccaaagcaataatgtcatgcatcaagcagttatcctacatgtaattaagaggctccagaagttttaagtctatatgcaaggagctgggcagggaatgcgcgctgtttgctggtagaggtttcctttcttgaggaatcatttaccatggtgatcttaagaccaattaccttctttgcactgatgataccttatcactttacaaaaaaacaagcaa

SEQ ID NO: 302330 - DNA, 593 bp, Homo sapiens
tgggcaaattggcaaatatctgggagatggagaattctctaaaagattgtttaaacatcagacacaacggagctttaaacagcactggactgaatgaagttaatttcttcctggtccacaagtaggtagaggttcctgaaaaagaccttgtaagtctagacaaagaacctgattcctctgtgtatctaagcatgatgtaartgaatctgaggcttttattacttcagtttgtccccataaaagagctagagagaaatattttctatttgcactcaactctaaaaaatcattttttacaacacagaacactcctataacaccaatcccacagaaagattatttccacatcctttatttcacccagaaatttaaatgtaagccaaagcaataatgtcatgcatcaagcagttatcctacatgtaattaagaggctccagaagttttaagtctatatgcaaggagctgggcagggaatgcgcgctgtttgctggtagaggtttcctttcttgaggaatcatttaccatggtgatcttaagaccaattaccttctttgcactgatgataccttatcactttacaaaaaaacaagcaa

SEQ ID NO: 302331 - DNA, 616 bp, Homo sapiens
tttgctattgtagggtaaatgactaatagacatggtctttgtggatgtgatctgaaaggcaacattttaaaaggacagcttttaaaagtcaaactgtaacctaattartaaaagttggagagaggaaaagatttctgagttctggaacagtttgggggcctctattaccaccttcaagaaaaagtagcagtggctcagattcatttcaaggttagagacgtttgagtaagtttcctatccgactgttgtaaggtgtgttgtgcagaactgtgaacaagtctagcaatcaaaattcaagatattcccccaaagagcctgcaatgattcatacatgcctctcaatattcaattgctttttaattcagtggacgtgagaaaatgtcttagaaatgtgagattgcgtaagcacacatacacatatacatacacacacacagtgtgcagcccttttcatcttgagaaactggcttgcactcacaaaatggactgcaattgaaaaactgacttcgctgagcagtaggggttgaagtatggcgcacaaaagctttcagtttggaaaaatccacatctctgacattgagccaaagagttgcctcaagttgtgcacatatccatc

SEQ ID NO: 302332 - DNA, 616 bp, Homo sapiens
tttgctattgtagggtaaatgactaatagacatggtctttgtggatgtgatctgaaaggcaacattttaaaaggacagcttttaaaagtcaaactgtaacctaattaataaaagttggagagaggaaaagatttctgagttctggaacagtttgggggcctctattaccaccttcaagaaaaagtagcagtggctcagattcatttcaaggttagagacgtttgagtaagtttcctatccgactgttgtaaggtgtgttgtgcagaactgtgaacaagtctagcaatcaaaattcaagatattcccccaaagagcctgcaatgattcatacatgcctctcaatattcaattgctttttaattcagtggacgtgagaaaatgtcttagaaatgtgagattgcrtaagcacacatacacatatacatacacacacacagtgtgcagcccttttcatcttgagaaactggcttgcactcacaaaatggactgcaattgaaaaactgacttcgctgagcagtaggggttgaagtatggcgcacaaaagctttcagtttggaaaaatccacatctctgacattgagccaaagagttgcctcaagttgtgcacatatccatc

SEQ ID NO: 302333 - DNA, 509 bp, Homo sapiens
ccctcttttcaaaatgcacatactactctctattggctcccattccaagcctaagttcgtgttaactgaatgacatggagtaagtggagacataagtcagacaccactgtgatcagtgctggctctgccatctgctttcagggtgatagtgggcaagtcactttacctctctaagcattagttttctcatgtaagataacaggtcaataatattaatatttatctcaagggtagttaagggaattaaatgagataatagatgtgaaaatacctagcacagattctagcccatgaagttatatatgtacagaatagagaagagagacatttttctgaatctggaggtactatctgtattagttatttaaataattcataccatttaaagtcattgtttatctttttctatgtattgagtgatgaatacatgctcccaaaaagttatcttttattgttkcaggtatttgtgtgtctgtctgcacatcagatacaggttaattcaaatgtgt

SEQ ID NO: 302334 - DNA, 560 bp, Homo sapiens
cggaccagagtaatgcaagccatggaactggctttgactcacaaggcagaatattgagaagaaaactgagagtcagtaactaactttgggtttaaattttctcacctgagctagactccctgtgatgtacatctttgcaatatctttgcaaaacaatttctttgcttgtaatgctccatttcatactcctgcttagaaaaytgttactcatcttttgaaatcacatattcatttaatcaaaaaagtgtataaagacccaataacatatctgatgctgtgctaggaaacaaggatattgtgttgagcaaaatcagaccataacctcatccttatgcaccagcctctgcactagtgtcccctaaagcttgccctggattgctccctcccccatgcttaaagctccgggtgcacacgtggcattagagaacaatctatgggtttacacagctgtttcctcagcctggcagggggaagaggaaggactcaatgtattcatcttttttttttttttttttttgagacgaagtcctgctttgtcacccaggctggagtgcagtggc

SEQ ID NO: 302335 - DNA, 560 bp, Homo sapiens
cggaccagagtaatgcaagccatggaactggctttgactcacaaggcagaatattgagaagaaaactgagagtcagtaactaactttgggtttaaattttctcacctgagctagactccctgtgatgtacatctttgcaatatctttgcaaaacaatttctttgcttgtaatgctccatttcatactcctgcttagaaaactgttactcatcttttgaaatcacatattcatttaatcaaaaaagtgtataaagacccaataacatatctgatgctgtgctaggaaacaaggatattgtgttgagcaaaatcagaccataacctcatccttatgcaccagcctctgcactagtgtcccctaaagcttgccctggattgctccctcccccatgcttaaagctccgggtgcacacgtggcattagagaacaatctatgggtttacacagctgtttcctcagcctggcagggggaagaggaaggactcaatgtattcatcttttwtttttttttttttttgagacgaagtcctgctttgtcacccaggctggagtgcagtggc

SEQ ID NO: 302336 - DNA, 617 bp, Homo sapiens
attcattcactttttcattcatttaattaattcactaatacagtatcaactttgggccaggtactagggattccaagatggataagatgctctttgctttcagaagtttagtaaaaatcttgactgatctagagycaatttatgttagaaaacagctttaaccaaatagccttaaacatttgccgcagagctgagacccataatgaaacatattccttcagctagtatgtcccttcagaatagagagaaaagtaaagttggtcatgatctgaaactttggattttaattctgactccggtcatttctagttttgtgatctggaggaagtcatgaaatttctagcctcagtttctccatctacaagacgaagacaaggctgatcacatcaccaggtgttgtaagaactaggtgaataagatattacaatggcccgtaatcccaatgatttgggaggccgaggcaggaggatagcttaaagccaggagttcaagaccaacctgagccacatggcaatatctggtctcaaaaaaaatatttttaaaagtcaggcatggtggcacacacctgtagtcctagctactcaggaggctgagagcccagttcaagatcacagtga

SEQ ID NO: 302337 - DNA, 560 bp, Homo sapiens
ttttccaagaaaaagcattgatgaataaaatgaaaaaatatatttctgctggtactgtggcataggaatttactacagagctttaatggaaaatagactgtctataattggcggtgttattatttacataatttgttcaggacaatgagttaagataaaatgtacaatttcccttggtcaaattttatatatatatatatatataaagtttgacaagattatggaagataattcaaaaggaaatcacttggcactgtgtgactagcttgagctagaagtgtattagaggcacaggtattgacagtggcaggaagccatggacaaactgtcattaggacaggaattagtgggagagtggaacagacctcagggagcaaaaatgcacaaaaattacacctgacatggagtctttgcccagccccagtatctcctctgcggtttctgcctgaggaagattattgcataagtttgatcccaaaggggccatarggattatttctgggtcatctatttttttctattaacatactcaggaaaagctctaatctaatttcacaaac

SEQ ID NO: 302338 - DNA, 606 bp, Homo sapiens
ggggcacctactgtaattgaagcttgcaggtctagaagttgctctgggtgagtcagtaagtgagtgatgagtgaatgggaaggcctagaacataactgtacactactgcagactttataaacactgtacgcttaggctacgctaaatttataaaaactatttttgcttcaataataaatcracttcagcttactttaattttcttcataaactttattttttgactcttttgtaataacagcttaaaacacaaatgcattgcacagctgtacaaaaacattttatttccttatattcttattctataagattttctatttttgaaatttttgatttttaaaaaatttataaactttttttgtgaaaaatgaggacataaacacgcacatcagcctcggcctacatgaggtcaggatcatcaggacatcactaggtgacaggaatttttcagctccattataattttgtgagaacaccatcatatatgtgattcattgttgacaaaaccttgttatgtggtgcatgactgtatatgtctatattcattcagttctcactattatctacagattcatatttgtgaatttgtctacttgctaaaatgta

SEQ ID NO: 302339 - DNA, 520 bp, Homo sapiens
aattcatattctacctgctttcctttattttccaaatagctattttaatccattcaacttctcaatgattttttcttttgataatttttttttatttctaaacttcgagtagttaaattttgtcttcctcactgaacagtgaggcccttaaagtcactgctcatacaacrtagtacctaacacatagttgacatacactactcattaagtgccattgaaaaataaaatataaaacattttttacatactcaaagtgctaaacatttttgtgattttattactgtgtttttataaaattttaagttgtaatactgttaggtatgatagactaagaaatacaataaattttgtatgcagaacttaatcttagatttccatgacatttctcatcatcagatcaaacataaattatatttaaggccaaaagagaagaatggattttttttttctcatggacagcacagttaagggcaagtgcaggtcagggcatcatcaaagaacatggcttggcagattcaga

SEQ ID NO: 302340 - DNA, 612 bp, Homo sapiens
ttattcatttgcaccatgggaaaataaaagcaaaatgtcagtgaaataaatttattttctggtactgcagcctattgatatgatttctcctaaggatacagatctgraaactgtccatgtttaggatttggatgtgtttgggtcttataaattatcttaatctacataaaaagatatgttgatcaataaaatgtatccctaagtatgataatatatttgaaacaatgatcatttgagttactttattgtgacaaggattttggaataattaaagtatgaagtactatttgtatggatagtgatgctctgtgcaggataactagaaaaaggactggagctctaagaaaggtatgagttttagtcacagacgaaggccactaaccttttcataacatgtacttttttaggatgcttccccgagctcaatacctctaatccctctggcttcaccttgccatctctaaggcttcaacccagtctttcgaggcagttgcggattttggcattgttccagaaggaacctgtagcactacatttccagtaagcgcaaagccacaaccatctgtagaccacagatgcctgactgtaagttatcataccatgtgaccagaa

SEQ ID NO: 302341 - DNA, 547 bp, Homo sapiens
gcagggcctgaatactcaggtatatttccaaaggcttagaacatgagttcttcaagaatgatggctcatrcctgtaatcccagcactttgggaggcgaggcgggcggatcatgaggtcgagatcaagaccatcctggccagtgtggtgaaaccctgtctctactaaaaatacaaaaaattagctgggcttggtggcgggcacctgtagtcccagctactcgggaggctgaggcaagagaatggtgtgaacccgggaggcggaagcttgcagtgagctgagatagcgccactgcactccagcctgggcgacagagccagactccttctcaaaaaaaaaaaaaaaaggaatgatgaaggatggattctataaacccaggtgttgtcacacacagttaagtatttagtctacttaaagaaaaacatttaaaaacttagccactcttatagattgaataatagaaatataaagtcccaaaccccctgtgaatgtggcttttcttatttggaaataaggtgtttgcagatgatcgagttaaaatgagttcat

SEQ ID NO: 302342 - DNA, 547 bp, Homo sapiens
gcagggcctgaatactcaggtatatttccaaaggcttagaacatgagttcttcaagaatgatggctcatacctgtaatyccagcactttgggaggcgaggcgggcggatcatgaggtcgagatcaagaccatcctggccagtgtggtgaaaccctgtctctactaaaaatacaaaaaattagctgggcttggtggcgggcacctgtagtcccagctactcgggaggctgaggcaagagaatggtgtgaacccgggaggcggaagcttgcagtgagctgagatagcgccactgcactccagcctgggcgacagagccagactccttctcaaaaaaaaaaaaaaaaggaatgatgaaggatggattctataaacccaggtgttgtcacacacagttaagtatttagtctacttaaagaaaaacatttaaaaacttagccactcttatagattgaataatagaaatataaagtcccaaaccccctgtgaatgtggcttttcttatttggaaataaggtgtttgcagatgatcgagttaaaatgagttcat

SEQ ID NO: 302343 - DNA, 590 bp, Homo sapiens
ttttttttagctacttgtcaagtatctcttatttaattggtttgcagcttaagttttatttttttaaacttttctgatttcctccactcctacatccacaaccagagcaaagtactcaatatcccgagctcctgttatattttgtttataccttatttgtaatatttgtgttgtaaccatctgcaaacatgtcttcttccatcataaaggtaattttaggataaggaattttatccagattgttttcrtattcttaaaatgtatcatagtgcttgttgcttgagagtctgtagaaggatgtttactgataaaataataaagtcatgtttttgttacatattagccaaaggtcacagattgttatatgtacattactcatccccaccaataaactatcagtgttataattcttcatagatcatttgcatgtcttgggtttcccaggacagtcagggtttatatttattgttctggcattctgtttggctgagcttttcccagatttatcattttttaatacataatattattaatggttatgttaatataagttaagtagtttgacttaaactagaaatactcctttatat

SEQ ID NO: 302344 - DNA, 598 bp, Homo sapiens
agctgtttgtagcaatgggattggtatgaatttttcttctactgcctggcaaattgaaaagctataaaatattttcagttcatttcaggttcaggtatccctaggagcaactgtcttcattcaatcagaaaggaaggtactaagattgcaaaccaaagattaagtaactgaatgcaaactgctgttggttgaaaactccaactgggactttattgccaagcaccagacattagaagatcagtggcaaaattagccagagtaaacatcctgaggtacaaaactagtgccagctcactgagctatcaaaaagataagtgggttgacagaggggctgaagaaagacrtaagtaaatatggataaattcagtacccgttcatataatgatggacatgatttgaaaaagaaatatgtcagtcataaattcagttataaatatgcagaatgaaattttggaagttttatgctcttgttaggaaaaaatagctatattaggattaatattacatatttaatttgagtctcaatataagaaccccatgaaggttgttaaaataatgaaagtaatgctgatttaataattagacattgaaaacttac

SEQ ID NO: 302345 - DNA, 323 bp, Homo sapiens
gaaaacattttggtacatctctgcacctactcaggactttatggtaggcatttctatgagctagtcttaacccttacccttactttctatttcctttcccataatttaccttcttctattgctcaagtgtttttttttttaatattgtagtcattttaaacgtaaaataaataaaaacattacgtaggtrtataaaaggatgttttggcttttgtatgtaaccaaaattcaaaacgctttctttataattagtgactgcttaatataatactaattggattaaatatatttttctattacacattggaggtgtgtggtagtga

SEQ ID NO: 302346 - DNA, 583 bp, Homo sapiens
agggcttaatgtgacccttgagtatgtacatcaagaaattacrtaaatgcaaatccaaggctctgaaatattctgtttgcattgttaacctctaattggttatgccattaaattagttgtaaagcattatagtacatgactggtcagccatactgtatatagttgagtcctcctctaaatttatattgttatatatttcatagtcaaacttttagccatttaattaaaaggtatatgtaatacttatagaattgatgatctgtatgatcttttctgtgtgtaattttaatattccccaattggcctagctcagaagcatatgtgtgccaggaataaatatttaggtgaataagatatatgattaaaagtcaagattgaaaactagactttttgaaaataagattaccatttttttttttttctaaaaaggaaacttctttacagcatggatgttacagttgaatttttgggaggctattatatcagttatcatcttaatgctactagaagataatcatatacaataacttgtgataaggattttttatcgtctctttgagtcagacactaaattatagtatta

SEQ ID NO: 302347 - DNA, 584 bp, Homo sapiens
atgctttgtatgcaaacaatgaagtaaattactcttaattcagaacctgaggtttagaaaaaataaaaatgctgcaggtgccaataaaataaagcgctataggaaataatttcaaatgtaaaatatttcaggaaagacattatcagtaaaatttatgtagaaattaaaragagaaaccaaaggtaacaaacaattaacagatgtatttttcatataaattaccataaagtggaaaactgaggtctcagtgcatggtttcattacccattactttaaaaataaggataattttcaaatgcctctgaactgttctgagtaaaactacacttttcaatttcctattttccacatgaccatgagaatgccttaccattaaccacacacataatggtaacggtaaaattatccaagtaatataacccattatggtgcattttctgtataaacaaagtttcacttgcatgaaccttctacaccagtaccatatgggtatgtgcttaaaatctctagtttaaacaagtcatatatgaattacttttcatgtaaaagaagtttatagggagccagtagaaagctagtgtgtc

SEQ ID NO: 302348 - DNA, 562 bp, Homo sapiens
ttgaatgacaagcaatagtgatggtctacatctcagggctagaagttgaggtaaggatattaacaatatattttgttgcttaaagttagacaggtcctactaaaacaggaagatattatttcacaaaaacaactttagaattttaaattgacagaattttctatgggaagatattaataaatattagctaatgcagacagaaataaaagttccttaatgtttatggactatattttcatgaaatgtatatacggccaatgtcacagcattcatttgtcatyatttcaacttttccattaaaaaattaaaagcatcaatatatgcactttctatattattatataacagtaataatggcagttagaaagaactgccagctactgttagatcaatattttttggtaattagattcatcacacagtgactggtctgggttgcttataacctgctttcatacaactttaaattatttgttcttaagctgagtaaatttcaaaagtcatacacagcatttgctgcaagtatctctgaagaatatgataacaacaattgaaataatgg

SEQ ID NO: 302349 - DNA, 470 bp, Homo sapiens
ttcctggaatctattatctcttgtacatagataagtgtgcaagttgtgcttcttatgaaacttttatgtttctggtctatcagagacatttctatgattagacctttgagtaagtgattggaaatttaaataacaaaaagatgatagacctttaatttttatttagagaatctgaggcyttaatttttaaatagaaagcagactagtggaaatagtaaaacagtgcttgccataaaaataaagatttcctagcctacccatggatgttctgaaacagaattctaactagggagtccaacagtcttttttaatagatgccctaagtctttgctcctcaaaatataatctgtagactgtgtagtctgacttgggaatttttcagaatttcaaaattctcacccacattctagacatactgagtcagaatctacatcttaacaagagacacaggtgtttcctgtgtatgtagc

SEQ ID NO: 302350 - DNA, 591 bp, Homo sapiens
acagttttaggtttttcagcttgaggatggggttttgttgggtacctgaatttttctgcctagaatttttctgccccccccattcttataataaccaattcagctattcctgtaactcacttctgatttttatgtcactttactttttttgtctataaatttgttcttaccacaaggcaccccyggagtctctctcaaactgttgtgattctgggggctgcctgattcacaaattgttcaattaaactcctttaaatttaatttgcctgaaagcttttttttaaaaacaggtgtgttagaaatggggtctgaagtacggctgctaacaactcccatgagcagagtgaacaagcaagagacctgctggacccactgtgtcctttgaactctcagagcagttgggaattgtggtaagtcctcttgaatttcagagctccatggatttgtgttttgagctctccaagtttatttgagcaaatttctgttccaaattgggtttggaagtcatgacagaagctggactgagtccaggatcaaatttgatcttgtaattaactggcttggatccagttagaggcctcttacatctga

SEQ ID NO: 302351 - DNA, 579 bp, Homo sapiens
aactgattaagattggatagatttgtctataaggttttattaaaaattgaagtagacattaatagtagactaatgcaagggtgayatttggctgtctctcgaacaagatttccatgtaatattaaagcataatgataaatttttctttgccttttgaataaattactgaaaaaagaagggaaagagaagagacagattatttggaaagctaagtcttccctctctcaatgagtaaagatttttgccttttaaaaaatttttgagtcgttattttggctaaataaatgatttatggtgacctggaattctatttcataatatcaaatgttttagacctttagcatatctgataggcttcccaaagtcaagtttcagcatcaaaattatcttttctgacctctaactttagggtgctagagagggcccctgaagcacccaaaagagaggtaaacaaacagggctatttgatatgctaggttgcatgggaagcagtgtcaaaataagagagaatgtttaaccttcttcagtttatattttagcatatgtcatcaatatattccaaaattgtatgggatttct

SEQ ID NO: 302352 - DNA, 579 bp, Homo sapiens
aactgattaagattggatagatttgtctataaggttttattaaaaattgaagtagacattaatagtagactaatgcaagggtgatatttggctgtctctcraacaagatttccatgtaatattaaagcataatgataaatttttctttgccttttgaataaattactgaaaaaagaagggaaagagaagagacagattatttggaaagctaagtcttccctctctcaatgagtaaagatttttgccttttaaaaaatttttgagtcgttattttggctaaataaatgatttatggtgacctggaattctatttcataatatcaaatgttttagacctttagcatatctgataggcttcccaaagtcaagtttcagcatcaaaattatcttttctgacctctaactttagggtgctagagagggcccctgaagcacccaaaagagaggtaaacaaacagggctatttgatatgctaggttgcatgggaagcagtgtcaaaataagagagaatgtttaaccttcttcagtttatattttagcatatgtcatcaatatattccaaaattgtatgggatttct

SEQ ID NO: 302353 - DNA, 598 bp, Homo sapiens
taatggtacatacttttcttcatattcagtcagaaacagaacattgatttactattcttacccacatcaaggattaaagagaatattgattgctaggaggccttcattcttctagaagggcatcatttttccatcgtttggagtaaaagaggtaataaccagaaatgtatccctcatgataggttctatagcagattctactgtaaaggctgtggtcacacaacagacttattaaattatcttgtgaaagttacgctaaataattgaattgtggcctatgaagaactacattaaatgaagattatagagagagattcagatgtaggatattaacaaacaaaaagatcacctagttaagcaagtagactccctatctaactcattctttactcttttcgattttaggtggtttggtttatggggagtctgaataaraagcatactccaaactcttggtattatcctcccgatagtaataatagtttccctggtacactgtattttctcaaaggttctaaatgtttgcattctgccacctctagaatggcaaatggtctgtctttaactggaactacaagagttgaaagaagcacacaac

SEQ ID NO: 302354 - DNA, 624 bp, Homo sapiens
ttttttcaatttctgcagtattttaaatttttatttcaatattatttggtagatactaaaatagctacaattctttacccctttcttttatctctgcactttacaagagtgttgttttttccctaactactgaatctgggctgtccttgtgacctgtttggtaatatattgctttagatgtgagttatgccagttctaaaaataagccttaagggacattgtctgcttccattctctcacttgtaacctctgcatttgccttatgaacaaggctggtttaactttctggagcctgcgagacaatgtggaactgaacctattcagctcagtttctactagctccagttccagaaataatatcataccttaccaagaacagcagaaatgcttagcccaccygaagacaaccatagacgcaggaaggaacctaggaaataccagagggcaacccagcagatccacatagattcatgagcaacaaactgtctattgttttgccagtaaatatggcagaatgtcttgttacacagcagagtaactgataaattttatttctaaacctttatttctaaacctttccacgttcaaaattggatacattttgatataatttatacaacagtt

SEQ ID NO: 302355 - DNA, 624 bp, Homo sapiens
ttttttcaatttctgcagtattttaaatttttatttcaatattatttggtagatactaaaatagctacaattctttacccctttcttttatctctgcactttacaagagtgttgttttttccctaactactgaatctgggctgtccttgtgacctgtttggtaatatattgctttagatgtgagttatgccagttctaaaaataagccttaagggacattgtctgcttccattctctcacttgtaacctctgcatttgccttatgaacaaggctggtttaactttctggagcctgcgagacaatgtggaactgaacctattcagctcagtttctactagctccagttccagaaataatatcataccttaccaagaacagcagaaatgcttagcccacccgaagacaaccatagacgcaggaaggaacctaggaaataccagagggcaacccakcagatccacatagattcatgagcaacaaactgtctattgttttgccagtaaatatggcagaatgtcttgttacacagcagagtaactgataaattttatttctaaacctttatttctaaacctttccacgttcaaaattggatacattttgatataatttatacaacagtt

SEQ ID NO: 302356 - DNA, 603 bp, Homo sapiens
gtagagttcaataatgcatttatttgggaaaggactattacataaatttttatttttaaaaattgatttttttgttattaagtttgcaagattctatttttggatattagctccctgtcagatatatggttctaaaatattttctcccagtctacaggctatcttttcattttgtgaatttctcctttgctgtgcagaatgttttttaatttgatgtagtcycacttgtttatttttgcttttgttgcctgagctttttgtgtgatattcaaaaaattatatccaaggccaacatcaaggaggtttatccctaggttttcttctagcagttttttttttcacagttttgggtcttacttttaggtctttaatccattttgagtttatttttgtgtacggtagagacgggtccaattttcttcttttgcacatggatatccagttttctcaacaccatttatttaacaggctgttgcttctctattgtgtcctcttggtgtacttgtcgaaaattcgtttactgtatatgcttgggtttatttctgggttttttattctgttcctatggtctctgtgtgtgtttttatgccatttccatactgt

SEQ ID NO: 302357 - DNA, 560 bp, Homo sapiens
cacctgtaccccaataacctataaaaaatttaaaattaaaaaaattaaaaagagaactaccatagggcaatcctcctcctgggcatacagcaaaagaaataggattagcatctcctagagatacctgccctttcatgttcattgaggcattattcaatatggaataattggaagatatggaaactaagttttctgttaatgaatgaatggataaagaaattgtggcatatatatacatgtgtgtgtgtgtctatatatagtggaatattactcagccttaaaaaaggagctgctgacatttctgacaatatggatgaaccaggaagatattatagcagtgaagtaagccagacacagaaaggaaaatrctatataatctcacttatatggggaatcaaaaatataaaatttggattcatagaaacagatggtagaatggtgattactggggattgctagggggagaggacaggaaagagtcgggagatgttgccaaagggtataaagttacagttatgtagggtgaataaatttagagatctaatatacaacatgatgag

SEQ ID NO: 302358 - DNA, 560 bp, Homo sapiens
cacctgtaccccaataacctataaaaaatttaaaattaaaaaaattaaaaagagaactaccatagggcaatcctcctcctgggcatacagcaaaagaaataggattagcatctcctagagatacctgccctttcatgttcattgaggcattattcaatatggaataattggaagatatggaaactaagttttctgttaatgaatgaatggataaagaaattgtggcatatatatacatgtgtgtgtgtgtctatatatagtggaatattactcagccttaaaaaaggagctgctgacatttctgacaatatggatgaaccaggaagatattatagcagtgaagtaagccagacacagaaaggaaaatactatataatctcacttatatggggaatcaaaaatataaaatttggattcatagaaacagatggtagaatggtgrttactggggattgctagggggagaggacaggaaagagtcgggagatgttgccaaagggtataaagttacagttatgtagggtgaataaatttagagatctaatatacaacatgatgag

SEQ ID NO: 302359 - DNA, 504 bp, Homo sapiens
atgcaaaattattttggctaacatytcttagagaattcagatactggatgacaataattttaaaccactgattatacagtatatgttttgctacatgattgattctcagagttgttacttgccactaagttagatcaaagaatctagaagatttatttttttttcccattggtttttaattccaaaataattatttgttgtttcttgccaaaaagtttacctaaaacatttctgctcataggaaacatataataaaatattatatttactttttgcttcccttatgcttatttgtgttgtatagaacattgatatattttcgtgtaagggcctcaggatggaaattggtcaatgaaacatgaggttgaagacaacggattaaatagtggaagtctattgcattttttaaaaaaacaggacctaaatgatatggtttattttggtatcatgttcacttgtctgctggcattatttaacattggtcatgtaaagaataactcaaga

SEQ ID NO: 302360 - DNA, 588 bp, Homo sapiens
aggcacataaaagtaaagaagtggaattaacaacttaaaattatcttcccacagagaaaacaccagctccaaatgggttcactggtgaaatmttccaaatatttttaaaaaactaataccagcaatttacaaactcaaaaaacacagaaaaactaaaactatatgtaagaaccaaaactaaattgccttgaaaaaaaagcagcaggaaacttattttattatcttggatgaggcaaacaattcctagaaatgacaccaaagtataatccataaagaaaaataattgataaattggacttattaaaattttttaactttgcacttaaaaagacaccattaagtaaatgaaaagagaaaccacagaccataaaaataggcaaactatgtatctattaaagaatttgtatccagaatgtataaagaactcttaaaattcaataagaaaaaaaaatcaattttacaatggacaaaagatttgaacacttcaccagagaagatatatgaatagctaaaaagcatgtgaaaagatgctcaacatcattagtctttagggaaatgcaaatcaaacctcggagctatcactacata

SEQ ID NO: 302361 - DNA, 588 bp, Homo sapiens
aggcacataaaagtaaagaagtggaattaacaacttaaaattatcttcccacagagaaaacaccagctccaaatgggttcactggtgaaatattccaaatatttttaaaaaactaataccagcaatttacaaactcaaaaaacasagaaaaactaaaactatatgtaagaaccaaaactaaattgccttgaaaaaaaagcagcaggaaacttattttattatcttggatgaggcaaacaattcctagaaatgacaccaaagtataatccataaagaaaaataattgataaattggacttattaaaattttttaactttgcacttaaaaagacaccattaagtaaatgaaaagagaaaccacagaccataaaaataggcaaactatgtatctattaaagaatttgtatccagaatgtataaagaactcttaaaattcaataagaaaaaaaaatcaattttacaatggacaaaagatttgaacacttcaccagagaagatatatgaatagctaaaaagcatgtgaaaagatgctcaacatcattagtctttagggaaatgcaaatcaaacctcggagctatcactacata

SEQ ID NO: 302362 - DNA, 588 bp, Homo sapiens
aggcacataaaagtaaagaagtggaattaacaacttaaaattatcttcccacagagaaaacaccagctccaaatgggttcactggtgaaatattccaaatatttttaaaaaactaataccagcaatttacaaactcaaaaaacacagaaaaactaaaactatatgtaagaaccaaaactaaattgccttgaaaaraaagcagcaggaaacttattttattatcttggatgaggcaaacaattcctagaaatgacaccaaagtataatccataaagaaaaataattgataaattggacttattaaaattttttaactttgcacttaaaaagacaccattaagtaaatgaaaagagaaaccacagaccataaaaataggcaaactatgtatctattaaagaatttgtatccagaatgtataaagaactcttaaaattcaataagaaaaaaaaatcaattttacaatggacaaaagatttgaacacttcaccagagaagatatatgaatagctaaaaagcatgtgaaaagatgctcaacatcattagtctttagggaaatgcaaatcaaacctcggagctatcactacata

SEQ ID NO: 302363 - DNA, 588 bp, Homo sapiens
aggcacataaaagtaaagaagtggaattaacaacttaaaattatcttcccacagagaaaacaccagctccaaatgggttcactggtgaaatattccaaatatttttaaaaaactaataccagcaatttacaaactcaaaaaacacagaaaaactaaaactatatgtaagaaccaaaactaaattgccttgaaaaaaaagcagcaggaaacttattttattatcttggatgaggcaaacaattcctagaaatgacaccaaagtataatccataaagaaaaataattgataaattggacttattaaaattttttaactttgcacttaaaaagacaccattaagtaaatgaaaagagaaaccacagaccataaaaataggcaaactatgtatctattaaagaatttgtatccagaatgtataaagaactcttaaaattcaataagaaaaaaaaatcaattttacaatggacaaaagatttgaacacttcaccagagaagatatatgaatagctaaaaagcaygtgaaaagatgctcaacatcattagtctttagggaaatgcaaatcaaacctcggagctatcactacata

SEQ ID NO: 302364 - DNA, 561 bp, Homo sapiens
cacagcggtgctatttgtaatagctaatcattagggagaagcgccaatgtccatcaatggtaaatggataaatcaagtatggtatattcacagaatgaaatactattcagcaataaaaatgaacaaactactgatacatactacaacatggacaaatctcaaaaaccttaagctacatgaaagaagccagatgtgaaagactacatattatatgattctacttatatgcaatgtccaggagaggcactatctatagatactgaaagcagcatggggttagggattggaacagagattgactgcaaacaggcatgagaaatcttttggggatgacgaaaaatattctaaaactagaaattacacctctctctctctttctctctctctctctctctctctctctmtatatatatatatatatatatgtttaaaaaaaaatttttttgagatagattcttgctctgttgcctatgctggaatgcagtggcatgatcatagctcactgcagcctcaaactcctgggctcaagtgatcctccttatctcagcttcctgagtaact

SEQ ID NO: 302365 - DNA, 607 bp, Homo sapiens
ataatcattcaatattatagttgtagatatggagtatattttctttaaaaaaatgaaaaactaagaagaaaatgcctctcaacatcgttagtatatcaataggtcagcagggaaaaaaaatactgtgataaacttgtctctttgatattaagaagaaattctagtccacactccaatatacttcctgttttttcactaggtatttcttttacagctgctcttcattcttttccacatttcatattagaggattggtacagcctttraaacttcattgacaggagcaaatccagtatccacttatttcttctcgaaagcactctagcccatcagatagcccagcagtttcattctcatgaaaactctagccgtgaaaaaactcagtaggacacacatgaatttaatgaatagaagaagaaatctattgagttttgggatattttgtgcattcaattggtccaggattatgaaacgtaaacctcccattttaaacaggaagctggatgcaagtccttccataatatattgtccatttactctgtaggccaagaaagctactgacctctaatgcctatgttcatcagtcatagagccaacacttgcaggt

SEQ ID NO: 302366 - DNA, 529 bp, Homo sapiens
gaatcttcaaggttttctagtatagactcatattgtcagcaaatagggttagcttgacttcttttcctatttggatgccttttatttctttctcttgcttcattgttctggctaccagttctagtactaggtcgaaaaggagtgatgacatttttctttttttcttgtcccagttctcgagagcgacgcggcggggagcacctgctccagtattatgttggctgtgggtttgtcataggtggctcatcatttctaggtgtgttcctttgatgcctattttcttgagggtttttatcaagaaaggatgttggattttatttaaagctttttccacrtctattgagatgatcatgaagtttttgtctttaattttgtttatgtggtaaatcacatttattgatttgtgtatgttgaaccaaccttatattcaggaatgatgcctacttgatagtggtgaattaactttttgatgtgctgtttgatttgaattgctagtattttgttgaggatttttgcatctatgttcatc

SEQ ID NO: 302367 - DNA, 586 bp, Homo sapiens
ctttctgttcaacagtccacatatttcttgaagacatctaagtcctttctataaagttktattatttataattaaatattttttcatgaaaacaaaccaatatatgcaagtagtaaggatgctaagacttaacatgctacatcatttgtaaatagcaaaagttaaatttcatcatttaacatcactcaccacacccagcaacttttttgtattttttgtagcaatgaggttttaccatatttcccaggctggtcttgaactcctgggatcaagcaatcctcccacctcggcctgccaaagtgctgggattacaggtgtgagccgtcatgcccagcctgctttatcagattttgataaatgattattccttaaaatctttatgaaaatactattgcccttgagatttttcccccatttcttatggcacaattcttcagtttgcaccaaggaaaatcttgcatttcaagacttaagaacttttaggggaaaaaaaaccttttaagaaattcttactgatttccctggaatattttagtcttcggttcttatgaaatctattattaacgtctttttcctaaagatatat

SEQ ID NO: 302368 - DNA, 598 bp, Homo sapiens
aatgtatgtgttgacttaactgaataaaaaatacttcatggatacactttcacagtgctgttttaagttggaaaacctctctaggttaaggtgttttgtaattctataatgcctatagaattcggggtttatttcctgccccyacccaagataactttctcccctgtcaaactgtaaaccacaaactaatgtgctcaatttagggaggtcctgagaagagaataaaaggcattcaaatagttgctgtgaatgcactggaaagaaagcaagttgcatgtaggatggactggaacaaataaaccttgtcctgactcagctccttgctggcttgtgactcttgaacaagccgcttcacttctgtaagcttcactggactcatttgtgaaatgggcacagaaatatttgcctcagtgttagcgtgagggtcacccaagattcgatgtttgtggaagggcctggaatacgatagtagctattattttaacaaatgaacagagtggcagtgaattatatagaatcatagaatttaaaaatttttaaagggaagcagcctgtaggaatacctagttcagttttcagccttggctgcacattaaaa

SEQ ID NO: 302369 - DNA, 577 bp, Homo sapiens
aagtttctagtatggtggtatcagccactcactgcctcaaacccagtgaaaccctccgtaacacagactaggatatgccacaattggcaatgggtaccyctcttccaaatggacccaaattcctatctcaggcatgaggtgaggtcactagttcactgcccagtggtcatctgcacttgctcagctcattgtggagtcagtgggcacagactaactttatcttatgtgctttttgggaaatcccagagaggttgaaaaatattatttttagttaacgtcacaacagtggggcccatgtgttgtgttttcatattagactccacttacctcactattatgggttttactgtactttcctactgtttggataaatatctgctgccctgcgggtcctctaccccaggtccttccaagcccctcctccaaatgacttcccacatttctggcatcccggcaagaggtgggagggacagtttacaagaccctgcacctcagcaggtgtcttttcttaagagacaccttaaggtgggtgctccttattaaatatttcagattatgtctgtctattcggtgtggc

SEQ ID NO: 302370 - DNA, 577 bp, Homo sapiens
aagtttctagtatggtggtatcagccactcactgcctcaaacccagtgaaaccctccgtaacacagactaggatatgccacaattggcaatgggtacccctcttccaaatggacccaaattcctatctcaggcatgaggtgaggtcactagttcactgcccagtggtcatctgcacttgctcagctcattgtggagtcagtgggcacagactaactttatcttatgtgctttttgggaaatcccagagaggttgaaaaatattatttttagttaacgtcacaacagtggggcccatgtgttgtgttttcatattasactccacttacctcactattatgggttttactgtactttcctactgtttggataaatatctgctgccctgcgggtcctctaccccaggtccttccaagcccctcctccaaatgacttcccacatttctggcatcccggcaagaggtgggagggacagtttacaagaccctgcacctcagcaggtgtcttttcttaagagacaccttaaggtgggtgctccttattaaatatttcagattatgtctgtctattcggtgtggc

SEQ ID NO: 302371 - DNA, 528 bp, Homo sapiens
tgctacacctcaagaaaggtacagagatgaaaatagtctggatagtaatcaagaattggaggacttccacgtaaaggcagattaactatcatcctccccatcaccaaaaacagacacgaaacaaaaataagacacagtacagagcagatttctgtctgaacaggagaaggcttttcagtaggaagcctgacccaggcacaagttttctaaaaagtgtttcgtgaggtttgggaacataaatggttaaagtgcatgggccctttaagaaacaaggtgcagggctgtaagaaaatattcctagacaaggtcagacggaagtggaaggtactggagctgttgtttctctgcatgtggtgaaggagtattttgtggatccaaagtagacagggcataagcagaaaatgcaggtgaccccagcagccgctgagccggcctggattcgggcaaagaaagcagcgtcctcctggtgcaaacagacacagccacaagtgcargacacgcagtctagaaagtccggaaggtaaaata

SEQ ID NO: 302372 - DNA, 550 bp, Homo sapiens
caagaacttgaactcataatcaaaatctttcccaggaaaaactctccaggctcagataatttcactgatgaagtctatcaatcggttgatgaaaaataatgccaattttacgcaaaagtttcagataatgaagagaagaaaacacttcctactatacactatacacgtgtgggctactataacactaatactcacacytgacatacagatcacatgaaaagaaaattgcaaaccaatatccctcatgaatataaaaatgaaacgcattaataaagtactaatgaatcaagtccatcagtgttgaaagagaatttatcatgttcaagtggagtttgtcttatctgaatttaacattgaaaaatcaatcaatgtaacttatcatattgcaaagctagaagagaacaataggtgattaccccaatagaggcagaaaatgcagtcagcaaaatccaaaaccattcatgatcaaaattcccagcaaactatgaacagaattttcttaaacttataaagggcatttacagaaattctatagatacttaacggtgaa

SEQ ID NO: 302373 - DNA, 541 bp, Homo sapiens
aggctggcgtgcatgcaggaaatctcctgcttcctcctggccttaaccaacctacataccaatattttccctcacttacwttaattttaatatcatgacagtttaaacatgttaaaagcatggctctaatcacaatcccactcaaaagcctccagcggtttaccattgcctattgaatttaggcaaaacttccaaccgtgcctttagtgttgtgctggttataatccatttgcctccctccaccccaccccatactcatcccagggctctaggaggctgatctctgagggcagaattgcctgggctttctcccctgtggcttctggttgggctcaaccaactggaagaagcaacaagagattgatggacaagaagagaaagaggtggcgtttgtcttgcccacaacttccctgctcagtgctactgagcagtgactggatcccctcaagagcacagccctgctggctggcccctcctccagggttctgccccttccttccccagatctaggggtgaggggctgctccctattgacactgtc

SEQ ID NO: 302374 - DNA, 541 bp, Homo sapiens
aggctggcgtgcatgcaggaaatctcctgcttcctcctggccttaaccaacctacataccaatattttccctcacttacattaattttaatatcatgacagtttaaacatgttaaaagcatggctctaatcacaatcccactcaaaagcctccagcggtttaccattgcctattgaatttaggcaaaacttccaaccgtgcctttagtgttgtgctggttataatccatttgcctccctccaccccaccccwtactcatcccagggctctaggaggctgatctctgagggcagaattgcctgggctttctcccctgtggcttctggttgggctcaaccaactggaagaagcaacaagagattgatggacaagaagagaaagaggtggcgtttgtcttgcccacaacttccctgctcagtgctactgagcagtgactggatcccctcaagagcacagccctgctggctggcccctcctccagggttctgccccttccttccccagatctaggggtgaggggctgctccctattgacactgtc

SEQ ID NO: 302375 - DNA, 546 bp, Homo sapiens
agtatttagataattaaagaagaaatttagttgattgctgtgttaatatttaccaggaataaacaaacacgcacaaaaaatataaaataactatataccatttgttcattataaaatgagcaagatttatagagataataatagtcagcatttgcatgtggaactagatttctcatgctctgttgatggggctataaccygcataagcattctgtatcatattttaacaatatgtaaacatcttaactttgttttccccctggtaaaatagttcctcttctaggaatttgtctgaggaaataaatacatatgtactcagagaagcacgtacttcaaaacagcattgacaatagaagataaaaagaaacaagtgaaatgtgtaataagaaattggttcagaaaggattatgtcaatcatgaaaatacacaaaagtacaaaactcactgttagagcagatacagaaatgagaaagagaaaggagtcaaatgttatcactataaaaaaactaacaattgtaaggtaggtaataaaagagaaagaaacaa

SEQ ID NO: 302376 - DNA, 591 bp, Homo sapiens
atggaggattcacacatggcactgcctgttccaagtagttcaagaagttctttctggtcagtagtcatsgcaaatgcctgtatctttcctgaacaactttcctcatcccccgcactcaggattttttttgttggcagtaagaagaagcctttggggcaacttgaccttttagatcagcaaggaaagaccccatcttaggcctacttgtctggaagaatggcctggtgagatgataagttcattgctcctattcggttttagtactgagcagcatgggggaggttggggccacttatgttggaaagggaaagttaaggctgggccacctctgttgcctgaaagcctggtgttcaggtgtgcctattccaacaaccgtgggaaccctagtcccacccttcccttaggtagtcttgtctctttgctgtgcgcatttgaaatatccaggcggtttcttagatggaatcctatttacaactagggtgttaaatggccttttcttgacatagacatgatataattcctgggaccacttgttgacttattctgtttcttctgactgatgagggtgggaattccatgctacaggttttt

SEQ ID NO: 302377 - DNA, 591 bp, Homo sapiens
atggaggattcacacatggcactgcctgttccaagtagttcaagaagttctttctggtcagtagtcatcgcaaatgcctgtatctttcctgaacaactttcctcatcccccgcactcaggattttttttgttggcagtaagaagaagcctttggggcaacttgaccttttagatcagcaaggaaagaccccatcttaggcctacttgtctggaagaatggcctggtgagatgataagttcattgctcctattcggttttagtactgagcagcatgggggaggttggggccacttatgttggaaagggaaagttaaggctgggccacctctgttgcctgaaagcctggtgttcaggtgtgcctattccaacaaccgtgggaaccctagtcccacccttcccttaggtagtcttgtctctttgctgtgcgcatttgaaatatccaggcggtttyttagatggaatcctatttacaactagggtgttaaatggccttttcttgacatagacatgatataattcctgggaccacttgttgacttattctgtttcttctgactgatgagggtgggaattccatgctacaggttttt

SEQ ID NO: 302378 - DNA, 591 bp, Homo sapiens
atggaggattcacacatggcactgcctgttccaagtagttcaagaagttctttctggtcagtagtcatcgcaaatgcctgtatctttcctgaacaactttcctcatcccccgcactcaggattttttttgttggcagtaagaagaagcctttggggcaacttgaccttttagatcagcaaggaaagaccccatcttaggcctacttgtctggaagaatggcctggtgagatgataagttcattgctcctattcggttttagtactgagcagcatgggggaggttggggccacttatgttggaaagggaaagttaaggctgggccacctctgttgcctgaaagcctggtgttcaggtgtgcctattccaacaaccgtgggaaccctagtcccacccttcccttaggtagtcttgtctctttgctgtgcgcatttgaaatatccaggcggtttcttagatggaatcctatttacmactagggtgttaaatggccttttcttgacatagacatgatataattcctgggaccacttgttgacttattctgtttcttctgactgatgagggtgggaattccatgctacaggttttt

SEQ ID NO: 302379 - DNA, 394 bp, Homo sapiens
ctcaggaggctgaggcaggagaatcacttgaacccgggaggtggagattgcagtgagctgagatcgcgacactgcactctaacctgggcgacaggtagccatgcaatggatatccaaagaagaattcagtaaccttatgsaactgtgagacttaagttaggccttaaggagtaaggaagattagagaagggagagggaatggcagcagagggaaaaacaaagagtaaaagttcagaggcaagaatgatcctggcttgtttgcagaggacattgaaaatccctctggaacagggagctgggaactcacacttgcaaagtacctacattgtgcacatattatacattaatgcacttagtccttataacagtgctatgtggtaggtactgtacgttg

SEQ ID NO: 302380 - DNA, 570 bp, Homo sapiens
cgttcccttcccagcccggaagctacsctgtccttcccctctcctttgagagctgatttactgattgctagttgataaccacctctttagagagctgtacttccagtctcttgggccttgtgacagccagccggagttccctccttgccttcctgcctgggccagcccagtgctgggcttttcagtcatactgtcaacacccactctcctgctctgtgtggaactgaagattacaggcccaggagttctgctttgaatgtcaaggcttcccacgtaatccgctgggcacaaataatgccccctgcctccaaggagctttaagtcttagttcatccacctagtgctcttgtaacaaccattttaatctctaattcctggataggaaaactgaggcccagcaagcgtaaatgcctcatgcttggttatagtgagtcagcagagctggggttagaacttaggtctctcaacttccagtctgaggtctctatttgactctccactggcctagagggtccttatgcccttccctgacccactgtctgagggtctctatctgaatgtcctgacgtt

SEQ ID NO: 302381 - DNA, 570 bp, Homo sapiens
cgttcccttcccagcccggaagctacgctgtccttcccctctcctttgagagctgatttactgattgctagttgataaccacctctttagagagctgtacttccagtctcttgggccttgtgacagccagccggagttccctccttgccttcctgcctgggccagcccagtgctgggcttttcagtcatactgtcaacacccactctcctgctctgtgtggaactgaagattacaggcccaggagttctgctttgaatgtcaaggcttcccacgtaatccgctgggcacaaataatgccmcctgcctccaaggagctttaagtcttagttcatccacctagtgctcttgtaacaaccattttaatctctaattcctggataggaaaactgaggcccagcaagcgtaaatgcctcatgcttggttatagtgagtcagcagagctggggttagaacttaggtctctcaacttccagtctgaggtctctatttgactctccactggcctagagggtccttatgcccttccctgacccactgtctgagggtctctatctgaatgtcctgacgtt

SEQ ID NO: 302382 - DNA, 594 bp, Homo sapiens
ctggaccttgctgagcaccctaagctgagcacaccatgtagtagctgtcagtaaatgactgaatgaagtcgatgcaatcatgtctttgcatatgggagttcctcttcctggaatgcgactcaccccccttcagatccttcctgtccttcaggyccagtactgttccccagcttctccaggacatcacagcaaccccctcttctgccttacctttcccagcattgaccgtacttttcattgtgctgaactaactggatgcttcagggggagggtagtctgaccttctgtttatttccagaagcccagggaagggctgagcaaaagctgtagaatgacatacccctcctcccccatcaatccacagactctgatgctgggaacaaggaagaacctctaggaccagaagacacaagacataagtaaccaacttctttctcattcaccctgaagagcccaaagttggggtaataaacacataagctatactgtcttgtcttcaactggaagggtgagaggtgaagctggcagatctagctcagagatgatgaggaagatgggaaggaaaagtggtcccgacaggctacagactgggaa

SEQ ID NO: 302383 - DNA, 594 bp, Homo sapiens
ctggaccttgctgagcaccctaagctgagcacaccatgtagtagctgtcagtaaatgactgaatgaagtcgatgcaatcatgtctttgcatatgggagttcctcttcctggaatgcgactcaccccccttcagatccttcctgtccttcaggcccagtactgttccccagcttctccaggacatcacagcaaycccctcttctgccttacctttcccagcattgaccgtacttttcattgtgctgaactaactggatgcttcagggggagggtagtctgaccttctgtttatttccagaagcccagggaagggctgagcaaaagctgtagaatgacatacccctcctcccccatcaatccacagactctgatgctgggaacaaggaagaacctctaggaccagaagacacaagacataagtaaccaacttctttctcattcaccctgaagagcccaaagttggggtaataaacacataagctatactgtcttgtcttcaactggaagggtgagaggtgaagctggcagatctagctcagagatgatgaggaagatgggaaggaaaagtggtcccgacaggctacagactgggaa

SEQ ID NO: 302384 - DNA, 594 bp, Homo sapiens
ctggaccttgctgagcaccctaagctgagcacaccatgtagtagctgtcagtaaatgactgaatgaagtcgatgcaatcatgtctttgcatatgggagttcctcttcctggaatgcgactcaccccccttcagatccttcctgtccttcaggcccagtactgttccccagcttctccaggacatcacagcaaccccctcttctgccttacctttcccagcattgaccgtacttttcattgtgctgaactaactggatgcttcaggggragggtagtctgaccttctgtttatttccagaagcccagggaagggctgagcaaaagctgtagaatgacatacccctcctcccccatcaatccacagactctgatgctgggaacaaggaagaacctctaggaccagaagacacaagacataagtaaccaacttctttctcattcaccctgaagagcccaaagttggggtaataaacacataagctatactgtcttgtcttcaactggaagggtgagaggtgaagctggcagatctagctcagagatgatgaggaagatgggaaggaaaagtggtcccgacaggctacagactgggaa

SEQ ID NO: 302385 - DNA, 563 bp, Homo sapiens
  misc_feature (1)...(563): n = A,T,C or G
aactgactcatggcttttctatgtagttcntggatccagaccaggcctagcccatatattgcacaggtggacaccatggtgtcatctgaggtgaatgcagcccagaggagaaaaagggacttcnccagaatcatacggttctttaatgtcagagccagaactgactctgaaatctctggatttttttttttttttttcagttcatcgcacagcctgaacttgtagtaaaagcatagttttccctacatatggtaatttccatgaaaacaaataaaaaagtgaggaaaaaagcactgatctgtaaaatacttttctttcaatcctatctgagattttatggcacttctttgtttaaaattttttttattgagataaaatttacrttgcataagatttgccattttagctatttcagaatttacgattcagtggattttagaacatttataatggtgtacggccatcaccactacctaattctagaatttgttttaccccaaaagaaaccctgtacctgtaaagtgttcactcctcctctccctctcccctgaaaccctggcaac

SEQ ID NO: 302386 - DNA, 563 bp, Homo sapiens
  misc_feature (1)...(563): n = A,T,C or G
aactgactcatggcttttctatgtagttcntggatccagaccaggcctagcccatatattgcacaggtggacaccatggtgtcatctgaggtgaatgcagcccagaggagaaaaagggacttcnccagaatcatacggttctttaatgtcagagccagaactgactctgaaatctctggatttttttttttttttttcagttcatcgcacagcctgaacttgtagtaaaagcatagttttccctacatatggtaatttccatgaaaacaaataaaaaagtgaggaaaaaagcactgatctgtaaaatacttttctttcaatcctatctgagattttatggcacttctttgtttaaaattttttttattgagataaaatttacgttgcataagatttgccattttagctatttcagaatttacgattcagtggatttkagaacatttataatggtgtacggccatcaccactacctaattctagaatttgttttaccccaaaagaaaccctgtacctgtaaagtgttcactcctcctctccctctcccctgaaaccctggcaac

SEQ ID NO: 302387 - DNA, 599 bp, Homo sapiens
gcccattcttttttttttgagacgtgatctcagttcactgcaacctccgcctcccaggttcaagcaattctgctgcctcagctttcccagtagctgggattacaggcatgtgccaccacacccggctaattttttgtatttttagtagggggtttctccatgttggtcagkcttgtctcgaactcccgacctcagatgatccgtccgccttggcctcccaaagtgctgggattacaggcatgagccactgcccccggccgagagctcccattctttactggttcccttaactctcttcacactcctgaacacagtccctgttaacatctcttgtattattcctttgagggcaccatctgttttctcccagggccatgactgtaccctctcccaggcatgcaggtggtgacgtttgccccctgatggagtttgctgccttaagagattgtatcttagtgcagcagcagaatgacttatccagaaaaatccactatttgaaacctggctctgtgcaggcttaaacattttgtttatgtggtgaaaataaggagaacgtcattcttgaaaagggatttcttttttaacttttggccaaacac

SEQ ID NO: 302388 - DNA, 599 bp, Homo sapiens
gcccattcttttttttttgagacgtgatctcagttcactgcaacctccgcctcccaggttcaagcaattctgctgcctcagctttcccagtagctgggattacaggcatgtgccaccacacccggctaattttttgtatttttagtagggggtttctccatgttggtcagtcttgtctcgaactcccgacctcagatgatccgtccgccttggcctcccaaaktgctgggattacaggcatgagccactgcccccggccgagagctcccattctttactggttcccttaactctcttcacactcctgaacacagtccctgttaacatctcttgtattattcctttgagggcaccatctgttttctcccagggccatgactgtaccctctcccaggcatgcaggtggtgacgtttgccccctgatggagtttgctgccttaagagattgtatcttagtgcagcagcagaatgacttatccagaaaaatccactatttgaaacctggctctgtgcaggcttaaacattttgtttatgtggtgaaaataaggagaacgtcattcttgaaaagggatttcttttttaacttttggccaaacac

SEQ ID NO: 302389 - DNA, 552 bp, Homo sapiens
gtagtgttccaaaatcttcctcacttgaaaagagtttacctcatgaaaccctaactagtgagcmcctacagtgcactgaagtgcttttttaaaagattcctaactggattgtaggcaccctttaaactattaggagccgaaatcaacaccaaacagaaagaaatgcaaattctcacattttaattgaaattatatactgtcatatgatagtgttatgtatccagattatctgcgtaagtccagttctaatatattctaatgtgtactaatgacagcagataaaattttttaatctctactgattttctgcaactgaaataaattagaatgttattgtgtttgtgcactaacaccaaaggtcccattctgcaagatatggttcttgtaataggcagttgggttgcttttatgacctggttccctccctgaacagaaacactgaggtcaacgagagaccacaaggcaggatatgtccttaaccttggtatcagtgactgacaatataaaactgtggattttcaatcacaggccatgattactctttaaccatga

SEQ ID NO: 302390 - DNA, 552 bp, Homo sapiens
gtagtgttccaaaatcttcctcacttgaaaagagtttacctcatgaaaccctaactagtgagcacctacagtgcactgaagtgcttttttaaaagattcctaactggattgtaggcaccctttaaactattaggagccgaaatcaacaccaaacagaaagaaatgcaaattctcacattttaattgaaattatatactgtcatatgatagtgttatgtatccagattatctgcgtaagtccagttctaatatattctaatgtgtactaatgacagcagataaaattttttaatctstactgattttctgcaactgaaataaattagaatgttattgtgtttgtgcactaacaccaaaggtcccattctgcaagatatggttcttgtaataggcagttgggttgcttttatgacctggttccctccctgaacagaaacactgaggtcaacgagagaccacaaggcaggatatgtccttaaccttggtatcagtgactgacaatataaaactgtggattttcaatcacaggccatgattactctttaaccatga

SEQ ID NO: 302391 - DNA, 580 bp, Homo sapiens
  misc_feature (1)...(580): n = A,T,C or G
aaggtaatttcatttggactatctaatattattaaggcaaaaaaaacacaacattaaacaaaagtttaaatttaaaagtttccatgcctctggctggccattttcactgccttyaagcctttgtgactcttcctctgatgtcagctttaagtcttgttctgttgaaaaatccatacattcagttaaaatcaaccacttaaaacagttaaaaactattgccttttaaaaacagatttgagacatttcattttatttcataaattgagtgtttcatcttttgtgaaattgtcatttaagaaataattctcaaaaacttcagaaacccactnntgggagatagcagatgtcacccagattgagacaanncaacatgtcagnattgcctcancaattcatccacccaacatcccatgacaaacccacagagacacagctttaaaattcagtagaaacatataaggtgacacagtgtactgttctccacgtcctaatagtaccttataaatgatttcccaaatcactgctgacacctttattactgtacaacatcttcgtaatatctaaaatgtttctctccact

SEQ ID NO: 302392 - DNA, 549 bp, Homo sapiens
atttgctgtgctgccttcatacgctccttgctctttcttttctggcagctgtgactcacacaggtcatggagagtatcattccctaagaggaacaactccgatattcatctttatctattaagttcatctgtcccaattctgtgttctgtggatgctgactttctgtcacggacgatgatgcacatggacatttattactgactttcagattcttggatctttgacaagtcttattacttagagtcaaactagtaggatgcgagttataaatgctgattatccaattacctactcaaaataccctacacgaatattccattaaacatgcatcgaaaaacattagtcattcctgctgacctgctgctctttgctctyctgtattcaccagaaaatttcctactccttcctcatgtccaggttaaatactagtgtgcaatctggaaacctgtacatcatctgagatttctctctgtcccccaagcctttctcattcaattatcactaaatcatattgactatacctctcttctgcctctgttttatattcc

SEQ ID NO: 302393 - DNA, 549 bp, Homo sapiens
atttgctgtgctgccttcatacgctccttgctctttcttttctggcagctgtgactcacacaggtcatggagagtatcattccctaagaggaacaactccgatattcatctttatctattaagttcatctgtcccaattctgtgttctgtggatgctgactttctgtcacggacgatgatgcacatggacatttattactgactttcagattcttggatctttgacaagtcttattacttagagtcaaactagtaggatgcgagttataaatgctgattatccaattacctactcaaaataccctacacgaatattccattaaacatgcatcgaaaaacattagtcattcctgctgacctgctgctctttgctctcctgtattcaccagaaaatttcctactccttcctcatgtcyaggttaaatactagtgtgcaatctggaaacctgtacatcatctgagatttctctctgtcccccaagcctttctcattcaattatcactaaatcatattgactatacctctcttctgcctctgttttatattcc

SEQ ID NO: 302394 - DNA, 549 bp, Homo sapiens
atttgctgtgctgccttcatacgctccttgctctttcttttctggcagctgtgactcacacaggtcatggagagtatcattccctaagaggaacaactccgatattcatctttatctattaagttcatctgtcccaattctgtgttctgtggatgctgactttctgtcacggacgatgatgcacatggacatttattactgactttcagattcttggatctttgacaagtcttattacttagagtcaaactagtaggatgcgagttataaatgctgattatccaattacctactcaaaataccctacacgaatattccattaaacatgcatcgaaaaacattagtcattcctgctgacctgctgctctttgctctcctgtattcaccagaaaatttcctactccttcctcatgtccaggttaaatactagtgtrcaatctggaaacctgtacatcatctgagatttctctctgtcccccaagcctttctcattcaattatcactaaatcatattgactatacctctcttctgcctctgttttatattcc

SEQ ID NO: 302395 - DNA, 693 bp, Homo sapiens
tacctactcaaaataccctacacgaatattccattaaacatgcatcgaaaaacattagtcattcctgctgacctgctgctctttgctctcctgtattcaccagaaaatttcctactccttcctcatgtccaggttaaatactagtgtgcaatctggaaacctgtacatcatctgagatttctctctgtcccccaagcctttctcattcaattatcactaaatcatattgactatacctctcttctgcctctgttttatattcccactgccactgggaacacaaacatttacaaaatgacttctatttaaaagaaaactgccaactattaatgttatttcttacaggaaaaaaaattaagcaaaacaagtgaaaaaggcataacgaaggccaacatagtaaaatgagtaactgagatttctaacgttatttatttyaccatggacgggtgaaaaccttgtaatacattgatgctactccaaggatgtgtgacatggaaactatagctgactactgcaaaagcttcctttgtctcctggtttctttgcatgattatctcccatcaatcccaggaaactattagcacaggccaaatccaatctgcattatggttttgtaaataaagttttataggagctcagtcatgcctgtttgcttacatataatcatggtggctttcacactacaacagcaga

SEQ ID NO: 302396 - DNA, 693 bp, Homo sapiens
tacctactcaaaataccctacacgaatattccattaaacatgcatcgaaaaacattagtcattcctgctgacctgctgctctttgctctcctgtattcaccagaaaatttcctactccttcctcatgtccaggttaaatactagtgtgcaatctggaaacctgtacatcatctgagatttctctctgtcccccaagcctttctcattcaattatcactaaatcatattgactatacctctcttctgcctctgttttatattcccactgccactgggaacacaaacatttacaaaatgacttctatttaaaagaaaactgccaactattaatgttatttcttacaggaaaaaaaattaagcaaaacaagtgaaaaaggcataacgaaggccaacatagtaaaatgagtaactgagatttctaacgttatttattttaccatggacgggtgaaaaccttrtaatacattgatgctactccaaggatgtgtgacatggaaactatagctgactactgcaaaagcttcctttgtctcctggtttctttgcatgattatctcccatcaatcccaggaaactattagcacaggccaaatccaatctgcattatggttttgtaaataaagttttataggagctcagtcatgcctgtttgcttacatataatcatggtggctttcacactacaacagcaga

SEQ ID NO: 302397 - DNA, 693 bp, Homo sapiens
tacctactcaaaataccctacacgaatattccattaaacatgcatcgaaaaacattagtcattcctgctgacctgctgctctttgctctcctgtattcaccagaaaatttcctactccttcctcatgtccaggttaaatactagtgtgcaatctggaaacctgtacatcatctgagatttctctctgtcccccaagcctttctcattcaattatcactaaatcatattgactatacctctcttctgcctctgttttatattcccactgccactgggaacacaaacatttacaaaatgacttctatttaaaagaaaactgccaactattaatgttatttcttacaggaaaaaaaattaagcaaaacaagtgaaaaaggcataacgaaggccaacatagtaaaatgagtaactgagatttctaacgttatttattttaccatggacgggtgaaaaccttgtaatacattgatgctactccaaggatgtgtgacatggaaactatagctgactactgcaaaagcttcctttgtctcctggtttctttgcatgattatctcccatcaatcccaggaaactattagcacaggccaaatccaatctgcattatggtttygtaaataaagttttataggagctcagtcatgcctgtttgcttacatataatcatggtggctttcacactacaacagcaga

SEQ ID NO: 302398 - DNA, 600 bp, Homo sapiens
tctacattatggtaagttgtataattattttattatatattacaatgtaataataatataaagtagcacaataagtgtaatgtgactgaacaatcctgaaaccatccccaccttcccccagcccatggaaagattgtcttccacaaaaccggtccctggtgccaaaaagattgtggacaactgacctaaagtaattcactatcacaagtcttacctgggttgctgttttcagaagagtattttggcatctgyttttctttgtagtcagaaagtaattcacaaattctatgtataaaaatataacaaataaaattactgttttaaaatactgatctggaaacttaccaaatgtaaaattcttagagtatttcaaacaatatcagaatatcagaacttaacagtattatcccatccacttatgcgtacgttctacaaacttctcatgaagcttctaattaaagaagaaaaaaaagtaagatgaaatactcataaatcgagggcactttgacccagtaaattaacttgcattagcctgacataatagaaagtgtcccaactctaaataagtcctagctccataatgaacagctatttgctctt

SEQ ID NO: 302399 - DNA, 600 bp, Homo sapiens
tctacattatggtaagttgtataattattttattatatattacaatgtaataataatataaagtagcacaataagtgtaatgtgactgaacaatcctgaaaccatccccaccttcccccagcccatggaaagattgtcttccacaaaaccggtccctggtgccaaaaagattgtggacaactgacctaaagtaattcactatcacaagtcttacctgggttgctgttttcagaagagtattttggcatctgcttttctttgtagtcagaaagtaattcacaaattctatgtataaaaatataacaaataaaattactgttttaaaatactgatctggaaacttaccaaatgtaaaattcttagagtatttcaaacaatatcagaatatcagaacttaacagtattatcccatccacttatgcgtacgttctacaaacttctcatgaagcttctaattaaagaagaaaaaaaagtaagatgaaatactcataaatcgagggcactktgacccagtaaattaacttgcattagcctgacataatagaaagtgtcccaactctaaataagtcctagctccataatgaacagctatttgctctt

SEQ ID NO: 302400 - DNA, 503 bp, Homo sapiens
atgaaatactcataaatcgagggcactttgacccagtaaattaacttgcattagcctgacataatagaaagtgtcccaactctaaataagtcctagctccataatgaacagctatttgctcttgaacaagctgcttctcttaggctyaatgtcttctacaaagtgaggactatgctgccttattttactaggttgttataatgatttaacacgataacatttttttaaatgctcaaagaaatagtaaaacaatggaataatttgttcctaaactttatgactgaaattatcttggaatcccaaataaaacccagtgcgaattttgttcataggttctaatatgcaaatgttgtagttttcaggaaatgttattaagtcctaattttgcttcttagttgtcctactctttatggcttctaattcagggcatctcaactatgtcatagtttgtaactaaattttttcataaatatctcattaaagtagataatgtgattgtccac

SEQ ID NO: 302401 - DNA, 503 bp, Homo sapiens
atgaaatactcataaatcgagggcactttgacccagtaaattaacttgcattagcctgacataatagaaagtgtcccaactctaaataagtcctagctccataatgaacagctatttgctcttgaacaagctgcttctcttaggctcaatgtcttctacaaagtgaggactatgctgccttattttactaggttgttataatgatttaacamgataacatttttttaaatgctcaaagaaatagtaaaacaatggaataatttgttcctaaactttatgactgaaattatcttggaatcccaaataaaacccagtgcgaattttgttcataggttctaatatgcaaatgttgtagttttcaggaaatgttattaagtcctaattttgcttcttagttgtcctactctttatggcttctaattcagggcatctcaactatgtcatagtttgtaactaaattttttcataaatatctcattaaagtagataatgtgattgtccac

SEQ ID NO: 302402 - DNA, 592 bp, Homo sapiens
taatttttaacatacatactaacagtatatttggtacacaacaccccacacgttatttggctctggtgtcatctcacagaccaccttacatgactatttttattgcgcaaatcacaatttcaatgtttttgtggcacccattctgctttgattcacaccatttccttaaagctactcagcaaacagtcaaatgaccttccagtgactgcgcaaaatatagaatgcttcaaaaatttgtgtggccgccttatgcaagggccagctccttgggaggctgaggcaggagaaatgcatgaacccacgttgcaatgaactgagatcgcgccactgyactccagcctgggcgatacagcgagactccatctcaaataaataaaataagataaaataaaatagtaaagtttgcaattcctctgactcagtttaccataatgacaattatgattactattaaagaataaatagtgaataaccacaatattgggcttttctccctaaataaaaaaattaatataaagaatgtagcttattacaaagagccaaaacgattttaaaaatgcagacaattaccaggcaaaactgttaggaaaga

SEQ ID NO: 302403 - DNA, 592 bp, Homo sapiens
taatttttaacatacatactaacagtatatttggtacacaacaccccacacgttatttggctctggtgtcatctcacagaccaccttacatgactatttttattgcgcaaatcacaatttcaatgtttttgtggcacccattctgctttgattcacaccatttccttaaagctactcagcaaacagtcaaatgaccttccagtgactgcgcaaaatatagaatgcttcaaaaatttgtgtggccgccttatgcaagggccagctccttgggaggctgaggcaggagaaatgcatgaacccacgttgcaatgaactgagatcgcgccactgcactccagcctgggcgatacagcgagactccatctcaaataaataaaataagataaaataaaatagtaaagtttgcaattcctctgactcagtttaccataatgacaattatgattactattaaagaataaatagtgaataaccacaatattgggcttttctccctaaataaaaaaattaatataaagaatgtagcttattayaaagagccaaaacgattttaaaaatgcagacaattaccaggcaaaactgttaggaaaga

SEQ ID NO: 302404 - DNA, 379 bp, Homo sapiens
caggtgtagttttcaaattttatataacaatwatatattttaaaggttataaaaattatacacatgtggcattaaaaatgccagactgaggtgttaaattcttaaaactatagaactaaaagtcgccttgaacatttctagattacacataagctgattatcattttattcatgcttatacataaagaccaagaaatactaaaagtttcaaggagagtatttcttgcttgataaaatcagccaattctaggaaaactgatactcatcaaatatacaaaataattgatcacagcaaaatactgggttctattaacaggaataaagtgggagaaatgcagaaaataatcttattttataaatgaaatttttaaaattatat

SEQ ID NO: 302405 - DNA, 379 bp, Homo sapiens
caggtgtagttttcaaattttatataacaattatatattttaaaggttataaaaattatacacatgtggcattaaaaatgccagactgaggtgttaaattcttaaaactatagaactaaaagtcgccttgaacatttctagattacacataagctgattatcattttattcatgcttatrcataaagaccaagaaatactaaaagtttcaaggagagtatttcttgcttgataaaatcagccaattctaggaaaactgatactcatcaaatatacaaaataattgatcacagcaaaatactgggttctattaacaggaataaagtgggagaaatgcagaaaataatcttattttataaatgaaatttttaaaattatat

SEQ ID NO: 302406 - DNA, 379 bp, Homo sapiens
caggtgtagttttcaaattttatataacaattatatattttaaaggttataaaaattatacacatgtggcattaaaaatgccagactgaggtgttaaattcttaaaactatagaactaaaagtcgccttgaacatttctagattacacataagctgattatcattttattcatgcttatacataaagaccaagaaatactaaaagtttcaaggagagtatttcttgcttgataaaatcagccaattctaggaaaactgatactcatcaaatatacaaartaattgatcacagcaaaatactgggttctattaacaggaataaagtgggagaaatgcagaaaataatcttattttataaatgaaatttttaaaattatat

SEQ ID NO: 302407 - DNA, 615 bp, Homo sapiens
tattactttcatgcttcttcatttcttcttcaaccttgagtgggatattaaggatagttatcactttattgaataaaaagaacctttttaattgattctatcaattgactcagtttgtcattattttagtcattaaaaatatttcacacttaaatttgatcatatatatagaaatattaccatataactttaagatgtaattatcatctcattaatatatcacagaaatttttgtaaagtttgcttcatttctgtttcaatgaatgaaacagaattttccaaaattcaaaaagggccctccttcattttgtgcttttattctcaatcactcttcagaatcttatgtatgtatttaccccatttgaytcatgggaacacacaaataaaaagacaaagatgcaaaatgtgtcctcttccgtctttaccacctagattttacattaaacagtcagatttagaggatgacacactgtgcggcttcaggaatagaaaggaagtttgcccttttctgcgctaagatattcttctaccccactgcctttgagcattcttttttcatttggttgctgggatatcaaaaacatgatggtgctcactgaaaatgggagccaaagt

SEQ ID NO: 302408 - DNA, 615 bp, Homo sapiens
tattactttcatgcttcttcatttcttcttcaaccttgagtgggatattaaggatagttatcactttattgaataaaaagaacctttttaattgattctatcaattgactcagtttgtcattattttagtcattaaaaatatttcacacttaaatttgatcatatatatagaaatattaccatataactttaagatgtaattatcatctcattaatatatcacagaaatttttgtaaagtttgcttcatttctgtttcaatgaatgaaacagaattttccaaaattcaaaaagggccctccttcattttgtgcttttattctcaatcactcttcagaatcttatgtatgtatttaccccatttgattcatgggaacacrcaaataaaaagacaaagatgcaaaatgtgtcctcttccgtctttaccacctagattttacattaaacagtcagatttagaggatgacacactgtgcggcttcaggaatagaaaggaagtttgcccttttctgcgctaagatattcttctaccccactgcctttgagcattcttttttcatttggttgctgggatatcaaaaacatgatggtgctcactgaaaatgggagccaaagt

SEQ ID NO: 302409 - DNA, 611 bp, Homo sapiens
ttatctgcttaagtccagttctaatatattctaatgtgtactaattacagtggataaagattttttaayaatatgtactaattttctgcaactgaaataaattagaatgttattgtgtttgtgcactaacaccaaaggttccattctgcaagatatgattcttgtaataggcagctgtgttgcttttatgacctggttccctccctgaacagaaacgctgaggtcaacgagagaccataaggcagaatatatttttaagcttggtatcaatgactgacaatataaaactgcagattttcaatcactggccatgattactccttaaccatgaatccagctcagggaccatcagagttacattgttcataattctattgcttaataacataatccaataattgatgtaccttcttcatcatgttcgggtgttgtaaaaataaaagaacaaagttctgcaatttgtttttgcctctattccaaaaggaaagattagctataagctaatcaaaaaggcagatgagagtattttaaataaaaatattataagagtattttaaattttatagtggttatgttttttaagttaaatatcaaatgttaaattagaatcc

SEQ ID NO: 302410 - DNA, 611 bp, Homo sapiens
ttatctgcttaagtccagttctaatatattctaatgtgtactaattacagtggataaagattttttaacaatatgtactaattttctgcaactgaaataaattagaatgttattgtgtttgtgcactaacaccaaaggttccattctgcaagatatgattcttgtaataggcagctgtgttgcttttatgacctggttccctccctgaacagaaacgctgaggtcaacgagagaccataaggcagaatatatttttaascttggtatcaatgactgacaatataaaactgcagattttcaatcactggccatgattactccttaaccatgaatccagctcagggaccatcagagttacattgttcataattctattgcttaataacataatccaataattgatgtaccttcttcatcatgttcgggtgttgtaaaaataaaagaacaaagttctgcaatttgtttttgcctctattccaaaaggaaagattagctataagctaatcaaaaaggcagatgagagtattttaaataaaaatattataagagtattttaaattttatagtggttatgttttttaagttaaatatcaaatgttaaattagaatcc

SEQ ID NO: 302411 - DNA, 611 bp, Homo sapiens
ttatctgcttaagtccagttctaatatattctaatgtgtactaattacagtggataaagattttttaacaatatgtactaattttctgcaactgaaataaattagaatgttattgtgtttgtgcactaacaccaaaggttccattctgcaagatatgattcttgtaataggcagctgtgttgcttttatgacctggttccctccctgaacagaaacgctgaggtcaacgagagaccataaggcagaatatatttttaagcttggtatcaatgactgacaatataaaactgcagattttcaatcactggccatgattactccttaaccatgaatccagctcagggaccatcagagttacattgttcataattctattgcttaataacataatccaataattgatgtaccttcttcatcatgttcgggtgttgtaaaaataaaagaacaaagttctgmaatttgtttttgcctctattccaaaaggaaagattagctataagctaatcaaaaaggcagatgagagtattttaaataaaaatattataagagtattttaaattttatagtggttatgttttttaagttaaatatcaaatgttaaattagaatcc

SEQ ID NO: 302412 - DNA, 515 bp, Homo sapiens
ctccagacatcccagagcaaggttaagaaaacaaaatcctttactgtctccccttcccctcagcattcactcagagctgtttttacaaatgcatactattygcaagttcctgttgaccttcaatgcagctgcaaggtcataagctttgctgaggttgcaaaactgtcactatatgattaactgcctttgttctgcttctgtaagcttgcctacataagccaagccctgtctttgttcagggctcagctttcggatgcaaatctgctgagctgttgcgaacctaaatgaaatcctcctgtttcacccacttggtctctcctgcctcctgctttctgcaacaatagtaccttacaaatgatttcaaaaattactactgacacctttattagtgtacaatgtcttcccaatatctaaaatgttttcctccactattctgacacatttattttcatttttctttctttctttttttttttttttttgagccagggtcttgctctgtcaccaggctggag

SEQ ID NO: 302413 - DNA, 515 bp, Homo sapiens
ctccagacatcccagagcaaggttaagaaaacaaaatcctttactgtctccccttcccctcagcattcactcagagctgtttttacaaatgcatactattcgcaagttcctgttgaccttcaatgcagctgcaaggtcataagctttgctgaggttgcaaaactgtcactatatgattaactgcctttgttctgcttctgtaagcttgcctacataagccaagccctgtctttgttcagggctcagctttcggatgcaaatctgctgagctgttgcgaacctaaatgaaatcctcctgtttcacccacttggtctctcctgcctcctgctttctgcaacaatagtaccttacaaatgatttcaaaaattactactgacacctttattagtgtacaatgtcttcccaatatctaaaatgtttycctccactattctgacacatttattttcatttttctttctttctttttttttttttttttgagccagggtcttgctctgtcaccaggctggag

SEQ ID NO: 302414 - DNA, 570 bp, Homo sapiens
ggattctgtttggttgcaggctgcaagcggggaaaaaatcaaagtgtatttcacagaaaatgattttttagaagtcagaactatgacatgaagtcaagcagggcactctaggactgaatttgctgtgctgccttcatacgctccttgctcgctcttttctggcagctgtgactcacacaggtcatggagagtatcattccctaaraggaacaactccgatattcatctttatccattaagttcatctgtcccattctatgtctgtggatgctaacttttgatcattgatggtgatacacatggacatttatcatcaactttcagattcttggatctttgacaagtcttattagtgagagtcaaactagtaggatgcgagttataaatgctggttatccaattacctattcaaaatatcctacatgaattttccattaaacgtgcatagaaaaacattagtcattcctgctgacctgctgctctttgctcttctgtattcaccagaaaatttcctccttcgtcctcacatccaggttaaatactactgtacaacctggaaacctggaaatt

SEQ ID NO: 302415 - DNA, 622 bp, Homo sapiens
ttgcttacatataatcatggtggctttcacactacaacagcagacaacagcagggttaagtagatatgacagagaccacatagtctaaaatattgcccamctggccatttacagaaaaagcttgctaacccgttttacaccataaccagaatgccttaatactcaaatttaatcttgtgactcccctgctcaaatttctccaatgagcccctgcagcacacattgttggctccctatcaatagccattccttattctttcttgaagaagaaatccaagtctattgggatatttattatcccaatccccctcctcagcctcagaaacagaaatgtttattctaagctaatcaggtatttaccttcccagtgcctggtttgggaatgagcatgtggtgtgacccagccagtgaaatgttacaggaagccctttgcatgcttctaagttttctccctgtttaaaagacacatgtgaagaaaagcagcccttgcgatgttgtgttgtgagaacaagatgtttggagctgctgcggattagccaaccatgaaaggagacgtgaataaaacactgtcaacagcacagctgaaagagggaaaagtgggatcctaggatatcaatgaaca

SEQ ID NO: 302416 - DNA, 622 bp, Homo sapiens
ttgcttacatataatcatggtggctttcacactacaacagcagacaacagcagggttaagtagatatgacagagaccacatagtctaaaatattgcccacctggccatttacagaaaaagcttgctaacccgttttacaccataaccagaatgccttaatactcaratttaatcttgtgactcccctgctcaaatttctccaatgagcccctgcagcacacattgttggctccctatcaatagccattccttattctttcttgaagaagaaatccaagtctattgggatatttattatcccaatccccctcctcagcctcagaaacagaaatgtttattctaagctaatcaggtatttaccttcccagtgcctggtttgggaatgagcatgtggtgtgacccagccagtgaaatgttacaggaagccctttgcatgcttctaagttttctccctgtttaaaagacacatgtgaagaaaagcagcccttgcgatgttgtgttgtgagaacaagatgtttggagctgctgcggattagccaaccatgaaaggagacgtgaataaaacactgtcaacagcacagctgaaagagggaaaagtgggatcctaggatatcaatgaaca

SEQ ID NO: 302417 - DNA, 622 bp, Homo sapiens
ttgcttacatataatcatggtggctttcacactacaacagcagacaacagcagggttaagtagatatgacagagaccacatagtctaaaatattgcccacctggccatttacagaaaaagcttgctaacccgttttacaccataaccagaatgccttaatactcaaatttaatcttrtgactcccctgctcaaatttctccaatgagcccctgcagcacacattgttggctccctatcaatagccattccttattctttcttgaagaagaaatccaagtctattgggatatttattatcccaatccccctcctcagcctcagaaacagaaatgtttattctaagctaatcaggtatttaccttcccagtgcctggtttgggaatgagcatgtggtgtgacccagccagtgaaatgttacaggaagccctttgcatgcttctaagttttctccctgtttaaaagacacatgtgaagaaaagcagcccttgcgatgttgtgttgtgagaacaagatgtttggagctgctgcggattagccaaccatgaaaggagacgtgaataaaacactgtcaacagcacagctgaaagagggaaaagtgggatcctaggatatcaatgaaca

SEQ ID NO: 302418 - DNA, 622 bp, Homo sapiens
ttgcttacatataatcatggtggctttcacactacaacagcagacaacagcagggttaagtagatatgacagagaccacatagtctaaaatattgcccacctggccatttacagaaaaagcttgctaacccgttttacaccataaccagaatgccttaatactcaaatttaatcttgtgactcccctgctcaaatttctccaatgagcccctgcagcacacattgttggctccctatcaatagccattccttattctttcttgaagaagaaatccaagtctattgggatatttattatcccaatccccctcctcagcctcagaaacagaaatgwttattctaagctaatcaggtatttaccttcccagtgcctggtttgggaatgagcatgtggtgtgacccagccagtgaaatgttacaggaagccctttgcatgcttctaagttttctccctgtttaaaagacacatgtgaagaaaagcagcccttgcgatgttgtgttgtgagaacaagatgtttggagctgctgcggattagccaaccatgaaaggagacgtgaataaaacactgtcaacagcacagctgaaagagggaaaagtgggatcctaggatatcaatgaaca

SEQ ID NO: 302419 - DNA, 503 bp, Homo sapiens
gtgaactgctcagaaaccctgccatgttcactcaagcatcttgtcttttgcacttgctgctcttcctcccaaacaggcaatctcattagatgttccttctggcaaacacacgacctcgctgcatgttccttctgccaaacattcttcttctgcttctttacctagaaaaattcttctctctctgcatgcttaccttaaatcatacctactttttcccaaaactttcattcctcatcacatatgtctggcacataatcaatatataataaatcataattataagcttccagtgggcatctagcacacagtaagcactgaataaagtagtaaaataatgaaaatgacaatgataacaaaaagctcctgtctgtatttttaattgtytgtggtctatagcattagaaaaatggttactatctaaaagacatttgatagttatatgttaagtggacaagtgaaaacataaatagaaatgttttctttgtaaattctgttgaaaaagc

SEQ ID NO: 302420 - DNA, 503 bp, Homo sapiens
gtgaactgctcagaaaccctgccatgttcactcaagcatcttgtcttttgcacttgctgctcttcctcccaaacaggcaatctcattagatgttccttctggcaaacacacgacctcgctgcatgttccttctgccaaacattcttcttctgcttctttacctagaaaaattcttctctctctgcatgcttaccttaaatcatacctactttttcccaaaactttcattcctcatcacatatgtctggcacataatcaatatataataaatcataattataagcttccagtgggcatctagcacacagtaagcactgaataaagtagtaaaataatgaaaatgacaatgataacaaaaagctcctgtctgtatttttaattgtttgtggtctatagcattagaaaaatggttactatctaaaagacatttgatagttatatgttaagtggacaagtgaaaacataaatagmaatgttttctttgtaaattctgttgaaaaagc

SEQ ID NO: 302421 - DNA, 561 bp, Homo sapiens
tttacctagaaaaattcttctctctctgcatgcttaccttaaatcatacctactttttcccaaaactttcattcctcatcacatatgtctggcacataatcaatatataataaatcataattataagcttccagtgggcatctagcacacagtaagcactgaataaagtagtaaaataatgaaaatgacaatgataacaaaaagctcctgtctgtatttttaattgtttgtggtctatagcattagaaaaatggttactatctaaaagacatttgatagttatatgttaagtggacaagtgaaaacataaatagaaatgttttctttgtaaattctgttgaaaaascacagaaatgaaatggagacagctctattatgagcaccttaaagatcaaaactacatctattccatctttgtctcctgcaacttataaaacctaacttacaaaagctctttgataaatagatgactaaattaaacggtgtcctcacacagtttggacaatataatgtattaggtgtccacaaccaggtagcatactagcatttttgttagcgtga

SEQ ID NO: 302422 - DNA, 524 bp, Homo sapiens
tatgactaaaattatcttggaatcccaaataaaacccaatgcgtattttgttcataggttctaatatgcaaatgttgtagttttcagaaaatgttattaagtcctaattttgcttcttagttgtcctactctttatggcttataattcagggcatctcaactatgtcatagtttataactaaatttattcataaatatctcattaaagtagataatgtgattgtccactattacggagttgatcaatcacaccaagggcagaaaaaccaatggatgttaagacctgacttggaccaacgatccttctctacagactcaaactctcagccagtagatgtctgttaggataatgctttatattgatgttcaattccagctgacatgggagaccaaaagtctacttttattttttttttagtttccacggagaagtagcaagctgacattctgtaattttcgacatacatactaacaatatattttgcacsgaacatgttattcagctcaaagtcatctcatagacc

SEQ ID NO: 302423 - DNA, 434 bp, Homo sapiens
gatgttcaattccagctgacatgggagaccaaaagtctacttttattttttttttagtttccacggagaagtagcaagctgacattctgtaattttcgacatacatactaacaatatattttgcacggaacatgttattcagctcaaagtcatctcatagaccatcttacatgactatttttgcagcacaaatcacaatttcaatatttgggtggcacccattttgctttgattcacactatttcctcagagctagtcagcaaaaatagtcaaatgaccttccagtgactgcacaaaatatggaatgcttcaaagatctgtsctgcctccttatgcagaagccacgctaactttccccgtattgttccaattttaggatatgtgccgccgaagcaagcacaaagccctacttttacatatgattagtgatgcgt

SEQ ID NO: 302424 - DNA, 552 bp, Homo sapiens
tacttctaacttgtcttgctttttgtctgatttctggctgatgcaggggactaaaactcactgccacgcgaaaactacctgaaccaaactatgacatctcacctgatatgtgagatgcaactgttataattattttaaacctcaattcagcattaactagccttttaatgtaaacacttacacatgatgatgactagaaacagcatactctctggccgtctgtccagatagatcttgagaagatacatcaatattttgctcaagtagaaggctgactatacttgctgatccacaacatacagcaagtatgagagcagtyctaaaatgacagagataggaactgtaataaagttatttttaaagctaatttgatatactttaccaatgtaacatcttgcctgtctgtgcagaatcaaacatttacatgcactaaaagacataagcaacctgagtgctcaagtgttcatctttgtaaaatgccaccaaggttaaaaggaagggaccaaaaaaaaccctcttatctcagtggggtattgcatagcagaagctact

SEQ ID NO: 302425 - DNA, 420 bp, Homo sapiens
aattattttaaacctcaattcagcattaactagccttttaatgtaaacacttacacatgatgatgactagaaacagcatactctctggccgtctgtccagatagatcttgagaagatacatcaatattttgctcaagtagaaggctgactatacttgctgatccacaacatacagcaagtatgagagcagttctaaaatgacagagataggaactgtaataaagttatttttaaagctaatttgatatactttaccaatgtaacatcttgcctgtctgtgcagaatcaaacatttacatgcactaaaagacataagcawcctgagtgctcaagtgttcatctttgtaaaatgccaccaaggttaaaaggaagggaccaaaaaaaaccctcttatctcagtggggtattgcatagcagaag

SEQ ID NO: 302426 - DNA, 420 bp, Homo sapiens
aattattttaaacctcaattcagcattaactagccttttaatgtaaacacttacacatgatgatgactagaaacagcatactctctggccgtctgtccagatagatcttgagaagatacatcaatattttgctcaagtagaaggctgactatacttgctgatccacaacatacagcaagtatgagagcagttctaaaatgacagagataggaactgtaataaagttatttttaaagctaatttgatatactttaccaatgtaacatcttgcctgtctgtgcagaatcaaacatttacatgcactaaaagacataagcaacytgagtgctcaagtgttcatctttgtaaaatgccaccaaggttaaaaggaagggaccaaaaaaaaccctcttatctcagtggggtattgcatagcagaag

SEQ ID NO: 302427 - DNA, 420 bp, Homo sapiens
aattattttaaacctcaattcagcattaactagccttttaatgtaaacacttacacatgatgatgactagaaacagcatactctctggccgtctgtccagatagatcttgagaagatacatcaatattttgctcaagtagaaggctgactatacttgctgatccacaacatacagcaagtatgagagcagttctaaaatgacagagataggaactgtaataaagttatttttaaagctaatttgatatactttaccaatgtaacatcttgcctgtctgtgcagaatcaaacatttacatgcactaaaagacataagcaacctgagtgctcaagtgttcatctttgtaaaatrccaccaaggttaaaaggaagggaccaaaaaaaaccctcttatctcagtggggtattgcatagcagaag

SEQ ID NO: 302428 - DNA, 617 bp, Homo sapiens
tttttgattcgatatcagcaccatataagagcagtgctttggccattaatttatcttcattatagatagcgtagtgcagagtggtatttccatactcatctggaatatttggatcagtgccatgttccagcaacattaacgcacattcatcttcctggcattgtacggcctgtcagtattagaccaaaaacaaattacawatcttaggaattcaaaataacattccacagctttcaccaactagttatatttaaaggagaaaactcatttttatgccatgtattgaaatcaaacccacctcatgctgatatagttggctactgcatacctttatcagagctgtcctctttttgttgtcaaggacattaagttgacatcgtctgtccagcaggagttttactacttctgaattcccattggcagaggccagatgtagagcagtcctatgagagtgagaagactttttaggaaattgtagtgcactagctacagccatagcaatgattcatgtaactgcaaacactgaatagcctgctattactctgccttcaaaacaaacatttaactttcccatgaaaaaagcacactatttattatctctcattgctcgctgtatt

SEQ ID NO: 302429 - DNA, 550 bp, Homo sapiens
ggttaggtctacctagtaccaggcctcccctcccacgattcaaagactgaatgagtgtccagcatcaggaactctgttctggacctgttttttcatttaggtcaccaagggacaacccctaacccgagctagggatggtccaagctctggcatgagattttcctccagcaatgtgatgcttacagggacaggtagaaaagctggtgaccaggcctgctgtcctctggktaaggagtgtgccacccaccctctgagaggcaggtggtgccaggccacagcactgggtgcctgtacccctggctctgcagacaccggtcatggaggtccctccctccacattaccttcttgctgctcctagatttcttctagtcattaagcactttgagtcacttttctgtgcatccaattttacatttttgctctcagatgaaacaggataaagtatgctgagctgccaggattcctggaggggaccttggatgctgagtcttgggatccagggccctgatgggactgaatcagaaggagccagggaaagacaaagattgg

SEQ ID NO: 302430 - DNA, 550 bp, Homo sapiens
ggttaggtctacctagtaccaggcctcccctcccacgattcaaagactgaatgagtgtccagcatcaggaactctgttctggacctgttttttcatttaggtcaccaagggacaacccctaacccgagctagggatggtccaagctctggcatgagattttcctccagcaatgtgatgcttacagggacaggtagaaaagctggtgaccaggcctgctgtcctctggttaaggagtgtgccacccaccctctgagakgcaggtggtgccaggccacagcactgggtgcctgtacccctggctctgcagacaccggtcatggaggtccctccctccacattaccttcttgctgctcctagatttcttctagtcattaagcactttgagtcacttttctgtgcatccaattttacatttttgctctcagatgaaacaggataaagtatgctgagctgccaggattcctggaggggaccttggatgctgagtcttgggatccagggccctgatgggactgaatcagaaggagccagggaaagacaaagattgg

SEQ ID NO: 302431 - DNA, 550 bp, Homo sapiens
ggttaggtctacctagtaccaggcctcccctcccacgattcaaagactgaatgagtgtccagcatcaggaactctgttctggacctgttttttcatttaggtcaccaagggacaacccctaacccgagctagggatggtccaagctctggcatgagattttcctccagcaatgtgatgcttacagggacaggtagaaaagctggtgaccaggcctgctgtcctctggttaaggagtgtgccacccaccctctgagaggcaggtggtgccaggccacagcactgggtgcctgtacccctggctctgcagacaccggtcatggaggtccctccctccacattaccttcttgctgctcctagatttcttctagtcattaagcactttgagtcacttttctgtgcatccaattttacatttttgctctcagatgaaacagrataaagtatgctgagctgccaggattcctggaggggaccttggatgctgagtcttgggatccagggccctgatgggactgaatcagaaggagccagggaaagacaaagattgg

SEQ ID NO: 302432 - DNA, 360 bp, Homo sapiens
agtgaaacaacaataaaaccccaaacataaacaaaaagagttaagcaaaacaaacaaatgcacaattcatatgattaactgagtgttctaatggtaaggaggaattaaaagcagctggtgggtaatcttaaattttagtcattaarcaaaaattttaagacaaaactctaattcagctacttacctggaaataaggctcagactgggtgatcattctctgccatcttagaagctggaaaaacttacactcaccttccctgtcagaagcaagctgaaactcaggaaaggaggtgcctgctctcctttgtcaatggaagcaggaaaacttgccttccttgttggaaatgagtaaaacttcaa

SEQ ID NO: 302433 - DNA, 360 bp, Homo sapiens
agtgaaacaacaataaaaccccaaacataaacaaaaagagttaagcaaaacaaacaaatgcacaattcatatgattaactgagtgttctaatggtaaggaggaattaaaagcagctggtgggtaatcttaaattttagtcattaaasaaaaattttaagacaaaactctaattcagctacttacctggaaataaggctcagactgggtgatcattctctgccatcttagaagctggaaaaacttacactcaccttccctgtcagaagcaagctgaaactcaggaaaggaggtgcctgctctcctttgtcaatggaagcaggaaaacttgccttccttgttggaaatgagtaaaacttcaa

SEQ ID NO: 302434 - DNA, 494 bp, Homo sapiens
ttcaaaaaaaaaagtctggccacgtttttatagagcagctgtgctgtgctgggggttcacttcagcccctggtccgcctcagacactctgaagccctaaggctgaaatggctgggtcrcccaaacagcaaagatgacaatctggtcctccccctgggagctctgactcagggaggcctgagacctctgtcggccagagaacagcagtcaaggtagccagagaccctggttgaaagacttcacccgctgactagaaatgtgatcagggactgacgtaaacaagagtctggccacgtttttgtagcgtggctgtgctgtgctgaggtacctcttccaccccttgtcagcttgggctctccaaagcccgcaggccagaatggctagtcaccgaaagagcaaaggtgggggcctgcccctctccgggagctctgtcccaggaacatttcacatttccattggccaaggaatgctggtgggggtagctggaggccccag

SEQ ID NO: 302435 - DNA, 494 bp, Homo sapiens
ttcaaaaaaaaaagtctggccacgtttttatagagcagctgtgctgtgctgggggttcacttcagcccctggtccgcctcagacactctgaagccctaaggctgaaatggctgggtcgcccaaacagcaaagatgacaatctggtcctccccctgggagctctgactcagggaggcctgagacctctgtcggccagagaacagcagtcaaggtagccagagaccctggttgaaagacttcacccgctgactagaaatgtgrtcagggactgacgtaaacaagagtctggccacgtttttgtagcgtggctgtgctgtgctgaggtacctcttccaccccttgtcagcttgggctctccaaagcccgcaggccagaatggctagtcaccgaaagagcaaaggtgggggcctgcccctctccgggagctctgtcccaggaacatttcacatttccattggccaaggaatgctggtgggggtagctggaggccccag

SEQ ID NO: 302436 - DNA, 494 bp, Homo sapiens
ttcaaaaaaaaaagtctggccacgtttttatagagcagctgtgctgtgctgggggttcacttcagcccctggtccgcctcagacactctgaagccctaaggctgaaatggctgggtcgcccaaacagcaaagatgacaatctggtcctccccctgggagctctgactcagggaggcctgagacctctgtcggccagagaacagcagtcaaggtagccagagaccctggttgaaagacttcacccgctgactagaaatgtgatcagggactgacgtaaacaagagtctggccacgtttttgtagcgtggctgtgctgtgctgaggtacctcttccaccccttgtcagcttgggctctccaaagcccgcaggccagaatggctagtcaccraaagagcaaaggtgggggcctgcccctctccgggagctctgtcccaggaacatttcacatttccattggccaaggaatgctggtgggggtagctggaggccccag

SEQ ID NO: 302437 - DNA, 596 bp, Homo sapiens
cctaatttacctgacagttggaatttccaggccatgttgaaaatacagattatccagactcttacttctgcagatgtatttagtggttctaaaatggcacccaggagtctggatttttccyaggggccttgtgtaattcacactgatgaccaggcaagtttgggaaattgtgccttaaggagatttttcattaagcagtcttcatttgaaaagaggatcatttatcttctaataccccatgcttcctctttctcctgctctctttgtctcctgttgtttttcagttcctagaagctttaattgaatgaaagttcctagtagatctgtacctactaaaaaccacacttctgaagctacgtggccaccagaagacacagctagtctgccatgtaaaaaaggaaaggtggcgtgtgccctgaaggcgcaggggtgagaggcagggaaatggagaccccaacagccagcatcagtggccctcatcacagccctccaggagatatcaaaggaggtcagaccttggacagtagtcttgacttcctgctatagaacacattgttaacactgaaaaagatgatctgttctaggggaatggtgaa

SEQ ID NO: 302438 - DNA, 596 bp, Homo sapiens
cctaatttacctgacagttggaatttccaggccatgttgaaaatacagattatccagactcttacttctgcagatgtatttagtggttctaaaatggcacccaggagtctggatttttcctaggggccttgtgtaattcacactgatgaccaggcaagtttgggaaattgtgccttaaggagatttttcattaagcagtcttcatttgaaaagaggatcatttatcttctaataccccatgcttcctctttctcctgctctctttgtctcctgttgtytttcagttcctagaagctttaattgaatgaaagttcctagtagatctgtacctactaaaaaccacacttctgaagctacgtggccaccagaagacacagctagtctgccatgtaaaaaaggaaaggtggcgtgtgccctgaaggcgcaggggtgagaggcagggaaatggagaccccaacagccagcatcagtggccctcatcacagccctccaggagatatcaaaggaggtcagaccttggacagtagtcttgacttcctgctatagaacacattgttaacactgaaaaagatgatctgttctaggggaatggtgaa

SEQ ID NO: 302439 - DNA, 596 bp, Homo sapiens
cctaatttacctgacagttggaatttccaggccatgttgaaaatacagattatccagactcttacttctgcagatgtatttagtggttctaaaatggcacccaggagtctggatttttcctaggggccttgtgtaattcacactgatgaccaggcaagtttgggaaattgtgccttaaggagatttttcattaagcagtcttcatttgaaaagaggatcatttatcttctaataccccatgcttcctctttctcctgctctctttgtctcctgttgtttttcagttcctagaagctttaattgaatgaaagttcctagtagatctgtacctactaaaaaccacacttctgaagctacgtggccaccagaagacacagctagtctgccatgtaaaaaaggaaaggtggcgtgtgccctgaaggcgcaggggtgagaggcagggaaatggagaccccmacagccagcatcagtggccctcatcacagccctccaggagatatcaaaggaggtcagaccttggacagtagtcttgacttcctgctatagaacacattgttaacactgaaaaagatgatctgttctaggggaatggtgaa

SEQ ID NO: 302440 - DNA, 327 bp, Homo sapiens
cccaacagccagcatcagtggccctcatcacagccctccaggagatatcaaaggaggtcagaccttggacagtagtcttgacttcctgctatagaacacattgttaacactgaaaaagatgatctgttctaggggaatggtgaaagctgactctagcacttgtrctttttgtttgtttgtttgagatttgagtcttgctcttgtttcccaggctgcagtgcaatgcgtgatctcagctcactgcaggctctgcctcctgggttccagctattgtcctgcctcagcctcccgagtagctgggattccaggtgcccgcaagtgtgcctg

SEQ ID NO: 302441 - DNA, 327 bp, Homo sapiens
cccaacagccagcatcagtggccctcatcacagccctccaggagatatcaaaggaggtcagaccttggacagtagtcttgacttcctgctatagaacacattgttaacactgaaaaagatgatctgttctaggggaatggtgaaagctgactctagcacttgtgctttttgtttgtttgtttgagatttgagtcttgctcttgtttcccaggctgsagtgcaatgcgtgatctcagctcactgcaggctctgcctcctgggttccagctattgtcctgcctcagcctcccgagtagctgggattccaggtgcccgcaagtgtgcctg

SEQ ID NO: 302442 - DNA, 327 bp, Homo sapiens
cccaacagccagcatcagtggccctcatcacagccctccaggagatatcaaaggaggtcagaccttggacagtagtcttgacttcctgctatagaacacattgttaacactgaaaaagatgatctgttctaggggaatggtgaaagctgactctagcacttgtgctttttgtttgtttgtttgagatttgagtcttgctcttgtttcccaggctgcagtgcaatgsgtgatctcagctcactgcaggctctgcctcctgggttccagctattgtcctgcctcagcctcccgagtagctgggattccaggtgcccgcaagtgtgcctg

SEQ ID NO: 302443 - DNA, 555 bp, Homo sapiens
tggctaatttttatgtttttagtagagatgggatttcgccatcttggccaggctgttctccacctcctgaccttggccaaagtgttgggattacaggcataagccattgtgccmggcctgtgtttttaatttcatcatggcacagcttcaaaatgacatctaagtagctgacataaaaatgaaaattctgtgtactttgatattagcaggcttcaaatacaaaccagaatatgagtaaattgtttcttagccaaactgaataattttcacattggcaggccattggtaggctattcagcatctggctcatgtttgggccaagctgggtgcctcatgaaagtctggagggaaatacagagggcaattctccataagcattaggctcagaaatatcctgcttcccagtgaaaagtttaagttgactttcacgccaccttcatcaaaccgaggttggtcaacacttttcaccactgccactggacactttgacttccaattttgctacctgctgtacaaagatacccccttctttcctttcctgcattctccctacaa

SEQ ID NO: 302444 - DNA, 555 bp, Homo sapiens
tggctaatttttatgtttttagtagagatgggatttcgccatcttggccaggctgttctccacctcctgaccttggccaaagtgttgggattacaggcataagccattgtgccaggcctgtgtttttaatttcatcrtggcacagcttcaaaatgacatctaagtagctgacataaaaatgaaaattctgtgtactttgatattagcaggcttcaaatacaaaccagaatatgagtaaattgtttcttagccaaactgaataattttcacattggcaggccattggtaggctattcagcatctggctcatgtttgggccaagctgggtgcctcatgaaagtctggagggaaatacagagggcaattctccataagcattaggctcagaaatatcctgcttcccagtgaaaagtttaagttgactttcacgccaccttcatcaaaccgaggttggtcaacacttttcaccactgccactggacactttgacttccaattttgctacctgctgtacaaagatacccccttctttcctttcctgcattctccctacaa

SEQ ID NO: 302445 - DNA, 434 bp, Homo sapiens
tcgccatcttggccaggctgttctccacctcctgaccttggccaaagtgttgggattacaggcataagccattgtgccaggcctgtgtttttaatttcatcatggcacagcttcaaaatgacatctaagtagctgacataaaaatgaaaattctgtgtactttgatattagcaggcttcaaatacaaaccagaatatgagtaaattgtttcttarccaaactgaataattttcacattggcaggccattggtaggctattcagcatctggctcatgtttgggccaagctgggtgcctcatgaaagtctggagggaaatacagagggcaattctccataagcattaggctcagaaatatcctgcttcccagtgaaaagtttaagttgactttcacgccaccttcatcaaaccgaggttggtcaacacttttcacc

SEQ ID NO: 302446 - DNA, 434 bp, Homo sapiens
tcgccatcttggccaggctgttctccacctcctgaccttggccaaagtgttgggattacaggcataagccattgtgccaggcctgtgtttttaatttcatcatggcacagcttcaaaatgacatctaagtagctgacataaaaatgaaaattctgtgtactttgatattagcaggcttcaaatacaaaccagaatatgagtaaattgtttcttagccaaactgaataattttcacattggcaggccattggtaggcyattcagcatctggctcatgtttgggccaagctgggtgcctcatgaaagtctggagggaaatacagagggcaattctccataagcattaggctcagaaatatcctgcttcccagtgaaaagtttaagttgactttcacgccaccttcatcaaaccgaggttggtcaacacttttcacc

SEQ ID NO: 302447 - DNA, 555 bp, Homo sapiens
tggctaatttttatgtttttagtagagatgggatttcgccatcttggccaggctgttctccacctcctgaccttggccaaagtgttgggattacaggcataagccattgtgccaggcctgtgtttttaatttcatcatggcacagcttcaaaatgacatctaagtagctgacataaaaatgaaaattctgtgtactttgatattagcaggcttcaaatacaaaccagaatatgagtaaattgtttcttagccaaactgaataattttcacattggcaggccattggtaggctattcagcatctggctcatgtttgggccaagcygggtgcctcatgaaagtctggagggaaatacagagggcaattctccataagcattaggctcagaaatatcctgcttcccagtgaaaagtttaagttgactttcacgccaccttcatcaaaccgaggttggtcaacacttttcaccactgccactggacactttgacttccaattttgctacctgctgtacaaagatacccccttctttcctttcctgcattctccctacaa

SEQ ID NO: 302448 - DNA, 555 bp, Homo sapiens
tggctaatttttatgtttttagtagagatgggatttcgccatcttggccaggctgttctccacctcctgaccttggccaaagtgttgggattacaggcataagccattgtgccaggcctgtgtttttaatttcatcatggcacagcttcaaaatgacatctaagtagctgacataaaaatgaaaattctgtgtactttgatattagcaggcttcaaatacaaaccagaatatgagtaaattgtttcttagccaaactgaataattttcacattggcaggccattggtaggctattcagcatctggctcatgtttgggccaagctgggtgcctcatgaaagtctggagggaaatacagaggscaattctccataagcattaggctcagaaatatcctgcttcccagtgaaaagtttaagttgactttcacgccaccttcatcaaaccgaggttggtcaacacttttcaccactgccactggacactttgacttccaattttgctacctgctgtacaaagatacccccttctttcctttcctgcattctccctacaa

SEQ ID NO: 302449 - DNA, 297 bp, Homo sapiens
gagcaaacgttatcataagacagtgtgtccactacttactctctaacagatttmctcataaaccactaggcttgccaacttgttgaatgagataaaattggagggtcaggggatgggaaatgcatatgcttcttagtatttcattccataaatacataaataatgaaaccattaatgatatcatcatgttgattcaataagtttgaaagcaaaattgatagtaatctttggaagaaattgtatatgtgtctatgtatgtacatacatagacatacatattgctttctgaaattttca

SEQ ID NO: 302450 - DNA, 297 bp, Homo sapiens
gagcaaacgttatcataagacagtgtgtccactacttactctctaacagatttactcataaaccactaggcttgccaacttgttgaatgagataaaattggagggtcaggggakgggaaatgcatatgcttcttagtatttcattccataaatacataaataatgaaaccattaatgatatcatcatgttgattcaataagtttgaaagcaaaattgatagtaatctttggaagaaattgtatatgtgtctatgtatgtacatacatagacatacatattgctttctgaaattttca

SEQ ID NO: 302451 - DNA, 555 bp, Homo sapiens
acatattgctttctgaaattttcaatgactttatgcttcttctgaagcaattcgagtttagwatttgagacccctgggtcaaaacatcttcttgagtatactgaagaacatttggattaatttcagacacgtattttggtttatatagtgttttttatccatggtaacttatttactgtttaaaaacatattgagaacaaacagcagcagcaaccctgaattgagtgaaagtcctgagagagctttgcccaatcagtgcatgtgcatgtttacactaatctcctgtctgaacctaggaactggctgaatgagctagcagatggcctgtctggctgcattataaatgataatttatttttatttgttttactcattcattcattttgagacagggtctcactctgtcatccaggctagagtatggtgacacaattatggctcactgcagccttcaactctcaggctcaagcaatcctcctgcctcagcctcctgaatagctgggactacaggtgcacaccaccatgcccagctaatttttaaacctttttttgtag

SEQ ID NO: 302452 - DNA, 555 bp, Homo sapiens
acatattgctttctgaaattttcaatgactttatgcttcttctgaagcaattcgagtttagaatttgagacccctgggtcaaaacatcttcttgagtatactgaagaacatttggattaatttcagacacgtattwtggtttatatagtgttttttatccatggtaacttatttactgtttaaaaacatattgagaacaaacagcagcagcaaccctgaattgagtgaaagtcctgagagagctttgcccaatcagtgcatgtgcatgtttacactaatctcctgtctgaacctaggaactggctgaatgagctagcagatggcctgtctggctgcattataaatgataatttatttttatttgttttactcattcattcattttgagacagggtctcactctgtcatccaggctagagtatggtgacacaattatggctcactgcagccttcaactctcaggctcaagcaatcctcctgcctcagcctcctgaatagctgggactacaggtgcacaccaccatgcccagctaatttttaaacctttttttgtag

SEQ ID NO: 302453 - DNA, 555 bp, Homo sapiens
acatattgctttctgaaattttcaatgactttatgcttcttctgaagcaattcgagtttagaatttgagacccctgggtcaaaacatcttcttgagtatactgaagaacatttggattaatttcagacacgtattttggtttatatagtgttttttatccatggtaacttatttactgtttaaaaacatattgagaacaaacagcagcagcaaccctgaattgagtgaaagtcctgagagagctttgcccaatcagtgcatgtgcatgtttacactaatctcctgtctgaacctaggaactggctgaatgagctagcagatggcctgtctggctgcattataaatgataatttatttttatttgttttactcattcattcattttgagacagggtctcactctgtcatccaggctagagtatggtgacacaattatggctcactgcagccttcaactctcaggctcaagcaatcctcctgcctcagcctcctgartagctgggactacaggtgcacaccaccatgcccagctaatttttaaacctttttttgtag

SEQ ID NO: 302454 - DNA, 649 bp, Homo sapiens
attacagtgagccaagattgtgccactgcactccagcctgggcgacaagagtaagacttcatttcaaaacagcaacaacaacaacaacaaacaacaagaacaacaacaacaaaacccaacattttctaatacaaggaaactcactaagctttataaggcccccatccctccaagtattatcctttccggctgccccaacattaatgacagcaactggtactagccatctgacatacaatcccagtacatttttgggctctgatgttttctaggaattttttctttacagacttattgaaattaagctctattccctsaagacctggttttcataaactgtatagttttgcagttgaggggaaatggtcttaggtcagtcaatccactgttgacacagaaatgaaatgaggtaacggtaggattattgttaagattgagagatgtatgaatcatcctatgctctttcccagcccccaggtgaccatataattaaaatatccttgatatttctatgtagtttaagtttttaattctagaacccctcaatctttctctattcaacttaaatgaaaagacatttagtatccagaagacactcagcactcagaagcaaaggaagaaaaatggaaacataatggtcaatgcccat

SEQ ID NO: 302455 - DNA, 563 bp, Homo sapiens
gtgtattcttctcatcttcttgttcctcttcattttcttttgctgctgcttctatttcatgtttctattcttgtttctcctcctctttttgttttctttatgccaagcaatggccttaacaaacaacaagccaaaattgtcactgtgttgtatttttaaaataactggtcctttactatgttttagggatgaggaaaaaaatcagttgtataattagttacttgaatagctatgctttcaygattgtgttaaaccacttatgcctagtgttccattattggaatggtaagcatgagggagttaattacatcctactgctcaaggtcattagaaggtttgatttttcactcgtgcaaaaattcaaaaaattgcagcctctggcataaatgggctaatgcgttgtaagtagttattcagagaatcaaaaaatgaagcatcacataaaaatattggtggcaaacagccatttcatctctctcacatatttggagctatgcaggagtcacggggtaagttctaatttatgagattattaagtgaactgtattgccttcattttctct

SEQ ID NO: 302456 - DNA, 563 bp, Homo sapiens
gtgtattcttctcatcttcttgttcctcttcattttcttttgctgctgcttctatttcatgtttctattcttgtttctcctcctctttttgttttctttatgccaagcaatggccttaacaaacaacaagccaaaattgtcactgtgttgtatttttaaaataactggtcctttactatgttttagggatgaggaaaaaaatcagttgtataattagttacttgaatagctatgctttcacgattgtgttaaaccacttatgcctagtgttccattattggaatggtaagcatgagggagttaattacatcctactgctcaaggtcattagaaggtttgatttttcactcgtgcaaaaattcaaaaaattgcagcctctggcataaatgggctaatgcgttrtaagtagttattcagagaatcaaaaaatgaagcatcacataaaaatattggtggcaaacagccatttcatctctctcacatatttggagctatgcaggagtcacggggtaagttctaatttatgagattattaagtgaactgtattgccttcattttctct

SEQ ID NO: 302457 - DNA, 611 bp, Homo sapiens
aacaaggtaataaataagcatatctgttaatatcacctttggtcaactcttggctagacccaatgataatgtaggaattaacataatttttctactaaaggtgttggatttgttccgagagaccacagttcaaagtcattgacaaagaaagtttaaaaattgttagattaaaaccttttagtgtgtttgaaattgttttgtagaaaaatatcctggtttgcattgataggtttttttttaaataacaactagaccaagagaaagggagagtagtgataaatgtccatgttttcgagttgaaaagtaacaatcagtgtattacaacagatggatttgatgtcaaattacaaatgctgagaacgttatatgtaactgacttgccagagtaattatacaaggcaaagaaaggaaaggcatctaaataggaagggaaggggtgagattgtctgtgttttagactccacaaaaaacccattacagctgataaacactatattcaataaagttgagagttacaaaattaacattggyttctatacaccaatgacaaactgttatctgaaaaataaggtaattccatttataatagcaacaaaacaaatatataagta

SEQ ID NO: 302458 - DNA, 611 bp, Homo sapiens
aacaaggtaataaataagcatatctgttaatatcacctttggtcaactcttggctagacccaatgataatgtaggaattaacataatttttctactaaaggtgttggatttgttccgagagaccacagttcaaagtcattgacaaagaaagtttaaaaattgttagattaaaaccttttagtgtgtttgaaattgttttgtagaaaaatatcctggtttgcattgataggtttttttttaaataacaactagaccaagagaaagggagagtagtgataaatgtccatgttttcgagttgaaaagtaacaatcagtgtattacaacagatggatttgatgtcaaattacaaatgctgagaacgttatatgtaactgacttgccagagtaattatacaaggcaaagaaaggaaaggcatctaaataggaagggaaggggtgagattgtctgtgttttagactccacaaaaaacccattacagctgataaacactatattcaataaagttgagagttacaaaattaacattggcttcyatacaccaatgacaaactgttatctgaaaaataaggtaattccatttataatagcaacaaaacaaatatataagta

SEQ ID NO: 302459 - DNA, 573 bp, Homo sapiens
  misc_feature (1)...(573): n = A,T,C or G
ctgataaacactatattcaataaagttgagagttacaaaattaacattggcttctatacaccaatgacaaactgttatctgaaaaataaggtaattccatttataatagcaacaaaacaaatatataagtaaatcaaagagcaaggagtaattttaatgaaggatgtgaacgatttgtatactgaaaattatagcacattgatgaaagaaattgaaagtgacaaatagaaaaagtcctatatcaattgaaaaaattaatattgtcaaaatttcaatgctactcaaagcattctacagattaaatgcaaccgctgtcaaattccaatgtcattcttcacagaaatagaaaaattagtcctaaaatctgaatggaaccacaaaagatgctgaaaaacsaaagcaatctttagcaaaaagaacaaacctggaggcatcagactacctaatctttgacaaagcaaacaagaaaatgggaaaggacaccctattcaacatatgctgctggtataattggcaagcacatgcagancaatgaagccgttcttcaaaggttaaatacagaatgaccacatg

SEQ ID NO: 302460 - DNA, 470 bp, Homo sapiens
ggatatatagaatatatacacacatatatatgacttaaaaatcctttatatttccaaaatacagttctttaaaatatacacacatataaaaacatttgaaaataactaaagaaaatacctcagaattcattttttcaaccacttctatctgcttttcttcatgaatcagaatctcatcgtgtaatattccagtgttctgttcttcacaaaattgcttctgagtatcattttgttcgtcactagaagaaattttaattttcatgaaatactggagctgtccctaaaatgatgtacagggcaagatggcgccatcagatgtcattcacacaatgcatatctgcacattattccaagacaaggcaaaggggtctcacatctgttaaccaggtgtccccaaccatgctggcaccagggactgsttttgtggaagataatttttccaggaacctgaggtgggggatggttccagg

SEQ ID NO: 302461 - DNA, 512 bp, Homo sapiens
aactatctcttcaccaatgatattatcccatacctagaaaaccctaaagactcctacaaaacactcctagatttgatacatgaattcagtaaagtctcagaggttacaaaataaatgaataccaatcagtagcaccactatacaycaactacaaccaagctgagagttcatatcaacaatccaatcccttttacagtggctgcaaaaaggtgtgaagtacctaggaatatacttaatgaaaaaagtgagtgatctatataaagataactggaaaacaccaccaaagaaaataacagatgacacaaacaaatgaaaatacatcctatgttcatggactgaaagaactgatatagtgaaaatgaccatagtgcccaaagcagtctacacattctatacaatacctaccaaagtaccaatgtcattcttcacagaattattttaaaatgctgacattcatgtagaaccacaaaagagcctgaacagcaacagacataccaagcaaaaggaacaaa

SEQ ID NO: 302462 - DNA, 512 bp, Homo sapiens
aactatctcttcaccaatgatattatcccatacctagaaaaccctaaagactcctacaaaacactcctagatttgatacatgaattcagtaaagtctcagaggttacaaaataaatgaataccaatcagtagcaccactatacatcaactacaaccaagctgagagttcatatcaacaatccaatcccttttacagtggctgcaaaaargtgtgaagtacctaggaatatacttaatgaaaaaagtgagtgatctatataaagataactggaaaacaccaccaaagaaaataacagatgacacaaacaaatgaaaatacatcctatgttcatggactgaaagaactgatatagtgaaaatgaccatagtgcccaaagcagtctacacattctatacaatacctaccaaagtaccaatgtcattcttcacagaattattttaaaatgctgacattcatgtagaaccacaaaagagcctgaacagcaacagacataccaagcaaaaggaacaaa

SEQ ID NO: 302463 - DNA, 512 bp, Homo sapiens
aactatctcttcaccaatgatattatcccatacctagaaaaccctaaagactcctacaaaacactcctagatttgatacatgaattcagtaaagtctcagaggttacaaaataaatgaataccaatcagtagcaccactatacatcaactacaaccaagctgagagttcatatcaacaatccaatcccttttacagtggctgcaaaaaggtgtgaagyacctaggaatatacttaatgaaaaaagtgagtgatctatataaagataactggaaaacaccaccaaagaaaataacagatgacacaaacaaatgaaaatacatcctatgttcatggactgaaagaactgatatagtgaaaatgaccatagtgcccaaagcagtctacacattctatacaatacctaccaaagtaccaatgtcattcttcacagaattattttaaaatgctgacattcatgtagaaccacaaaagagcctgaacagcaacagacataccaagcaaaaggaacaaa

SEQ ID NO: 302464 - DNA, 602 bp, Homo sapiens
ccagatggtttactgcctttcagttattaggaggaactctgccacatactcagagtgaaataggaggcaatcagaagggcwggggcagaggaatgacaacatttgacttatgttttaaatacatccactgagataagaattgatgaaaggggaagtttttaaaaaccaggactatcaattcccgtctatgacactcatctaaactgcagatgacggtggctcagatgtacaagatagactggcctctggatatattcttcagatagacctgacaagatttactgagagattagatgtgaagtgtcaggacagagagaaagatcagtcaagaagatcttgactgagagagaaagatcagacactgaggtttttggcagagcaactggaagagttgctgttaaccaaagtaggaaagactacatgaggtgtagatttcaggaaggacatcagtagcccaattttggatctgacaagtgtgtgatacccaacagctaatcaaatagagatgtcaagtaggtgggatgatatagagatctggaattaaggaaagagatctaagttggagacatacatttggaaatcactagcatatacacagtaga

SEQ ID NO: 302465 - DNA, 528 bp, Homo sapiens
ccatgagaaacaacaatgtccaaaaggagaaagatgaggagcagcaagcaaaacagaccatgataaacggactagaaaggcaggaggaaaagcctgagggagtgaggtcctgaaagccaagtgaagacgccattagggaggagatgccctccattggctcaaatattgctgacagattaaatgaggtgtaagaaaaatgcctagatttagtacagaaaaaaattagtgataatcttgaggaaaaatagttctggaggagtgctgaaattgaagacttaccggcattgagatcaagagtgaatggaaagaaaatttgagttcatgagtgtagacagttctttaaggacaayatacttaacgctcatgactgagaatgatgtaattttcatccacagtcatggaaaagtgatagacaagaaatagtagcttccaaattttacataccaggtggagttttcaaattttatgtaaccattatatattctaaaggttataaaaattatacacatatggcatttagaaatgtca

SEQ ID NO: 302466 - DNA, 528 bp, Homo sapiens
ccatgagaaacaacaatgtccaaaaggagaaagatgaggagcagcaagcaaaacagaccatgataaacggactagaaaggcaggaggaaaagcctgagggagtgaggtcctgaaagccaagtgaagacgccattagggaggagatgccctccattggctcaaatattgctgacagattaaatgaggtgtaagaaaaatgcctagatttagtacagaaaaaaattagtgataatcttgaggaaaaatagttctggaggagtgctgaaattgaagacttaccggcattgagatcaagagtgaatggaaagaaaatttgagttcatgagtgtagacagttctttaaggacaatatacttaacgctcatgactgagaatgatgtaattttcatccacagtcatggaaaagtgatagacaagaaatagtagcttccaaattttacatamcaggtggagttttcaaattttatgtaaccattatatattctaaaggttataaaaattatacacatatggcatttagaaatgtca

SEQ ID NO: 302467 - DNA, 528 bp, Homo sapiens
ccatgagaaacaacaatgtccaaaaggagaaagatgaggagcagcaagcaaaacagaccatgataaacggactagaaaggcaggaggaaaagcctgagggagtgaggtcctgaaagccaagtgaagacgccattagggaggagatgccctccattggctcaaatattgctgacagattaaatgaggtgtaagaaaaatgcctagatttagtacagaaaaaaattagtgataatcttgaggaaaaatagttctggaggagtgctgaaattgaagacttaccggcattgagatcaagagtgaatggaaagaaaatttgagttcatgagtgtagacagttctttaaggacaatatacttaacgctcatgactgagaatgatgtaattttcatccacagtcatggaaaagtgatagacaagaaatagtagcttccaaattttacataccaggtggagttttcaaattttatgtaacmattatatattctaaaggttataaaaattatacacatatggcatttagaaatgtca

SEQ ID NO: 302468 - DNA, 581 bp, Homo sapiens
tgcccttaaaagcattcagttttatatagtcacagaaagatggtttggaattggaacttatttttaaaagggaagcagagcataacagtttggaaactttgtagcctgctgatgcaatagcaaagaaaaatgcattttctgaggagaagttcaagcagctgccgaaatttgcgtaagtaacgaggagccaaatgttaatcgacaagataatggggaaatgtctccagggtatgtcaaagatcttcacagcagcccctcccatcacaagtggggaagcctaggaggaaaaaatggtttcgtggcttggcccatggctttgctgctgtgtgcagtctagggacttggtgccctgtatgccagctgtggctaaaagggagcaacgtacagctcaggccgttgcttcagagggtgcaattccccaagcctttgcagctgacacatggttatcagcctgtgggtgcacaaaagtaaagaattgagctttgagaacctctgcttagagttcagagatgtatggaaatrtatgggtgtccagacagaggtgtgctgcaggggtgtagccctcatggagaacctctgcc

SEQ ID NO: 302469 - DNA, 524 bp, Homo sapiens
attttttgtattctaacattccatgaaagcacatatatgtgttttctacaatctttttatttaaaaagttctcataatttaccaatggaacatacttttttccttttaactattttatgactggataatacttttgaaatcttataagaactttataataagctgaagtttcaagagtttataattatcctcttctgtttttcagtttcttatcctatctccaacygtaccagttcaatattaatcagctcccggactgctattgttatttaatgcagtctgtccaatagtaggacatctcagcctttttggaagtaagctggtgcatatatacatacacacatacatccatacatgcatgagtgtagtagtgaccataaaaataaattcatatttcttattcttcaaataaatatagttttaaagtgaggcaacagtgaggttagatgacaagtactgaattctgaggggtgaggtgtcagggaattttaagtaccgtgattctactaatgttcttaaagcaa

SEQ ID NO: 302470 - DNA, 524 bp, Homo sapiens
attttttgtattctaacattccatgaaagcacatatatgtgttttctacaatctttttatttaaaaagttctcataatttaccaatggaacatacttttttccttttaactattttatgactggataatacttttgaaatcttataagaactttataataagctgaagtttcaagagtttataattatcctcttctgtttttcagtttcttatcctatctccaactgtaccagttcaatattaatcagctccyggactgctattgttatttaatgcagtctgtccaatagtaggacatctcagcctttttggaagtaagctggtgcatatatacatacacacatacatccatacatgcatgagtgtagtagtgaccataaaaataaattcatatttcttattcttcaaataaatatagttttaaagtgaggcaacagtgaggttagatgacaagtactgaattctgaggggtgaggtgtcagggaattttaagtaccgtgattctactaatgttcttaaagcaa

SEQ ID NO: 302471 - DNA, 477 bp, Homo sapiens
tgaatttctttttcagcaactcagaaaggtgaaaatgaaaactaaraaaataaagacttttctcccttcctattactgggaccaaagaatgtatcaacaacaatttctgttaagtgtaacttgcaggtggggggaaatgagtacctggcattaaattttacatggttggtaatgggaggataaatccataggcttaggtcctcaaaaaatgtccagaatacaggatgaattaatcccatatacattctcattatggagaatgcagggaacataccactatcatcagcaacaaggcaagaaataaactgtttcctaatcctgaatatatttacttatgtgtccatttcagatgctacatatgaatctgtaaattaagatgtatgatactagtaccctacataagttaactatttaaaaatcacaacctgatacagaaggtataacatttgaaagttttgaaattgaataatctattat

SEQ ID NO: 302472 - DNA, 566 bp, Homo sapiens
gaatagctgattgaatttctttttcagcaactcagaaaggtgaaaatgaaaactaagaaaataaagacttttctcccttcctattactgggaccaaagaatgtatcaacaacaatttctgttaagygtaacttgcaggtggggggaaatgagtacctggcattaaattttacatggttggtaatgggaggataaatccataggcttaggtcctcaaaaaatgtccagaatacaggatgaattaatcccatatacattctcattatggagaatgcagggaacataccactatcatcagcaacaaggcaagaaataaactgtttcctaatcctgaatatatttacttatgtgtccatttcagatgctacatatgaatctgtaaattaagatgtatgatactagtaccctacataagttaactatttaaaaatcacaacctgatacagaaggtataacatttgaaagttttgaaattgaataatctattatctatacagctaaacaaatgatccacatatttttctctaagccactaatactttgtctaattggtgactcttatgaaat

SEQ ID NO: 302473 - DNA, 566 bp, Homo sapiens
gaatagctgattgaatttctttttcagcaactcagaaaggtgaaaatgaaaactaagaaaataaagacttttctcccttcctattactgggaccaaagaatgtatcaacaacaatttctgttaagtgtaacttgcaggtggggggaaatgagtacctggcattaaattttacatggttggtaatgggaggataaatccataggcttaggtcctcaaaaaatgtccagaatacaggatgaattaatcccatatacattctcattatggagaatgcagggaacataccactatcatcagcaacaaggcaagaaataaactgtttcctaatcctgaatatatttacttatgtgtccatttcagatgctacatatgaatctktaaattaagatgtatgatactagtaccctacataagttaactatttaaaaatcacaacctgatacagaaggtataacatttgaaagttttgaaattgaataatctattatctatacagctaaacaaatgatccacatatttttctctaagccactaatactttgtctaattggtgactcttatgaaat

SEQ ID NO: 302474 - DNA, 583 bp, Homo sapiens
aagggacttgggccccatgcccagttacactatggttcttgcaatcttatagaggtascaccttggtaatctttgatatgatccaggagaattcactagattatcaaacagagactcatgttctcctcccttactttctcctaaacaccctgagtctctctctctctctctctctctctgtgctgagccacctggagctgggggtggggtaatataagcacccctgtggccaccaccactagaacttccttgggtcagacctgaagccagcacagcgctgggtcttgcctaagggctgctgtaaccactaactggttatcacctatgttcactcaaggccctaggaatctctatacaacaggtggggaagccagtgaggtttgtaccctcccttcagggcagtaagttcccccacgctgtaggtgggttcatagctactgtcttggagccagggattggagtcaaaacccttagaaatctatctggtgttctgttctactgtggctaagctggccctcaaaccacaagacaaagtccttcccactgttccttcccctttccacaggcagaggagcctcactct

SEQ ID NO: 302475 - DNA, 573 bp, Homo sapiens
attcacatttataaactaaaacagaacaccaattattactgaaattaattttttagcagatgtagaagacaataaaattcacaatacttaagccttatttaccttcctagactgtgggcctttcctctttttttgtagttagcccttgkcaagcacaccacctggttcagagtaggtgttcaagaaatgctgaattcaaaggaattaatttcacatttgacttttatgaggataaatgtttttctggtcatcttggaatgaataaaatgacagaatatgtatatacttggatgattttattctgcaaagtgaaattaaaaattaacaacctagaaaactctaacttcaaagagatttaagaaactgccagtaaacaatgcatggggaaaagctgaatcttaactgctcagaaatctcctctccagctttatttacattgtaataaggtctcttacagaaatttaaaaaatatgattccatagaactatgatatcacatctggcaaaatacagtgaagaatagcatttctcaaccttgtcttcagatgcaactttgaaaagtctgccattgaaa

SEQ ID NO: 302476 - DNA, 481 bp, Homo sapiens
ggggactgaattggccagaatattctatctgtgtgtgatttatgccactttgataacacttaaattaactacaatgtgatttttcttaaagtgcttgygtattctagaaattaaagttatggcattacttggaaaatggcattaaaaattgatttttaagaaaatcacataatgactagaaattttaacatcaaatttatcaacaaataaaaaagaatgttgttgaagcttaaaatgattttgtcatgaattgtaaatggatgtacagtaatttcattttataattgcttacttatgtaagcagttttctcattcagaattttatagagcttatctgccttcttggtatttcttggtcagatgtatgtgacaaagtaaacacaaaaattgatatgagaatattcacaaagcaattctctcactgaaatttgaaaaaatgtacatagaacttttaggtaaatgtaatagtaaatatgtgtcc

SEQ ID NO: 302477 - DNA, 481 bp, Homo sapiens
ggggactgaattggccagaatattctatctgtgtgtgatttatgccactttgataacacttaaattaactacaatgtgatttttcttaaagtgcttgtgtattctagaaattaaagttatggcattacttggaaaatggcattaaaaattgatttttaagaaaatcacataatsactagaaattttaacatcaaatttatcaacaaataaaaaagaatgttgttgaagcttaaaatgattttgtcatgaattgtaaatggatgtacagtaatttcattttataattgcttacttatgtaagcagttttctcattcagaattttatagagcttatctgccttcttggtatttcttggtcagatgtatgtgacaaagtaaacacaaaaattgatatgagaatattcacaaagcaattctctcactgaaatttgaaaaaatgtacatagaacttttaggtaaatgtaatagtaaatatgtgtcc

SEQ ID NO: 302478 - DNA, 567 bp, Homo sapiens
ttgtctctattattttaaaatactttgttttaataggaataagtattaccatacttttgcaagacactctcatgcaaaaagctacaaatactgagcactaaaatctcttcacacaaaattagtgtataaatagatatggactcagaagttatcttctacctggagtatataatttccaacaactgaaaattaaaaatattgtttacaaaataagacttttgtttaagatggttacaaagcaactaagttttgaaacctctgcttaaaagttgggcatgacaagaaagaatatgaatgcgatgtcagtgatgtgtatgtgtgtgcacagacaaagatatagatcaatctatagtatatatccctaagtatacataatttttgtgtgataactttacaagsatgatgtaactttctagccattgatgtggtgtcgaatataaaagtttaaaaacattatcacattttggaaacaaccttataaaaatataaatgaaattaattaagaaaacatcttacactgcttcatgattcatgatgcatgtagctctcagacagaaacactgagtg

SEQ ID NO: 302479 - DNA, 567 bp, Homo sapiens
ttgtctctattattttaaaatactttgttttaataggaataagtattaccatacttttgcaagacactctcatgcaaaaagctacaaatactgagcactaaaatctcttcacacaaaattagtgtataaatagatatggactcagaagttatcttctacctggagtatataatttccaacaactgaaaattaaaaatattgtttacaaaataagacttttgtttaagatggttacaaagcaactaagttttgaaacctctgcttaaaagttgggcatgacaagaaagaatatgaatgcgatgtcagtgatgtgtatgtgtgtgcacagacaaagatatagatcaatctatagtatatatccctaagtatacataatttttgtgtgataactttacaagcatgatgtaactttctagccattgatgtggtgtcgaatataaaagtttaaaaacattatcacattttggaaacarccttataaaaatataaatgaaattaattaagaaaacatcttacactgcttcatgattcatgatgcatgtagctctcagacagaaacactgagtg

SEQ ID NO: 302480 - DNA, 596 bp, Homo sapiens
agttatggaatcaacctaagtgtccatcagtggaggactggataaagaacacattatatatatatgcacacacatatatatttatcatgtaatatatattgatatcatatatatatcaatggaggactggataaagaacacatggtgcatatatatttatttatatataaaatatctcctctcattctataaggttgtctgcctactttgttggttataccgtgtgtgtgtgtgtgtgtgtgtgtgtgtgtgtrtatatatatatatatatatatatatgccgtgtgttttttatccagtcgtccattgatgaatacatatttatatttctttatatatatatcatggaatactactgagccataaaaaaataaaaccatgtcttttgcagcaacatggatggaactggaggcattaacctaagtgaaataactcagaatcagaaagccaaatactgcattggctcacttataagtgggagctaaacaatgggtacacatgaacattcacagtggaataatagacactggggactccaaaacattggaaggtgaaagagatatgaagggtgaaaaattacctattgaatacaatgt

SEQ ID NO: 302481 - DNA, 526 bp, Homo sapiens
attaatacatacatattccaaatatatgtaagaaaaaatgtatatgtatacttacaaatgtatgtgtataattataaatattttaatatttaaataaacttgtatgtttatatttacaaatgtcaacatttgacaaaatatacatacaaaatatacatacatacatattttccttaataaggaaactattcattgctaagatctatggttaaaacaaatcttcagttcataaaattgtaaagaaggagaaakaaatctgcaccggttttgcagatgtatctcaaactacaaaagttaagactgcagtgcatgataaatgcttagttaagacagaaaagacgttaaatttgtaagtagaagacatgaacagaacatgtgttctgattaacagcaacgtgttgcaccagaagacatttgaacctgtagaaatacttcagcatggaattccctgaaatgagtgagccatttattgcaagtaagagatggttacacagattcaggaataggtttggactgaaaaacagaa

SEQ ID NO: 302482 - DNA, 580 bp, Homo sapiens
actatcacaattatattgaatggatttaaacttgtgctggcatttatttcccatgtgatatttaaatgataattaaaacaagcctaagttatccaattacattgctttttggattaaaatattatcagtccttatgttaaaaaaagtacatatatattttaagcacaagattttactaactgacatctggtagctttaaattgtaaaatgctaatacaaagttttccattttccttgcttcacaaagaacattaattgactttacatatttcttaaattatttgatttgtatctgatcaaaatataagtgtacaaaaggtttggaaccaaacaagawtctatactaggaaacattgctatagtgcatatacaggctcatgcgtatatacatgcatgaatatatatgaacacttctatctatgtagtcataacataaaaagagaacaaaaaggctttagagacttggttaatcttgcaatataagggcacatgttccagaaaacatgataatatgtggcatctgaaatttcacatagcaattatagagtgttgcacttaaatgtcatttggtgcttatttg

SEQ ID NO: 302483 - DNA, 582 bp, Homo sapiens
tagcccaagtgagggctttaccaatagattttggcaccacagcacatgaggctcccataccaaggagtctggaaatttcttttgccctgatcattttacctactcttatgcaaaagactttgagttcttatcagtgagttgagccaaaggacccttgtccttttttcagtcttgatcttgattaacctacctgaccattgcctcaagtggttacaagtcaggtttctcattgtaatctctaccttctagcttaaaaaattctcccaatggataaatagggcagacttgcttaacaccctttaatgttagggaagyagccaaggtgtccctttggtccatccatcccttggtaatgttacatttaaacttttgttttaacccaattaaggtccattttattcattctatttcttaataacaatctacagatggctgctctcattttgcatttctaaagggatggcatttaagtatgataaggtagagaattaacatttaaaaggcacagaacgtagacttcagacctaaatactatcatttgctgaaataaataaggtgggggtaaaagtccattaagacaac

SEQ ID NO: 302484 - DNA, 464 bp, Homo sapiens
ttggggacctgcctttttctgcctaaaatttctctgcctcccatctctgtcaatatcataggctacttattgattcaattattcattcattcatacattccctccacagacatgttattgrgtgtctggtgaggcaataaaattgagattcacattttataaagtccacccaggcagcaatgtggtaaataggtttggtgatgtgagtcttaatgaatgaaaattactggaaagcagtagctttaattttaaggtcccaaagtaaacaataaaaggaaaaataagttgctacataatatcaatttttgtgaataacaatgaataaaggcatgttgatcaatgtgttttatgtatgcacagttataaaaagtttgcatgaaaatatcagagaatgaacagagcatgaaaataatgcatttaagtttggatagacagaggtttagttatctgtgggaaaattaatg

SEQ ID NO: 302485 - DNA, 569 bp, Homo sapiens
caccattacagcaacactgtattctatttttgtctctatatttatctttgccaactagttttataattttttatcctgacattttgctgtttagcatcttttcatttcaaccggaagaactccctctagaattttttggtaaggtaaatctattggtgatggattcccttaattttggtatgtttgagaaagtctttacaaaagaatgagttggattcttatcttacaccatacatacagatggactcaaaatgaattaaagaaaaatgtgacctatatatgtaaaactcctagaagaaagcatgagagaaaagattcattacattgatcttggcaatgatttcattgtgggactatatcaaactataaagctctatacagcaaatgaaacaatcaacagagtgaaacctattgagtgggagaaaatatttgcaaaccatrtatctgataaagagttaatatccaaaatatataagaatatataagaaatccctatgacctaatagtgaaaacaaacaaagaacaaaataccttataacttgtttaaaaaatgggttgacttgagtaga

SEQ ID NO: 302486 - DNA, 603 bp, Homo sapiens
cagggttctcccctgtgcccccatgcctaaagcagtccctggaagataataagtgcccagtgaatatttgtggactaaatgacaagtgagtgaatgtactcctgcaggttagacacatacatcatggttcctggcatctaacacacgcttaatgcctacagagtgaaagataaattgtgtttcttccagaagttctatttaaaactgtccctgatcatttaatattacctcctgtggcttcatgactccttgatcccttttgtgaagggactgtttagrcaacagtctctcccacattcagagccctctaataaattctgtagacatttactgagctgttctctgattccccaaatagactaagttggctaattgtttgctcctgcagtaccctctctgctgttttttggaagcgcacaaaccacttattgttacttgtttgatgtctgttttccccaatgggccttaaaggtttcaatagggcaggatccatgtgaaacttgctccctgctgtttcctgcacttccagtccactatctgacactcgttggacagtaaatgagtatttattgactgaaggggccaggtatcgttagcagtgcc

SEQ ID NO: 302487 - DNA, 458 bp, Homo sapiens
ggctaattgtttgctcctgcagtaccctctctgctgttttttggaagcgcacaaaccacttattgttacttgtttgatgtctgttttccccaatgggccttaaaggtttcaatagggcaggatccatgtgaaacttgctccctgctgtttccygcacttccagtccactatctgacactcgttggacagtaaatgagtatttattgactgaaggggccaggtatcgttagcagtgccaaggagggattaaaatatgttctttgaccccaggcactggattgagtaatactttaaagacatttcccgctcccaagtacctcagtgagcatatcttttgggaaattccttcatctgaggatttgacatttacaaaattatgtaccttcaaaagttatcagattgaacaaaggaattctgctgtttattcagcacaggaaaatgataaactgctacccagg

SEQ ID NO: 302488 - DNA, 606 bp, Homo sapiens
ctgtttagatgcatgggattttcaagtggggagcactctgctctttaggtaagctctgtatcttcatatttttgtcatsggggaaaagcactattaattagacatggttggagtgttaattggggacattaaaatattacatttaatcctctcttttcaggagttgttccctttccaaaggccctttattagaacctgcttatagtggagagatgtaccactgatctccttgaaaagaggagaagatttggaagttctaactgcttcttttttgatgttgtttttaaaaatctttattgaaatgtaacttatattttatgatgttaaactatgtgaaatgtaaaattccatggtttttagtatatttacagatttgtgcaaacaataataacaataatctaattttagaatattcatcaccttataaaaagactttgcatccattagcaattactcccaatccctctgcccttactttcctgtaccacaggccaagcaatcactaatttactttttgaacatacagatttttctgttttgcacacttcatttaaatggtatcatacaatatgtaatgatttatgactattttttcatttaccgtag

SEQ ID NO: 302489 - DNA, 606 bp, Homo sapiens
ctgtttagatgcatgggattttcaagtggggagcactctgctctttaggtaagctctgtatcttcatatttttgtcatcggggaaaagcactattaattagacatggttggagtgttaattggggacattaaaatattacatttaatcctctcttttcaggagttgttccctttccaaaggccctttattagaacctgcttatagtggagagatgtaccactgatctccttgaaaagaggagaagatttggaagttctaactgcttcttttttgatgttgtttttaaaaatctttattgaaatgtaacttatattttatgatgttaaactatgtgaaatgtaaaattccatggtttttagtatatttacagatttgtgcaaacaataataacaataatctaattttagaatattcatcaccttataaaaagactttgcatccattagcaattactcccaatccctctgcccttactttcctgtaccacaggccaagcaatcactaatttactttttgarcatacagatttttctgttttgcacacttcatttaaatggtatcatacaatatgtaatgatttatgactattttttcatttaccgtag

SEQ ID NO: 302490 - DNA, 634 bp, Homo sapiens
tcctttctgtatctaggtttttaaaattgataagacagggagacatcacattcaccctatcttgggtctcccatgaggaagaaaggcactgataggactttggagaaatcatgctttgcaagaacatgtctttattattttactttagtttatggcaggacacacagaggggcagggaggtctagaggtcccaatcccaaggcattgktgccacaatttttggagattaactgtttggaaatcccctggtatgcctgttcataatgtagatactgctcccatggcggatgtactgcatctgcatcaatctatggaggtgggacactgctattcacattttaaacaagttctctggataaattcttacacacactgaagtttgagaactagtgctatggtggaggggttggttaccatcaagaatttgctcagcttgcctggtggaagtctgttcacagcccacccacattggcctctccaacattttatcttatgactccccacctgcaccattctctacttctgccaaatgatgaactttcgaagtcatcaattacagcatgttttggcaatggggagcaaaagcttatgcttataaaaagcctcctttggggatcagttcatagctggctat

SEQ ID NO: 302491 - DNA, 634 bp, Homo sapiens
tcctttctgtatctaggtttttaaaattgataagacagggagacatcacattcaccctatcttgggtctcccatgaggaagaaaggcactgataggactttggagaaatcatgctttgcaagaacatgtctttattattttactttagtttatggcaggacacacagaggggcagggaggtctagaggtcccaatcccaaggcattggtgccacaatttttggagattaactgtttggaaatcccctggtatgcctgttcataatgtagatactgctcccatggyggatgtactgcatctgcatcaatctatggaggtgggacactgctattcacattttaaacaagttctctggataaattcttacacacactgaagtttgagaactagtgctatggtggaggggttggttaccatcaagaatttgctcagcttgcctggtggaagtctgttcacagcccacccacattggcctctccaacattttatcttatgactccccacctgcaccattctctacttctgccaaatgatgaactttcgaagtcatcaattacagcatgttttggcaatggggagcaaaagcttatgcttataaaaagcctcctttggggatcagttcatagctggctat

SEQ ID NO: 302492 - DNA, 634 bp, Homo sapiens
tcctttctgtatctaggtttttaaaattgataagacagggagacatcacattcaccctatcttgggtctcccatgaggaagaaaggcactgataggactttggagaaatcatgctttgcaagaacatgtctttattattttactttagtttatggcaggacacacagaggggcagggaggtctagaggtcccaatcccaaggcattggtgccacaatttttggagattaactgtttggaaatcccctggtatgcctgttcataatgtagatactgctcccatggcggatgtactgcatctgcatcaatctatggaggtgggrcactgctattcacattttaaacaagttctctggataaattcttacacacactgaagtttgagaactagtgctatggtggaggggttggttaccatcaagaatttgctcagcttgcctggtggaagtctgttcacagcccacccacattggcctctccaacattttatcttatgactccccacctgcaccattctctacttctgccaaatgatgaactttcgaagtcatcaattacagcatgttttggcaatggggagcaaaagcttatgcttataaaaagcctcctttggggatcagttcatagctggctat

SEQ ID NO: 302493 - DNA, 439 bp, Homo sapiens
atatcatatattcttactcatacatggaagctaaaaatagtcttggatatctttttattttttgctgaaatgctctggctagagcatctgatatttgctgaatatgagggacaaaagtgagttgacatatgcaacttataatctataaattggttttatgcagatttgaggaagtaattaaaaagctaatttttattcatgtttagtattgttatgttgtgaacgacttaaacagaytttatggtgacactttgaaataaaaaaagaagcttgcaaagtcagaaaaaaatagaaaaacataaatgaggcaaaacaccacatatctgggtgattattcaccaccatattacacattttgccataataaaagttttacaagaaataaatattgttcttgccatattattctgaggaatcttataacaaagattcaaaattt

SEQ ID NO: 302494 - DNA, 460 bp, Homo sapiens
gtaattctattttcaatttttttcagaatcaccatattatttgccacagtctcatcaacaatgcaagcacaggggttccaatttctctacatcctgcccaatatttatttttattttttaataataaccatcttaatagttgcaaaatggaattatcactgtagttttgatttccatttccctagtgattagcaaagttgagctttatttmccttattggcaatccatatacctttagatgattttctattcaagtcctttgagaatttttaaattgtgcttcctttttattattgagttttagaattatttatatattttggatattaattccttatcatatatgtgatttgctatttttccattctaaatgttgtcttttcactgtcttgataatatgttttgtgtacaaaagtttttaattttgatgatgtttatttattttttcttttgttgcctg

SEQ ID NO: 302495 - DNA, 581 bp, Homo sapiens
tattgtttttttttgctaaattattttactaagtattgattttctgattcttattatccatcttcagatcacaaggcttagtgtagaatttgcttacactgtgataacaaaattcataatcaaatgggaagaggaaataatcctaccgtggtgcatgccatttttctatccaagggaacctcgtaagttgctgataagaataaattgcagtgaatgagaaaatcatgaaaagtcaaaaattaaaggatccttagtgataacctggcacagtgattattttttcccttccaaggggaggaacattttattttttgaattggaacatttttgttgctgtttttctacatggtcaccatgtttttagaatatcttctaatgtagtaacattgtatttattgagaaataacggctaatactgaatttgttcaatttcaaaaatgggaaaatgtgcagastgtatgatcataaacaacagtggtaacaatagcaagcaaaacaactctctgggaaatccaaataattcctgaccttcaagaaaacctagcaggtctgaggaggtgattgtcatagttgattccagt

SEQ ID NO: 302496 - DNA, 634 bp, Homo sapiens
tatcccctcaaacaaagttgaaagagaaagggacagttgattcctttatggagtaaagaccatagaataagatcaaactgagaggccagattgtgccttcaagagcatggagagaaatctgagaaatacatgacaatggatttgacaagtgagcatatggaggtagaaggaattagtaagtttaaaatggaagaaagttgagatttagaaagatacctttacaaaattcctggattgtccatttctagtgtcccttcacttgctggtgcctcataagtacaatagcttaaatgtctagagagaaggaggccatgtaggagactttaagttatatacaacctctaggtgtctttgttgggcccacaaagtgcttatagcttctatttgctgtgtctctagaacattttgcaagaagtgggacttgtgttactgtatggttccagttttcaatgctcatgtggtggyttcaccctttaaatagcacagtaggtatgctttccaatttgaagactccaatattctctgttgtctgacaatcagtcaacttaacttgtttaaataatttgtctggcctctgatgcatttgaatttgtcatctgatagaaactgctatgatatttgaattttaaggcaa

SEQ ID NO: 302497 - DNA, 567 bp, Homo sapiens
ggccccttcgtgccttccagttcatgaaatggtcactagttggcagagaatcagacccaaatcttctttctactctctaaatggaagccatactctgtagtggaattattaygcactattagtacatgatacatgtgcacatacagatgtataagaaatctctctcctttgaaggagtattccttttagcattcctgataatgctactgaaccaaactatgtctgtattccctatgggagtccaaaagcttatcaccactaccaaaacaatggctagagaaactaagcacccgtgggttgtaggtggttcaccctttcactttttaaactatatatctaaaaccagagtggaatgacagcttattagagcaatgtgacattctttatgtaattagaatgtgtccaaacatttattctgtgcaataaacatttaaaccagaattcactgttttttttcaggttgggatagatatgttccctgcttaactgttatgattgcattactctgccctcaggatgaaaaagggttattgaaacctaggggactttgagtgtgtcagtagcaca

SEQ ID NO: 302498 - DNA, 376 bp, Homo sapiens
cagtcaccttatttccaagtccctattttatcttcgtccagtacactctgaaaatcccatcttatatascatacttcactgcatttgctgtgttctagcaactcacatgggtattttttctgctttttaaatagatcaggctcattctttcctctgcttggaatgttttacctcgattcttcaaatgattggattcttctaaacaattttatttcagcttaaagtcatctcctcacaatgatattcttgaatgattacacattataaagtaccctttcacaagactccctcagtaacagaccaacatgatacaatttcttcctaaggtatattattttcggccataagcgtgcattcatatggttatcattttttg

SEQ ID NO: 302499 - DNA, 541 bp, Homo sapiens
aatggaactgtgaaagtctggatcttcatcacagtagccttaaaaggaagctcttttgctagcttcaggttatcttaacctgcaattcaaagatgcaaagctggccaggatatgtggtaaataatgtcagtaaggttgacccttagaacaattctggggtgaaataacacacaaagggttcctgattcattaaaggcagctraattctgacagcaaatctgtagccataaaattgagggcagctataacagacttcgatgtcagtttctccataaaggggcagtttatattctcttaccctgaaattattcttgcaattacacagctgactttaatatgctttgaccagttctgataatgttgtccatgcctttattcttctatctatattgccccttctccctacaatattcatcatctatagctcaactcatagttctgaataccacccagcatcacttttttaaggaaattcctctctgtaattcaggtatctcagtaattccactatgaaaacattttaaattatgcattgggattg

SEQ ID NO: 302500 - DNA, 444 bp, Homo sapiens
tagcccaacattttatttgggatatgtatgtggaggtgtttgggtcattcagtatctccaaaagagaatcctctcatctctygcttgagtatgaataagccacaattccaaaatgttgtgaaaacaatggctaaagaagaaatagtcttcagtacactatgtaaatcattactttttcacttttaactgtcccatcccctgttcaccttacctccacattctgactagtatggctgaacccaggtattttgattaaatttctctaaataataaacctaaataaaccgatttctctaaataataaaagaaagagtcattggaggaggaaggagtaatttctaaggtgtgtgagataaaagagaagcaggagagatacaaaagaatatttgtaaagaccctgtgttcacaccttcaacaatccaccttctaattctgaacccccca

SEQ ID NO: 302501 - DNA, 583 bp, Homo sapiens
aatcaacaaaaaatgggagtagtaagtccttacctctcaataattatgttgaatgtaaagtgaattaaattctctaatcacaatacatagaacggatggctaaaaccaatactcaaccatatgccgcttaaagaaagtcactttagctttaactacacacgtagactgaaagtggagatatggaaagagatatttcactctaatgtaaatcaaaagaaagcaagtgatgctattcttatagtagtcaaaatagactttgtcaaaatcttttacaaaagacaaagatggtcattatgtattgataaagggaataactccacaaaatgatataataattatagatattaatatatatgtatccaatgctacagcacataaatacataaagcaaatactaacagatagtacatgactgcattaccccactttcaacaattgattgagcacccagacaaaaaatcaataaggaatcaytggactcgaaccaaagtttaaaccaaatggacctacagacatatatagaacattccatcccacaacaacagaatacacatccttctccagtgcacaaagaacattctcc

SEQ ID NO: 302502 - DNA, 583 bp, Homo sapiens
aatcaacaaaaaatgggagtagtaagtccttacctctcaataattatgttgaatgtaaagtgaattaaattctctaatcacaatacatagaacggatggctaaaaccaatactcaaccatatgccgcttaaagaaagtcactttagctttaactacacacgtagactgaaagtggagatatggaaagagatatttcactctaatgtaaatcaaaagaaagcaagtgatgctattcttatagtagtcaaaatagactttgtcaaaatcttttacaaaagacaaagatggtcattatgtattgataaagggaataactccacaaaatgatataataattatagatattaatatatatgtatccaatgctacagcacataaatacataaagcaaatactaacagatagtacatgactgcattaccccactttcaacaattgattgagcacccagacaaaaaatcaataaggaatcattgkactcgaaccaaagtttaaaccaaatggacctacagacatatatagaacattccatcccacaacaacagaatacacatccttctccagtgcacaaagaacattctcc

SEQ ID NO: 302503 - DNA, 528 bp, Homo sapiens
tccatttcaaaaaaaaaaaaaaaaaaatcagatgaaaacgtatgtttactaccaatgtttttcatgagattgaaatttcattctacatatgccattaattaacaatttcttttgtatttgttattctacagtctacttgataatgctttgaagatcagatatgtggttaaaattcgtaataaaatgtttatttacctccatatatctaaatagtatgtatattctaattgtctcctgactgactaatcaaatttagacactatgtattttttttttttttttgagacaaacttttgctcttgtaccccaggctgkagtgcaaatggctggatctcggctcacgcaacctctgcctcccgggctcaagccattctcctgcctcagcctcctaagtagctgggattacagtctcctgacaccacgcctggctaatttttgtatttttagtagagacggagtttcaccatgttggccaggctggtctcgaactcctgacttcaggtgattcgcctgccttggcctcccaaa

SEQ ID NO: 302504 - DNA, 528 bp, Homo sapiens
tccatttcaaaaaaaaaaaaaaaaaaatcagatgaaaacgtatgtttactaccaatgtttttcatgagattgaaatttcattctacatatgccattaattaacaatttcttttgtatttgttattctacagtctacttgataatgctttgaagatcagatatgtggttaaaattcgtaataaaatgtttatttacctccatatatctaaatagtatgtatattctaattgtctcctgactgactaatcaaatttagacactatgtattttttttttttttttgagacaaacttttgctcttgtaccccaggctgtagtgcaaatggctggatctcggctcacgcaacctctgcctcccgggytcaagccattctcctgcctcagcctcctaagtagctgggattacagtctcctgacaccacgcctggctaatttttgtatttttagtagagacggagtttcaccatgttggccaggctggtctcgaactcctgacttcaggtgattcgcctgccttggcctcccaaa

SEQ ID NO: 302505 - DNA, 528 bp, Homo sapiens
tccatttcaaaaaaaaaaaaaaaaaaatcagatgaaaacgtatgtttactaccaatgtttttcatgagattgaaatttcattctacatatgccattaattaacaatttcttttgtatttgttattctacagtctacttgataatgctttgaagatcagatatgtggttaaaattcgtaataaaatgtttatttacctccatatatctaaatagtatgtatattctaattgtctcctgactgactaatcaaatttagacactatgtattttttttttttttttgagacaaacttttgctcttgtaccccaggctgtagtgcaaatggctggatctcggctcacgcaacctctgcctcccgggctcaagccattctcctgcctcagcctcctaagtagctgggattacagtctcctgacaccacgcctggctaatttttgtatttttagtagrgacggagtttcaccatgttggccaggctggtctcgaactcctgacttcaggtgattcgcctgccttggcctcccaaa

SEQ ID NO: 302506 - DNA, 528 bp, Homo sapiens
tccatttcaaaaaaaaaaaaaaaaaaatcagatgaaaacgtatgtttactaccaatgtttttcatgagattgaaatttcattctacatatgccattaattaacaatttcttttgtatttgttattctacagtctacttgataatgctttgaagatcagatatgtggttaaaattcgtaataaaatgtttatttacctccatatatctaaatagtatgtatattctaattgtctcctgactgactaatcaaatttagacactatgtattttttttttttttttgagacaaacttttgctcttgtaccccaggctgtagtgcaaatggctggatctcggctcacgcaacctctgcctcccgggctcaagccattctcctgcctcagcctcctaagtagctgggattacagtctcctgacaccacgcctggctaatttttgtatttttagtagagacggagtttcaccatgttggccaggctggtctckaactcctgacttcaggtgattcgcctgccttggcctcccaaa

SEQ ID NO: 302507 - DNA, 524 bp, Homo sapiens
acatggtctaaagagctgctctaaatgtatctgaacaggaaaatcaacccattttagcttttaagaaarcatttgattctaatataaaattagctcaatccaaagctccaaaagcacaacaagaaaattgggaaagataggggaacataatattctgaaactgacggtggtatggaccaaatggtctacccaaagttctaaccaaattatagtcatctttcttagtatattttccaactcattgaaacataacccaggaaagctttcatagtttttaaggtccttttcttacagaaggccttttcaaagtatggcaattatattttattcatctaccactattacaaggatgcaaatatgttctaatgatggtttgtatgttttctcattgagtggaagtattttcaaacagaaaagcaatagccttagcagcaagtaaaattatcttagataaaaaaagtattccaacctgaggagttcccctagaactttatactgacagaggtgctcatttcagtaggcaa

SEQ ID NO: 302508 - DNA, 550 bp, Homo sapiens
tattcctttattttcccttgtgattctccacatctgccattatccttaaagatctagctctttcctatcatgtcactttatctcgcaacatatttttctctccctacataccagcaagaccggccactaatttgttacttgaaggcaaaacattccatttgttgctaattgggattatttctttgcccccaaccaatttcttcccactctcttactttgcacatttgtggcaaaaagtttgagtttacagtttgtgatctatgtgtatgctgtgtgtgattataactgcttaaagcctgtgttccccgctagatcataaactccctgaaagcagagggcaygggttcatattttaccccctatacaccacaatttacaaatgcttaccaaatattgggaaagaggggaagtgaaagagagagagagagagaaataaagaacatgaagaacgagagggaaaaagagagaggggaaaaagaggagaaagaaaagaaaagaagggagagaaagaagatgagaatacagaaagaaaatggagtaattgtttatt

SEQ ID NO: 302509 - DNA, 550 bp, Homo sapiens
tattcctttattttcccttgtgattctccacatctgccattatccttaaagatctagctctttcctatcatgtcactttatctcgcaacatatttttctctccctacataccagcaagaccggccactaatttgttacttgaaggcaaaacattccatttgttgctaattgggattatttctttgcccccaaccaatttcttcccactctcttactttgcacatttgtggcaaaaagtttgagtttacagtttgtgatctatgtgtatgctgtgtgtgattataactgcttaaagcctgtgttccccgctagatcataaactccctgaaagcagagggcatrggttcatattttaccccctatacaccacaatttacaaatgcttaccaaatattgggaaagaggggaagtgaaagagagagagagagagaaataaagaacatgaagaacgagagggaaaaagagagaggggaaaaagaggagaaagaaaagaaaagaagggagagaaagaagatgagaatacagaaagaaaatggagtaattgtttatt

SEQ ID NO: 302510 - DNA, 648 bp, Homo sapiens
atattggcaaatgtttcttgggggcaacagtgagaaccatagtattacaaaatgawttaagggtctaatatgatcaagaaaatgtgctagataatttacatttccacatgctctgtgcctttgtctatatatctacatatgaagcccattaagttgtgtatatcctgtaggggtgattcttacattatctcatttaattctcacaaatattcttgaaccagatatttttattaccttcaactcatgttgaaactaaggttcagagaagttaagtaactagcttaaaatcgataaacaataattggtagtgaaatacaaaaacaataaaaggtataaccaggataggaacctaaatactctcatataaaccactgacagattgggaacattttgattaattatcatctagtttgatatctaagttttacaaataaaattttgaaattcactaccttattactttcattatatttcaaatatacacacaataaaaatctctcatgcatgtaaaaaagagcatattttcaaagaccgttcatgtcctatttctgttatatctctcataacaatcccatgagggcagcatcgcaggagttatgctcattttatagctgtagtaactgtggatcagggaagttaaatgactca

SEQ ID NO: 302511 - DNA, 648 bp, Homo sapiens
atattggcaaatgtttcttgggggcaacagtgagaaccatagtattacaaaatgaattaarggtctaatatgatcaagaaaatgtgctagataatttacatttccacatgctctgtgcctttgtctatatatctacatatgaagcccattaagttgtgtatatcctgtaggggtgattcttacattatctcatttaattctcacaaatattcttgaaccagatatttttattaccttcaactcatgttgaaactaaggttcagagaagttaagtaactagcttaaaatcgataaacaataattggtagtgaaatacaaaaacaataaaaggtataaccaggataggaacctaaatactctcatataaaccactgacagattgggaacattttgattaattatcatctagtttgatatctaagttttacaaataaaattttgaaattcactaccttattactttcattatatttcaaatatacacacaataaaaatctctcatgcatgtaaaaaagagcatattttcaaagaccgttcatgtcctatttctgttatatctctcataacaatcccatgagggcagcatcgcaggagttatgctcattttatagctgtagtaactgtggatcagggaagttaaatgactca

SEQ ID NO: 302512 - DNA, 648 bp, Homo sapiens
atattggcaaatgtttcttgggggcaacagtgagaaccatagtattacaaaatgaattaagggtctaatatgatcaagaaaatgtrctagataatttacatttccacatgctctgtgcctttgtctatatatctacatatgaagcccattaagttgtgtatatcctgtaggggtgattcttacattatctcatttaattctcacaaatattcttgaaccagatatttttattaccttcaactcatgttgaaactaaggttcagagaagttaagtaactagcttaaaatcgataaacaataattggtagtgaaatacaaaaacaataaaaggtataaccaggataggaacctaaatactctcatataaaccactgacagattgggaacattttgattaattatcatctagtttgatatctaagttttacaaataaaattttgaaattcactaccttattactttcattatatttcaaatatacacacaataaaaatctctcatgcatgtaaaaaagagcatattttcaaagaccgttcatgtcctatttctgttatatctctcataacaatcccatgagggcagcatcgcaggagttatgctcattttatagctgtagtaactgtggatcagggaagttaaatgactca

SEQ ID NO: 302513 - DNA, 635 bp, Homo sapiens
ttagggctatcattttatttctagctttttatttgtcctatggtttctttaatctttacctgccttctttgaatgatttcaaatttttatgactctattttatctccttttttggtttattagctgcaattccttgtttaattaacttagtggttgctttagggtttatagcctccatcatagcctttcaaaatatatcttagagtaatataatatcacttcatgcataatataagaaacttatcatagtatattggggggtcttcagaaagttcatgaaaagaacatattataaaaaactatgcatggatttaaaattttttgtaccaaaataaactcatacttccttttgtaatgtgtctacacaagatctaacttgaggtcataagaagacatcagtgtaaaaagagctcctacctaagcaatgtgaattctactaaaattgaagcaaaaacaaacaccaattttatagtgaagcttgggatgaaaaatggtgaaattactgatgctttattaaaattttatgttgcaacaatgctccaaagaaatggataattcattttaagaagggatgagacaatgttgaaaatgcagtctacagwagcagacaatccacatccattttcaaagaaaaa

SEQ ID NO: 302514 - DNA, 568 bp, Homo sapiens
tatggaatactgaaatgctgacctcattcttttgagattatacaaaatgaagaaaatttatcactagtcacctctgacgcggagattaaaaacaaaaatgtataaagctgaagtggacgaatgatgttctgatgcaacagagaagcaaagatttacctcctttaattcttgttcagtttgagggagttttccttctatatctctgattgcagctttcctttctttgagagtctcagaagctgcaattagagcttccttagccttagttaattgagacactgcagtattatgacgactgagatagatatcaagttctgactgggctacatccatctttgaacgtgcttcatttaccgatttgctgaaacccataagttctttctctcgactctgttaaaatatgagttcattaaatctggacagatatttactttcaaacctacactgaaatgaaaccatacattttatattcratttaagaaaggagattctataagcacagtatatagaaataagaaattctcacaagtggactagattcagtttttgcctagttgtcaatattcac

SEQ ID NO: 302515 - DNA, 550 bp, Homo sapiens
ctttctaagttggagggaaaataacacattttccagtgactacaatgtctaggtatataaaaattttaccataggagtaaaattttggttttaccttttacgaatatacttacaagttactatacaataaacttactatacaaatttttttatttaaaaataattagagatactagtgtcattgaaaaatggcatcaagtagggacatgataaaacccttaaaaatctatctagaaaaacccaaatcctatccctctatcagatttgtggactactaaaagattaamctgtgaagccaaatgcttattgtttgttactgtgctacgccactagggggtagcatccccacggttctaagacttcagagtagggaatttcatctgtaacaaggaactggatgcaaggcaagtttttttttttcactaagggggccaccacttgatatgctggcaaatgtcttacactcacaatgtgctagaagtaactttatatataaatacacatgtaatacaattatctaaatacttttagtacttcccaaaatattatt

SEQ ID NO: 302516 - DNA, 550 bp, Homo sapiens
ctttctaagttggagggaaaataacacattttccagtgactacaatgtctaggtatataaaaattttaccataggagtaaaattttggttttaccttttacgaatatacttacaagttactatacaataaacttactatacaaatttttttatttaaaaataattagagatactagtgtcattgaaaaatggcatcaagtagggacatgataaaacccttaaaaatctatctagaaaaacccaaatcctatccctctatcagatttgtggactactaaaagattaaactgtgaagccaaatgcttattgtttgttactgtgctacgccactagggggtagcatccccacggttctaagacttcagagtagggaatttsatctgtaacaaggaactggatgcaaggcaagtttttttttttcactaagggggccaccacttgatatgctggcaaatgtcttacactcacaatgtgctagaagtaactttatatataaatacacatgtaatacaattatctaaatacttttagtacttcccaaaatattatt

SEQ ID NO: 302517 - DNA, 617 bp, Homo sapiens
agagaaatcagattccttcaagcagtaatataaaagcttgggttctattgaccttcttaatttgggtatatctcatttcttctcttactcttcttcggtaatttttcycagtgtcttttcccatgagttgagttttcttcaagtcactcaaacagtttgtgaaattttatttcttctgttaaggattcaaagttttttgttttttgagacaaagtctctctctgtcacccatgctggcatgatcttggcagggagtttgaagagaagtgatcattcttggtagcatttgatcaattcccttataacccattaatcttagagtaccttcctttgtgctcatataaaacttatatatgtgtttgtttactagagtagatttatttataggttgtcctcagtcgccttctataagtgattctgaaagtttatcttgcagtgtttcccaaccctgagaaggttatatgtgtctcaccaaacctatggtcatttctaacctcttttctttccctgttgaacaccatctgtttgccagtgcgcacatatacatgaacacacacacacagtttggtaattgtctctgctaccaaaactagctattgaaaggtcaaggaggccgg

SEQ ID NO: 302518 - DNA, 574 bp, Homo sapiens
cattcctgaaaaagttaattgcaagttaaacccccctgttttccttaagagcactgatgatatatttgtgtgtttactcaatgttagtttctcccgtcagactataagctccctgaaacttacctattttgtacaccactatattcttaagtctcattacagagcctggtatgtagtcagcatttaagtaaatatttgagggaattaaatgaaattttttttttaagaaaacaggagggtactctgattagaattagtaactaaattagaatttttatttttaaggttatcttgtgtattatataaatttatggartacaagtgcagttttgttacatgtatagattgcgtagtgatgaagtcagaatttttaagtcaattttttctcttgatagaagtaatgcatgatcattgtaaaaacactttttggaaaaataaaaataatcttccatattctcactactgttagtcttttggattgtttcctttttcatgtgtacatttttccaaacatatttgaacttaatttgaattctcatgagagtaactcattagaatacagcaaaggttttca

SEQ ID NO: 302519 - DNA, 459 bp, Homo sapiens
ctggtggctttttgtctgtttcctagagatccgtggaactttgaacttgagagagatgatttagggcatctggcagaaaaatatttctaagtggcaaagcgttcaagagaaagcagagcataaaagtttgaaaaatttgcagtctaayggtgaaatagtaaagaaaacccattttctggggagaaattcaggccagctgcagaagtttgcataagtaataaggagccaaatgttaatcaccaaggcaatggggaaaatgtcttcagggcatgtcagagacactcgtggcagcccctcccatcacaggcctggaggcttaggagggaaaaatggtttcctgggctggcccaggagcccccttctttgtgcagcctcgagacatggtgccctgccttccagctgcttcagctccagccttggctaaaagaagtcaatgtacagctcaggccattgcttcag

SEQ ID NO: 302520 - DNA, 443 bp, Homo sapiens
ttaacattatttttaatcagctactgacttacaaattaaatagtaaatgtagtaaatgtgcccactcatcattggcactgagagcaatttcccacttgtgaggacatctagaagggcraagtcaggtatgcaaatatcaaacagatttctttacactgatttgtaattttctcctcaactgaaagtcaataccatttggatttgaatatcttaattttaaaagaattatctaaaaataacctctacaatatatgtattactcattagtttcattaaataaactccataatatttccaattctactttagaggaattaagtgtaataaaaagaagcatcaaaaagctcacagagtagtgaaaagaagcaacattaaatgtgcttttactactgaatgtaaccacagtttgatcaaaatgcaattacaacacagaggagggtgtt

SEQ ID NO: 302521 - DNA, 575 bp, Homo sapiens
gcaaatatcaaacagatttctttacactgatttgtaattttctcctcaactgaaagtcaataccatttggatttgaatatcttaattttaaaagaattatctaaaaataacctctacaatatatgtattactcattagtttcattaaataaactccataatatttccaattctactttagwggaattaagtgtaataaaaagaagcatcaaaaagctcacagagtagtgaaaagaagcaacattaaatgtgcttttactactgaatgtaaccacagtttgatcaaaatgcaattacaacacagaggagggtgttataaaatctatggccaataactaattctagtttcatgaagataatgacagttggcttgggtcttgaagcttttaggatttcttaaagaaatagacaaaaagggagatgattttacataattatgtaaaagcatatgtaaagaaacaaaaagtattcctttatctgagctattttactgaacttttgagcttggtttccaatgccttcctggctatttgattttgaataagctcttatcaactgaaatgaaaaaaaaatagt

SEQ ID NO: 302522 - DNA, 575 bp, Homo sapiens
gcaaatatcaaacagatttctttacactgatttgtaattttctcctcaactgaaagtcaataccatttggatttgaatatcttaattttaaaagaattatctaaaaataacctctacaatatatgtattactcattagtttcattaaataaactccataatatttccaattctactttagakgaattaagtgtaataaaaagaagcatcaaaaagctcacagagtagtgaaaagaagcaacattaaatgtgcttttactactgaatgtaaccacagtttgatcaaaatgcaattacaacacagaggagggtgttataaaatctatggccaataactaattctagtttcatgaagataatgacagttggcttgggtcttgaagcttttaggatttcttaaagaaatagacaaaaagggagatgattttacataattatgtaaaagcatatgtaaagaaacaaaaagtattcctttatctgagctattttactgaacttttgagcttggtttccaatgccttcctggctatttgattttgaataagctcttatcaactgaaatgaaaaaaaaatagt

SEQ ID NO: 302523 - DNA, 562 bp, Homo sapiens
tcttcaaacatgaaagagaaagacttttccaaaccaacaaaagctgagggatttcataaacaccagatctgtcctataagaaatgttaaagggattacttcaatcagaaagaaaagggcattaatgagcaatatgtaatcacctaaagctataaaactcactggtaatagtaaggagacagaaaaacacagactagtataacactgtaaatgtggtgtgtaaacctcgctaaagtacaaaaattaaatcatgaactgacaaaaaaaaatagttcccrcaacctttgaagatatagacagcacaatgatatataaatagtgacacaaaaagttaaaaactgagaagatggtgttaaggtgtagagtcttcatttgtttagtgtttgtgcttgtttgtttgcttatgcaaacagtgctaagttgctatcagcttgaaataatgggttacaagatagtatttgcaagcctcatagtaatcgcaaatcaaaaaacataatacaatggatacacacaaaaaaataaaaagcaagaaactatatcatatcaccagagaaaataacctt

SEQ ID NO: 302524 - DNA, 443 bp, Homo sapiens
atggctttcacccagtgtcagcatgggagtccaagtcaggcaatcttcctgcccctccttgagtgtcagtcaatcaatgtcttgtatcagtggagggtcttgatatcatcaggttaactgcccccttcctgcagcaaatgggtttttcctggtgttcatgcagagtccaggattggtgggttttctgccttccttcactggcagatcctttctgtttagccagcatgyagcccagagcaagtgagtttcctggacttcccctgtgacaacagacttctaatatgtattaatacagacctaggagtgcaggcaggtttcttaccccactccttgtgccaatcagctattgcccaatatcagagtagggtccaggttacagtgtattccctgcccctcactcagcagcaggcagattttgcataataaagatccagaacatgtgt

SEQ ID NO: 302525 - DNA, 574 bp, Homo sapiens
ccagggtccgttgcggcgcggcggagcagccaatggcgagccccacagtctcgcgagagtgctcaggcgctcttcgtggctgccctcttagctgctagcggagctcctcagggggcggccgggagcctacaattcctagaaagaaaatacgccattccggaaacagaactgcagttaagaccctcgaaaagatctaagaaagtgtgcatcctaaaacacctgacgaatttcagaatgtgacaaagcgcagaggatgcattatttcaaaacaaaacagaaggctaaaatttgcaggaaaaagaaaatcagtaaaccgggaatcctcggactggattgtaagcaagatttgaatgaataagaagctgaaggtattaaggctgtgatatagaaggtacatatttcatcccacaagagaaaacaataataatcagaaattttcggtgaaaaaaacgcaaaactgtacaggaaaatcatcctccaagtaccagacataaaatgctgcaagcttttgaactaatggcgagagtgtaagaaaatggrctctacttcagtgatcctgtggcaggacgtggat

SEQ ID NO: 302526 - DNA, 574 bp, Homo sapiens
ccataatcaaaaaatcaaaaacaatagatgtttgtgtggatccagtgaaaatggaacacttctatactgctggtgggaatgtaaactagtacaaccactatggaaaacaatgtggagattccttaaagaactaaaagtaaactaccatttgatccagcaatcccactattgtgtatctacccagaggaaaagaaatcgttatacaaaaaagatacttgcacaygtatgtttataacaccacagtttgcagttacaaaaatgtggaaccaacacaaatgcccatcaaccaacaagtggataaagaaactgtgatatatatatgtgtgtgtatatatatatcacatatacatatatatatacgtgtgtgtatatatatatcacacatagatatacgtgtgtgtatatatatcacatatatatgtttatatatacgtgtgtgtgtgtatatgatggaatactactcagccataaaaaggaatgaattaatgacatccgcagcaacctgagtaggattggagactattattctaagtgaagtaactcaggaatggaaaaccaaacattggatgttctc

SEQ ID NO: 302527 - DNA, 590 bp, Homo sapiens
attaataagtatttaaaatacatttggttaaattgtgtgcaaagacataataatrcagttacgtatgctcagatatatatcatgtgttatgttaggaaaaacaaaatgtcctcaacaagactgcctcctgctgaagttcttaaatactgtacattgcctcttggtaggcacaaaaaaagatgttagttcaaaattctgcacctattcttgatataaacccctaaaaaatcaattaattaatggtaattctttaacatgacaaaggagataagtcaacaaatttctagtgtttcaaatgaaaaatctaaaagcctggattttcacaaatgagtaaaggtttaaagctagattgcttgggagccttaacaagctaatattgtgccccgctacaaattgttgtctactttcccttgaccttcatccttggcaggaagctcatgtaattcctcttctagtgctctttatagttcctgtagtgatagagtttctgatatttattctgttatggtacattgacaacttctattccttcccattattttaacatgttgggaaaagtgcctgagttaaatgatacttttacaatggac

SEQ ID NO: 302528 - DNA, 590 bp, Homo sapiens
attaataagtatttaaaatacatttggttaaattgtgtgcaaagacataataatacagttacgtatgctcagatatatatcatgtgttatgttaggaaaaacaaaatgtcctcaacaagactgcctcctgctgaagttcttaaatactgtacattgcctcttggtaggcacaaaaaaagatgttagttcaaaattctgcacctattcttgatataaacccctaaaaaatcaattaattaatggtaattctttaacatgacaaaggagataagtcaacaaatttctagtgtttcaaatgaaaaatctaaaagcctggattktcacaaatgagtaaaggtttaaagctagattgcttgggagccttaacaagctaatattgtgccccgctacaaattgttgtctactttcccttgaccttcatccttggcaggaagctcatgtaattcctcttctagtgctctttatagttcctgtagtgatagagtttctgatatttattctgttatggtacattgacaacttctattccttcccattattttaacatgttgggaaaagtgcctgagttaaatgatacttttacaatggac

SEQ ID NO: 302529 - DNA, 566 bp, Homo sapiens
ttttcccaccaggatcattctggttccaaatcaaaraagtccaactaaaattagtttttaagtgaaaaagaaaaattgataatgcaaataacttggacttcaaacatgacaagatccaatggctccaacatgttatcaaaaagctttgatcagtctctcaactctctccatccagctgccacgtgactgccggcaaccccgtatttcattgcctcatcttagcagtttattcatacagcaaacacttggtgacactgactagacctgctttaatcacatggcattcctcaaccatcgctatggtaaaaagctggctgctgtgatgggcacacattgaatcacatgccaaccccatggcctgaggtttgggcaactatgatcagaagttctaatgagaccacaaggactgaagtagtttccccaagaaagggaggctgggcaggctggccaataatccaacacctctcctatggcttcagcactgatcatcatcccctacactcttttcttttcctctttttatgttactttgttcaattatgtttacggcaggggttctaaaagct

SEQ ID NO: 302530 - DNA, 608 bp, Homo sapiens
aaggtattaacaggaggtgatttggttatttgttgctgtgccacaaactaccccaaatttagcaccttaaaataataaacacctgttacttcaccatttgtgtgggttaagcattcaggagcagcttagctgggaggccctgacttatggtctctcatgaagttgtggtggagctgtcagctagagctgcagtgacctcaaggctcagcagggggagatatattcccatgctcattcatagttgctggtgtsggtcctcagttcctcgctgtatagacataggctaagtgttctcacaacgtggtaaatgggttcactctccctaagtttccctatgacatggcaactggatcccccacagcaagctgtgattcaagagagggcaaaagagtccacccacaatggaaatcccagtctttttgtgacctaatatcagagatgacatctcatcacttcggccatattctatgcagttgaagcaagtgcagcccatcattcaaagccccagtaatgaagctcctctgcttgaggggaggaataccaaataatttgtagtcatatctttaaaatcattacaggagcactggctctccgcatcagaaattatg

SEQ ID NO: 302531 - DNA, 512 bp, Homo sapiens
gtccaagatctgagcttaactgtaagttttaaagaatacttagaaagcacgggttccctggcacagataaaagtatcctggattcaggggtagaaaaaaaaagatctaagaggaattcaacagagatagatgctttataggtctctgagaagggccctctacaacctgtctsccacccctaaaacctacagcagatttgaagcacacaggagggagtaacagaacctcaaataaatttggaaaaaggaaagtaaaagacaattgtgtctggcctggtgaagcctgaggaggcagcaagcctggttaaagaaaactttctgtccagcaggataatctacacaatagattagaaatgacaggatatgctcagtactttggttgtggtgatgttatcacaggtggatccctagggccaaactcatcaagatatatatatacatattaaatgtgtccaacttttatacaccaatgatacctcaataaagctttcaaaagaataaaagaaagaacta

SEQ ID NO: 302532 - DNA, 608 bp, Homo sapiens
tgacacttggaagaaggaaatagcaaggagtgagtttcctgattttatagctggccctagtgtgcaccaggcagaggactaaaacgtcagtaaaaaagctgtagagttactgggttgaagtaacagaggactgagtttagggtaacatgagccgcaggagrtcaggagaaaatctgagaaaggagaagtccagaaaaggggagccccagcttctgactataaactatccaaagctttgtctggtccctacaccacacatgtataggcagacttcatgaagcccagctaaaataataaaattgatttcagttatcatcaagcacagtgaggacagaaatagcaacaaaacacattactttaggcaaagatactcttttcttgaaaacccaaactacattccattacctttcataacagtcatattccttgtccattcttgtttctaccatggttctaactcctacttttattcattacattaatcaaagtaattctctttcaaagaggaaactggaagttatgtaattgaggactattaaaaataagtattttggcagatgtgcaaaattctcaagcacatatattacaactttctatagtcatataca

SEQ ID NO: 302533 - DNA, 590 bp, Homo sapiens
atttttcctgctgtgactttagtttttaattagattttctatccacattgtatatatcttttacccattcaagtttgtaatctatcttgcttttaaagacacacacctttttctccacaagttgcaattacctatcgtttgcatataaaattaaataatttagattttttgaaataatatgtgaggttaaaatattgcttgccaatgctccaaacaaaaatgattacttttaaaatggtatcgaccggcaatgtgtgaattaccatcaaaagcaacctggtaggatttcatttatgttccaaaatacttagagaaacccagtagaaaaaaaaaaaaaaaacagtggaagtgatccccaaatgctcctygttgagttattctcttagaaaagcttctggaaagtctgtctacaaaggtaaagggtttggtgtttttgtatagttcctaagatgccacagtagcctcacagctgtctgttgcagcttgctgtttcccagaatgagaataaatgagtggcacgagggaaaggcatttaaggctaacatgacaaactttatgcacttgttgttccacaacataaaaaatatcca

SEQ ID NO: 302534 - DNA, 590 bp, Homo sapiens
atttttcctgctgtgactttagtttttaattagattttctatccacattgtatatatcttttacccattcaagtttgtaatctatcttgcttttaaagacacacacctttttctccacaagttgcaattacctatcgtttgcatataaaattaaataatttagattttttgaaataatatgtgaggttaaaatattgcttgccaatgctccaaacaaaaatgattacttttaaaatggtatcgaccggcaatgtgtgaattaccatcaaaagcaacctggtaggatttcatttatgttccaaaatacttagagaaacccagtagaaaaaaaaaaaaaaaacagtggaagtgatccccaaatgctccttgttgagttattctcttagaaaagcttctggaaagtctgtctacaaaggtaaagggtttggtgtttttgtatagttcctaagatgccacagtagcctcacagctgtctgtygcagcttgctgtttcccagaatgagaataaatgagtggcacgagggaaaggcatttaaggctaacatgacaaactttatgcacttgttgttccacaacataaaaaatatcca

SEQ ID NO: 302535 - DNA, 590 bp, Homo sapiens
atttttcctgctgtgactttagtttttaattagattttctatccacattgtatatatcttttacccattcaagtttgtaatctatcttgcttttaaagacacacacctttttctccacaagttgcaattacctatcgtttgcatataaaattaaataatttagattttttgaaataatatgtgaggttaaaatattgcttgccaatgctccaaacaaaaatgattacttttaaaatggtatcgaccggcaatgtgtgaattaccatcaaaagcaacctggtaggatttcatttatgttccaaaatacttagagaaacccagtagaaaaaaaaaaaaaaaacagtggaagtgatccccaaatgctccttgttgagttattctcttagaaaagcttctggaaagtctgtctacaaaggtaaagggtttggtgtttttgtatagttcctaagatgccacagtagcctcacagctgtctgttgcagcttgctgtttcccagaatgagaataaatgagtggcacgagggaaaggcatttaaggctaacatgacaaactttatgyacttgttgttccacaacataaaaaatatcca

SEQ ID NO: 302536 - DNA, 551 bp, Homo sapiens
ttgctgagctgaccaagactttatactgccttttcttgtcactccagtggttaaaaaaaaaaaagttcttacccgtatttctaatctactagtagttatcattgaagtgtttataaagygaattaaattcataattttcagtaaacatagcaaatttaacaagattgattataatactcctgctccaagaggacctcatttattataaaattattttctcccagagctcttcctagctcttagattttgttgaaaacatctagaatttacttccaaactactgctgatggttctttacattattagtcatataattcatttacttatatttttaaataaaattcaaaaccacataaacaaaaattgtttaaacaagtaaaagttttgctggtttgagtgctcactcaccactgctgcttatttgccatgctgtgccttttattggttgttttatcttgacttggctcaatttttttcaggaaagatgcaagtgtcgcagtatttctgagccatggcattgtccataaatgacttgattttaccctcacact

SEQ ID NO: 302537 - DNA, 579 bp, Homo sapiens
tgatggatatgtagaaaaacaagaagatcattaagaatgtaaaaacagccctgctaatcctccacttcagccagaggaaaattgcatggtggaaaastgctactttaagcaaataaaaaatactgagatatgaggctaaccagatacctaactgctttgaaactaatctgagaatgtcaaatattgttataattttaattaggttatgattaacggcatctatatttggatagtcattataagtacatctaatagcaacacccgagcaaaagtgttctgcatatggccaagcttgagaggatgaaatccatcaaacaaatctggttctcagcccagtcaattaagtttgccaattaaatccatccagtccatgaatattttttttctttatttgagacagagtctcactctatcacctagtctggagtgcagtggcacaatctcagctcacagcaacctctgcctcctgggttcaaacgattctcctgcctcagcgtcccaaatagcagggattacaggcctgcgccaccatgcccactaatttttgtattcttagtagagacgggttttcaccatgtt

SEQ ID NO: 302538 - DNA, 579 bp, Homo sapiens
tgatggatatgtagaaaaacaagaagatcattaagaatgtaaaaacagccctgctaatcctccacttcagccagaggaaaattgcatggtggaaaagtgctactttaagcaaataaaaaatactgagatatgaggctaaccagatacctaactgctttgaaactaatctgagaatgtcaaatattgttataattttaattaggttatgattaacggcatctatatttggatagtcattataagtacatctaatagcaacacccgagcaaaagtgttctgcatatggccaagcttgagaggatgaaatccatcaaacaaatctggttctcagcccagtcaattaagtttgccaattaaatccatccagtccatgaatattttttttctttatttgagacagagtctcactctatcacctagtctggagtgcagtggcacaatctcagctcacagcaacctctgcctcctgggttcaaacgattctcctgcctcagcrtcccaaatagcagggattacaggcctgcgccaccatgcccactaatttttgtattcttagtagagacgggttttcaccatgtt

SEQ ID NO: 302539 - DNA, 579 bp, Homo sapiens
tgatggatatgtagaaaaacaagaagatcattaagaatgtaaaaacagccctgctaatcctccacttcagccagaggaaaattgcatggtggaaaagtgctactttaagcaaataaaaaatactgagatatgaggctaaccagatacctaactgctttgaaactaatctgagaatgtcaaatattgttataattttaattaggttatgattaacggcatctatatttggatagtcattataagtacatctaatagcaacacccgagcaaaagtgttctgcatatggccaagcttgagaggatgaaatccatcaaacaaatctggttctcagcccagtcaattaagtttgccaattaaatccatccagtccatgaatattttttttctttatttgagacagagtctcactctatcacctagtctggagtgcagtggcacaatctcagctcacagcaacctctgcctcctgggttcaaacgattctcctgcctcagcgtcccraatagcagggattacaggcctgcgccaccatgcccactaatttttgtattcttagtagagacgggttttcaccatgtt

SEQ ID NO: 302540 - DNA, 565 bp, Homo sapiens
ttctcatcccttaaactcttctgggatgtaacctaagcacattttcccatatatgttaaatcatctctagattacttttaatacctaattcagtgtaaattctatgcaaatagtgagtatactmtattttaaaacatactgttttttaacttttgtatttttattgtttattttttaaaatattatttttctgaagttgcttgaattcctagatgtggaactcacagatatggaggaccaatttatattcaatttttgtaattaagtagctagctgactgacaagtaggcaggttgcaaggaataactttccctgtgaacagcattaagtcaataagctagtaacagcaaaaacattgcaaagtaaacccaagtgttcctaggaatatatactagcagataaaagaagttaggcagtgactaatataataatattttttataatagcctaaaactggaaattctccaaatgtttatcattggaggaagaacaattatatatttatacaatggaagaatctgcaacaacaactaaagaattaactactgatgtatgcaatcacttg

SEQ ID NO: 302541 - DNA, 425 bp, Homo sapiens
cttgggaaaaggggaaaagaagaacatttttatcatcaccctgggtctttttggcggtaaaacaaacaaaaacatcctcctactgttgcacaaaggaagcattttggaacaaatggtgcaaagtatttgtaggagaagttatatacctcctgaaattctgcactctcatgcatttgtacagtatctgattagtaaaacaaagctgaggacaagagaaacctttctgtattcctgcccccacacaaytaaagaacataaatacttccagatgtaaggtgataaccaaataaagactgatgtttcctactagagaattatgttagaaattttaacgggcatgcatcttcaaaagagttccttagttcaatggttctcaagccttagcatgcatcaaaatcacttaaagagattgtgaaaacacagat

SEQ ID NO: 302542 - DNA, 545 bp, Homo sapiens
ctcatattacccagggaggcaatgacagagccattattcagacttggtatgactcccaggccaaagttctttctcccatgcacactaggtcatcattccttcatcaagctgtcactgcagtagaataatgatggtgtcagtagagctggataagagcctacacttaatacarttttgaaaatggcaaagcttatttagcaaaacacagtcaatgtcattttccactatgatgtgtcatatctcagcacctttctggagcacagttacttggaggaattttttcaccaggaacctgtgttgatcagatgaccacagggtaccacaaccatatagcctcaccactattggtggcaatacagcatatactcagttttcaaagagttgctctaagtttagaccaggttgaagtgagaaagggcatggaggaagaggagaggagaggaggagaggagaggaggagagaagaggggaagagaagagaagagagaaggcattctgggttgcacagctttgtgtaccagattaataagaaaaaatttcagggc

SEQ ID NO: 302543 - DNA, 522 bp, Homo sapiens
ttctgtgctggcaattccacatctatattgtttacttggtctatgctcagtgctctgcagagtatctggcacatagaaagcacttattacttgttttctaattcatacacttatttcarataagaaagttatatttctctgaacttatggaccctgttcctatgctattttatctggtaattgggcagattatctctctcttttgtcagcctgtgtaacttctgctcatttttcccaatccaacttaaaactctccaagacagttatttctcctttgttccatcttttcatacatttgctgttagaatcgcacagtcaacatttgattacattcattctttcttttcataaaagtacgttatatttcacaggcctgtgttttttttttttttctatgagatatttttaaaagagattctgaaagtcttttttttttccatttattttcagagcctatgcctgctaggcatcttcaatgtgagagtaacaacttgctgacattgatttagaagatactgaaga

SEQ ID NO: 302544 - DNA, 570 bp, Homo sapiens
cgcttggtctggagctgatcaaagagaaagcttagggaagacagccttattattattttttttctaagaggctgcatgtctagaggttgtggtgaacatttcaaaactcatctgagaaaataacagggtagatgtttgtctcttaggatgcattcatgaaaaacgtactgacaaagtccatctgaaaaccaataagaaagtcaaggttaataggagatatttgtgtgagaattccaaacaacattcacagagattctaatttaaccttatgtgaaaatgcaacacaataagcaaaacaaatccattttaatttaaatcacagtaatctgtgtatttggcscctttcattcaaatatatatatgtttagttttcaagtattgaatttaatcaacccaaaagtacaaaaattgacaatctgacagaaaagaaataatcgaataggcttccttctttcaacatgaatttagaacttgtgggctgagaaaatctatttgttctttattcattccatgtcataaatctatagaaccgaacaatcttgttttgaaaatcctggtcagacagggaac

SEQ ID NO: 302545 - DNA, 517 bp, Homo sapiens
cctattgaggctgagcaccatgataattatactgtataggtgattagaaattaagccaaaaacaaagacacctgatattttagtgagctttcttaacctttagacaaatgaacaaatttgttaggtgaacagagattaaacggctgaatttaagctactataaaacatttatgttcttttgtttgctattagaagagaataagtaggagacaactaggaatttggaatttagaagaatattttaatattcttacagaattctatgctatgaatgctttcttgctaaagtgaggtatttatttgtatattcttaagcttttaaaaaacgttacttgtctactttatgaagagtcagatattgttatttgtttgtatgagcrtactattgattctgaaaaatcttataaacaagaacaaatgagattaatgaattgctacattggaagttagtttgtaaccatgcctttttcgctagtcatttgttaataaaatttaagaaatgaaaagcaaggatgaa

SEQ ID NO: 302546 - DNA, 653 bp, Homo sapiens
  misc_feature (1)...(653): n = A,T,C or G
actgtaagaatttgtagtgccaaaaaagaatcatgaatgaattcccacataatgaagctatgaagaactttcagaggccatggaaataaatgaatttttgaagagctataggtagacctaagtagctagagttaagaaattatcanagataatgaaccactggagaaagtggagtcagtagagtcaatctaaggtacaagaaagaagattgagtcacagaaaccaaagaatgagttaccagatagaaggactcacactcaccatgcgcgttgaatgttgcaatactgtttctcttctcttcagtgtccctcttttcctccttgtagcttaaattcaraggtcatttaatcatttccttgcatacaaataccttcagttccttcgctcctctctgttttggcaaaaccacagctttggttaaatctcacccttgcagctaagtgggactggaaaataattcaaaaaacataatgactggtctcactttaaaggcagtgggctcttaatgttacccagcaattgtaccacacttctttgatccattcactctcctagatgattgtttcattctttttcctctcctgaaaacctccaacatctcttcttcatcaaggcaatcagaaaagttttcacaagtacctgacatcacattt

SEQ ID NO: 302547 - DNA, 475 bp, Homo sapiens
actctgcctcccgggttcatgccgttctcctgtctcagcctcctgagtagctgggactagaggcacctgccaccacgcccggctaactttttgtatttttagtagagatggggtttcacygtgttagccatgatggtctcgatctcctgacctcgtgatcccccttgcctcagcctcccaaagtgctgggattacaggtatgagccaccgcgcccagcctatagtgttcttgtctctttttacaatttttgacttaatgactattttgtctgatgtaagtatagctacttctgccctcttttggtttacatttgcatggagcatcttttccatcccttcactttcagtctctgtgtgtccttaaaagtgagatgagtttcttgtaggcagcatatagctgagtcttattgttcatttattacatctcttcattagataattttataatgggatattatatatatggtttcataga

SEQ ID NO: 302548 - DNA, 623 bp, Homo sapiens
taactcataatggattgaagacttaaatgtgagacccaaaactatgaaatcactagaagaaaacatagcgaaaagcttcatgacattggtctasataaggattttttttttagataaaaccttaaaagcacaggcaaccaaagtaaatatagataaatgacattacgtcaaacaaaaaagcttttaaatggtaaaggaaacaacagagcaaagagacaacctgcagaataggagaatattttttgtaaactgcatctgataagggtttaatatccaaaacatataaggaactcaaacaacataacaacagaagaactaagaaccctgttttaaaatgggcaatagttgcctgtggttttttacaggtacaaaaatgtgctgtttaaagccacacaaatcctctgtgcactacaatattgttataatttatttctgttgtgaattgatttcttttttcagaaaaatatttccatgaggggaaggagataatatagtagtgacagagtgacagctaaactgttccgcatatggaattaatctaaattcagaagtttgaaagcatttgaggagctgggagatacaagcagagtactgaggctaggaagtagatgcaatcaatctgt

SEQ ID NO: 302549 - DNA, 579 bp, Homo sapiens
tatcctgacagtatcttacaatatgtgtaatatatgatagatattagtaggactacacacattgatacagtttgrctctgcgtccccacccaaatctcatctcaaattataatcctcccatgtcgagggagggacctggtggaaggtgattagatcacgggggaaattcccccatgctgttctcgtgatagtgagggagttctcatgagatgtgatggttttaaaagtgtcactttcccctgcactctctctcctgccaccttgtgaaaaaggtgtttgcttttcctttgccttccattatgattgtaagtttcctgaggcctcctcagccatgcagaactgtgatcaattaaatgcctttcctttataaattacccagtctcaggtagcatctttttagcacaggcccagaggactaggaggggaaaaattgtttcctgggtcaggcccagggccctgctgctctgtgcagcctcgggacttgatgccctgcatcccagtttctccagctccagccatggctaaaacaggccaaggtacagactgggccattgcttcagagggtgcaagccccaagcc

SEQ ID NO: 302550 - DNA, 431 bp, Homo sapiens
atgatggtgttcaaattataactgtgactatggacagtgwaggtatgttttattttagaaaacaccagacttaaaagactataatatacaggaattgtcctaattctatcaacctgttcccagggatctcataacaaggaactatataggtgccaaagattgttgctggttgagtagtggttttggctgctgaacctgggcagttgtagccatctgttcctcaaaattgtttttagaaatatatataaaacaattagcaagttggatttctacagactaagccaagaaaatgcaattctgttgaattgggtgcaaaataattttcattttagataaaagagaaaatagaatggaatttgtcagaagctattgtaggtcaaaattttttgacctacaattataggcagaaaaaatttgaaagagagaggtag

SEQ ID NO: 302551 - DNA, 634 bp, Homo sapiens
gggtcagaggactttagcaagattgttaaaaagtccaactatcaaaaactttccatatttctaaggccatattttctctttttaaagtatctatttgacagcccagaatgcagggcagatgctaatgcacacagcaggggagaataattaccaaaaccattcatttactaggtgatctttaaggcctcttctaactttaaaattctatgcctacgtctaaattagagagtcattttcatttgaattgataaagctaatcatacgttttaattaagatattttcctttcattaaatgactgtgtgtcagattagggaattatgttaatagggaaccaaattttgtctggaaagccagggtcatgcagcaggcagaacttagacaaatgactaagatctcttgtaaaacaagtttgccagcagagcttgagctaaagcgtttgtcagttgggcaagggaatagataaatatatcgatattgctaatgggaacacgaattagtggaggtraacatggagtcaacaggtaaagctaacttaggtttggggaagaggcgattgtgagtctaatcctacttttctaatgggtcacccagattttcccccatcaattccacttccaaaccaaactagctta

SEQ ID NO: 302552 - DNA, 444 bp, Homo sapiens
ttccttttctgattaattttgactttaaacatgttccattgagtacatttttatcctaagtcttctttgtgaccattcgtctgatatttttatataattaacttattctttcagctttcaggtttaattagtttaaatttcctaagagtaatgtttttgtttatcttttatttcaamaacacctggcctggctctggattcattgcctctgagtcaagcactttttctggattcttcattattaaccaagaggatgcagggcaatatataataaaaaatacggccaccaagagaattatgcatgagaaagttagaactatttatggtaggaatatgagtaaacatatctatcataagaagaacacatggacttatcagatactatcagttaagaagttaaattgctaacatttttatttgaatgaaacaaatgacaatagtgaa

SEQ ID NO: 302553 - DNA, 589 bp, Homo sapiens
atttgtgaattaagataccattagcattcttaatccataatattattagggaagagataaacaagcctagaaatattttaatattaaaagttaatttctagaactagagttgtatagaacagagggcttcaaattttgaccacaaacaaatgagttaacaacaacagagtccactactcatataagtgaaactatctatttataaattatatacatttgctactcaactaacatatcaactactttataaaccgtgtaacatgattaggcattttgaaattcattgaataaagcagagataaataaaattttgaaaataattatatctcagctgatacaatgatgtcgtaaacatgttgttctcagtaaacaaaaaaaattggaagagggaataaaaacacaatctttaacagtcctcgctgatargagaaaaatactaattgttaagaagaccttgccaaaaagtcaaccaggaggttttgtctccttcaagattaactcaaagtttatgagcatccctgtctaatgagaagttgctagtctgaataacaaaagaaggcagtagtttattttaaaaggggggaggatt

SEQ ID NO: 302554 - DNA, 526 bp, Homo sapiens
gtataacccttccggctcaagtgggcaggggttccagggtaccaccaacttgacttggcttttcctttgttcccagagtgacccatcttcaaagcatctctgaagggactttggtgccattgaacatcaaagactgaacactgttaccacagaccaagtcccttatttttttaaaaagacacaaccaacccagagaggcaaattagcccttggttatacaagaagttgtaagaagcagcatatctcttatgtcttttctttgcagttgctacagagtaaaagaaaatcaattcggtgtattctccaggagtatggaggaaaacagcccttatttcaaaaaattttggaaggaagaaaaccaaaataatttrtgtggtcattgttttgtaatactgatggtgaaatgcatgtgaattatccagacacatctttatttcagccatcctaaaattttgactagaattacatattaaactctaattgcataaatgtaattaaaatatcagctcatcaatgattcatattt

SEQ ID NO: 302555 - DNA, 533 bp, Homo sapiens
ctctgcttgtggaaaagacagggactattgggaaggactttggcttgtggcttggttgccagctgagctgcagtagaatacagcrccaggtgaattcttgaggtttctgactccaggccctgactcctggagggtatctctggatgaatgcaggatcaagggaattcaacaccctaaaaggaagaacacaagcttttctggctttgccacctgccaattatagagccctagggcctggagcaaatgtaggcagtaaccaggcagtgactacttggtgagatcctgtgctgtgctggcttcaagtcttacccagtgtagaaccagtgatgatggccacaggggtacttttgtcacccagctcccggttccaggcagctcagcatagaaagagaaactccatgtgttgggagaaagtaagggaagaggaaaagattctctgccaggtcatccagagaattcttctggaacttatccaagaccactgatgtattacctctgcgagtcagcaaaagccacagtgttactggacagat

SEQ ID NO: 302556 - DNA, 582 bp, Homo sapiens
gaggttcctggttacaaaactggcttcaagaggttaagtaacttctttatagttacataccaactatgcagagggattcaaaccctctctctcaggattmaaaatcagtgttgtcatctcctccactaaccaatgaaaattccattatgaaaaaaattgtgaatggcattaggtaaataaaattcactaataatttatattcaatttattcacaaaggataagagaaatttcatattttttgtatgttcttctcagcaaattttttacatttaatatatagcaaccctaaacctctctcaaaattttttttcatggtgttaccaaaaatgtcatggatcattttattgtatctaatttcagactgttgaaaatttttatctcattttatcttaaaagaaaatatacaaaagagtatataaaataaatatataagttgaataaatgatagcaaagccaaaaaaaattcatgttactaccactcaagtcaagaaaaaaatgtttgttatcaaagtttctctagtccttaccaattgcaattcatcccccagaggtaaccataattgttcatttatacccattat

SEQ ID NO: 302557 - DNA, 574 bp, Homo sapiens
ctagaggaggaagaatgaaagagtgagaggggagggaaggaagaaaatgaaagtgagtgattaaaatatattattaaaactgaggttcctggttacaaaactggcttcaagaggttaagtaacttctttatagttacataccaactatgcagagggattcaaaccctctctctcaggattcaaaatcagtgttgtcatctcctccactaaccaatgaaaattccattatgaaaaaaattgtgaatggcattaggtaaataaaattcactaataatttatattcaatttattcacaaaggataagagaaatttcatattttttgtatgttcttctcagcaaattttttacatttaatatatagcaaccctaaacctctctcaraattttttttcatggtgttaccaaaaatgtcatggatcattttattgtatctaatttcagactgttgaaaatttttatctcattttatcttaaaagaaaatatacaaaagagtatataaaataaatatataagttgaataaatgatagcaaagccaaaaaaaattcatgttactaccactcaagtcaagaaa

SEQ ID NO: 302558 - DNA, 574 bp, Homo sapiens
ctagaggaggaagaatgaaagagtgagaggggagggaaggaagaaaatgaaagtgagtgattaaaatatattattaaaactgaggttcctggttacaaaactggcttcaagaggttaagtaacttctttatagttacataccaactatgcagagggattcaaaccctctctctcaggattcaaaatcagtgttgtcatctcctccactaaccaatgaaaattccattatgaaaaaaattgtgaatggcattaggtaaataaaattcactaataatttatattcaatttattcacaaaggataagagaaatttcatattttttgtatgttcttctcagcaaattttttacatttaatatatagcaaccctaaacctctctcaaaattttttttcatggtgttaccaaaaatgtcatggatcattttattgtatctaatttcagactgttgaaaatttttatctcattttatcttaaaagaaaatatacaaaaragtatataaaataaatatataagttgaataaatgatagcaaagccaaaaaaaattcatgttactaccactcaagtcaagaaa

SEQ ID NO: 302559 - DNA, 522 bp, Homo sapiens
ccatccctgctaatcatatgtttgatcccctggtaatcattatcaattctgagcttatcccagggccctcaaccatctggtcatttcattagcatacaaaagacacatcatttcagagattccaaaggttttaggagttgtatgccaggaaatgggttaggggrgacctaaatatatagttgttattaaagcaaaatattataacctctaatctatatgtttacctttgcttttttctatgatttactctgcataatttgttatgatctgccctccaattttcgaaaccttctatctgttgttgctatttatatatatattttttaatttggaatattatgttttttactatttcttaagttttattcacgtgaaaactctacaagttgtattgtataaaagctaatgtccaggatttgcaagttttattctagttatgcaagatgttaacattaggggaagctgaataagagatatatgggaactctctgtactgttcttacaacttttctgtaagtctaa

SEQ ID NO: 302560 - DNA, 522 bp, Homo sapiens
ccatccctgctaatcatatgtttgatcccctggtaatcattatcaattctgagcttatcccagggccctcaaccatctggtcatttcattagcatacaaaagacacatcatttcagagattccaaaggttttaggagttgtatgccaggaaatgggttaggggagacctaaatatatagttgttattaaagcaaaatattataacctctaatctatatgtttacctttgcttttttctatgatttactctgcataatttgttatgatctgccctccaattttcgaaaccttctatctgttgttgctatttatatatatattttttaatttggaatattatgttttttactatttcttaagttttattcacgtgaaaactctacaarttgtattgtataaaagctaatgtccaggatttgcaagttttattctagttatgcaagatgttaacattaggggaagctgaataagagatatatgggaactctctgtactgttcttacaacttttctgtaagtctaa

SEQ ID NO: 302561 - DNA, 579 bp, Homo sapiens
attgcattcgtggttcttattcctcacctttgatcagtgattctcatcattgtgatttctttttatagatttatatgaaattatttataaagtttatatataattttaattaaaagtaataattgcacatatttatggagtactgtgtgatgtttccagtgtgtaatatttacattgtgtaatgatctaatcaaggtaattaacatatttaccatctaaaacatttatttctttgtggtyagaacattcaaaatcttctcttctagctatgttgaaatatacattatcgttaactatatcacaattctgtgcaaagaagactagaacttattcctctgatctaactgacagagtactcatttacaaaccccttctcatcttctctactttccctagtctctggtaaccatgattctactcgacttctatgagatccaccttttttagatcccatatgtgagtgagatcatgtagtatttgaccttctgtgcctggcttctttcacttaaaataatgtcctcttagttcatccatgttgttgcaaatgacaggatttcattctttgttatggctgaatag

SEQ ID NO: 302562 - DNA, 579 bp, Homo sapiens
tgttactgatttatagttttattccattattgatcagaaaagacacttgacatgattttgatttttaaaatttgatgagtttttttaatttctaaaatatgatctatcctggagaatgttctatgtgctgttgagaaatatgtgctttcttcaactatcatatgaaacattctgtaaatgttttttaggtccatttgatctagagtacagtttaacttccctgtttgttgattttccatctgcatgatgcgttcattgctgagagtaaggtgttgaagtcttctactattattgtattgcagtctatttctccctttaggtttaycaatatttgctttatacattttggtgctccaatgttgagtgcataaatatatttacaactattatatcctttagttgtattgacccctttattattatataatgtattttttgtctctttttatgggttttgctttaaagtctattttatctgatatggatatagatattcctcaatttccacttgcatggaatatcattttcaatccttttactttcagtgtatgtgtgtccttatagggaaaatgggtctat

SEQ ID NO: 302563 - DNA, 520 bp, Homo sapiens
ggctctttaggtagcaggtgataaatattgacaggactgggttagtcccttcaaggcagtaggttccctttagacctaggatgtgtttagaaatgtaatcctggagctagggcccagaatgggagcattaagactctgcttggtgctttatcctactgtggctgagcttgtatccaagaagaaaaactaagtgctttttactcttagctctcctccccttgagcagaaggaaggagactttcactgctgtgagctgcactgccttgggtaatgggaggagtggtgcaagcactcctttagcggccctgactggtatctccctagatcatatgccasgctagtccactggttctgacctcagcccagcactaggagttgcctaggaattgccgttctaggaattgcagtgcttgtgtcctagactgcctttcaagtttacttagcaccctatagcactttggcctgtggtagtgaggcttgctgagaaatttgagttttgactgatgggatgggtgattct

SEQ ID NO: 302564 - DNA, 520 bp, Homo sapiens
ggctctttaggtagcaggtgataaatattgacaggactgggttagtcccttcaaggcagtaggttccctttagacctaggatgtgtttagaaatgtaatcctggagctagggcccagaatgggagcattaagactctgcttggtgctttatcctactgtggctgagcttgtatccaagaagaaaaactaagtgctttttactcttagctctcctccccttgagcagaaggaaggagactttcactgctgtgagctgcactgccttgggtaatgggaggagtggtgcaagcactcctttagcggccctgactggtatctccctagatcatatgccaggctagtccactggttctgacctcagcccagcactaggagttgcctaggaattgccgttctaggaattgcagtgcttgtgtcctagactgcctttcaagtttacttagcaccctakagcactttggcctgtggtagtgaggcttgctgagaaatttgagttttgactgatgggatgggtgattct

SEQ ID NO: 302565 - DNA, 564 bp, Homo sapiens
atataattcttccaacacaatgatatagatttttgtataagccccattgtatagatgaaaaaacaaaggcacagggaataatgtgttttaatgtaaatccaggtttctactgtaatactgggaagaaaatagagggaaatgaattttcactttggcactttttccattttcctagttatttgtcttgctctagcatttcttgggccaaagtattacaatttggaatcttagattccatgctgaaacttcagtttgctcagttgagaaatgaggataaaaatctttctgctctctacttcctggggctgttataaatatccaatagacttggctcacttgatgaaatgaagaacaaaggataaggaatgatgtagaagaatcaagatgacctctacacacactgcagtaactcacaattcacaagaccagaggagaatggagcaaaggtggggagtgattaagctagagaaggaaagagaagcagtacatgtccagraactatcaaagtttagagaaatcagactatccatttatcccctggccttggccaccagaatactatca

SEQ ID NO: 302566 - DNA, 607 bp, Homo sapiens
tgctcttgatactctagttcctttagttgtgttgttaggatgtcactttgagatctttctagctttctgatgtggacatttagtgctataaatttccctgttaacacgctttaactgcatcccagagattctcatacattgtctctttgttctcattagcttcaaagtacttcttgatttctgccttgatttcattaattacccagagatcatttaggagcaggttgttcaatttccatgtagttgtttggtttttattgagtttcttaatcttgagtcctgatttaattattctgtgatctgagagactgttatgatttcacttcttttacattttctgagaaatgttttactttcaagtatatgatcaattttagagtaagtgccatgtagcaccaagaagaatgtatattctattgtttttaggtagagagttctgtagatacttaycaagtgcactcaatttagagctgagttcaggtcctgaatatgtttgttaattttctgttttgatgatctgtctaatttggacggtgtggtgtcaaagtctcccactattattgtgtgggagcctaagtctctttgcaggtctctaagaacttgttat

SEQ ID NO: 302567 - DNA, 578 bp, Homo sapiens
caaaatcccttaccttcttgctggtgacttgctagaaagaaaatactgagtgcctcgcatataccctcttttgcctcccctcatttttctctccctcttaccattttggttgtctaaatatttgaagtggtgtcttaggcagctgggacttctgtaacaaaataccataaattgagtagcttaaacaacataaattmatttctcacagtgatgaaggctgcaagtccatgatcagagccagcatggtcaagttctcgcaaatggccattttatccctgtgtcctcacatgacagagagagagctctggtgtttcctcttcttattagggtatgaatctcatcgtgggggctctaccctcattatctcatctaaacctaattatccccaaagaccccatctccaaatactatcaccttgggagttagggcttcaacatttgaatttggggggacaaaattcagtccatagcaaataaaagcttattttcttctgcagggaaaacaaacatgccctgtcttcgttgtacttgcatgatgtctgaatctcctcatcctaattttaaaattggcctgattcc

SEQ ID NO: 302568 - DNA, 621 bp, Homo sapiens
cactagccaaatctaaaataatttgaaaatcaaaataaatgaaattactaatggattataacccaccaaataagataaaaatccatgagcccatactgatataaataattaataagggacaactcttcctttcagmagactgctgactaataaatatggatgaaatgatggagttaggaaatcataagtgagtgccaaaactagtgggtgaacatttgatgttaagggaaagtgcttgtccttccttagggaatgcacactgaagtattcagaagtaaagaggttacaagtatcctagtcaatttcaaatgtttcagagaccaaatgagagccagagagagggaaaatataagaaatttctgaagcaatgtcaagggtatacatgattttttatactatcttaaaattttttataattttaaattttatcaacttaatagtcataaacaataaaaattccacccattaaaaaaataactccctgtgaaagaagaaaaattacgcgactttgaaatggaaagaacttggtaatgctaaagcagacaaactagaaactaacatttccttattacaaatgtaacataacccattgcagcatagctatgaccaaaaggactattt

SEQ ID NO: 302569 - DNA, 459 bp, Homo sapiens
gggggaccagcacaacttacatggcagaatcaggagcaacagagagagaggagggaggtgctatgcacttttaaacaaccagctctcatgagaactcactattatgagaagagcaccaagggtatggtgctaactcattcatcagaaaccatccccatgatccaatcacttcctactaggccccatcttcaacactsgggattacaattagacataagatttgggtgggaacacagatccaaaccatatcattctgcccctagctacctcaccaccacaaatttcatgtctttttccattgcaaaatgcaataatttattctcaacagtctcccaaaatcttaagttacttccacattaactcaaaagtccaaagcctcatctaagaaaaggcaagtcctttccaccaataagcctgtaaaatcaaaaacaagttagtaacttccaagataaaatggag

SEQ ID NO: 302570 - DNA, 625 bp, Homo sapiens
tctttaacctttggaatcccaacaatytcattcctatattacagatacttaatagtctcctcaacaggtagtactgtgagttttaaatcaaacaattgtgcaagatggacaatacagagccaggaatgtgacaatttttcaatgaatgctaactcacaaaattttactatctcccaattttaaatcctcctctgcctgaaaaattaaagaaagaaaaagatatgaattactgggctcagaaggatttacttggtagcctgcaagattttgaatataaagatggaaattaaatagactttcaaacacttccttttctctctctatgccttaagtaatctcatatatcattttcaccatcctatgtagactttcccactatcacagtatgtatcttcctttcttggtatgtgagttttgattgggtcaacaaaacacaggttgcatttctttcacatattcatttgtagtgtgtttgcactggtatttattcctgggtacatatcacattaaatgttatttattacataattactaattatattacataattaatgatatatattaatatatgtttattaaatatattcacaaacatgtatatacacgtgtgtatatacacgtaagt

SEQ ID NO: 302571 - DNA, 560 bp, Homo sapiens
atttggggaaggagaatttgagatgattaccaggaaaaggtgagagtataaggaaaccagtttatttttagtaacaatagaaatgataaaaataattattatttgtaacaattgtacatgagacatatatgaaaggccttcataacatatttagcactgacgggcatatcaatctttcctttatctaagaaggatttttgttgttgtcacttttaaaaatattaataataatacttgggtctttccctttaggcctgcctatgactgtgtgtgtttgatagaccacacaggtgtatgcacagttagtgcagaaaacactgtcattatgcaaatgtgacaagtgaaacacctagtcagaataaatctccttgatgcaaacatatctaacaggaggtttacatggttttgcctcctgagagcatagaatgcttaattttaattgtcaaggaagaaccatctatttcggaagtctacgtagaattcttcttagaaatctacatagaatactaaaggtaygtaatcattaatttgtggtataagttaatgaaagatttattaag

SEQ ID NO: 302572 - DNA, 619 bp, Homo sapiens
aaaactcacagctttacttgttctgaaccagtgtacacatcttaaatgtcatcaagatacaaaatacaacaaatgaaagtgtgtaagtccctcctcgtgttgagacctttccctgtcataatcaaagcgtgctaaggcattatgtccccagacccacacaacaacatttttgtagtgagatgtttcatactataccttccctaagaggtagaatgaatatgtaacaaaaaaagcgtgatttgcatggataggcaggtaagtatttacctcttgaatgctaagaagggtactaatctaaagctccttatccccataattctatcacagtgcattctggaaaattatgctttttgcttccttttatatgaaaatactagtcccagagttgyagtcaatttcaatacacattttagatgcaatctctgtttaagaagcagcaacacttaactcatagctatcataaaataaagggctcctaccactaaagagacttgattggtcctcatgataggtggactgggattaaaaacaatttaaccagatttttcaaataaaggctacattagcagacatgagaatttcagtaattagaaatttagtaattatatgtgattattcc

SEQ ID NO: 302573 - DNA, 619 bp, Homo sapiens
aaaactcacagctttacttgttctgaaccagtgtacacatcttaaatgtcatcaagatacaaaatacaacaaatgaaagtgtgtaagtccctcctcgtgttgagacctttccctgtcataatcaaagcgtgctaaggcattatgtccccagacccacacaacaacatttttgtagtgagatgtttcatactataccttccctaagaggtagaatgaatatgtaacaaaaaaagcgtgatttgcatggataggcaggtaagtatttacctcttgaatgctaagaagggtactaatctaaagctccttatccccataattctatcacagtgcattctggaaaattatgctttttgcttccttttatatgaaaatactagtcccagagttgcagtcaatttcaatacacattttagatgcaatctctrtttaagaagcagcaacacttaactcatagctatcataaaataaagggctcctaccactaaagagacttgattggtcctcatgataggtggactgggattaaaaacaatttaaccagatttttcaaataaaggctacattagcagacatgagaatttcagtaattagaaatttagtaattatatgtgattattcc

SEQ ID NO: 302574 - DNA, 627 bp, Homo sapiens
gtattttgtgatatttgcaaaacaaaaacaaaagtgagcaaacacacaaacaaacaaaaaatctgtgttctaatgcatgatactcagaaagtcattaatcccttggtatttcaattttctcatatgtaagaagaaattattagacttgataaatttcaagacccctcaaactctttttaaaaagctattactcttattacacatttaaagtatgcgtactgttattttctctctcaaaaaagccctccaaattaacctacttttttacttgtgactagatttggctataagggcatccaygatagaaatctaaaaagtttcctaacatccttttattgcctttctcaaatcttccccccagcaatagatgcttagtaatattacatctatataattatggaaaaccactgggaccagtcttcatcagcaaatgaatataagtttcattgtaactttcagatcatacttacactaggagcaaatgataatatcattccctataaaagaaaagagaaagaagaaaaatagtatctctaatatgtaacagactcttttatagtactattgctaaaatttaaataggatcactaaaggagcaataacagaatataaacataagaaatgcca

SEQ ID NO: 302575 - DNA, 509 bp, Homo sapiens
cgatagaaatctaaaaagtttcctaacatccttttattgcctttctcaaatcttccccccagcaatagatgcttagtaatatkacatctatataattatggaaaaccactgggaccagtcttcatcagcaaatgaatataagtttcattgtaactttcagatcatacttacactaggagcaaatgataatatcattccctataaaagaaaagagaaagaagaaaaatagtatctctaatatgtaacagactcttttatagtactattgctaaaatttaaataggatcactaaaggagcaataacagaatataaacataagaaatgccaggctaatatggacattgtgattaattataagtgatttttacagctaatataaaggagataattatagattatcttataaaaaagggaacatgctatgttttcaggaaaatacttatttttttctattaagtcctaaattaaccacacaatgtaagcattgttttcaccagagattaaacag

SEQ ID NO: 302576 - DNA, 509 bp, Homo sapiens
cgatagaaatctaaaaagtttcctaacatccttttattgcctttctcaaatcttccccccagcaatagatgcttagtaatattacatctatataattatggaaaaccactgggaccagtcttcatcagcaaatgaatataagtttcattgtaactttcagatcatacttacactaggagcaaatgataatatcattccctataaaagaaaagagaaagaagaaaaatagtatctctaatatrtaacagactcttttatagtactattgctaaaatttaaataggatcactaaaggagcaataacagaatataaacataagaaatgccaggctaatatggacattgtgattaattataagtgatttttacagctaatataaaggagataattatagattatcttataaaaaagggaacatgctatgttttcaggaaaatacttatttttttctattaagtcctaaattaaccacacaatgtaagcattgttttcaccagagattaaacag

SEQ ID NO: 302577 - DNA, 615 bp, Homo sapiens
ctatgatccagttacctccacctggtcccatccttgacatgttaacattatgggaattacaattcaggtgcagtttgggtggggacacagagctgaaccatatcaagaactataaggataataaaaaatattaaaagtatttggataggagaaaatagttattgacaaaggaacaaaaggcactatggtctcagacttacgagtaacattacagaaagctagacaatgccatttaaagttctagtagagcatatttttttcctaaaacacattctcaatgacatatgaggatggattaaagatattttatttggacattgcttgaggatatgcacaagtaaaatataaaataaaacaaaaaccagaaagagatgggatttaggattgggactaatcagaaaagaaattaaatccagaattcaacaatgcaagaagcaaaaaaaaaamaaaaaaaaaaactaatattcaaatagcagtccaggaggtcctggggaagtgatttcctaggacattaacgaaatcttcatttactgggtggaattttaagtagttatgtataaattgtaggataatacaagaagccccacatacccatggcctggtttcaacaattaa

SEQ ID NO: 302578 - DNA, 580 bp, Homo sapiens
aatgatacatgcctacaatgtctaatgatcaaatcagggtaattgagatattcatcacctcaaacatttaacatttgtttgtgttagaaacattcaaaatcttctcttctagctatttttaaaatatacaacagcatcttattaatagtagtcaccttactgtgctattgaacactagaactktacctacctaactgtatctttgtacccattaaccaacctctcttcatgccattttctcccctacccttcttagcctctggtaaccaccattctattctctaccaccttgagataaacttttttagccctcacatatgagttagaatatacagaaacaaacaaataaaaaagtgaatgaatgacatgcaggtcaaactggtagattcttgcagaatatacaagaaaaatgacaaaaagaaccaatgacagaaaataacaggtctgataaacagagaacagaaatctaacctgtagaaactcggagttatgaacaagagatttgtatggcaagatcacaaaattattcaaaaatagaattgaaaaaatttctcagttgaggaaagatgtgtgaagtgtg

SEQ ID NO: 302579 - DNA, 566 bp, Homo sapiens
actgttataccatccatcaatctcactactagatatttatctaaaggataaatcrgtatattgaagagatatctgtaaccctatattcattgcagctgtattcacaatagccaaatatggaatcaacttaagtgtctatcgacagacaaatggataaagaaaaggggtatataaacagggtggaatattatttagccataaaacaaatgaaatcctattattcacagcaacatggatgagcttgggggatgttacgttaggtgaaataagttaggcacagaaagatcaatattgcatgttctcagtcatataggaattaaaacatcaatttcataggattagagagtagaattatggttactagagactggaaagggtagggaaagggaaaaatagaaagaggttggttaagggatgcaaaattacagctagatgggaggaataagttttagggttctttagcactgtagagtggatatggttaacaataatttagtgtatattttcaaaaaagctataagacaagattcagaatgtttacaacaaatagaaatgataaatgtttt

SEQ ID NO: 302580 - DNA, 590 bp, Homo sapiens
tattattcagattccatgcaatccctatcaaaatttcaatgatatttttcacagcaacaacaataaatctatcctaaagttyatctggaaccgcaaaagaccctgaatagccaaagcaatctcgagaaaatgaacaaagttagagacatcaagctaatctaatctcaaaattgagtacaaatctataataatcaaaatggtgtggtgctaacccaaaaacagacacattgaccagtggaacagaatagagagcccagaaataagctcacacatatccagtcaactaatctttgacaaaggcaccaagaagataccatggggaaaggattgtatcttcaacaaatgatgctggggaactagatatttacatgcaaaagaatgaaattggacctgtattgtacacaatatacaaaaatcaactgaaaatggagtaaagaccaaaacataagacctgaaaccataaaacttctataagaatacataggggcaaagctcttaggcgtcagtcttggcaattattttttggatatgataccaaagaacaaacaacaatagcacaaataaataagtgagattacatcaaactaaaa

SEQ ID NO: 302581 - DNA, 576 bp, Homo sapiens
aaaacataagacctgaaaccataaaacttctataagaatacataggggcaaagctcttaggcgtcagtcttggcaattattttttggatatgataccaaagaacaaacaacaatagcacaaataaataagtgagattacatcaaactaaaaagcttctgtgcagcaaaggacataatcaacaaaataaaaaggcagcctacagattggaagaaaacattggtgaattatatatctgataaggagttaattcaaaatacaatatagaaggaatctgctcaactaaayagcagaaaaacagaataccctgtttttttaagtgggcaaaggacctaaataaacatttcttcaaagaaggcataaaaatggctaacaggtatatgaaaaatgctcaacactactaatcatcagggaaatgcaaatcaagaccataatgagatatcagctcacaactgttaggatggcttttatcaaaaagacaagacataagtgttagcgagagtttggagaaaaggaaacctttctacactgttggcgagaatgtatattggtgcagccactgtggaaaacagtataga

SEQ ID NO: 302582 - DNA, 576 bp, Homo sapiens
aaaacataagacctgaaaccataaaacttctataagaatacataggggcaaagctcttaggcgtcagtcttggcaattattttttggatatgataccaaagaacaaacaacaatagcacaaataaataagtgagattacatcaaactaaaaagcttctgtgcagcaaaggacataatcaacaaaataaaaaggcagcctacagattggaagaaaacattggtgaattatatatctgataaggagttaattcaaaatacaatatagaaggaatctgctcaactaaacagcagaaaaacagaatamcctgtttttttaagtgggcaaaggacctaaataaacatttcttcaaagaaggcataaaaatggctaacaggtatatgaaaaatgctcaacactactaatcatcagggaaatgcaaatcaagaccataatgagatatcagctcacaactgttaggatggcttttatcaaaaagacaagacataagtgttagcgagagtttggagaaaaggaaacctttctacactgttggcgagaatgtatattggtgcagccactgtggaaaacagtataga

SEQ ID NO: 302583 - DNA, 576 bp, Homo sapiens
aaaacataagacctgaaaccataaaacttctataagaatacataggggcaaagctcttaggcgtcagtcttggcaattattttttggatatgataccaaagaacaaacaacaatagcacaaataaataagtgagattacatcaaactaaaaagcttctgtgcagcaaaggacataatcaacaaaataaaaaggcagcctacagattggaagaaaacattggtgaattatatatctgataaggagttaattcaaaatacaatatagaaggaatctgctcaactaaacagcagaaaaacagaataccctgtttttttaartgggcaaaggacctaaataaacatttcttcaaagaaggcataaaaatggctaacaggtatatgaaaaatgctcaacactactaatcatcagggaaatgcaaatcaagaccataatgagatatcagctcacaactgttaggatggcttttatcaaaaagacaagacataagtgttagcgagagtttggagaaaaggaaacctttctacactgttggcgagaatgtatattggtgcagccactgtggaaaacagtataga

SEQ ID NO: 302584 - DNA, 570 bp, Homo sapiens
tgagatatcagctcacaactgttaggatggcttttatcaaaaagacaagacataagtgttagcgagagtttggagaaarggaaacctttctacactgttggcgagaatgtatattggtgcagccactgtggaaaacagtatagagattcctaatgaaattaaaaatagaactactatatgatccagcaatcccttttctgggtgtatattcaaaagaaacgaaatcaccaccctgtaaagatacctgcatttctatgtttattgcagcattattcacaatagtgaagacatgcaaacaatatgagtatccatgaacagatataaataatttgggatatatatatatctctacacatatacttaatgaaatactattcagcttcaaaatagaatatcctagcatttaagacaacatggatgatgaacttagaggacattctgtgaagtgaagtaagccagacacaaaaagaaaaatactacatgatctcgcttatatgtgggatctaaaataaataaataaatacattgaatgcatagaaagagagtaggatggtatttaacaggggttga

SEQ ID NO: 302585 - DNA, 559 bp, Homo sapiens
tttatagtttattctttggcccatgagttatttaaaattgttttaaaattccaaatacttgcttgtgattttttatttcaatttttagtcattaacatccaatttaattgcattgttgccagaaagtgtcacctgtatgatatgtattctttaaaatttattgtggattgatttttaaactagtatatgaccaatttttataaatatgacaagtgtgattgagaagaatatttagggctaatagttgggtccattattggattctttttttgtctrctttatctagccataactagtagaagtgtggtataatctactgtggtagaaatgtctttctctagttcaatgatattttcttctttatatattgtgagaataaaacatacattttaagaattattatgttttcttagtgaattaaacattttaatcacttcatcgtatggcagccatgaaactgggcctctcaggtctgcagctgcagggaacataattgacctataactcccactgctgtgttctgaaatttatcactgtgttcacatggaaaccacacttt

SEQ ID NO: 302586 - DNA, 464 bp, Homo sapiens
aaaaacacaccttaaaataataagggtcatctatggcaaacccccagccagcaacatactgagtgggcaaaagctggaagcattcttcctgaaatctggaacaaggtaagaatgcccactctcaccactcctatttaacatagtactgaaagtcctagccagagcaatcaggtaagagaaagaaataaaagacatctaaataggaagaaagtaactcaaactacctctctttgcagattatatgattctatacatagaaaatcctatagtctctgcccaaaggctccttgaactgataagcaacttcagtaaagtttcaggacacaaaaatcaatgtataaaaatgaattgtatctctatatgtcaataaygtccaacctgagaaccaaatcaagaatgcaattccattcacaatagccactaagagaataaaatatctagaaatacagctaaccagggatatg

SEQ ID NO: 302587 - DNA, 485 bp, Homo sapiens
gctgttggtccagggaccacactttaagaaccactactcaagacatcatggtgagattcaaaacagagaaatgctgtaagtagggcattcatctgaagggagcctagggagawttttttttttttttttttttttttttaatgacagaaacttcaaacaaagattgggctgaggagaaattgggctgaggcagaagaaaatccctacacaatactgatgacccaaaggaagaaaggctttttgttttgatgcctttttaaaactctgagtggaagcctgcctagcagagtgacctgcacctaactggggtagctaaaaaagagccgacatctggcacctgataggactattgtgaagattaaaggagtttgtatatatacagatcaatgagaaggcacctagcacagagtaaacgcttaacaagttacttactattattatttatttatttattttccaggacatgtttatagctaaggagttgt

SEQ ID NO: 302588 - DNA, 430 bp, Homo sapiens
gtcacactttcctgacaggtcagtaattaactcgcattgcaattgtttgttgtctccaccacagcagccatttaccaaaatagcattttaatttcagtttccttccatttcactttccttttgttttctccctgtggcttttacatctctattaagtctaatttccccgaccactctgtaagctgagagagtgcaataaaactcagtttcaaaaatgtcaaatataatgagaaaggaagatcacagtaaaggaatgtgaccatagccaccccattgggtaacattgtctttgggcaggtgttatatataggaaatgtgataataagtttkcgcatttatttaacttatagcagggaatctggagtatttgctgcatttgctgacaaagtctgacaagtctgcagcatggtaaattgtaatacagttatta

SEQ ID NO: 302589 - DNA, 430 bp, Homo sapiens
gtcacactttcctgacaggtcagtaattaactcgcattgcaattgtttgttgtctccaccacagcagccatttaccaaaatagcattttaatttcagtttccttccatttcactttccttttgttttctccctgtggcttttacatctctattaagtctaatttccccgaccactctgtaagctgagagagtgcaataaaactcagtttcaaaaatgtcaaatataatgagaaaggaagatcacagtaaaggaatgtgaccatagccaccccattgggtaacattgtctttgggcaggtgttatatataggaaatgtgataataagtttgygcatttatttaacttatagcagggaatctggagtatttgctgcatttgctgacaaagtctgacaagtctgcagcatggtaaattgtaatacagttatta

SEQ ID NO: 302590 - DNA, 513 bp, Homo sapiens
aagtaaaaaacactttgctatcattttcataagtcatcattattattatctctatcattatttatttagtcaaaaatgtattcatcaaatgcattttaaaactaagtcccgtgctatgtattaggaataaaacaaggcagaaaaactctcacctatatcagagcagacatttaaccagtgagattttagttatttggaacaactcctttacctctaaatatctcttcctttcacttgtagtattgaagataaatttcttggcttgcccagtttactataaatatttaaataaacatttaaatagccattcatttacttatttgttcaaacarttttattattttgactattggcactaccaaaatattccagaagctaggaatccaggtgtgaaaggtacagttttttgcctttgatggactcatagcacattatttgcctgcaggcacagataaataaaatgacatttacaacatgatctgatatgtgctgtcacagtgacaatggcaaact

SEQ ID NO: 302591 - DNA, 605 bp, Homo sapiens
cccagaaagaaaagtcaataaaggtgtatcactatctaacaaatcattcacattcctcttcatagtctgtcttttagatatttaacagcttgtaatgactatgattttgcaggcacttcccataagctatatatgcattattaataaagttctatgactgaaaacttccrtcactgcaatgactcttgaaaagcataggtttattcaaatcaacaatgcatagtagtttgtcacggttttaacatatgcattcttcttgcagatggttgaaaaagaaggttatctgcaaaaagctaaaattgcagatggaggaaagaaactaaggtaataaaattctttaattcacttttatataactatgctggttcttcatatgctaaacttgtgccactgttattgtttgggatgcaagtccctatggtaccagactagaacagtctcctctgctactgctatgatcaacattatttttaatggaactacagtttttaaagaaaggcactacattctatattgtcgaacagaacacataaatgagatgctttttgtcctccttggacttgaactcataaaacactgaaaataaataagacaatggattgtga

SEQ ID NO: 302592 - DNA, 610 bp, Homo sapiens
cttgactcagcatccaatttcctgagcattctaccttccatagctcttttaaagagatgttctgttttgactcttttaggaaatggatttaaagtgaacataaarttagtcaattttaataccatggttttagtaaaattgcttaaaatttaaatacttagaggtagttgctctttctcatcagtttatggcaatatgttttcagctggtgggttatttgttccaattttcagaagcatataatggatacagaattcaaacccaacctttcatcactgccaacttactaaaactgtaccatatatatagtacatatagtgtcttttatttgaaatatatttctagcttctcttctcctaaattaccctatattttagaccaggaaaattcacacatctccagattgtcttccttgattctacagcccaaagtcaatctttatggcatttatcctttcactaaacaaatatttattgatattatcatacacctaccatttgttctaggttctaggtatttagcagtaaaaagacaggcgaggtcaatactcccatggaccacacattctaaggtgaaaatagccactaaacactgaaaaataaataataaa

SEQ ID NO: 302593 - DNA, 610 bp, Homo sapiens
cttgactcagcatccaatttcctgagcattctaccttccatagctcttttaaagagatgttctgttttgactcttttaggaaatggatttaaagtgaacataaagttagtcaattttaataccatggttttagtaaaattgcttaaaatttaaatacttagaggtagttgctctttctcatcagtttatggcaatatgttttcagctggtgggttatttgttccawttttcagaagcatataatggatacagaattcaaacccaacctttcatcactgccaacttactaaaactgtaccatatatatagtacatatagtgtcttttatttgaaatatatttctagcttctcttctcctaaattaccctatattttagaccaggaaaattcacacatctccagattgtcttccttgattctacagcccaaagtcaatctttatggcatttatcctttcactaaacaaatatttattgatattatcatacacctaccatttgttctaggttctaggtatttagcagtaaaaagacaggcgaggtcaatactcccatggaccacacattctaaggtgaaaatagccactaaacactgaaaaataaataataaa

SEQ ID NO: 302594 - DNA, 536 bp, Homo sapiens
aagtgctggaaaatgggatgagtacattttaaaagttcagttgaatggaaggagccagtgaatggaagggtctatctttctaggtaccaagtctatgrgactctaaattaggagcagagcaggccactccagaagagaataataaaaaggagcaacaggaggaatatcaaggaaagagtttctcctttctgaatcttactgaatgctggccctaagtggaaaagcacgacattctttgagcaaattagctttaatatgactttccaaataaaatcttccgtattattttcatttcatcaaaacttgtttctgactcatccacttaaaacatataaagtaatagaattctatagtaacttatttgcaattaactgtcttaaaatttggtttgtaccttacttctctttacaaacaattctgaaggtattttaatttacctatcatctttactcattgatctttctaaattcatatcaagctctcttcaattcattcttaattttacacatattccataaaatatgtgtattttaatt

SEQ ID NO: 302595 - DNA, 521 bp, Homo sapiens
ggatgagtacattttaaaagttcagttgaatggaaggagccagtgaatggaagggtctatctttctaggtaccaagtctatgagactctaaattaggagcagagcaggccrctccagaagagaataataaaaaggagcaacaggaggaatatcaaggaaagagtttctcctttctgaatcttactgaatgctggccctaagtggaaaagcacgacattctttgagcaaattagctttaatatgactttccaaataaaatcttccgtattattttcatttcatcaaaacttgtttctgactcatccacttaaaacatataaagtaatagaattctatagtaacttatttgcaattaactgtcttaaaatttggtttgtaccttacttctctttacaaacaattctgaaggtattttaatttacctatcatctttactcattgatctttctaaattcatatcaagctctcttcaattcattcttaattttacacatattccataaaatatgtgtattttaatt

SEQ ID NO: 302596 - DNA, 521 bp, Homo sapiens
ggatgagtacattttaaaagttcagttgaatggaaggagccagtgaatggaagggtctatctttctaggtaccaagtctatgagactctaaattaggagcagagcaggccactccagaagagaataataaaaaggagcaacaggaggaatatcaaggaaagagtttctcctttctgaatcttactgaatgctggccctaagtggaaaagcacgacattctttgagcaaattagctttaatatgactttccaaataaaatcttccgtattattttcatttcatcaaaacttgtttctgactcatccacttaaaacatataaagtaatagaattctatagtaacttatttgcaattaactgtcttaaaatttggtttgtaccttactkctctttacaaacaattctgaaggtattttaatttacctatcatctttactcattgatctttctaaattcatatcaagctctcttcaattcattcttaattttacacatattccataaaatatgtgtattttaatt

SEQ ID NO: 302597 - DNA, 413 bp, Homo sapiens
caatctcccctggcttgcaaggcttctgctgagaaatctgctgttagtctgatggggttcctattgtatgtgatctgacctttttatctagctgcttttaagattttttctttagcattgaccttggatagtctggtgactgtatattttgatgatgttcatactrcaaatattacaccatttttaaaaagaaggaaatttgatcacatgctataacatggatgaatctcaagggtattatgttaagcacaaaaagtttatggcagatgatagaagaacctgacagtgataacttaagcctattctgagaatgcccaagtatgacagatgtataggtgggcattgtgagttcagacttttgagcatcaccaacctggagattcattccttatctataagaaacatctgaggcc

SEQ ID NO: 302598 - DNA, 412 bp, Homo sapiens
gcaaatattacaccatttttaaaaagaaggaaatttgatcacatgctataacatggatgaatctcaagggtattatgttaagcacaaaaagtttatggcagatgatagaagarcctgacagtgataacttaagcctattctgagaatgcccaagtatgacagatgtataggtgggcattgtgagttcagacttttgagcatcaccaacctggagattcattccttatctataagaaacatctgaggcccttgcccatcccatggaacacaggccatacaggcaatcaaggccctctgttttggattaacaaagattgtcaggtggaggtagttgagggaaggatgataagtgacattgctatataatctgtatgatttctgcaagctgtggcagttctgtcccgccccctcc

SEQ ID NO: 302599 - DNA, 564 bp, Homo sapiens
atatatatgcacataatattatatatatatatgataaggggttttatatatatatatgagaaggggttaatattcagataatacaaagaactcactcctacaactcaactcaacaacaagaaaaacaacaaattaaaaatgggcacaggagttgaatagacgtttttctaaagaagacatgcaaatggccaataagcacatgaaaaagtgctcaacatcactaatcattaaagaaatacaaattaaaaaccacaatgaaataacatttcacatccattcaaatggctattatcaaaaaaagaaacagaaataaatgttagcaaggatgtagagaaactggaacacttgtgcacttttggtgggaacgtaaaatagtgaaggcactgtgaaaaacagcatagcagttcctcaaaagctaaaaatagaatcaccatataatccagcaattccawttctgggtatatacctaaagggattgaaaacaagaacttgagcagatatttgtatacccatgttcatagcagaattattcacagtagccaaaaggtagaagcaactaaaatg

SEQ ID NO: 302600 - DNA, 618 bp, Homo sapiens
tgtaccaggcttcaaacaagtggaagagcctcaatatgttatatatggagcagctggttcagtcaaagttcatttgctgaatggtttctgtaatcccagcttgagctggaaaggaatctctataaaagtagttaactcagagagtccatgcaagaagcacctgtcatctaaacaactttgtgggagatgcctgccttctcagctgtggcaaatgatgagaaagactgccatcagaaagagcaacaatgttcgtcaacacgtgctttccgaagtgacacagcaagtctcttttgccactagctcaggttgttaacacctggccctaaatcagagtcatttacccaacatcctccctggaataaartgaacacttggttattcgtgatactttttggccctatccaatcaaaagctactttaataacctgtttatctactaagaatatatattctgtcattgtttctactctgccaagtctgtaagtattcttgtcaaaaagaagaatgaagaaagaaagtcatgtttgggagcagaacgtttgaagccctgcaacaacccaacaaactgcattacactgtcttactcccagaattatcccactgggggcaaatacatat

SEQ ID NO: 302601 - DNA, 575 bp, Homo sapiens
atcctgtacatgtattctggaacttaaaattttttaaaatgtatcctctgtttgtatgcaatggcctaaacatgccctatcttctcatgtgattattagttattaatattctttaattgaactggtttataagatctrttcctttgttgatttatacccactaactatcactgaccctaatccctacattatatcaaggactctcagtaaaaggaaaagaatgattgcacatacataaacatatgtttatacctaccttccaaaactaataaaatcacatgcttgaaaatcaataaatgtacgagacccttttatgctccgtgtccacctgctttcacattgtctcaattctactattgactttgtcttccatttctagatcctttttcatcctttcaacttatcttttgagtgagcaaactaaatggctttattgaatactcaccccatgccttcctccactactgaaaccttgtcatgcatttccaaggtgagcaccttgcctgagccaccccttaaatccccatgatagggagagggggtggctcaaaatttcccatgagaatgagattaga

SEQ ID NO: 302602 - DNA, 580 bp, Homo sapiens
cattttggaaaaagatgtatcttttcttatgatgctgccattaattaaaacactttggaattccttctgtcctactgatttcaaagcagtttataagacttacatgaaatttggtgactttactttatagggaaactacagttgatcaaaataccatttcttggaaagatcatttaycttatttgccagatctggctctgaatgtctttgtctattttccaaataaaatcaaactattgatgatgaaaatttctcaccacttagaagatttaaaagtctatgtcagaaactaaaggtgattttttaaaaggtgttcaaaatattttgagtaatgtcaggattgtgagactaaggtcacagattcaccaggcatctacttggaaaatgtataaccctttcttttggcatatattgttctgcttattccatgaatagttgaaatacatattcaggcatctttatccaaatctaagcaaatattttggatatacaatttttgaatagtggtagcctatatctcattattttaaatgggggaaattataaagtatttctagctcaccccaaaacacacgaacaa

SEQ ID NO: 302603 - DNA, 580 bp, Homo sapiens
cattttggaaaaagatgtatcttttcttatgatgctgccattaattaaaacactttggaattccttctgtcctactgatttcaaagcagtttataagacttacatgaaatttggtgactttactttatagggaaactacagttgatcaaaataccatttcttggaaagatcatttaccttatttgccagatctggctctgaatgtctttgtctattttccaaataaaatcaaactattgatgatgaaaatttctcaccacttagaagatttaaaagtctatgtcagaaactaaaggtgattttttaaaaggtgttcaaaatattttgagtaatgtcaggattgtgagactaaggtcacagattcmccaggcatctacttggaaaatgtataaccctttcttttggcatatattgttctgcttattccatgaatagttgaaatacatattcaggcatctttatccaaatctaagcaaatattttggatatacaatttttgaatagtggtagcctatatctcattattttaaatgggggaaattataaagtatttctagctcaccccaaaacacacgaacaa

SEQ ID NO: 302604 - DNA, 498 bp, Homo sapiens
gactcgtcaattacaacagttacaggggctgaggctaaaggcaccttctcatttttattttaaatcacaacaaacaggtcctagaacaagaaattctttatcctgagatgtttgccttcattgcaaacaacaaggacatgtggaaagaggtttcttggttttatattagtctgcaataagcctcctttctttaggctagatcattttacccctagaatgagcccaagagattttaacattaatgatgataatcaatatttattaggctccaaggattctctgttaaattgcccctgacataatacccttacataaacatggagaaacaagttaaaataaataaggaatcttgtacatcctggtggatactgtagccaccttatgwaccataaactccactttattaagccatcagatcccttgacgcaaaaaagtcatttctctggtgggggtttcaaatcaattcatgagattttcatatatcaactcattcacctt

SEQ ID NO: 302605 - DNA, 498 bp, Homo sapiens
gactcgtcaattacaacagttacaggggctgaggctaaaggcaccttctcatttttattttaaatcacaacaaacaggtcctagaacaagaaattctttatcctgagatgtttgccttcattgcaaacaacaaggacatgtggaaagaggtttcttggttttatattagtctgcaataagcctcctttctttaggctagatcattttacccctagaatgagcccaagagattttaacattaatgatgataatcaatatttattaggctccaaggattctctgttaaattgcccctgacataatacccttacataaacatggagaaacaagttaaaataaataaggaatcttgtacatcctggtggatactgtagccaccttatgtaccataaactccactttattaagccatcagatcccttgacgcaaaaaagtcatttctctggtgggggtttcaaatcaattcatgagattktcatatatcaactcattcacctt

SEQ ID NO: 302606 - DNA, 597 bp, Homo sapiens
aggtccccctgccccatccccctgtttttttttttttgtaactaaatatggttatacatccttacaacgttttatgaaagggccacaaaaaagtaaattttccactggactttgttcaggagctaggcagaacaagggtgaaaaatttaactaacccttgctcaaatacaactagatggccctcttttccaatcccttagggactatatttggtctgcacagaatttcattctacctccttgctggtttggatcttgctatttggtctggctcactcctgccttttaaatagcttctcgtgagagttcctgtaatagctcctatgatcagaaaccaaagcagtcaataactgaaattagcaccaatcttgaaatagatgaaagataaattagattctactgaggagacattccatcgtggttcctggggactcactcttggtggtagtgggtactagttgtatggaatttaaagctaattcataaattgagagaaatcttgaagtttatagccaatcagacttcccacggtttgaggtgsgtaggagccactctctgaaaggtaaatgataccataagtgttcaacaaaaacacatc

SEQ ID NO: 302607 - DNA, 592 bp, Homo sapiens
atggtttaacttattaggcatgccttcacaggagttaaaggtttatgtaggtagctcaccaagttgcatgacattttgagacaattatttttgacctgaggagatttggaagactcttgagcaaatcaaatctagaaatcaaagcaaatatgtaataaacatttaacaaatattaggtattattattgttgtcaatgttgcattaagattaggctggcataaaacattagaatctgttcagtgcatggaacaattacattaaacacaagagtatactctatcacctactcaagaataggrtaaagaaataaccatgaaaccaggtggtaagagtttctacagcactgattgcaaatatttatctttgtggccccagtaattttgagagctgtacatagtgggtcctcaataaatgttgaataaatgaatgttttattttgctgatttttaaaagatttttctacttataaaaaataaaaggaaagtacacaacaaaacctttcacccatttattgtgcctttatgtttctgggctaaggcttatggatggtcttcaggttggggatagaagagtcctagttatcatttggct

SEQ ID NO: 302608 - DNA, 592 bp, Homo sapiens
atggtttaacttattaggcatgccttcacaggagttaaaggtttatgtaggtagctcaccaagttgcatgacattttgagacaattatttttgacctgaggagatttggaagactcttgagcaaatcaaatctagaaatcaaagcaaatatgtaataaacatttaacaaatattaggtattattattgttgtcaatgttgcattaagattaggctggcataaaacattagaatctgttcagtgcatggaacaattacattaaacacaagagtatactctatcacctactcaagaatagggtaaagaaataaccatgaaaccaggtggtaagagtttctacagcactgattgcaaatatttatctttgtggccccagtaattttgagagctgtacatagtgggtcctcaataaatgytgaataaatgaatgttttattttgctgatttttaaaagatttttctacttataaaaaataaaaggaaagtacacaacaaaacctttcacccatttattgtgcctttatgtttctgggctaaggcttatggatggtcttcaggttggggatagaagagtcctagttatcatttggct

SEQ ID NO: 302609 - DNA, 588 bp, Homo sapiens
ggtagtttgcaaatattttctcacattctgtggttgtctctttactttgttgactgtttcctttgctgtacagaagctttttaacttgatgtaatcccatttgtccatttttgctttgaytgactgtgtttgcctcaagaaatttttgtccagaccaacggcctcgagagtttcccctatgttttcttctagtagttttatagtttgaggtcttagatttaagtctttaatcaatttcaatttgatttttgtatatggtgagagataggagtctagtttcattcttcggaatttggatatccagtttccccagcacgacttactgaggagattgtcttttccccagtgtatgtttttagcactgttgtcaaaaatgagttcactgtggttgtgtagatttgtttttgggttctttattctgttccattggtcaatgtgtctgttttatgctagtaccatgctgttttggttactgtatctcaatagtataatttgaaatcaggtaatgtgattcctctagttttgttctttttgctcagggaagctttggctattctgtgtcttttatggtttcatataaattttaag

SEQ ID NO: 302610 - DNA, 532 bp, Homo sapiens
atgttaacatctcaaaatattctgccacatttgaaatacgggagagttgaattcattagaggacttctattggaaaaaaggaattgtttttgaaaatgatgtctctgcagttgcacagactgtgttggacctaggtccgtagaacgccgtgatgtcatcattgakgtcagagaatctgcgatgggcctggtgacctttgaaccttaacagccctgcagtgtagtgggcactgggcagtgctgctccttcactaagcggtctgagttctttagctatctcggagattcaactacgtttactcgtactgaatctttttaatgaatttcctgagagccaagaagggccaatctacaggaaaaagtgggaggtggacattaagcatcttctagaaactcttctagctgatatcatgaaacgacgacaaaagaggaaacatttggaaaatgaagagtcccaggaaaccgctgagaagggaggaggtatgtgcggggcaaactttctggggcacaagcgtcactggccagcctgagcc

SEQ ID NO: 302611 - DNA, 586 bp, Homo sapiens
gcccgcacatccatcttgagggtacccagatgtgagacggacaggaagttcagatgccaytggcacacagaaagccaaccctgctgggctgagaacttttgctctggggctgctggtacctggaactatgccagtctcaggcaggcgggggacccacttacaaagacccagtgatgcagcctgagtctcatctttctctcgtattctctttatttgctctttctctggggtgactgaggtggaagttgtgaagggtgctggtagaaatctatgatttgcactacaccttttagcagaaacgagagtagcccaatgagttaaaggccttgttgaaaaatatcttgagaagtgaaatgcttgttagaaagtagattaaacacttgtttagggatggcgtcatagtgaaaccacggaggtttgattgcttcagcgggaagaattaaccaattaatccaatagagtttgtgaatccacagtgtgggacttcccagaggaaatgaagcacagggtaagggcctcagatcgctgtcaatttacttcccaggctgcatgataatggcatgtattaaatgtaaacaagccactt

SEQ ID NO: 302612 - DNA, 586 bp, Homo sapiens
gcccgcacatccatcttgagggtacccagatgtgagacggacaggaagttcagatgccattggcacacagaaagccaaccctgctgggctgagaacttttgctctggggctgctggtacctggaactatgccagtctcaggcaggcgggggacccacttacaaagacccagtgatgcagcctgagtctcatctttctctcgtattctctttatttgctctttctctggggtgactgaggtggaagktgtgaagggtgctggtagaaatctatgatttgcactacaccttttagcagaaacgagagtagcccaatgagttaaaggccttgttgaaaaatatcttgagaagtgaaatgcttgttagaaagtagattaaacacttgtttagggatggcgtcatagtgaaaccacggaggtttgattgcttcagcgggaagaattaaccaattaatccaatagagtttgtgaatccacagtgtgggacttcccagaggaaatgaagcacagggtaagggcctcagatcgctgtcaatttacttcccaggctgcatgataatggcatgtattaaatgtaaacaagccactt

SEQ ID NO: 302613 - DNA, 586 bp, Homo sapiens
gcccgcacatccatcttgagggtacccagatgtgagacggacaggaagttcagatgccattggcacacagaaagccaaccctgctgggctgagaacttttgctctggggctgctggtacctggaactatgccagtctcaggcaggcgggggacccacttacaaagacccagtgatgcagcctgagtctcatctttctctcgtattctctttatttgctctttctctggggtgactgaggtggaagttgtgaagggtgctggtagaartctatgatttgcactacaccttttagcagaaacgagagtagcccaatgagttaaaggccttgttgaaaaatatcttgagaagtgaaatgcttgttagaaagtagattaaacacttgtttagggatggcgtcatagtgaaaccacggaggtttgattgcttcagcgggaagaattaaccaattaatccaatagagtttgtgaatccacagtgtgggacttcccagaggaaatgaagcacagggtaagggcctcagatcgctgtcaatttacttcccaggctgcatgataatggcatgtattaaatgtaaacaagccactt

SEQ ID NO: 302614 - DNA, 647 bp, Homo sapiens
tccacaggtacactttctgcacacacaccacccaaatgcatgacctgcagtgccattctcccacactacctcccacattccacaaataacacatcaatgatggcaccaactcacatcctcatagcacacacatgctgccgacattccacatatgctgcagtcctcaccaccatactccacacccctrtatatggacaccccaccaacatccctacacgcaaatgacactagaatcactaccccacaatatgaacaacaaataccaagctcactacacagctgcatctcaccacagtccctgtctcctgcaccacacatatttaacttacgttccctcagctcctagcatggcccatgcatctgctcatgtttctaatttcctttcccaggaatccagagaatacatcgagacagcccccagcctcaatcacccctggcccaggttcaggaacgaggagagactcctccccgctcacaacatgtctccttgtcgtcctattcatcctataagacttgtgtgtcctctctgtgtgtaaacaaagaggaaaggggcatgaaaatatactacatgcaggtacaaatgaacaaaggtgtggctgtctcctgggagacagaggaaactttggagtccttagaaaagcagccaa

SEQ ID NO: 302615 - DNA, 404 bp, Homo sapiens
acatatttttaaattttaggagcaatatagaaatattgtcatcataaaaatgcaaatgatattaragtaatcaacgtataaaaataaaattaaagtctccttcaaattatccctactctcctcccaagcctacttccttttgcagagattttgttagttgtttagtttcaagatcttaggtccatgtatttacatacatagctgttttatatgatatatgtagctttatagagatttttgattcataaattgtatcatactatgtgtaatctaaatcaacatttttgttgaagatcttttaatgcctttaatatagatatttaacatggatctttaatatagattcatcccatttttttaagcaagtgtaatttatttacttccagtgagaaatcataatataa

SEQ ID NO: 302616 - DNA, 602 bp, Homo sapiens
cggccctgtgccaaatctttttctgtagtttctgtttctgtagtacttttttttaaagatgacaacttatttttcttttcctttgctggaagactccccgtatgtagagggattgccaccccgtgtagtgttataaatttagggtaaaacatttgtaagagaattctccagcattacatattccatacttggcccatgtgagatgaaactrttaccatgatgttatgtgtttgttgacatttattacatagcatttttgtataatttcttgtttgcttgcaaaaatgcttcttgaatttcagtctttattttacagcaaatcatttttctatggtagagaccacagcttgctctacataaaaatgaaaacccacaagacattttaatgtacaccatgaatttaatatgagttttaggatatttatctctgaaaactagaaaaattctcttgaatgcatactttaaaaatgaaaccaaactgttatctcaatattatttgagtatttccagatgcttacaatagaggaccctaaaattaagattcagaggacatgggtttgtatcctgactttgccaccagacatgtgtagcctttgcacaaa

SEQ ID NO: 302617 - DNA, 598 bp, Homo sapiens
attattttaatataagtatatcctatgtaatacttaggcatacttagactaaaaatggactcactatttttttgaccctcaaatttaactaaacagcctgtattttatgtgtcaaccctactcattggaaatggtggaggctcaccaggatcagtaataaggaccccaaagatgccccaaataatccttgtcttttatttatagactctgaattagtaagcatgagcttttcattccaattaacaggctgtaatgaatatcttcagttttagggctctatatacttatcattatcacaatctttcttattttaaagagatgggtattttttccaaccttaatatctcatcaaaaagtattcaaaagttcactagacaaatgaaaaacatgtatctgaaaaatgaargcgaaacccctggtgtttagcaaaaaaacaaaaactaccaggaagacggaagaaaactaacttaataagcaaatctctccagggatatttccatagtttgatgttctcccacactctgaaaatattattgcatcaagaatgtagaactgctaaccaaatttaaggcgtccttacgattctatcaaattgagg

SEQ ID NO: 302618 - DNA, 534 bp, Homo sapiens
acttgagattcttttggtggtaggcaacaagaaactacttttggcttaatcaaaaagggatgctgacacttacaactgtaggtccaggagcaaggtcctgacttcaaagtcaggtgtcactggattcaggactcaaacaataataacattcagctctatcttctcactttgtgttctactacacggccttcaacctcagacatcagggcagagcagttggcagcagaaactcttgcacatgcattccttaatttagagttcagagacaaagaacaaatttctccagcaaaagaatcatttatcttatttactttaattggatcatatgcccatctctgagccaaatacagctgccagagyaattcgatactctgatcaacttagaacctatgctctatttctgagcttcatgaaaattctacagataagaatgggagaaaaaaatcaaggtctggttattagaaaaaaggttaatgagcttgttggcaaatacataagatgacaaatctataagatcatgcatacatatatata

SEQ ID NO: 302619 - DNA, 539 bp, Homo sapiens
ccacattttcctttcacactgccctagcagaagttctccattaggactctgcccctgcaggagacttctgcctggatatccaggtgttttcatacatcctctgaaatctaggcagagactcccaaagctcaactcttgttttctgtgcacctgcaggcccaacaccacatggaaaccaccaaggcttggggcttgcaccctctgaagcaatgacccaagttgtaccttggcctcttttagccgtggctgaagccggagaagctgggatgcagggcaccaagtcccaaggctgcacagagcagcagggccctgggcccaattaagccatttttccctcctataactccatgcctgtaatggaagaggctactgtgaaggtctctgacattacctsgacacattttcctcattgtcttggctattaacattcagttccttgtcacttatgcaaatttctgcagccagcttgaattcttccccagaaaaaaaaaaattttttctaacacatgatcaggttgcaaattttccaaacctgtatg

SEQ ID NO: 302620 - DNA, 580 bp, Homo sapiens
gtaggttgcctgttcactctgacggtagtttcttttgctgtgcagaagctctttagtttaattagatcccatttgtcaattttgtcttttgttgccattgcttttggtgttttagacatgaagtccttgaccatgcctatgtctagagagaagaaaatgttatcaagaaaayaataaggaagagacaatatactattcattaagtggcagtggaacatcataagttcttcatcctcatgttcacattgagtaggttgaagaggaggaagagaagggattggtcttgttgtctcagggttggcaggagcgaaataaagtttgtctttaagtagacccagacagttcaaacccatgctgtccagggtcaactatacttacaaatcctgacacaaaagtacttaatgttccttttcagcttagcaatgtacaaacaaagggaaaacactgagagctgagttattctgaaattggtcacacagaatttccaacttcttgtcagaggattctaagcaatagattatgcaaacaatgcatatatttacataaatttgggaacatttttgtagcttcctacagttaa

SEQ ID NO: 302621 - DNA, 387 bp, Homo sapiens
atgcaaaaagatgggtgacacatactctaaatattacatggggacaaagggtacacaaggtttaccatgggatatactyagatcatctcattgtttactattaacaaatggtcccaaacttactgaaattatctgaaacttttagaattttgtccactggattcaaatagctatgtgtctgatggaaagataaccagatttatgatctgttggacattagtttataactaataacaatctcatcttaattattctctgtttaattgcccataaatccctgccttcttaagtgctcttcaaattgatcatgacatcttactgattctctcattaattaatgagttttaaagtatcaacatatgttcaatttacatttacatggaagat

SEQ ID NO: 302622 - DNA, 583 bp, Homo sapiens
gctttttactaagaaagaacttatactttgcttccattttcactccttttattcctcaaataagagaacaaagtgagaaatgtagagtcgcactttttactttgctttttaaataataaagtagtaaaagaatatgaactgacagtcaattcccctcccatatccattcttctaaactttgttaatagctgtcaatttaatctagtgttcctaagttaccgatcactactgtgtgcagacaattgaattcagcaagactccmtgactgtagatgatattggaattaaatgacattggacctgtttatcttagattatttaccccttagcatttcacataagtgatgcctactgtattagtccatttttacactgctggaaagaactacccaaggctggtaatttataaaggaaggaggtttaattgactctcagttccacgtggctggggaagcctcaggaaacttacacaatcatggtggggaaatgggaagcaaaggcacatcttcccacggtggcaggagagagagggagcagaggaaatggccacttttaaaaccatcagatctcatgagaactcactc

SEQ ID NO: 302623 - DNA, 623 bp, Homo sapiens
tgactcagcatagaccaaacctcactggacagagaagcctggggcagaaaacaaatgagaggcagtgcagcttgagggtcattttatcaagatgtatctgaggcaccactgattgccacataaatggcttgagtaaagtgacaggccaaggggatgtaagatgggttataaaatgtatttggcacactcctttacattagcatacacatagtttgattatgtaagttatttgctctacatgtgttgatgtacattttctgttattagaactatgtcaatgaggagattaaatgagaygtgtgtgagagtgccctgaaatataaatcatatatagaactgttcattttatattaagttctccaaagttgaaagttaaacagtggttgaactttttttttttaactcatcagtctgtagttacttgtgaaatcagtgcctcctcttagttcactatataactgtacatggatttcagcacaagaaaattgctttgaagacccaacagggcatacaggactaaattccaaattgacattgatgtgatcattgaattgtaaaagctcaaataattaatctgtttaatgcctactcatttggctacttactttcttggatgctctacc

SEQ ID NO: 302624 - DNA, 623 bp, Homo sapiens
tgactcagcatagaccaaacctcactggacagagaagcctggggcagaaaacaaatgagaggcagtgcagcttgagggtcattttatcaagatgtatctgaggcaccactgattgccacataaatggcttgagtaaagtgacaggccaaggggatgtaagatgggttataaaatgtatttggcacactcctttacattagcatacacatagtttgattatgtaagttatttgctctacatgtgttgatgtacattttctgttattagaactatgtcaatgaggagattaaatgagatgtgtgtgagagtgccctgaaatataaatcatatatagaactgttcattttatattaagttctccaaagttgaaagttaaacagtggttgaactttttttttttaactcatcagtctgtagttacttgtgaaatcagtgcctcctcttagttcactatataactgtacatggatttcagcacaagaaaattgctttgaagacccaacagggcatacakgactaaattccaaattgacattgatgtgatcattgaattgtaaaagctcaaataattaatctgtttaatgcctactcatttggctacttactttcttggatgctctacc

SEQ ID NO: 302625 - DNA, 609 bp, Homo sapiens
ctgtttatcttagattatttaccccttagcatttcacataagtgatgcctactgtattagtccatttttacactgctggaaagaactacccaaggctggtaatttataaaggaaggaggtttaattgactctcagttccacgtggctggggaagcctcaggaaacttacacaatcatggtggggaaatgggaagcaaaggcacatcttcccacggtggcaggagagagagggagcagrggaaatggccacttttaaaaccatcagatctcatgagaactcactcactatcataggacagcatgggggaaactatccctaggatcccatcacttcctaccagggctctcccttgacatgtgaagattataattttgagatgagatttgagtggggacacagagccaaaccatatcacctactcttatatgcttaaagtgaatgcatttaattataaatttaatagagccattatgctttttatatcacctttacactgtataattatttaaacaatactgtaaataaataacgtgtatagggaaatgtaagttaaccataaaggtaactagcaagatcaccagtgcttgctttgaggtaactagcaagat

SEQ ID NO: 302626 - DNA, 575 bp, Homo sapiens
ggtgttcccaatataaatttttatcagctttttcaaagatcagttggctgtaaatatgtggctttatttrtaagttctctattctgttccattggtctatgtatctgtttttatagcagtactatgctgttttggtttctgtagccttattatatattttgaagtcaggtaatttgatgtttccagctttattccttttgctcagaattgctttggctgtttgccaggttggttatttgcccattttttttctatttcctttaagaatgatgttggcattttgatagcaattgcaatgaatctctaagttgttttggggaatatggtcaatttaatgatattaattcttgtgatccacgagcatgagaatttttccatttgtttttgtcatctccagtttctttcaccagtgttttataattttcgttgtagagatctttcatctatttagttaaatttactcttaggtattttacttttttggtagctattataaatgggattgctttcttgatttctttcttgactggatcattattggtgtgtataaatgctactgatttttgtatgttgaa

SEQ ID NO: 302627 - DNA, 609 bp, Homo sapiens
ctgtttatcttagattatttaccccttagcatttcacataagtgatgcctactgtattagtccatttttacactgctggaaagaactacccaaggctggtaatttataaaggaaggaggtttaattgactctcagttccacgtggctggggaagcctcaggaaacttacacaatcatggtggggaaatgggaagcaaaggcacatcttcccacggtggcaggagagagagggagcagaggaaatggccacttttaaaaccatcagatctcatgagaactcactcactatcataggacagcatgggggaaactatccctaggatcccatcacttcctaccagggctctcccttgacatgtgaagattataattttgagatgagatttgagtggggacacagagccaaaccatatcacctactcttatatgcttaaagtgaatgcatttaattataaatttaatagagccattatgctttttatatcacctttacactgtataattatttaaacaatactgtaartaaataacgtgtatagggaaatgtaagttaaccataaaggtaactagcaagatcaccagtgcttgctttgaggtaactagcaagat

SEQ ID NO: 302628 - DNA, 632 bp, Homo sapiens
gaaaatgtaaaatactatttttgttgctaaaactagttgaaagcaattcatatgactactacagaatattaaaacctaacacactgtaaaagcctcgatttttaaaatttgttaagtatgtaagatttgttaggtatgtaaaggtraatatatatacaaaatagaagccactgagcattgaaagaatatatagtatatgtaagatttgttaggtatgtgagatttgttaggcatataaaggtaaatatacatacaaaatagaagccattgagcattgaaagaatatacagtcattgaacctagttataaaatcctaaagtgaaaaactgattttcacatatacatatctaaacgtacttgtttttaaacctgaacttgcttttaaattatacaagtaaacactttgctacaaaaagtcactttaaagtacacaaaatacagcccttttgtcaggatttttacaacccacagcatcgttacaggatgaatgtggatggataccatgaaaataatttctatcttcaattattatacccagctatgatttttataaaaatgacaggaatttgtgcaatagctgattaactctactaaattagataacttgcttaatttgcaatattttaagtctc

SEQ ID NO: 302629 - DNA, 571 bp, Homo sapiens
tggcttcatagtattcaatggtgtatttgtaccaatttttctttaaacaatctgccactgatacgcacctgagctaattttgtgtctttgctactgtgagtagtgcttcaagaacacacaagtgcatgtgtctttttggtagaataatttatattcctttggtatatacccagtaatgggatttctgggttcaatggttattctgttttaagtgctttgaaaaatctccaaactgctttccacagtggttgaactaatttaccttcccaccaacagtatataagcatttccttttctctacaacctcactggcatctgttattttatgactttttaayaatagccatactgactggtgtcagatggtatctcattgtggctttgatttgcatttctctgatgattagtgatgttgagcattttatatatttcttggccacatgtacatcttcttttgagaagtgtccattcttatctttttctccattttttaatggggttattttttttttgcttgctcaattgcttaagttctttatatattatctgaaatgcctttgaagccttttcc

SEQ ID NO: 302630 - DNA, 612 bp, Homo sapiens
acccagtaatgggatttctgggttcaatggttattctgttttaagtgctttgaaaaatctccaaactgctttccacagtggttgaactaatttaccttcccaccaacagtatataagcatttccttttctctacaacctcactggcatctgttattttatgactttttaataatagccatactgactggtgtsagatggtatctcattgtggctttgatttgcatttctctgatgattagtgatgttgagcattttatatatttcttggccacatgtacatcttcttttgagaagtgtccattcttatctttttctccattttttaatggggttattttttttttgcttgctcaattgcttaagttctttatatattatctgaaatgcctttgaagccttttccccattgtcttaactacttgactcctttttacttacgcaaacttttacataagtaaaacttgcttgaattccttccatgaaaatgggcttttctaccacaaggccaggctgcacattttttacacttttacatcctgtgccccttttaagtatcagttcaactttaggtcatttctttactaacacatataagaacaggattttagaag

SEQ ID NO: 302631 - DNA, 612 bp, Homo sapiens
acccagtaatgggatttctgggttcaatggttattctgttttaagtgctttgaaaaatctccaaactgctttccacagtggttgaactaatttaccttcccaccaacagtatataagcatttccttttctctacaacctcactggcatctgttattttatgactttttaataatagccatactgactggtgtcagatggtatctcattgtggctttgatttgcatttctctgatgattagtgatgttgagcattttayatatttcttggccacatgtacatcttcttttgagaagtgtccattcttatctttttctccattttttaatggggttattttttttttgcttgctcaattgcttaagttctttatatattatctgaaatgcctttgaagccttttccccattgtcttaactacttgactcctttttacttacgcaaacttttacataagtaaaacttgcttgaattccttccatgaaaatgggcttttctaccacaaggccaggctgcacattttttacacttttacatcctgtgccccttttaagtatcagttcaactttaggtcatttctttactaacacatataagaacaggattttagaag

SEQ ID NO: 302632 - DNA, 618 bp, Homo sapiens
atcagtttctgcacacactctggttttagwgtgatctttgctgatgggccctgtaaatttcccttttcttctttcaagcttatttatctatttaataagatatattttctgtttcatctagaatttctagatatttgtgacagtaggattttcaggttcttagtccaacattagtcaggaatgaaaacaagttatccattctattaatattcagaatgaatttaaatattgggtttgttcatagagatgatgtttttactcctttagacacaagtgagatcagagcctatcaacatgcagtttttcttgatgaagatggatgaccgaacctctgctgctgaaagcatggtaagaattctaatcaaatccacgtgcaaatcatttgggtaattttgtggaatgtataatttacttttcttggatgactaaaatagtgataaataaattaggtccattgactgtattttaagccaaggtagagctaggtcttttagtccctaaaagttgttgtaattgctactgactacctggcattacagcaaatgaggacagctttctgttacaattggtattgctcttttcattcttgtgatagcaaaaacattaggggtaccttgc

SEQ ID NO: 302633 - DNA, 618 bp, Homo sapiens
atcagtttctgcacacactctggttttagagtgatctttgctgatggkccctgtaaatttcccttttcttctttcaagcttatttatctatttaataagatatattttctgtttcatctagaatttctagatatttgtgacagtaggattttcaggttcttagtccaacattagtcaggaatgaaaacaagttatccattctattaatattcagaatgaatttaaatattgggtttgttcatagagatgatgtttttactcctttagacacaagtgagatcagagcctatcaacatgcagtttttcttgatgaagatggatgaccgaacctctgctgctgaaagcatggtaagaattctaatcaaatccacgtgcaaatcatttgggtaattttgtggaatgtataatttacttttcttggatgactaaaatagtgataaataaattaggtccattgactgtattttaagccaaggtagagctaggtcttttagtccctaaaagttgttgtaattgctactgactacctggcattacagcaaatgaggacagctttctgttacaattggtattgctcttttcattcttgtgatagcaaaaacattaggggtaccttgc

SEQ ID NO: 302634 - DNA, 618 bp, Homo sapiens
atcagtttctgcacacactctggttttagagtgatctttgctgatgggccctgtaaatttcccttttcttctttcaagcttatttatctatttaataagatatattttctgtttcatctagaatttctagatatttgtgacagtaggattttcaggttcttagtccaacattagtcaggaatgaaaacaagttatccattctattaatattcagaatgaatttaaatattgggtttgttcatagwgatgatgtttttactcctttagacacaagtgagatcagagcctatcaacatgcagtttttcttgatgaagatggatgaccgaacctctgctgctgaaagcatggtaagaattctaatcaaatccacgtgcaaatcatttgggtaattttgtggaatgtataatttacttttcttggatgactaaaatagtgataaataaattaggtccattgactgtattttaagccaaggtagagctaggtcttttagtccctaaaagttgttgtaattgctactgactacctggcattacagcaaatgaggacagctttctgttacaattggtattgctcttttcattcttgtgatagcaaaaacattaggggtaccttgc

SEQ ID NO: 302635 - DNA, 618 bp, Homo sapiens
atcagtttctgcacacactctggttttagagtgatctttgctgatgggccctgtaaatttcccttttcttctttcaagcttatttatctatttaataagatatattttctgtttcatctagaatttctagatatttgtgacagtaggattttcaggttcttagtccaacattagtcaggaatgaaaacaagttatccattctattaatattcagaatgaatttaaatattgggtttgttcatagagatgatgtttttactcctttagacacaagtgagatcagagcctatcaacatgcagtttttcttgatgaagatggatgaccgaacctctgctgctgaaagcatggtaagaattctaatcaaatccaygtgcaaatcatttgggtaattttgtggaatgtataatttacttttcttggatgactaaaatagtgataaataaattaggtccattgactgtattttaagccaaggtagagctaggtcttttagtccctaaaagttgttgtaattgctactgactacctggcattacagcaaatgaggacagctttctgttacaattggtattgctcttttcattcttgtgatagcaaaaacattaggggtaccttgc

SEQ ID NO: 302636 - DNA, 516 bp, Homo sapiens
aaaatattttgaactaaataaagtgaaaatacacttgttaaaatttgtgggatgtggtgaaarcagtgcttagaggggatttttttggttggttggttttggttaggtggttttttttttttttttttttgtgcgttgtggtcttgctctgaagcccaggctggagtgggaatgcagtggcataattatacctcactgcagcctcaaactgctggcttcatgctatactcccaccttggtctcccaacatgctgggattacagccataagccaccatgcctggggaagatagaaatttatagcatcaaatgcatattttagaaaagaagaaagctctaaaaatcaataatctaagtttccactttaggaaactagaaaaagaaaatttaaatttaaagtaagaaaaataaaagatataataagaattagagcagaaatcaataaaattgaaaataggaaatcaatagagaaaggagaccaaaagttggttatttgaaaagagcaaaattgactagc

SEQ ID NO: 302637 - DNA, 516 bp, Homo sapiens
aaaatattttgaactaaataaagtgaaaatacacttgttaaaatttgtgggatgtggtgaaaacagtgcttagaggggatttttttggttggttgkttttggttaggtggttttttttttttttttttttgtgcgttgtggtcttgctctgaagcccaggctggagtgggaatgcagtggcataattatacctcactgcagcctcaaactgctggcttcatgctatactcccaccttggtctcccaacatgctgggattacagccataagccaccatgcctggggaagatagaaatttatagcatcaaatgcatattttagaaaagaagaaagctctaaaaatcaataatctaagtttccactttaggaaactagaaaaagaaaatttaaatttaaagtaagaaaaataaaagatataataagaattagagcagaaatcaataaaattgaaaataggaaatcaatagagaaaggagaccaaaagttggttatttgaaaagagcaaaattgactagc

SEQ ID NO: 302638 - DNA, 516 bp, Homo sapiens
aaaatattttgaactaaataaagtgaaaatacacttgttaaaatttgtgggatgtggtgaaaacagtgcttagaggggatttttttggttggttggttttggttaggtggttttttttttttttttttttgtgcgttgtggtcttgctctgaagcccaggctggagtgggaatgcagtggcataattatacctcactgcagcctcaaactgctggcttcatgctatactcccaccttggtctcccaacatgctgggattacagccataagccaccatgcctggggaagatagaaatttatagcatcaaatgcmtattttagaaaagaagaaagctctaaaaatcaataatctaagtttccactttaggaaactagaaaaagaaaatttaaatttaaagtaagaaaaataaaagatataataagaattagagcagaaatcaataaaattgaaaataggaaatcaatagagaaaggagaccaaaagttggttatttgaaaagagcaaaattgactagc

SEQ ID NO: 302639 - DNA, 516 bp, Homo sapiens
aaaatattttgaactaaataaagtgaaaatacacttgttaaaatttgtgggatgtggtgaaaacagtgcttagaggggatttttttggttggttggttttggttaggtggttttttttttttttttttttgtgcgttgtggtcttgctctgaagcccaggctggagtgggaatgcagtggcataattatacctcactgcagcctcaaactgctggcttcatgctatactcccaccttggtctcccaacatgctgggattacagccataagccaccatgcctggggaagatagaaatttatagcatcaaatgcatattttaraaaagaagaaagctctaaaaatcaataatctaagtttccactttaggaaactagaaaaagaaaatttaaatttaaagtaagaaaaataaaagatataataagaattagagcagaaatcaataaaattgaaaataggaaatcaatagagaaaggagaccaaaagttggttatttgaaaagagcaaaattgactagc

SEQ ID NO: 302640 - DNA, 559 bp, Homo sapiens
ttggtatttatttaaatgaattgaaaactatgtccacacaaaaatctgtacaaaagatgtttatagcagctttattcataattgctaaaacttggaggcaatcaagattatcaagatgtttgttagtaagtgaatggataaataagccatggtatatccagactatggaatattactcagcactaaaaggaagtgaactatcaagccatgaaaatatatgtaggaaccttagcagcaaattgctgagtgaaagaagccattcagaaaaggccacatactgtatgattctaactacatgacattttggaaaaggcaaaactatggatataactataacaaaactatggatatagcaggagaaataggcagagcacagaggatttttagggcagtgtcactattctayacaatactgtattactatggtgaatacatatcattatacatttgtgaaaacccatagactgcacaacaccaaaagtgaaccccaatgtaaactgtggactttggatgacaaaaatatatcagccttagttcatcaactgtacttagttcaacc

SEQ ID NO: 302641 - DNA, 587 bp, Homo sapiens
taacatatacagatgttaaacatatgacatactgttgggtcttgagagtcctttacatattctagatactagccctttgttggatacgtggtttgcaaatattttctcattttgcagcttatcttttcatcttatttatttgtttatttattttcagagtcaaggtttcaccacattggccaggttggtctcaaactcctgacctcaggtgatgtgcctcccttggcctcccaaagtgccggaattacagatgtgaggcaccgcgtccggccatcttttcatctttaacagagtacttcacaaagcaaaagttttaaattttgatgaaatctactttatcaatttttccttttatagatcgtacttttggtttcaagtctaagaattctttgcctaaccctagatccaaaagatatcctcctatgttttayattttatatttaagtccatgagtgaattttttattaaggtgtaaggtttgtgtcgaaaatttttttttcatttgtggatgtctaattgccccagtaccatttgttgaaaagggtatcttgcttttattgaattatttttcacctttgtcaaaaacc

SEQ ID NO: 302642 - DNA, 595 bp, Homo sapiens
tatgtaggggtttgtaatactgtttggtctacttctgcatatatttaaaatttttttcaagaagttttttaaaaaattggcattattgaaagtttcattgaaagcgtacttacagtttcaattgccatttctattgccacattatcttccgagcttgggcatttcaggaagtgtttaagtgcctgaaaagcgaattacagcaattaaaaattttcagaatgttttcacattagggaaaacaaagctttcacacagctttaacacaaagtaattacagtctgtgaaagtatcttcatctcaaccaggggcttgcatggtgttggatcttaaatatgtccttaaaagctggatatagtttaaaaaatggaaggacccagttaaccctctgaagaatctagtcctgatgaaatgaaaaggcaaaatgtgcccttttcagtaggaagatttaattattttcattcatttattctttcaacaaatagttactgacaacctgctactatgtgtgtgggacttygctagatcccatggagaataccaggaatggtatggcacggcccctattttctgtgttatgtacagtcttgctaagaag

SEQ ID NO: 302643 - DNA, 413 bp, Homo sapiens
aagctgaaggaaagaagacgcagaatgttagattaaaggaggcaggatgggcyaaatactcctatacagtccacgcaaagaggggttggacgagctcgggtatatctttttttcttccaggtttctggggtagaagggaggaggcataagaggtacaatagtttatttcaaggtagggttgttggtgctttttttttttcagtttcaccaaaatcttttttttttttcaatgtcaacaaaatgtgctagctaacgtgggcaggaaaaatgagctccaatagttttcctttagagtttggatctggcagcttttccccaagtataaagccctgttgtacagtatttgtgctgcattatttatagcatgaaagtgcatcttttacccaagcgtctgaaagtgttgaaacagtcta

SEQ ID NO: 302644 - DNA, 413 bp, Homo sapiens
aagctgaaggaaagaagacgcagaatgttagattaaaggaggcaggatgggctaaatactcctatacagtccacgcaaagaggggttggacgagctcgggtatatctttttttcttccaggtttctggggtagaagggaggaggcataagaggtacaatagtttatttcaaggtagggttgttggtgctttttttttttcagtttcaccaaaatcttttttttttttcaatgtcaacaaaatgtgctagctaacgtgggcaggaaaaatgagctccaatagttttcctttagagtttggatctggcagcttttccccaagtataaagccctgttgtayagtatttgtgctgcattatttatagcatgaaagtgcatcttttacccaagcgtctgaaagtgttgaaacagtcta

SEQ ID NO: 302645 - DNA, 567 bp, Homo sapiens
tatttaaactttgaaaaataaaatatttttcaaaaatcgtgaaagaagctgaggggaggggggcattatgtatagaggaggtaagataagaattacattgaattctcagaaaccatgaaaggaagaagagagcggaataaaatatttaaagtgttgagaattttttttaaacccacaaatctagaattctgtatcctgtaaaattatccttcacaagtgaaggagtccactcctcattgattagatgccaaactcaaaatggctaactttggtgaaaggatcttgacctgccttttttcaaactggaactgttcttgccatgcattttcctcctgactcaacagtaaagctactttagttctaagtgttttgataccacaaggatgtagtggtcagtaatcagatcaagacttgaaaaaaagagtatttcatgtaaacattatttgggggttactcaaacaatactagtgatttatgatttmatgtaaaacacacacacacatttttacagaaacactatatgaggattcaaatccctgaatatcagtaaatgggattgagaaatat

SEQ ID NO: 302646 - DNA, 445 bp, Homo sapiens
aacatggccaagaatagcaaatgacaaatctatactttggcccaaacaacaatttttctgtggctgtgttatgccctggccacccaatgaggtacaactcttacagagactatcaaacactaacatattatatgatgggtatatatgagtgctaatgagaggaactgcawagtagttaagtgtgcaatatcctgggtttatatcacagctttggcacttactgggtgtctgtgagcaacatatgtaaactcttgtgcctcattttcattataacagtacccatctcatataattttgtgaaaattaaaggatgtaatactcctggctcatgggaagcactattattgttactgctattattacaggcacagagctgggggaagaattcccccagctggatagaggaaaagaaacaaaatcaaggaaagtgacaaaaatgttgact

SEQ ID NO: 302647 - DNA, 575 bp, Homo sapiens
taagtggatatgttctaaagtagcattttaatttaattatcttctcacttcaggcatacctctgaaatattgcattttytgttccagcccaccacaagaaatcaagtattgcaataatgcaagtaacacatttttttttgtttcccagtgcatataaaatttatgtttggctgggtgtggtggctcatgcctgtaatcccaacactttgggaggccaaggtgggcagatcacctgaggtcgggagtttgagaccagcctgaccaatacggagaaaccccgcctctactacaaatacaaaattagttgggtgtggtggtgcatgcctgtaatcccagctactcgggaggctgaggcatgagaatcacttgaacccaggaggcagatgttgcagtgagctgagatcgtgccattgcactccagcctaggcaacaagagcaaaactccatctcaaataaacaaacaaacaaaaagttatgtttatattatagtctattaagtgtgtaatagcattatgtctaaaaaaatgtacataacttaattttaaaatactttattactaacaaatgctaataat

SEQ ID NO: 302648 - DNA, 575 bp, Homo sapiens
taagtggatatgttctaaagtagcattttaatttaattatcttctcacttcaggcatacctctgaaatattgcattttttgttccagcccaccacaagaaatcaagtattgcaataatgcaagtaacacatttttttttgtttcccagtgcatataaaatttatgtttggctgggtgtggtggctcatgcctgtaatcccaacactttgggaggccaaggtgggcagatcacctgaggtcgggartttgagaccagcctgaccaatacggagaaaccccgcctctactacaaatacaaaattagttgggtgtggtggtgcatgcctgtaatcccagctactcgggaggctgaggcatgagaatcacttgaacccaggaggcagatgttgcagtgagctgagatcgtgccattgcactccagcctaggcaacaagagcaaaactccatctcaaataaacaaacaaacaaaaagttatgtttatattatagtctattaagtgtgtaatagcattatgtctaaaaaaatgtacataacttaattttaaaatactttattactaacaaatgctaataat

SEQ ID NO: 302649 - DNA, 476 bp, Homo sapiens
ttaccatatatgtctcaatttatcagaatcagcttcagatttattctaaattaattccagtgtgatatatctmtatctatatctatatatatatatacacactctatatagctctatatccctttccccattttgtgaaattgttgatacatctatctatctatatataatctctaagtgttacaaacctcacaatacattgttatgatcatttataaaatattatgtttttaaaaagccaaaggaaagaaaattttatatttatagttttaaaaaatatattaatactccgatttatcatttctgagttaccatcgagtaatttccttagcccaatactgctttgctctgagttaccccctttgtgctgttactagcaagtatattacatttatatatgtatggacccaataattcattatacacgtggttttatacaattgctttataaatcagttaagaaaggatgaataaca

SEQ ID NO: 302650 - DNA, 581 bp, Homo sapiens
tgtcttattttctttataaactttttgtaatctgtaattatctcatttgcttattattatatttttttggtctcttttatatgctggaatgtaagctccgtgaaggtggaagatgtgattcttttcatactgctgtattttcaagcagtgcctgttacattatagccaaccaatatgtatttgtagaataaattcaaattaaacttctcttcaacatcactggatattatttaataaagaagcagcaggcagggcggtggctcatgcctataatcccagcaccttgagaggccaaggtggacagatcacttgagggcaggagtttgagaccaggctgatcaacatgacaaaaccctgtctctaccaacaacaacaacaaaaaaaaaattagctgggcatggtggcacacctgtaatcccagctactcgggaggctgaggcagaagaatcacttgaactctggaggcggaggttgcattgagccaagattgcagcactgtacctcaaaaaaaaaraaaaaaaagagggaatgacttcaaaaatctaagagaacatgatcttcaacttggaatgtcatattca

SEQ ID NO: 302651 - DNA, 527 bp, Homo sapiens
tgtggatgtccagttgttccagaaccatttgttgaaaagactatctctgttccattctattgcctttgcttctttgtcaaatatcagttcactatacttgtctgggtccattctggattctctattcagttccactcatctttttgtttattcttctaccaataccacactgtcttgattactgtagctatatagtatgtctttaagtttggtagtgtccaactttcttattttcctacaatatcatgttggttattctgggtcattgcttctctatttaaacttcagatttagtttgccaatatccttaaaataactgctgagaatttaagtgggactgcattgaatctataggtcaagttgagaagaattgatgtcttgacaatattgagtcttcctgtctctgaacacagactatctcttcatttatttcgttttttttttttttgacatctttcatcrggttttttttttttaggtttcctcatatagattttgtacatattttgctagatatatacctaagt

SEQ ID NO: 302652 - DNA, 457 bp, Homo sapiens
gttgagtatatcccttcattcaggtcaattaggctttgataaaacctggcaggttaggctctgatataayaatttctcttaagggaagatcctattaagaataaaatgctctggtgtatttcaaaacaatttccactccttctgcaagaagcctgtggggacttttctctgatcttcattgtgagaactttttagagtttctgaagataaaactcacaagtgggagggcccatctattattgccttcacccagtgtttcatattttaaattttcccacactgagcctccagaaatttatcagttacagttcagattttcctacctggtattggttcccatacagtgtgtttctactctggtaaattgtggttctctgtatccatctgtctgtctttccaacatgggggatagcaatgaagcatccttcattgaaggcatgacttcattgaaggaatg

SEQ ID NO: 302653 - DNA, 481 bp, Homo sapiens
aggggctgagaattttccttagctttccaggaaaggtgtatacagcaaaccattcatgagggtatacagaatccatctctttgtgtgggcttttcaatagccttgagaataatgtgtacattccaaaggcttcccagagcagcctaggattgagcacaaagtcaacattgtgccctgcttttttgtgctaacatggtagtcttgtctaagcaccaaggtactagaggacaagcccgtgacatttagctgctgyagtagagaaacacatgagtattatgtgactctttgttcccaatgtcattgtctacacagtacaaggaaagtgcaatcaaagagaaaaaccatgtttttgtaaacctcatcatcttactaacacagctaacttgactgggtatactggtaggaatgtagacagtgtaacccaggattaatgaagacaagcctgagacctttttctcttcatgagccctgtatctaacac

SEQ ID NO: 302654 - DNA, 363 bp, Homo sapiens
agacatagaatacaacattcaggtctatacactgaagtatcttggaatcccaaatttccctaaaccctctgggcctgcagaagtgagtcctcctttgaaatactagtgctcttaattgcttaaagacaatacaaaagcctgtcttgtgcaacacaagaggtattgcttcctcttccctcccattattttccatctcctctcctgagagactaataactaggatgagtcacaacacagcmccccctgagaaagcagtgagtctgctaagagaggaaggggatgatatgctgaggggactgcacatctagccaatatgtaccagcaagaattaattagaagagtatatacagtaactattgcatc

SEQ ID NO: 302655 - DNA, 625 bp, Homo sapiens
tgactacattaagaaaactgtcaagaaaataaattagttgtattagatatagatatagatacagataacacagtcacatatatacattgaaaaatgtatatatgtgctatctataacaaattcacgttgaagagaaaaacaagatacattaaaagcaaaatgatggagaaagatataccatgcaagccactaatcaaaagaaaactggaatagttatattaatttcagtccaagtagatttcagggcaagggagattatcagggataaagatggacacaacgtaatgataaacaaaacaattctcccagaagacaagaaaatcttaaatatttatttaacaacagatcttcataaarcatgaagtaaaaacctgacatatctgaaaggagaaatagacatgcccacaattacaatttgagatttcaacacctttctcttgggaattgatagaacaagtaagcaggcaatcagtaagactgtatacaacctgaacagtgcaatcaaccaacttggtgcaggtaatatttagagagcacttcacccaacaacaacagaagacatattcttctcaagtacatatggacattcctaacacacaccatattctcagctataacaaaacct

SEQ ID NO: 302656 - DNA, 625 bp, Homo sapiens
tgactacattaagaaaactgtcaagaaaataaattagttgtattagatatagatatagatacagataacacagtcacatatatacattgaaaaatgtatatatgtgctatctataacaaattcacgttgaagagaaaaacaagatacattaaaagcaaaatgatggagaaagatataccatgcaagccactaatcaaaagaaaactggaatagttatattaatttcagtccaagtagatttcagggcaagggagattatcagggataaagatggacacaacgtaatgataaacaaaacaattctcccagaagacaagaaaatcttaaatatttatttaacaacagatcttcataaaacatgaagtaaaaacctgacatatctgaaaggagaaatagacatgcccacaattacaatttgagatttcaacacctttctcttgggaattgatagaacaagtaagcagrcaatcagtaagactgtatacaacctgaacagtgcaatcaaccaacttggtgcaggtaatatttagagagcacttcacccaacaacaacagaagacatattcttctcaagtacatatggacattcctaacacacaccatattctcagctataacaaaacct

SEQ ID NO: 302657 - DNA, 668 bp, Homo sapiens
cacaagaattagcaatgagaaaaggactccctattcaataaatggttctgggatagctggctaggcttatgcagaaaaatgaaactcgacccctaccttttactatatacaaaacttaactccaggtggattaaaggcttaaatgtaggacttcaaactataaaaaccctagaagaaactctaggaaataccattctgaacatcagccttgggaaataatttataactaagtccttaaaagcaactgcaacaaaaasaaaaactgacaattgagaactaattaaagagcttctgtacagcaaaagaaactatgaatagagtacactgacaacctacagaatagaagaaagtattcacaaactatgcatctgacaaaggtttaatatccacgatctatgaggaacttaattcaacaagcaaaaaacaaataaccccattaaaaagtaggcaaaagacatgaacagacacttcttcaaagaagacatataaatgaccaacaaacatatgaaaaatgctcaacatcactaatcattagagaaatgcaaatcaaaaccacaatgaaatactatctcacacctgtcagaatggctataatgaaaaagtcaaaaaataacaagcaagacagtgagaaaaagagaacacatatacgctgttggtaggaatgtaaa

SEQ ID NO: 302658 - DNA, 668 bp, Homo sapiens
cacaagaattagcaatgagaaaaggactccctattcaataaatggttctgggatagctggctaggcttatgcagaaaaatgaaactcgacccctaccttttactatatacaaaacttaactccaggtggattaaaggcttaaatgtaggacttcaaactataaaaaccctagaagaaactctaggaaataccattctgaacatcagccttgggaaataatttataactaagtccttaaaagcaactgcaacaaaaagaaaaactgacaattgagaactaattaaagagcttctgtacagcaaaagaaactatgaatagagtacactgacaacctacagaatagaagaaagtattcacaaactatgcatctgacaaaggtttaatatccacgatctatgaggaacttaattcaacaagcaaaaaacaaataaccccattaaaaagtaggcaaaagacatgaacagacacttcttcaaagaagacatataaatgaccaacaaacatatgaaaaatgctcaacatcactaatcattagagaaatgcaaatcaaaaccacaatgaaatactatctcacacctgtcagaatggctatwatgaaaaagtcaaaaaataacaagcaagacagtgagaaaaagagaacacatatacgctgttggtaggaatgtaaa

SEQ ID NO: 302659 - DNA, 684 bp, Homo sapiens
ctgaagtatgaggtaggagtggctccctggcagtggtctctgtttgcatgcccacagtgattctagaaaacatctgggccatatggtgctcaagtcccggatgccaatttggatgtactgaaagaagaactgaaacatagaagtagagatgccaagcagaaaccagggtaagagcaggcraagtttcttaggttcttctcttggtggggggacctcaaaccctaccagaccacccagcattgcaaaaaccttcctggcagggctgcaatctggaagtgcaattccacacctcaccctaacccaggtctgaactaccacccaaggggcaggggtcaaagcttcccattcatacccacgttctctgatttgcaatcttaccctcagcctccgtgttgtcattcaattcagagaaagcctttcaacgaggccacagaggtcacggagacgactcaagctcttgcgaaggcggagtttcccatttcctgacttaacatctgccactcagtttgaggctctctttcttcctcttagctttaaagaagaaaaattattgaatagcccagggctaggggtagcaaaaaaatctcattacttcttctctgctgtcttctctcaggatgcatttcctagtcaatattcttgcaacaaatcatttttaatttgaaagtcacactcctccataaa

SEQ ID NO: 302660 - DNA, 575 bp, Homo sapiens
gtattaggaagcagggcctttgaaaggtgattaaggcttgggggtatgggattagtgccttataaaagggacccaagagagctcatttgccctcttcccaccatgtgagactacaacaagaagccagcatctgcagcctagaagagagcccttgccagaacctgaccatgctggtacccttatctcagacttccaatctccaggactgtaagaaataaatttctgttgtttataagctacccagtttatggtaatttttcatagcatctcaaagtgactaagacagggagagaattatggaagaaagggtgaattggttggctggcagctctaggatcaggaaaaacaaagacgagagtcaagtcattttgatgacagaggctcaatcaacaaatcaactcttgctatcaagagggttcgaaagccaacctggatatgaactccctaacttattcatctctctgaggcygatcctccatagttcctatttttcccatgaggttaggggatttatttttctattttaatttaatttctttttgaagatttgagaaaattttgagtaaaatgcacaa

SEQ ID NO: 302661 - DNA, 444 bp, Homo sapiens
tgaataacttttggctcaataattatttgcttaattgttcagtagcctacaacccaatatttcagcttattaaactattatttagtttcatgtaatttttttttggttgtcttaaagtctccccaagcctgtctcacatctgagtttatccaacagatatacattgtgtcctctatgcaggtgcaaatcaaaatctagcaaactagcaattaagtataaatcctagttttagtgcaatttggatgagcaactctttaggctgggttagaacaggttgtaagatttgtagcaataattggtagaatcttgactttaataaggtggaaytataacatatatgttgcactaaagaaaaagataaaccaacagatcaaaatctcattccttcatttgatgacagtaataaatctacatgatgtgcttgcagatgaaaggaagtcattg

SEQ ID NO: 302662 - DNA, 525 bp, Homo sapiens
acctgtatctacagttagtaataatctaagcaaacaaagaaaaaacttgcataaaacccaatatccatcaaaattgttagtaaactgtgggaaatgcatacgatagactactgtataatagtgagaaatgaataaattctaactatatatcacgacatgataaatcccaggtaccacctaatgtttagcaaaaaaaaagcaagactgtgagaagcacacagtcattaatttattctagaaatatttcttaattttaagaaatatttaagcatttactttgtacaaacattgtattgggatatatttgtagacaaaattgacagagatctctctgctcatggaacttaccttctaatagttggacatagaaaatctatagtagacrgaataaataggcaaatcatatggtacgatagaaggttaaaaaaatgatgaaaatagaaaatagagcaaagtaatggagatggaactgctgtcatttaaaataggatgatagagtaagcaccactgagaaatatttaagac

SEQ ID NO: 302663 - DNA, 568 bp, Homo sapiens
gggcttgcaattccatatattctcaccagctaatttaaaggattttcatttagctygaagattaaaccaagagtgtgccacatattatttattatgactggtagataaattaaaggcatagctttatttctgaagcaggaccacaaacaggtactgtaaggtctaggggacagcattgatagtaaagaatatactatttgatatttaagaatgcttatcataaaactttaagaatttgatttgtgaccaggtgtagtggctcacgcctgtcatcccagccctttgggaggctgaggtgggcagatcacttaaggccaggagtttgagaccagcctggccaacatggtaaaaccccatttctactaaaaatacaaacattagccgggcatggtggcgtgggcctgtaaccccagctacttgggaggctgagggaggagaattgcttgaacctgggaggctaaggttgcggtgagccgagatcatgccactgcactctagcctgggcaacagaatgaggctccatgtcagaaaaaaaaaaaaaaaaaagaatttgatttgtattttgaaa

SEQ ID NO: 302664 - DNA, 568 bp, Homo sapiens
gggcttgcaattccatatattctcaccagctaatttaaaggattttcatttagcttgaagattaaaccaagagtgtgccacatattatttattatgactggtagataaattaaaggcatagctttatttctgaagcaggaccacaaacaggtactgtaaggtctaggggacagcattgatagtaaagaatatactatttgatatttaagaatgcttatcataaaactttaagaatttgatttgtgaccaggtgtagtggctcacgcctgtcatcccagccctttgggaggctgaggtgggcagatcacttaaggccaggagtttgagaccagcctggccaacatggtaaaaccccatttctactaaaaatacaaacattagccgggcatggtggcgtgggcctgtaaccccagctacttgggaggctgagggaggagaattgcttgaacctgggaggctaagsttgcggtgagccgagatcatgccactgcactctagcctgggcaacagaatgaggctccatgtcagaaaaaaaaaaaaaaaaaagaatttgatttgtattttgaaa

SEQ ID NO: 302665 - DNA, 575 bp, Homo sapiens
cagaaccaagttttgaactagcccttatcatttaaaaactacactgctatacctattattaatcagggcaattgagaatttatgggtgtcagtgcaatgtgaaaaagtgattagtataatacttggagaacataaagatgtttttaacaatccacaaattamgatttataaagagttactggctactgttgtagaattccttatataccaaactactttggggtatcaagccaaaacatatcaaagagacatggagaactgaagtctataattatatatggctcaattaactttttaaagtagcattaagaatattcttaggagagttgtgctaatattaaagtgtgatgtttacttatttctaccacaagattttcctaattgttaacttttatacaaaattacccctattattttaaattgcagactacataaatgcagtctccatgcatctatatttttttcttaccaatgtcatacccaacatctagagcaatgtgttgcacataatgtgtgaaaaaccccaaaaaagtttggttatttattttggattctaaaattttttaatttgttaa

SEQ ID NO: 302666 - DNA, 549 bp, Homo sapiens
atgagccttaacagggaagctggtgctcctaaagccatcttgttcttgatagctctgagaagggcaactctactgagttgttaacatcaaytaatgtctgttgactgtacagcaatggtgagccgagcacttagtgacttaatgacacactattataaaagcatatgagccaaaaccgtggaatttatctgccaaataaacttgtgctctaatccttgtttcaggatctacatcaagtggaacacaacttaagagaataacttcaaagtccatacagacagctcctctttgccttacagtccagttacttttgtcttcaaggacatatactagcttttgttccttgggactgttccacatgtgaaatcttaaactttagaattccatccttcgaacaaactacataaccactttttccccacttgactatcccaaacctactctttgaacttattaaaacctgcagttgtgagtttctcatttgatgtcacttttccccatatctatacccactgttggtgtgtttagttatgctcacctgcatcctca

SEQ ID NO: 302667 - DNA, 575 bp, Homo sapiens
cagaaccaagttttgaactagcccttatcatttaaaaactacactgctatacctattattaatcagggcaattgagaatttatgggtgtcagtgcaatgtgaaaaagtgattagtataatacttggagaacataaagatgtttttaacaatccacaaattacgatttataaagagttactggctactgttgtagaattccttatataccaaactactttggggtatcaagccaaaacatatcaaagagacatggagaactgaagtctataattatatatggctcaattaactttttaaagtagcattaagaatattcttaggagagttgtgctaatattaaagtgtgatgtttacttatttctaccacaagattttcctaattgttaacttttatacaaaattacccctattattttaaattgcagactacataaatgcagtctccatgcatctatatttttttcttaccaatgtcatacccaacatctagagcaatgtgttgcacataatgtgtgaaaaaccccmaaaaagtttggttatttattttggattctaaaattttttaatttgttaa

SEQ ID NO: 302668 - DNA, 562 bp, Homo sapiens
tagaacttttcagcaatttctgtgcctgtttcacatcttttttctgttcagttagttagtattatttatgctcatattattctataacgtctgcagttgcttcctttgatcrtccctttcttttgaataccattttatttcctccccgaactcattcataacctctactttctattttagtgtgcatacacacacacacacacgcaaatatatatatatacgcatacatacacacacacacacacacacacacaacactcactgtaagccaagactgtgttaggtattataaatttataaataaagcaaactacaaaaaaagataagatccctagctgttatgagttatatattttatagttctataggatatgtcttttttaaaaattttattattattatactctaagttttagggtacatgtgcacatcgtgcaggtttgttacatatgtatacacgtgccatgttggtgtgctgcacccattaactcatcatttaccattaggtatatctcctaatgatatccctcccccctcctcccaccccacaacagtccccggt

SEQ ID NO: 302669 - DNA, 562 bp, Homo sapiens
tagaacttttcagcaatttctgtgcctgtttcacatcttttttctgttcagttagttagtattatttatgctcatattattctataacgtctgcagttgcttcctttgatcgtccctttcttttgaataccattttatttcctccccgaactcattcataacctctactttctattttagtgtgcatacacacacacacacacgcaaatatatatatatacgcatacatacacacacacacacacacacacacaacactcactgtaagccaagactgtgttaggtattataaatttataaataaagcaaactacaaaaaaagataagatccctagctgttatgagttatatattttatagttctataggatatgtcttttttaaaaattttattattattatactctaagttttagggtacatgtgcacatcgtgcaggtttgttacatatgyatacacgtgccatgttggtgtgctgcacccattaactcatcatttaccattaggtatatctcctaatgatatccctcccccctcctcccaccccacaacagtccccggt

SEQ ID NO: 302670 - DNA, 608 bp, Homo sapiens
gctgtaatctgaccccatcctgccacagtacttgttcttaaccactactctccactgtgcttcatattagttagataacatgtttgttcatattccttagcaagaatttttattttatatcaacatgagtttccaagggcccctaggctgcatcacacctgggagcccatcataaacatgtgcctttggagctattaaactttagtattctccagaatcacttgtaggatcttgttacagtacagatatgtgtagtctaccagcagaggttcagtcagttgagggtggatwctgggatcctaattggtacaagctttctttagggatgatgaaacattctaaaattagcttatgtgatggctgtaaaactccgtagatatactaaaaatcactgaatcatactctttaattgggtgaactatatggcatgtaaactatattttaatgaagctgttgaaaaaaagtctggaacagaaatgaccatggaggcacagccttctagccaagtctcacagaagggcccacgaagagcagggctgggatggaagtgtcgtggctttctcattcattcataatattaaagtcatttatagcaaagatagagatag

SEQ ID NO: 302671 - DNA, 608 bp, Homo sapiens
gctgtaatctgaccccatcctgccacagtacttgttcttaaccactactctccactgtgcttcatattagttagataacatgtttgttcatattccttagcaagaatttttattttatatcaacatgagtttccaagggcccctaggctgcatcacacctgggagcccatcataaacatgtgcctttggagctattaaactttagtattctccagaatcacttgtaggatcttgttacagtacagatatgtgtagtctaccagcagaggttcagtcagttgagggtggattctgggatcctaattggtacaagctttctttagggatgatgaaacattctaaaattagsttatgtgatggctgtaaaactccgtagatatactaaaaatcactgaatcatactctttaattgggtgaactatatggcatgtaaactatattttaatgaagctgttgaaaaaaagtctggaacagaaatgaccatggaggcacagccttctagccaagtctcacagaagggcccacgaagagcagggctgggatggaagtgtcgtggctttctcattcattcataatattaaagtcatttatagcaaagatagagatag

SEQ ID NO: 302672 - DNA, 573 bp, Homo sapiens
taaatgagtaggctttagtatctctctactggctttttagctatgacttttaaaattattttatagtcattgctctgagaattacaatatgtatgcttaacttatcatgatctaccttaaattaatatttcatatatctctcacatactgtaagaaattttaaktgactttttaaaaatttagaagaaaaaataaccttttatatttaccctttcatttgccattattggggttctttattccttattagatctggatttccatctggcacttcatctctttagcttacaaaactctttttagcatttttgatgattttgatctgttggcaacaatttctctcatcttttgtttatctgaaaatgtttttatttaaccttaatttttgaaacatatttttagagtatacaacattttagattgatgatattgtttagtttttgtgttttagcacttaaaaggttttgttctatcttcatgctgtcattgtttcttaaatttattattattcctctctaagaactggtctttttttctggctataagaccatgtggtctttgtacgtttgccaa

SEQ ID NO: 302673 - DNA, 593 bp, Homo sapiens
ctgttgtacaatgtttacataaatgtgatttattcattcagtgggatgctatcaatgctatctagcagttaaaatgratcaataagatctacacatatttatagcacctaagttgttttttttttaactgcatttaggccaaaggaagcaaagaatataaaataatattttttgtatgtgagagagtaggctttctgcttgcttctatttaatattgttcccttgataatataaaatattgaataatttgatatacgaaacatcttaacgttatcactggtgggggaaaaacaatgtttcagtattttcattgtctaaatctctgctctgccttcagctcatgtgatgaacactgcaatgcaggagaattctgcaatccatgagtttgtgaaaatgttgacttaatttagtgtctaaatcctgcatctgcagttagcaaaaagattcaggatttagacattaaattaagtcaacatgtccacaaactctttcagcccctgtcattgattctactagaaaacttaagataatggaaaaggtatctgtcattcattccaaagaaattgttcccaattactatatttgtggatggc

SEQ ID NO: 302674 - DNA, 611 bp, Homo sapiens
tcacattacctgacttcaaattgtactacagagctatagtaactgaaacagcatggcactggcataaaaacagacacatagattaatggaacagcatagagaatccagaaataaacttatatatctaaagtgaacgaattttttgacaaagatgctaaaaccataaattggggaaaggacaatcttttcaataaatgggtcwgggaaaactgagtatccatatgcagaagaatgaaactggactcatatctcttgccatatacaaacattaaatcaaaatagatttaaggcctaaatctaagacctcaaactataaaactactagaagacaacactagggaaactctccaggtcattggactgggcggatttctttaggaatatcccacaagcacaggcaaccaaaccaaaaattgacaaatgggatcacatcgagttaaaaagcttctgcacagcatagggaacaatcaacaaagtggagggacaactctcagaatgggagaaaaaaattgcaaactacccatctgacaaagggttaataaatcagaatatataaggaactcaaacatctctattaaaaaatctaataatctgatcagaaaatgagcaaa

SEQ ID NO: 302675 - DNA, 548 bp, Homo sapiens
aataatctgatcagaaaatgagcaaaagatgcatttttctttaggtctgctgatttcaccttctctggagcatcttactgcctttagattttctttatttctctactttttttaaaactcaagttctgtaaaggtctcattcattctcttcgcttgggcatctctgcagagatcctctttcagtcctctacgcttctgccctcatctggaccgaatgctttctatttatgctacattacaatttagtgacttccttccactgcttttctgaatcrcaaccactgttttctaggtgccatattcagtggtgtgcaggtaaaaatttaacataggttctcgaaacatgcatataaacaaattctaattttcagcattttctgatttccattttgcaaatattcccatcatggcagacatcaagttcccaacttaagttcactgaccatagaatggggaagggatgcctcctgccccctcaaccaaggctagcatctccccaacaccacagattagagccattttaacagagatatttctaaagaacattc

SEQ ID NO: 302676 - DNA, 608 bp, Homo sapiens
gagaatataatgatttaatatcagaacatctatcaatacaagtcatcaaattaacaaaataatagacaaatgtatatgattttcccaaatgcaaaaaaagggggatgaaattcagtctgataatcaaagtctgggaaacttaaaagtacagagaaatcccttaacttgataaggagaatttatcaaaaccccacacaacacaatggggtgatttggtacatattttttaaaggaggggatgagataaagatgtttcttatcaatgtttttaattagatttgatttttttctatattgtactaaagatcctagaaaatgtaataagaaaataaaataataggaatagataaaaattattaattaccaatatatgttcatctacaaagcaaatctaatgtagttaacaggyacattcttaaaaattataaggtagttctgggaagttgtttgatatgagattaattttcaaaaatttacctataccaggcataatcaagtaaaaaataaaattaaaaataagataatattaaaactcacaagataaaatatttaggaattacaataatagttgtgtaaacaatgcacaagacattatagagaatatttta

SEQ ID NO: 302677 - DNA, 585 bp, Homo sapiens
gttgattccattgggaagaaggatcatcatatatttacccaattcctctatttgggtattaaagtgattttttttcatttgtaaatgctcaccgtggtaattatttttgccatcatatatttctaagttcacaggtcctaagcattacctgaataattctaaaatgttgtttttattgctctccgtagcacccataacttaaaatttcatagccctttccttgcatggcaagacaggaggacttatgcctcagcatctataagtcattcctggaaatgacagaatagcactgaccagtcttcagtcaacctttgaggatgtccacatctgtagctaaaatggaggcattgtgtaaataagacatctaaatactgtgctgtctgtaaacctgagaaatttatttggaaaaacttaattttacttcatttaactatccgtgttaamgtttatgttaactatttgtgataaagccttacgtttctatttgggagatattttatgatgattccttaaggtagattcagataagctagttgtacctattttcttgtttcagtggttattctttgagatattatagatcac

SEQ ID NO: 302678 - DNA, 551 bp, Homo sapiens
tcattttaatatgccaccctctttttggtgtgtcccgcacattacagttacagtttttcactttgtatggattttaatttcttacttttacttgtgcgaagtccagtacttttgagaaacatgaaaaatgcacttcttccttaacytaggacatcacattgactccacaacaaagtgaatgtctgattccgtaatgcataaaaagctatttgacatttataacatcattattttttaaaaaattgtcatcaaataacaactcctaattaagtgagcaaaactaggctttctgaaaaagaagatggtctctaatttctatgtgtttacatattactttattatgtacttaataactaataaaaagaagaggaagatggatatctatccacagttaatgtaaaatttctacattcattaagctggtgatcacagctgttttataaccacttaaactgacaagaaaaaatgtgacagctttactctgtctcattcaaagttgcaatgttaagcactattaaataaataaaagatgtctgtagagtttagagttt

SEQ ID NO: 302679 - DNA, 606 bp, Homo sapiens
ttgtcgttttctctttggcrtgctcagcatcaggctcacacagactacaagctccatgaggacaaacggtttatctgccatgctcatatctgtgtgcccaggactcagctgactgctgctcttagtgaatgcttaataaagatatggtggatggatggactgaaggctgaaaatcaaaggaacaaaaggctgacaagatgttaaggtatctattacatgcccttgcctgactttcagattccttagctatggacttagttctaaaaaccacagaaaggggtagctatagatatttatgccagggaagtttccaactcctcttaatccaattaatttaaataactaaatttaatgtcaaataaaatttaaattattaggttggtgcaaattaattgcggtttttgctgttaaaagcaacggcaaaaacctcaattactcttgcatcaacctataataatctggacacagaacttgcttagggaaaaatcccaccgtctgataaagtgtaatagatatctaaatttctatttctaatagagctttgtaaaaccgtctcagtggacatgaggcttaagaaatcactataaaatgcaaataacttaccca

SEQ ID NO: 302680 - DNA, 506 bp, Homo sapiens
ttccagctccacggtggtgcactattagacaaaagtggcagaaagtagatcctcgaataatactaattctactcaaactatgccaaaacaatagggatggaggaaaacttccaaactaattctacaagaccaccattaccttaatatcaaaactagacaaataaaactataggccaatatcagtgatgaacattcatgcaaaaatcctcagcaaactgaagtcaataacctattaaaaagatcattcttcttgatcaggtgggattcatctcagggatccaaggatggttcaatatacagaaataagaactgtaataaatcacattaatagaatcaagtacaaaaaccatatgaacattcaataaattctagaaagagcatttgataaaattcaamacacttcatgataaaaactctcaacaaagtgggtgtagaagaaatatacctcaaaacaataaaggccatatatgacaaacctatagcaagcgtcactgtgaatggaacga

SEQ ID NO: 302681 - DNA, 623 bp, Homo sapiens
tgtgatgattatgttaactgtacaaattgattgtaaaacgtgtgtttgaacagtatgaaatcagtgcaccttgaaaatgaacagaataacagcgattttagggagcaagggaagacaaccataaggtctgactgcctgcggggttgggctaaaaaagccatatttttcttcttgcagagagcctataaatggacatgcaagtagaagagayatcactaaattcttttcctaccagggaatataatattaagaccctaggaaaagaattgcattcctgggggaaggtccatagacggctgctctgggagtgtctgtcctatgcggttgagataaggactgagatacgccctggtctcctgcagtaccctcaggcttaccaggattgggaaaccccagccctggtaaatctgaggtcagaccagttctctgctctcgaaccctgttttctgttaagatgtttatcaagacaatatgtgcaccgctgaacatagacccttatcaggagtttctgattttgccttggtcctatttcctcagaagcatgtgatctttgctctgccttttgccccttgaagcatgtgacctactccctgttcatacaccccctcctcttttgaaatccc

SEQ ID NO: 302682 - DNA, 623 bp, Homo sapiens
tgtgatgattatgttaactgtacaaattgattgtaaaacgtgtgtttgaacagtatgaaatcagtgcaccttgaaaatgaacagaataacagcgattttagggagcaagggaagacaaccataaggtctgactgcctgcggggttgggctaaaaaagccatatttttcttcttgcagagagcctataaatggacatgcaagtagaagagatatcactaaattcttttcctaccagggaatataatattaagaccctaggaaaagaattgcattcctgggggraggtccatagacggctgctctgggagtgtctgtcctatgcggttgagataaggactgagatacgccctggtctcctgcagtaccctcaggcttaccaggattgggaaaccccagccctggtaaatctgaggtcagaccagttctctgctctcgaaccctgttttctgttaagatgtttatcaagacaatatgtgcaccgctgaacatagacccttatcaggagtttctgattttgccttggtcctatttcctcagaagcatgtgatctttgctctgccttttgccccttgaagcatgtgacctactccctgttcatacaccccctcctcttttgaaatccc

SEQ ID NO: 302683 - DNA, 604 bp, Homo sapiens
taaattcttttcctaccagggaatataatattaagaccctaggaaaagaattgcattcctgggggaaggtccatagacggctgctctgggagtgtctgtcctatgcggttgagataaggactgagatacgccctggtctcctgcagtaccctcaggcttaccaggattgggaaaccccagccctggtaaatctgaggtcagaccagttctctgctctcgaaccctgttttctgttaagatgtttatcaagacaataygtgcaccgctgaacatagacccttatcaggagtttctgattttgccttggtcctatttcctcagaagcatgtgatctttgctctgccttttgccccttgaagcatgtgacctactccctgttcatacaccccctcctcttttgaaatccctaataaaaacttgctggttttgcggctcaggtgggcatcacggacctaccgatatgtgatgtcacccctggtggcccaattataaaattcctctctttgtggtctttctctttatttctcagactgaccaacacttagggaaaatagaaagaacctatgttgaaatattgggagtgggttcccccgataagaatcca

SEQ ID NO: 302684 - DNA, 563 bp, Homo sapiens
ggtgtgaaatggtgactaagatatgtaaaattagctcctcacacaactcagctacttgagtgtccaccattatatctagctctcataaaaaagataggaaaaaaaattgtgcttacttcttctctgatagagatgaagtaaatcaattattttcagagaagttcctttaaggtagtagccagctgcaccccctgaaaagttaatgcaagtgggctaggagatagactattgctcccatggctgyagctggtcctggggctgcaattgatctttgcgatctcccctttctaccacccagtctagattcccttcacccttagcaattctttgactggtctgagtggcttgtctcatggaatgatgcaaatcttcatttcagagttgtctaaagtattacatttttcagtgttctggggacgtggttactacattctcaattttgctttcaaaactagaggtagaagcatcaagtactgtcgctttgaatcccttgagtattatttgtctctgcccccattgttaagcagcaaccctgactctttatggtaatcatggaggttagc

SEQ ID NO: 302685 - DNA, 590 bp, Homo sapiens
gcaagtgaatctaaggtgtgaaatggtgactaagatatgtaaaattagctcctcacacaactcagctacttgagtgtccaccattatatctagctctcataaaaaagataggaaaaaaaattgtgcttacttcttctctgatagagatgaagtaaatcaattattttcagagaagttcctttaaggtagtagccagctgcaccccctgaaaagttaatgcaagtgggctaggagatagactattgctcccatggctgtagctggtcctggggctgcaattgatctttgcgatctcccctttctaccacccagtctagattcccttcacccttagcaattctttgactggtctgagtggcttgtctcatggaatgatgcaaatcttcatttcagagttgtctaaaktattacatttttcagtgttctggggacgtggttactacattctcaattttgctttcaaaactagaggtagaagcatcaagtactgtcgctttgaatcccttgagtattatttgtctctgcccccattgttaagcagcaaccctgactctttatggtaatcatggaggttagcctcctctagtact

SEQ ID NO: 302686 - DNA, 549 bp, Homo sapiens
ggtctgagctgctgtcttgcttatctgatggacttgcttcccaagtcctactatatagcaatacaggctgaatggaaaaaaaaaaaaagacatacatcctcacttggttgattggattcttggtcccaaatctgtattcagcatgtattcagtacctctgccatgcaacttttcaggtcttccctaaaaaggcagaatgttccttaccattcattgactttgaacttggcaaagcaatttgctttagccaatgagattatagtagttatcatccaagcagaggccgaaaacatgcgtgcatttggtggtagagtgtgagaactgaggaggcagttatacagggtaatacaactaaggtgaagcaatatggtgctgaatgtgtcagagagggtggagctgaaaggtagggaatgagawgaagagaaagtggctaagaggtagtcttaataatcaaatttaaaaccttaaatttcaatagggggtctgaggagaagagcaattgcattgaataaaataaaccagaaactaagtattataaacaataaagca

SEQ ID NO: 302687 - DNA, 574 bp, Homo sapiens
ccaattcttccctgctcaacaagtgtcacagtccactatcttcatgccactttgtttgacaaaacaaccagggatctcattttacratacattatataccaatctgggctaaatattattttcagttcatccaacccaaaggtttgacgattaccgtcttcctcacctgtgatgtgatggtgatctacaaacataatcaatgtacatttgtaaacacatgagcacatatgacatctttgtaaaaaaagaaagaaagaaactaagcagcaagagagggtttgaatccatgaaggttagccacctttcccctaaccactcaatcacttcagaggtaggtgccatcaggcttactaacgttaatcctaagatttttgtagcttataaacccaacctggcaatgctggaaactcaggctgcagaaatttataaacttaattccctgtggcttagaacccagagagtgacttcaagggcctcagagtcaaggtaccaactgcacagtgcaggactcctgagcttcagtgtcaggttcaaatttggcactcagcatactttggatcagggatgttttgga

SEQ ID NO: 302688 - DNA, 574 bp, Homo sapiens
ccaattcttccctgctcaacaagtgtcacagtccactatcttcatgccactttgtttgacaaaacaaccagggatctcattttacgatacattatataccaatctgggctaaatattattttcagttcatccaacccaaaggtttgacgattaccgtcttcctcacctgtgatgtgatggtgatctacaaacataatcaatgtacatttgtaaacacatgagcacatatgacatctttgtaaaaaaagaaagaaagaaactaagcagcaagagagggtttgaatccatgaaggttagccacctttcccctaaccactcaatcacttcagaggtaggtgccatcaggcttactaacgttaatcctaagwtttttgtagcttataaacccaacctggcaatgctggaaactcaggctgcagaaatttataaacttaattccctgtggcttagaacccagagagtgacttcaagggcctcagagtcaaggtaccaactgcacagtgcaggactcctgagcttcagtgtcaggttcaaatttggcactcagcatactttggatcagggatgttttgga

SEQ ID NO: 302689 - DNA, 637 bp, Homo sapiens
gtttttcatgctgattggaaggcaatataaaagggacctcattaataatgtagtttaagatagcttatttcttcttgtgtgcatttacaattttstgcctttccttttatgcttagatattataaacagtaagcacattattaaagactgttaaattaataggccatgatgcacatcattaaaagatgttaaattaatagggcatgatgatcttaataaaagtatctaaccacaaattacaactacacacaaaatgtgccccaaaactcagtgcacatttactgtagtcaaaattccttgcttagaccaattcagtggggacaaattgtggtgtgactgtgctgtggcataagcactggcctggagtcagcatagctggggctccatcactgaagagctttccagtgggaaagaaagagcttggaggtcaactcatgaattaacttgttagctatctgactttgggaaagttacctaacccctgtgaatatcagttctcctatccaaaagttaggactcagttcagaaagttgttgaaatattaaattaggtaatgtggataaatggcttagcacagactgagataagtcagtaaatgatagtttaaaaatctatgcttttcaatcaactatctata

SEQ ID NO: 302690 - DNA, 637 bp, Homo sapiens
gtttttcatgctgattggaaggcaatataaaagggacctcattaataatgtagtttaagatagcttatttcttcttgtgtgcatttacaattttctgcctttccttttatgcttagatattataaacagtaagcacattattaaagactgttaaattaataggccatgatgcacatcattaaaagatgttaaattaatagggcatgatgatcttaataaaagtatctaaccacaaattacaactacacacaaaatgtgccccaaaactcagtgcacatttactgtagtcaaaattccttgcttagaccaattcagtggggacaaattgtggtgtgactgtgctgtggcataagcactggcctggagtcagcatagctggggctccatcactgaagagctttccagtgggaaagaaagagcttggaggtcaactcatgaattaacttgttagctatctgactttgggaaagttacctaacccctgtgaatatcarttctcctatccaaaagttaggactcagttcagaaagttgttgaaatattaaattaggtaatgtggataaatggcttagcacagactgagataagtcagtaaatgatagtttaaaaatctatgcttttcaatcaactatctata

SEQ ID NO: 302691 - DNA, 584 bp, Homo sapiens
agatttttatttttagaaagttttacttacatcagtgagctaacaagaaactaactagttctgaacttgagcttcagtttccaagattcaaagaatgrgaaagaagagacaaatcctaaaggaatactcaagctaggagtctaatagaagaatcttttaatgaagcaggaaccccaaacaactacaacttcaaaataaatttgaactagacctaacccatccccagaaaataaatcaaattgtctgcctccagtcttggttttaagtggagaaacagaaaaatttctcctgaatattcacgaaaataagttattctttacatggatttgtaaactaaattcacatcacttgaataattaataaaacatataagcaataatttattttaaatggtactaggctattggtacctcaaggcatcaggcaaacagagatgaaaatccaaaaacaaataaaattcctacctgaaattatttaaattcaaaataaatcacaaaattttccaaagatatgcttaacaataatcctggtgttgcacattagatttccagacttactcatcctacataactgccactttgaac

SEQ ID NO: 302692 - DNA, 584 bp, Homo sapiens
agatttttatttttagaaagttttacttacatcagtgagctaacaagaaactaactagttctgaacttgagcttcagtttccaagattcaaagaatgagaaagaagagacaaatcctaaaggaatactcaagctaggagtctaatagaagaatcttttaatgaagcaggaaccccaaacaactacaacttcaaaataaatttgaactagacctaamccatccccagaaaataaatcaaattgtctgcctccagtcttggttttaagtggagaaacagaaaaatttctcctgaatattcacgaaaataagttattctttacatggatttgtaaactaaattcacatcacttgaataattaataaaacatataagcaataatttattttaaatggtactaggctattggtacctcaaggcatcaggcaaacagagatgaaaatccaaaaacaaataaaattcctacctgaaattatttaaattcaaaataaatcacaaaattttccaaagatatgcttaacaataatcctggtgttgcacattagatttccagacttactcatcctacataactgccactttgaac

SEQ ID NO: 302693 - DNA, 548 bp, Homo sapiens
tctcctactacataatgttgcttctacaacttgtgcaattaagaaaaagacttgaaagtggatttaaatttggtgaaactaaaattgaatatagatgctacttcacttgtgttggggttatgtcctgataaacccattgtaaattgaatatattgaaagtmaaaaatgcatttaatacactgaaccgaacctactgagtggtataacttatcctagcctcccttaaatgtgctcacattagacacttaaattaccctacaattaggcaaaataacctaagacaaagtttattttataataaagtattgaatatcttgtaatttattgagtgtctatactataaatgaaaaacataatggttgtataggtactcaaagtacactttctatgaatgcttgttgcttttgcccactgtaaagtcaaaaaatcccaagtcaatccatcatccttgtaaggcagaggctatctccatttttaaggcatttatttcagaggcacatcagatactgcatggcttatggaaatgctttgttctacctttagctttc

SEQ ID NO: 302694 - DNA, 548 bp, Homo sapiens
tctcctactacataatgttgcttctacaacttgtgcaattaagaaaaagacttgaaagtggatttaaatttggtgaaactaaaattgaatatagatgctacttcacttgtgttggggttatgtcctgataaacccattgtaaattgaatatattgaaagtcaaaaatgcatttaatacactgaaccgaacctactgagtggtataacttatcctagcctcccttaaatgtgctcacattagacacttaaattaccctacaattaggcaaaataacctaagacaaagtttattttataataaagtattgaatatcttgtaatttattgagtgtctatactataaatgaaaaacataatggttgtataggtactcaaagtacactttctatgaatgcttgttgcttttgcccactgtaaagtcaaaaaatcccaagtcaatccatcatccttgtaaggcagaggctatctccrtttttaaggcatttatttcagaggcacatcagatactgcatggcttatggaaatgctttgttctacctttagctttc

SEQ ID NO: 302695 - DNA, 615 bp, Homo sapiens
ttcactacaggtagacacactgaaaaagattaaaacagggtcacacatattggcagaatcctaagaaagcatttgatcaaacgatagtttcacaaaacaaattaaagtgtattgtatgactgctactctcttgtgtgtagtctctagcctacgaattcatgtgataaatatttcataaacatgaagaatcaattctttccttaaagtgtgatgtaaaagctctaaatatattcttattagctaarttggtatttcctaggccatttcaaataagtcttgggttattgaaataggcttattttttttttttttttcagacagtctcactctactgcccagactggagtaaagtgttgcaatcttgactcactgcaacctctgcctcccaggtttaagtgattctcctgcctcagcctcccaagcagctgggactacaggcaagagccaccatgcctggctaatttttgtatttttagtagaccaggggtttcaccatgatggccagtcatgaggttggttgccgtggtcttggacagctccacctctgtggctttgcagggtacagcctccctcccagctgctttcgtgggctaatgttgagtgtctgcagctttt

SEQ ID NO: 302696 - DNA, 615 bp, Homo sapiens
ttcactacaggtagacacactgaaaaagattaaaacagggtcacacatattggcagaatcctaagaaagcatttgatcaaacgatagtttcacaaaacaaattaaagtgtattgtatgactgctactctcttgtgtgtagtctctagcctacgaattcatgtgataaatatttcataaacatgaagaatcaattctttccttaaagtgtgatgtaaaagctctaaatatattcttattagctaagttrgtatttcctaggccatttcaaataagtcttgggttattgaaataggcttattttttttttttttttcagacagtctcactctactgcccagactggagtaaagtgttgcaatcttgactcactgcaacctctgcctcccaggtttaagtgattctcctgcctcagcctcccaagcagctgggactacaggcaagagccaccatgcctggctaatttttgtatttttagtagaccaggggtttcaccatgatggccagtcatgaggttggttgccgtggtcttggacagctccacctctgtggctttgcagggtacagcctccctcccagctgctttcgtgggctaatgttgagtgtctgcagctttt

SEQ ID NO: 302697 - DNA, 635 bp, Homo sapiens
ggagtataatgcatattcttcttttgcaatccatagttctaacatctctatttctcccttttatgttattagcaatcactcatatcacatgtggatgagagttaaataaattgaaaaggcattactactgctcttaaaaaaaaagagagagatactctcattttaaaaggttaatcagatcacacatttgcttgcttaaatttctcaaatatctttccattgggcttaaattcgaatccatggcctaacaatgggctacagtgctctataggacctgcctcygacctctcacctcacttcttttcctgctctccagctctaccctacagcaagcacaggagcttcatttttatttctcagaggtacttgactaattcctgcctcaggacctttgcacttgctcttgctgcttctgcctagaatgttgcttcttgcctcctcattcccaagtcctaaccaagtcagagattctggttagtgctttcctcatactatttcattgcatttattaaaaactgcatcaccacaaagagattacatacttctttagaaaagaaaagttggagaaatcctaagaattttgtggcaatgaaatcacaatcatgatcagaaaccttatgaaaacaaaggtacaa

SEQ ID NO: 302698 - DNA, 576 bp, Homo sapiens
gcactgtgttaagaagtgtcttgaggccaggtaagagctcaccagggagcaatgaagagatgtttccttgaggtccaccaagcccacagaatttggaaatggcagcacatttgctgtgcattggcaatgcctggacaagattacagttgccagtcattttctaaagtttcttcattgttgttctacaatttctcactgttcagtgaaagccatttgctaaaagtgaaaaatattccaaatttagtatttatttattcaaattttcttgtaatttaattttaataaatgcattatgagtgtatggccaccacttttctttcctaatgttcttataatttgagttctgcttaatgtcatgtttatgtttctgggtaagatttctggaagtaactggcatcatcagaatgaatttgtcatcccccgtcttaattcygatctctttgcaagtttctcaaaattggatcaactaattctgagtaatgcaaccctaatcccagcacctagtagacatctactaggttggatatctgcattcttcccaataatcaaatttattcttgtctaacccaacgttct

SEQ ID NO: 302699 - DNA, 486 bp, Homo sapiens
aaactcttcagcatttcataaagtattattcggctaggtgagccaggagtgtcaggctgagcagatgctcaggctgggtaaccaatgctggactggagtgtgtggtcatccctggttgctggctttctcttctcagtactaatttccaagcagacggacctccacttctagtcgatgttcgggtgatagatctttgttttaaatctggtcttttrtgatttgaatgggtaatcttctcataggttgattttgattctgaaggccgccttatcctatggaggttgtcagggacaataagcccttgccgagtcaataaattagcttcttcaacctggatgttgcgggaggctttcattccgcatttgcagcttcttcaagctcctctaccagcctcctgttggctgccccctttccctagctggaacctaggatccagcttcttaatccttcttaaaatggtcccctcctctccatccctgtaagtca

SEQ ID NO: 302700 - DNA, 486 bp, Homo sapiens
aaactcttcagcatttcataaagtattattcggctaggtgagccaggagtgtcaggctgagcagatgctcaggctgggtaaccaatgctggactggagtgtgtggtcatccctggttgctggctttctcttctcagtactaatttccaagcagacggacctccacttctagtcgatgttcgggtgatagatctttgttttaaatctggtcttttatgatttgaatgggtaatcttctcataggttgattttgattctgaaggcckccttatcctatggaggttgtcagggacaataagcccttgccgagtcaataaattagcttcttcaacctggatgttgcgggaggctttcattccgcatttgcagcttcttcaagctcctctaccagcctcctgttggctgccccctttccctagctggaacctaggatccagcttcttaatccttcttaaaatggtcccctcctctccatccctgtaagtca

SEQ ID NO: 302701 - DNA, 593 bp, Homo sapiens
ggaaaaaccatagcacatttaaccacaatgtcggcctggaagtgacacaaatcacttttgtttatatccactggccagaaaaagtcacaccacctcaactaaatgcaaagaaactaggaaatgtagccactgactggacttccttttcctaaatgaaactgtggaaggaaggatagcctgaatattttaataggcaactagtcatctctgaaagaaatagtcatagtcccttactcatcagatttaccacctaataaactctttatttccaaaccgtgcygtttctcaagttcttcatctccagcagcatgtgccctataaaatctgtggtcatctctatgtatatataacattcatattatatatatatatattatttatacatatattcatctattcacaccaacatatacatacacacacactgcctaaatttgaaactgtccatcattctcaaattaacacaaatttatgaacttctcttttctgttattggcattcttatttttttacagctttactaatatagagctatttttggcttcttcgcaagcttttaaccaggtctatccaatctttaaataaaaattaag

SEQ ID NO: 302702 - DNA, 474 bp, Homo sapiens
gacctgaaactgtaaaaccactagaagaaaatttagaggaaagctccataacattagtctaggcaaaaatttcttggatatgacaccaaaatcacaggcaagaaaagcaaatatagacaaatgggactacattaaacaaaagaaaacatttaacagagtaaaaaggaaacctacacaatggaggaaaatatatgtaaaccatacatctaaaaatcagttaatataaaaaatctacaaggaactcatacaactcaatagcaaaaaaaacaaataacccacttaaaaagtgtgtgaagggcttgaatagacatttttccaaagaagacttacaaatggctgtcagggacacgaaaaaatgctcaacatcagtaatcatcagggaaatgcaaaccaaaaytaaaacaaaaaatattatctcacacctgttcagatggctgttatcaaaaatcccaaaaacataacaagtatttaaaa

SEQ ID NO: 302703 - DNA, 598 bp, Homo sapiens
caatagtcaaaatatggaaacaatctaaatgtccactgacagatgaatagatacagaaactatgatgtgtacatacaatgaattattattcaaccttaaaaaagaagcaaatcctgccatatctgacaacatggatcaaccttgaggacattatgttaagggaaataagccagatamagaaggacaaatactccatgattccacttatatgaggttatatcaaagtcataaaaacagagagtagaataatgatttccagggtctgaatgggaggagaaatggggagttgctattcaacaggtataaagtttcagttaggcaagattaacttttagagatctattgttcaacattgtgtctatagttaacaatatgcaccatacacttaaaaatttgttgagggtatgtctcatattatgtactcttatcacaattttaaaacaaggaaaagcctcccagggagggaaaattattcaatactttcattgtctaatatgataaatgtgagccacatgcattggagtaaacaagatacattattaaaattaattttatgtctttttcaatgtacctgctacaaaactcaaagttacatgat

SEQ ID NO: 302704 - DNA, 522 bp, Homo sapiens
agacaaaaacatatctgaactcttcttcttgtacatactcactcttcttcccatttcctrtaacaaaggagattctgtttcaagaatctataaaattccttaaaatttgtagcacctctaattttattgggtcacattaaatacactcaaggctttttatttgcatgcaaatccaatctgcatttttgctttagagagttttccttgagaactttactcttttaaactcatttctactctccatttttggataaacactgtttaatgtaactgcgtctcattgttcatagagaatgtctcaaattccaagttcaattcagccaatgccagtgattttctaggaacctataggtctctgttaaagatttagagaaacaacaactgaaaacaacaactccctcccccaccacacacacgcgcacacgcgcacaatcccatagaaatcattacgttcctaaaagaacttaaaatctagtaagggtgataagtctccaaatgataaagcagaatgacatatgagaa

SEQ ID NO: 302705 - DNA, 653 bp, Homo sapiens
tctacagtttgttcagaatggttctagttctcaatgtttgcttttagaattttactagaaaggagaatgatcctggagaaactatatctatatctaactagagctatacctgtatctgtatctatatatatatatctatatcttccatttcaaatggcctgggaatcatatagaatgagctgccatgactatagtcatattcagccaaggaagttaattgtgagggaaatattggagactcatatgtaactcagcaccttaagatgctcatttgggccaggcacagtggctcacatctgtaatcccagtgctttggaaggccaaggtgggaggatcacttgaggtcaggagtttgaaccagcctggccaacattgtgaaacttcatctctactaaaaatacaaaaattagccaggmatggtggtttgcacctggaatcccagctacttgggaggctgaggcacgagaattgcttgaacccaagaggcagaggttgcagtgagctaagattgcgccactgcactccaggctgagcaaaattccatctcaaaaaacaaacaaacaaaaaaagatatccagttgattccatcaatcattgaatttatgtctgattttgggctatttagttaatctctctgtgtatccattttcaca

SEQ ID NO: 302706 - DNA, 653 bp, Homo sapiens
tctacagtttgttcagaatggttctagttctcaatgtttgcttttagaattttactagaaaggagaatgatcctggagaaactatatctatatctaactagagctatacctgtatctgtatctatatatatatatctatatcttccatttcaaatggcctgggaatcatatagaatgagctgccatgactatagtcatattcagccaaggaagttaattgtgagggaaatattggagactcatatgtaactcagcaccttaagatgctcatttgggccaggcacagtggctcacatctgtaatcccagtgctttggaaggccaaggtgggaggatcacttgaggtcaggagtttgaaccagcctggccaacattgtgaaacttcatctctactaaaaatacaaaaattagccaggcatggtggtttgcacctggaatcccagctacytgggaggctgaggcacgagaattgcttgaacccaagaggcagaggttgcagtgagctaagattgcgccactgcactccaggctgagcaaaattccatctcaaaaaacaaacaaacaaaaaaagatatccagttgattccatcaatcattgaatttatgtctgattttgggctatttagttaatctctctgtgtatccattttcaca

SEQ ID NO: 302707 - DNA, 653 bp, Homo sapiens
tctacagtttgttcagaatggttctagttctcaatgtttgcttttagaattttactagaaaggagaatgatcctggagaaactatatctatatctaactagagctatacctgtatctgtatctatatatatatatctatatcttccatttcaaatggcctgggaatcatatagaatgagctgccatgactatagtcatattcagccaaggaagttaattgtgagggaaatattggagactcatatgtaactcagcaccttaagatgctcatttgggccaggcacagtggctcacatctgtaatcccagtgctttggaaggccaaggtgggaggatcacttgaggtcaggagtttgaaccagcctggccaacattgtgaaacttcatctctactaaaaatacaaaaattagccaggcatggtggtttgcacctggaatcccagctacttgggaggctgaggcacgagaattgcttgaacccaagaggcagaggttgcagtgagctaagattgcgccactgcactccaggctgagcaarattccatctcaaaaaacaaacaaacaaaaaaagatatccagttgattccatcaatcattgaatttatgtctgattttgggctatttagttaatctctctgtgtatccattttcaca

SEQ ID NO: 302708 - DNA, 564 bp, Homo sapiens
actgaatagctttcacaatgtgtgaagtggatatattttccctaagggtaaaataaatgctccaaaatatttcatgtagatctttgtaccaaatttatacatagtaaaaaataggacacaaaaaagaagttggagacacagttcctgccttcagtgagcttctaataccagtgattaaattcctgacagtgttagcatattaccaacagatgaagtaaccagagacttgtatttcaaaaggtcaaggaaaagatggaaggagggttgacttgataaaattctcatgatgattcattagaatctctgraagcagaaatctcatgtcttctgttttcatccttctgggtgctaccctgtttatacaggccaaattcactttccatgactcttaaaatggtgctgtcattagtaaatgtcacatcagagaaaacttctggtttagtgcatattttactttcttagaagctcagaatctatgatcatatactcaatatgaatgcctacaatcacagggattacacgtatagcatcttcttttggtatcattaaaagacacctgaagga

SEQ ID NO: 302709 - DNA, 536 bp, Homo sapiens
ttttagtgtataatcacctcttaataaaatgtgttgtgtgacagttagcaacaattctgctgttcgtggcgttaatgccgaagatctgataagaggagttgcaggagtgtgaaaaatgagtcaacttttctagatattttctataaattggatccaataaagtacaataaatatgtcttcaactggtcttacaaagcttttatctgagttgggtacaggtaaaaagaacagtatctcgtgaaatctctgattgttccttttgtttcagggtcttagtcagcagtcagtatttaactatgatacatgaaatgttatttcttttaggttagaggtaatgagaaaaatcaagaaatattaggaaacatgttatatacagtagtaatttatcattaataatttgtaaatattatcagagtgaaaattcagagactgacaagggcatttacccagcacactttcaagtcaatcattcactgtgtaggattargatcatgtgttttgaaactcatgtattttgagttgaatctcaggcaact

SEQ ID NO: 302710 - DNA, 611 bp, Homo sapiens
caatggtgaaatggtagactgtttagcagaaggtattgggagaaaactaccaattaaagaaaaatcaacaaccttgaatccttacctcrtaccatacagaggggaaacttaaatgtgaagggtggaactacaaggttaatagaagaatatatagaaaacattgagactgctaaatacacaaaccatacatctaaatgtgggatctttagcacttgaatctcctaagttgccagcttggctctcttccaagtgtactttacttcctttcttaaaaaaaaatggggctttttgttcaacagagaataccttagacaaagttgacagacagatcacagactgggaaagatttacaatcaacaaggagtaatatcttaaaaatctaaggaaatacccccaaatcaagaagacaggaaacacaatagaaaaataagcaagtaatttaaatatataatttatagtgaaatccaaatgattaacaagtatatgaacaaatattcagcctcactagcaatcaaataaatgcaagttaaaacaagggttttcttccatcagactggcaaaaattagagagcccaaataataccaagtgtcagaaagatgttgggaaacag

SEQ ID NO: 302711 - DNA, 601 bp, Homo sapiens
ccaagattaccaaatcatcatatattccaaaatcaacccaacttttaaggccctcttaaaatgtcacttccttcatgaggttttctttcatccacccagtcctaaggaattactcctcacttctcatctctcagccatccataccattatctgtcaatccttttggtcacttaaaatatacatatttatgcacatgtcctatgtcccttggtaattttttcaaaagcaagatccacatgctaattattattatttccctgcacctaatagaatgctttgcctataataggtgctttgccataaacggtcttcatggagtgagtgacttaatgaaatgtctaaaaagtctcaatataaatgaggctagtaatagagaactatggataatataatatttaggagagttacgataagaaagaaaattcctagtagaagaaccgaagtcagaggaaagagttaatagcaatttcagatatagctttatggcaaatggcacattcctggaattgtgggcccgtgtctcatggcaatttagtgatcacaatatacacttggcacttggatgctcatggtggttagakataagaatgaaaccactgcc

SEQ ID NO: 302712 - DNA, 518 bp, Homo sapiens
ccattcaggaaagatctacccccatgatccaatcacctcccaccaggccccacctccaacattggggattacactgtcacatgagatttgggcagggacacagatccaaaccgtatcaaattggttcttttaaaatatgaaatatggcagtgcatggtgctcatgcctgtaatccctgcactttgggaggccaaggtgggtggattgcttgatgccaggagttcaagrccagcctggccaatatggcgaaaccctgtttctactgaaaatacagaaatgttagctgggagtaatgatttgtgcctgtagtcccagctgctcaggaggctgctgtgggacaatcacctgagcccgaggtggtcaaggccgcagtgagctgtgatcatgccatcgctctccagcctggatgacagcagagcaagaccctgtctcaaaaaaaaaaaaaaaaggaaaagaaaaaagaaagaaatatgtatttcttagcacgaaagacagtttcttactaaatgaagcactaa

SEQ ID NO: 302713 - DNA, 518 bp, Homo sapiens
ccattcaggaaagatctacccccatgatccaatcacctcccaccaggccccacctccaacattggggattacactgtcacatgagatttgggcagggacacagatccaaaccgtatcaaattggttcttttaaaatatgaaatatggcagtgcatggtgctcatgcctgtaatccctgcactttgggaggccaaggtgggtggattgcttgatgccaggagttcaagaccagcctggccaatatggcgaaaccctgtttctactgaaaatacagaaatgttagctgggagtaatgatttgtgcctgtagtcccagctgctcaggaggctgctgtgggacaatcacctgagcccgaggtggtcaaggccgcagtgagctgtgatcatgccatcgctctccagcctggatgacagcagagcaagaccctgtctcaaaaaaaaaaaaaaaaggaaaagaaaaaagaaagaaatatgtatttcttagcacraaagacagtttcttactaaatgaagcactaa

SEQ ID NO: 302714 - DNA, 593 bp, Homo sapiens
ccggtgtctcgttacttggtttaatcgtcgccagccctaagtcacggcctcggctccctctcctcaactgtgtgggatcccgccgcctggtttcggccgggcggaggggtgacgtcagccgctcacacagtgccccctggcmgctggagctcgggaaatctgtgcgctcgaacttggctccgccaagaagctgggcaaggatccgggctcctgatggaactggcaagttggaaaagtggcaaaggaaaagccaacatgagcgctttcggcttgcgcgggcagaaagggtgggaaatcaggccacggcgaaatcttctgactcacagatgaccgcttagaatgaaaactacggaagggaagtcctctgactctgcagtttcacagagagtcactgagttaccaaagcagttgggaaacagaggcagaggactgcccccactctgtccgcagcaggggtatgggaggcagctcgggacactccagggaccaagcgggcagtgggcgccgtccccgaggaacacccagcccagcgcccctggttctgggctggttggcttatcgaggccggttggccaaagcatcaggaaagggaa

SEQ ID NO: 302715 - DNA, 574 bp, Homo sapiens
gagattccataccagtttgaccagataagtttattccagcaatgtgatttatgatgaacacctggttttactgcaatagggatgaagtgcagcatccagtcagaggagctgccagtcacattccctgtgttactgacccctagtaaaactctcgacacagagactcaagtgagcttcccttgttgaaaaccctcacacatgttgtcacacatcattactggaagaattaagcatgtccccaagtgactctactgggaagggacacttggaagcttgcrtctggttgttcttggacttcattccatatgccttttccctttgctggttttagtctttatccctttactataaaaaatataatcatgaatatcatagttttttcaaatccttctagtaaattactgagcctgaggatgatattagagattgctaatgtagtgacataatactacacaccaacttgaatggataaaatgaaagagattgacacaccaagattggccagaatttgaagcacctggaactttcatatatcattggttggaatgcaaaattgtacatacatctcttttac

SEQ ID NO: 302716 - DNA, 585 bp, Homo sapiens
gtcacaactcctgaaatttctacatgaaaaaataaatccctgaccattagaatgatgagccttttgagtaactaaacatctttcacaatatggctatttcagcttgtcttatttatttaagccacaataagaaattctcttaaaaaataaaaataaaaatctgaactcttaagagttagtgcatctttgcctgaatattgaacagctatagactcacagaaagctttaagaaactattttagggaacatattgacacagcaatccttaattgaatgttaccaactgcttcatatcatatatttagaaagaacctgtttatgttgttttgctactccaatgaataaagtcagaatggtttaatcatcttttaaacatcaaatagtctttattttaacaaatgtctttattggcccaggatttgaaaccctagtcactagagcaagacaacacagccatttttatgccagcmaaagaagcagctatgaggcctcacggataacagaaagaattatcacacacccaacttactgcctggcacaatctatgtgatactgaaacagatcattgaaaatcaaaacatgtaa

SEQ ID NO: 302717 - DNA, 564 bp, Homo sapiens
ctaggaataattcttaataaattgcttttgttcaaattcttatctcagggtcttcttctaggaaaaccaatctcaaacataaatcaaaactaaaacattaaaagcacaaaggaaagaaaaatgagctaaggacatagactaggaattcattgaagaagaaaatacatcttttccataggttacttttattattgagtgtatttgaaggaaaaggagatttcttcttaatctgctccctgttcctttcacgttcggtaatttctccataatgcttccaactccccatttctcccaactctattttgagtgtcctccagctttgtcactacctcctgaaactctagacatactttcctccttcaattcggtgctttcgctacagtactggccttggtaggtggctaacmctggaaagaccacttttccatttctttccctttgtatgcatgtaacatggtatgctgaatgttcagggattgaaaaaacttaaaagactaaatatgactttctcaaaaatcgaagggaatcaccattgttatatgcttattagtcttgaggtgcacc

SEQ ID NO: 302718 - DNA, 560 bp, Homo sapiens
gcatagtatttgagctggattttgaaggaaaaataagaactcaccaggtgggtaagtgggtgaagtcttaacagatgcaaaaacataaaggtattggaatgttctcagcctgtatcaagatgagctgtgaggcatatgtgcatttttatatgagatcatactctgccagttttgtgtatttttttcttaaatattatatcagacttcaaaattcttgaaaatgtcatgtttgaaaatggtattttattatacacctggccctaatttattaaccattcattaatygttaggcatttttaggattttccccaatctctctgtgttataagcatggctgcaaagaatatcattgcgtatacatttccatctgattttctgattatttacttagcatatattcccagaggtggaactgctgagtaaaaggaaatggaattatatgaacttctatattgataaagtgctctccagaattttttcccaggggtttgagtttcgattgaccctacatctggttctgtgagacagtgtttgtttcaccaaagcattttcatctttgg

SEQ ID NO: 302719 - DNA, 465 bp, Homo sapiens
aatgtaaatatctatgtagagaaataacactgaataataagcaaaagcacaatcwtagaaggagaaatctcccttcttggctaatggcagcagaagtaagagacaaggtgtgtgggtatcccctgtccagtatattcatggtattcttttatatgaggttgatgctgatcattcggtagaagtggaaggcacatccaagtgacccaaggccctcctcagtggtggagctgacacctatcaacgtgaccaaaagtggaggtcttggggacaggtagttctgggtcctcatcctggccctgctgctgatcaatgctgtgaccttggacaagtgacttctctaagctctaagtttctcaactataaaaagaggcaatgatataaccaagatcctaaagtgaatctcaggcttaaatacaatgaaatatcaaaagagcttagccaaatgcatgacccttgtgtgggctc

SEQ ID NO: 302720 - DNA, 626 bp, Homo sapiens
cattatagctgatacttcagaaattcaaggtatctttagtggctacgctaagcaactatttgccaatacattagaaaatctaaattcctagacacatacaacttatcaacattgaactatgaagaaatccaaaacctggacagaccaataacaagtaacaagattgaagccataataaaaaawgtcttccagtacagaaaagcctgggaccctatggcctcactgctgaattctaccaaacattataataactaataccaatcctactcaaactgttccaaaaaatagaggaggagggaatacttccaaaatcattatatgaggccagtattaacttgataccaaaaccatacgaagatatatcaaaaaaagaaaactacaggctgatattgctgatgaatatagatgaaaaatctgtaacaaaataccagcaaactgaattcaacaatacattaaaaagatcactcatcatgaccaagtgggatttatcccagggatgaaaagatggtttaacatacacaactcgatcaatgtgatacttcatattaacagaatgaaggattgaagaaaatgatatgatcattttaattgatgctgtaaaagcatttgaaaaagttcaacattca

SEQ ID NO: 302721 - DNA, 581 bp, Homo sapiens
ggtgctcttcggatgcggatcccgaatccctccggatgcggatcccgaatcccttcgggagcactgcgcaagcaaaaacagcgcggtgggcgcgagtgctgcgtggacgtcatttggtgtgtttgcaacctagggatgctggacctgctggaaggcggctcctttcctcctccagtcctgccaggtcccagcacaaacactctcctcgttatcctacccagccctgtttactggaaccttggttctaaacaccagtcgatcrgaagagccagagatttgccgggcaaaaaagactctcaccgtaagagttgtttctactgttaaactgaagttactgactccttgtttttccttctctttccctccttccacctactgtgtctaaagtttgatttaaaaggccgaatttaaataaacctgcagctcattggcttggcaaatccagagactttcaagttgtatatgccaatacagagagcacaggagccgggctcatttactttgcccacacaacaaaaaaatgttaattgatgtaaagttgcttggcacgtggataatttagtcttacctgcattttaatt

SEQ ID NO: 302722 - DNA, 581 bp, Homo sapiens
ggtgctcttcggatgcggatcccgaatccctccggatgcggatcccgaatcccttcgggagcactgcgcaagcaaaaacagcgcggtgggcgcgagtgctgcgtggacgtcatttggtgtgtttgcaacctagggatgctggacctgctggaaggcggctcctttcctcctccagtcctgccaggtcccagcacaaacactctcctcgttatcctacccagccctgtttactggaaccttggttctaaacaccagtcgatcagaagagccagagatttgccgggcaaaaaagactctcaccgtaagagttgtttctactgttaaactgaagttactgactccttgtttttccttctctttccctccttccayctactgtgtctaaagtttgatttaaaaggccgaatttaaataaacctgcagctcattggcttggcaaatccagagactttcaagttgtatatgccaatacagagagcacaggagccgggctcatttactttgcccacacaacaaaaaaatgttaattgatgtaaagttgcttggcacgtggataatttagtcttacctgcattttaatt

SEQ ID NO: 302723 - DNA, 574 bp, Homo sapiens
tcaaacacattagaatatttgcctatgatattaggaaggggtatgaaagtgggtattagggacaaaacagaataagtaaataaagccagagggaccttattagaaccaattataattgtgtatcatgaactaaagagtgtaaggagagtgatcactcaactcgatgaacctagagttaaaacaaaaagaaggaaaaaacaaactcagtggatgagttggagagattagatatactgttcaaagaagaaactggaagagacatctaaagaaattacrtggagtgtaagttagagatacaaagtgtggtgagaaaagatcaaaggatgtatgtagagtgagaggatctaatgtagagtgtgagaacagtaatattcacagagagaatggctgagaagattccatacttgatgggagacacctgtgctcagattcaagaagcagcaggacatgcaagcatgagaaacagaaagaaactaagaacatcaaagacaaagaggacacgttaaagtagtcagagagaagagacagactacctattgagtaattaaactcactaacggctatccgcccaata

SEQ ID NO: 302724 - DNA, 572 bp, Homo sapiens
acaggcatactcactatcagccgttctctctagtgggggtcgtgctcactcaacactatacatttctgcaggtttaaccttttgtatctttattacttttgcatcagaaagaaactggcttcatgggctgccttcccctgggtagttacatttttaatcacttgcccagaaatatgaataaagagccttaaacatgatctcacctttgatcaagaattctacctctggaaatgtattcaaagaatgtggtcagagacatatctrtgggaaaacatgcacactaatacagtgtgaagattgcaaaacaatatgtgtgctatgatcccatgagtccagaaggtattcataaacataaacagaaaaaggcccagaaggaactcaccaagatgctagggcattacccacagagaacaccaacgtgggcctggagtccagaatgccttcttttcctcttttcaagaattttctcataattattttataaaggatctgcttttatttaaaagagaaagttatgcacactaataatctcagagtatttatatataagcgtgtttggagaataattactt

SEQ ID NO: 302725 - DNA, 419 bp, Homo sapiens
ctgtttcgcttttcctttttaagagagagagattatcattattttttccagctacccaccagcaattctataacttaccctgtcgtcccttcgtttacaatctctataaggccccatcttggtcttagcacacacaggtcccataggatcctagccctccctcccactcacctctcctgcctctgccctcccacttcaagctccaggyccactatttgggtcatttgtgctcccacctcagaggcttcacacctccgttctccctgccaggatcctctgctctgccctccacctttccccctcccagcatcagccgagatgtctgccactcacccctggaagcctcaccttctaagtgctcccattgtcttcccctccactttccagaattacccatcctttcaaaaaatatataaact

SEQ ID NO: 302726 - DNA, 419 bp, Homo sapiens
ctgtttcgcttttcctttttaagagagagagattatcattattttttccagctacccaccagcaattctataacttaccctgtcgtcccttcgtttacaatctctataaggccccatcttggtcttagcacacacaggtcccataggatcctagccctccctcccactcacctctcctgcctctgccctcccacttcaagctccaggtccactatttgggtcatttgtgctcccacctcagaggcttcacacctccgttctccctgccaggatcctctgctctgccctccacctttccccctcccagcatcagccgagatgtctgccactcacccctggaagcctcaccttctaagtgctcccattgtcttcccctccactttccagaattacscatcctttcaaaaaatatataaact

SEQ ID NO: 302727 - DNA, 584 bp, Homo sapiens
gcacttcttattttctccaataacgtttcctttgcattcacaacttggctaactgttcagcaagagtcctagttttcggcctgtctcagcttttgtcatgcctccctcactaagcttaatcatgtctaccttttgatttaaagtgaaagacatgggactctacctttcacttgaacgcttgaaggccactgtagggttattaattggcctgatttcaatattgttgtgtctcagraaatagggagcccctagcagagggaaagaggtggggaaatggccagttggtggagtagtcagaacacacacagtgttatatggtcagggttcttagtccctctaaacatttatgatagtaccatcaaagatcacttatatgggcagggttcttagtgcctctaaacaatcatgatagtagcatcaaagatcactgatcacagatcatcataactgatataataataatggaaaggtttgaaattttgcaagaatattgcaaaatgaacaaatgctgttggaaaagtagcactgatagacttgctggatgcagggttgccacaaaccttaaatttgtaaaaaatgcaata

SEQ ID NO: 302728 - DNA, 524 bp, Homo sapiens
ctttggggggccaagatgagtggatcacctgaagtcaggagtttgagaccagcctggccaacatggtgaaaccccatttctactacaaatacaaaaaactagccaggtatggtggcaggtacctataatcccagccacttgggaggctgaggcaggagaatcacttgaaccagggaggcagaggttgcagtgagccaagattgtgccacagcactccagcctgagcaagaagagtgaagccccatmtcaaaaaaaaaaagaaaaagaaaaaaaaaaaagaaagaaaaaacaaggattttaaaagcagcaagagaaaagaagcaaataacataccaaaaaactccaatagttgtggcagcacacttctcagtgaaaaccttacaggccaggagagagtggcatgacatattaaaagtgctgaaggaaaaaaaaacttttattctaggttattatatccagcaaaaatatgcttcaaacataaaggagaaataaagactttctcagacaaacaaaagctgagggat

SEQ ID NO: 302729 - DNA, 658 bp, Homo sapiens
ccaggacattggtctgggcaaagattttttgagtaatactccccaaatacaggcaactaaagcacaattgggcaagtgggatcacatcaagttgaaaagcttctgcacggcaaaggaaagaataaagtgaagagaaaccacacagaataggaaaaaaaatttgcaagctactcatcgttccaggaattaataacgagaatatatagggagattaaacaactctatagggaaaaaaatctattaattctgttaaaagatagacacaaacatcataaatagacatttctcaaaagaagacatacaaatggcaaacaggtatataaaaaggtgctcaatatctttaatcatcagagaaatgaaaaacaaaactacaatgagatatcatttcaccccagttaaartggtttttatccaaaagacaggtaacaacgaatgctgatgaggtcgtggagaaaaaggaaccctcgtacactgttggtaggggtgaaaattaacatagccactacggagaacagtttggaggttcctcagaaaattaaaaataaaataccatatgatccagcaatttcactactacctatatacacagaagaaagcaaatatattaaagagatatctgcactcccacgtttattgaagcactattcacaatagccaa

SEQ ID NO: 302730 - DNA, 569 bp, Homo sapiens
tggagataatatgtaagtaagtataagattctcagacatgtttataaaatctttttaactcatattgtttacagtgataatataatagaaagataaatgcctttcaagagacctgtatactaatcccagtaacaccttttattgattttatgacaatggccaagtcctctctgaggcatctttttctcataacaatatatacttacatagcatatatagttatatgaaaaagagaaaattttatttcaaactctggagccagaatcctttttagaataagaacattttaaacttaagtttttcattcaaaattttgagtcttgcaatgtaagttccaaacatggtctgaaaaaaaaaggccaaaacaaagagaagtcttagttgctcagtatgaaatctgagaaagatgtagacatgacattggcccagaaggaagacacaggggcctaggaatgaggacawcaaagaaaagaaggtctggtggcaaggagtgcacacaacacaatgacaggccaggaggctgagaaggagatacagtcaacgcaatgttcccatggtaggaatggctg

SEQ ID NO: 302731 - DNA, 652 bp, Homo sapiens
gaaacaataagttttaatatatatttatgacatatatatgtatatgtatacatatatgtatacagagatagcaagagagagacagagtattgctctattgcctaggctggagtgcagtgatgtgatcacagttcactgtaacctcaagcttctgggctcaagtgatcctcctgcctcagcctcccaagtttgtagaaatggggtctcgttatgttgccctggctggtctcaaacatttggcctcatgccatcctcttgtcatggcttcctagagtgttgtgattacatgcatgatcttccttgcttggccaatgtatgttttcttaatctactcattaactttctcttcacacttgaatttatatagtgatgtcaytgagctcttgctatgctgcccaggctggtctcaatctcctgggctcaggtgatccccccacttcaaccttgcaaagaactggaaatatgttagttattattaagtctctggacaatggaattaatttctaaggtcctgtaagctccgagaatacaaagacagtaaggtatggttcccaatgagtcttcctaggagacatgggtttttgctatgctgcccaggctggtcccagtctcctgggctcaggtgattctcccacttcagccttgcaaaaca

SEQ ID NO: 302732 - DNA, 600 bp, Homo sapiens
acaaatatcaatgggtcccattcatcattcaagtaccttttcaaacaggatctaagtttgtaatgttaggtaataggcatataggctgaagccggactgccaagattacaattgctggctctgtccttaatataactttgggcatctttcttcctttctctgcttcatctataaaacgaaaacagtaacaactcccacctaagtgtcgttgtgataactaaatgaaatrgtgtgtgtaatgtgccaaggaatttctggagctaccaagcacttaaactaagttctaactaagtttggttactttcacgttataaaggaatttttaggaatcacctaggcactctcctaaagtctcaaaataacttaatacagtacttctaaggagttcaagtgcctccttatctgggacgccatctcagatgctcttcaaatgaaagggaccctgcaaatgaaagttaactttttccattttttaaataatccttcgcaggaatctgaagcacgcgacactcacgggccattcagctccgcctctccagggaacaagaaggttaactgagtaacgtggtcacggagcaaccccgagtcgctgcggctgct

SEQ ID NO: 302733 - DNA, 604 bp, Homo sapiens
gtattttgttttaatcaagaatggattttggattttgtcaaatctttttctcaatctactgagatgatcaaatggcttttttaaaaacttattaatatggtgaaaacagcctgaattcctaggataaaccccacttgatcctgatacattttctttttatatattgttggatttgatttgataaaacttagcgtacttgtttctatgttcataattgatgaattaatctgtagtttttgtatcaggataatgctgttgaaaccagctcaatagtcccatagacagttatttttgattaaacatagaaattgacccttctgctgttaaagcttgaaatttatataggttggtgcaaaagtaattgtcaactttygatcaacccaaagaaccagcttatggtttcactgatttttctctataaatttgctgtttcactgatttcccctctgatctttatttcttttcttctgcttacatggggtttaatttgcttttgttccttaacctagcagttgaggttattgattggatcctttttctaaaataggcattgagtactacagaacccccagctaattcctcacagctagatcctcatgtttac

SEQ ID NO: 302734 - DNA, 527 bp, Homo sapiens
cataatacagtgaataatcatagtttcttagacatacactatttcaaaattctttgcccactgaaaagtaagttcagggagacccttaaacctccccttaccctagatactaaatttcactgcttctggcaagaacagatgagttaatgcattctatttatagttgattcatatacttctccatcatagaatggattccaggaaagaggtgggatattgtaactgtgtgcagtaacatttcatagttctttaatacattctaagtgctgatgaaaaatttcttcccttcctcatatttttatgaaagcctaagttgcaagattttaagctggatggtaagaacacagctacatattatcacccttgacatttgcagactgaaaagaactcttttttcgtcttggtttctttcactcactgactcaataaacaatacttatttattgtaggaaratttaaagaccaaacccaggatggtaaaatggcaagaggatgggttttggagtaacacaaccctagtcacaaat

SEQ ID NO: 302735 - DNA, 579 bp, Homo sapiens
aaccactaaaggactttagttatttccttactatataaaaacctcttatcgtacattcatctcttcaatttattcagcactaacttgtgctgggcaccagacaatgtttaggccstggagtctcagcaatgaacaaagataaaaaacggtcctcatggaacttacattctaattgagggaaagagacattcactaaaaacaaataaataacatgtaacaatgtaagtattactgggaaaaatagagaagaggatggaagtacaaggtgagaagagggagttggaattttaaatgagatggtcatcactgagaagataatatctgagcaattctcaaaatgatggtgaagcagatactcagtggatatttagggaaagaatgttccaggcaggaaacacagcccaggcaagggtgaagtgggaatgtgcctactgtttatgaggcacagcacagagaatcaaagggaggaagcagagtgagctcattgttttaatcccctggtcattttgggctggctcctgccctctgaaaaaagccacagctcctgtcacgtggctctctacacctagtattctgtct

SEQ ID NO: 302736 - DNA, 579 bp, Homo sapiens
aaccactaaaggactttagttatttccttactatataaaaacctcttatcgtacattcatctcttcaatttattcagcactaacttgtgctgggcaccagacaatgtttaggccctggagtctcagcaatgaacaaagataaaaaacrgtcctcatggaacttacattctaattgagggaaagagacattcactaaaaacaaataaataacatgtaacaatgtaagtattactgggaaaaatagagaagaggatggaagtacaaggtgagaagagggagttggaattttaaatgagatggtcatcactgagaagataatatctgagcaattctcaaaatgatggtgaagcagatactcagtggatatttagggaaagaatgttccaggcaggaaacacagcccaggcaagggtgaagtgggaatgtgcctactgtttatgaggcacagcacagagaatcaaagggaggaagcagagtgagctcattgttttaatcccctggtcattttgggctggctcctgccctctgaaaaaagccacagctcctgtcacgtggctctctacacctagtattctgtct

SEQ ID NO: 302737 - DNA, 598 bp, Homo sapiens
actcaaatcaggctgagaccatgtcttaaactgtcatatagttcatgcaatctatagtgcccaatacaagtgctgtacatgtggcaaagcacacaatattaatgaaattaatgaaaacgaatctccttttctttcgacattaacaaagagtaacaatcaaaaaatacaacattaaaaggagaaaatgtgaaaatacattttgtactattatttcatttgggtttgtttctaaagtactataaaattttgcagatgttgtcagattctagttagagttcagcttctmgtaatttctactaattgaaaagtaaagtgttatctttattctcagagaacacctatcatcagtaagatatatgcttaaaaatagagacaaaaacccaaaacacaagattttgggagtttatcctctcatctggtatgccttgaaacgaatttattacaacatatacctgagttcatatgatatgaatggtgtgctaagtacctagaagcattaacataatattgtatgtggatatatatatgtatcagcatcacagtcttatacttaggtagaaatctcttctgtgattctgaaagttctttatacaaagtt

SEQ ID NO: 302738 - DNA, 604 bp, Homo sapiens
atttacaggaaagggcggatggggygccagggattctcaatgccaatgccaagctcgctgggtccttcttcaactcccacagtcctccctgcctttctgcctccccgcatttccacctccccaccacctcagccccactaactccaggcttaagagcctagctgtagagcggccttcccgcctctgcaatgttttgctttcaaattcccaaacactggtttcagtaacttatacacaagacaacgtaaaaccttgcgagtctgaaatgcacaaataaatcaaagctcattagtaagaaaacatccatttgtgatgggtatttttatgttatttatctaataaaacataaaaacataaatcacctggctttcataatgttagatttgaatcagattagatcgcaagaagaaatagcccctatttttaagagttgagttgttttcatctgcatgatataattcaaaataagtggttatatggcattcaaacacaatctaggaatatttattataaatatagtacctacaattggttgaaaaacaagcatcacgctatcataggaaattccatttcacataatgaaagaaactcatttttttccata

SEQ ID NO: 302739 - DNA, 600 bp, Homo sapiens
ggggtcagagcctgtgaaggacagttcaagggcagtttccaggcgttcctttagtttccagaagaaagcaaacatctctggagcaytagcttccttggctattgttttaggtgattaccttcttaacaagctacttaagcactcctggggccagccagatacctggcatttttctgaaaagaactttggaattttcctttacttccatgcctgggggtttgcaggctcctgaaagtggggggtttccagttcatttcaacctctctgcagaagattatgattagaaaatcatcaaaaataaattcatctttctgtaaaaccaggaagttatcataaaattatattgatcattaataggagtcatgagaaatatatatgaataaaaatatatattttttgcttttagaagggacttagaatgataagtaatagatatgtcttctggaaaacaattaagtccaactttatcagaaatagatttctgaaactgtgactattttgaccaaattataaagctggtttggagttaagaagggcctggacacaaacactttgctcaccaagtcaaaataaatattattcagattttattacagcata

SEQ ID NO: 302740 - DNA, 600 bp, Homo sapiens
ggggtcagagcctgtgaaggacagttcaagggcagtttccaggcgttcctttagtttccagaagaaagcaaacatctctggagcattagcttccttggctattgttttaggtgattaccttcttaacaagctacttaagcactcctggggccagccagatacctggcatttttctgaaaagaactttggaattttcctttacttccatgcctgggggtttgcaggctcctgaaagtggggggtttccagttcatttcaacctctctgcagaagattatgattagaaaatcatcaaaaataaattcatctttctktaaaaccaggaagttatcataaaattatattgatcattaataggagtcatgagaaatatatatgaataaaaatatatattttttgcttttagaagggacttagaatgataagtaatagatatgtcttctggaaaacaattaagtccaactttatcagaaatagatttctgaaactgtgactattttgaccaaattataaagctggtttggagttaagaagggcctggacacaaacactttgctcaccaagtcaaaataaatattattcagattttattacagcata

SEQ ID NO: 302741 - DNA, 566 bp, Homo sapiens
ccctgccgtccactcagggttcccagtcggtccatccttgagttccttgtcttcaccgtgcttaattctccactgttacagctcctcccccgagtcccctccaagtttcaggcaggccagggccccaggctctcagtggtaccttcagwggaagcctctgagggactcggtggtgtcagttaattacagaagttttgacagactttggtttatcctttggtctttcctgggcttgtggatttactggtgaccgcggggaaaagttctctctctttagctgtgatcagcctgtgggttccgtaccccgtgtgtgaagcagttcccgggagcattcacgcgattccccagacacgctggaggatgtcctctcgtggcacagatgcgggctgtgatgttcagagatggcctgctcagccatttcaccgatggatgcacttccagcgacgacggccctcagggagttcgagtcctcttgagaacttgttgtttttaagagtacatgctaggaatggtagaatcataattagaaaccaaattttgcaatgtttttcattccctttcagtct

SEQ ID NO: 302742 - DNA, 566 bp, Homo sapiens
ccctgccgtccactcagggttcccagtcggtccatccttgagttccttgtcttcaccgtgcttaattctccactgttacagctcctcccccgagtcccctccaagtttcaggcaggccagggccccaggctctcagtggtaccttcagaggaagcctctgagggactcggtggtgtcagttaattacagaagttttgacagactttggtttatcctttggtctttcctgggcttgtggatttactggtgaccgcggggaaaagttctctctctttagctgtgatcagcctgtgggttccgtrccccgtgtgtgaagcagttcccgggagcattcacgcgattccccagacacgctggaggatgtcctctcgtggcacagatgcgggctgtgatgttcagagatggcctgctcagccatttcaccgatggatgcacttccagcgacgacggccctcagggagttcgagtcctcttgagaacttgttgtttttaagagtacatgctaggaatggtagaatcataattagaaaccaaattttgcaatgtttttcattccctttcagtct

SEQ ID NO: 302743 - DNA, 457 bp, Homo sapiens
gttggtgaatgtatttcataattggatactattctaatgcatttacttatatccaacttattcctgaaggtacttaaaaaattgataagacactttgcctattccagcaggtttacttttatggctgttattactaaattatcagcagtgaggaatagaaaacggycttacatttattaacagtttgcattatgtcagcttgtaaacacatcgatgtatcctactatgcagagatgtctttgtggctggcatggatagaaccatcagctggttttaaatacacaagctgaccacaccagcccagggcctggtgtggaacaggcatgaactaggtgttgtaggaaaggagatggtaagtggaaaggcgggcttaacgttttacaggcaggtggaagatttcactgagcttctcaacttcctgatcaaaggttctctctggaacagagatcaaaaggct

SEQ ID NO: 302744 - DNA, 434 bp, Homo sapiens
atgcatatatacctatgagaaatgaaatcaccaccttgtaaaaatatctttctaaaatattaaaaatgaaaaggaaaaattatatatatatttacagcatacagcatgatgttttgatatatgcatacattacggaatggctaaatcaasctgcttaaacttttttgtggtgtgaactgaaaatttactccttagcaattttgatttatacaatatattataaactgcattcaccacaatacacaatagatgtcttgaacttagtccttcagtctaactgagatgttctgtccttggaccaagagctccccagtatttcttcttatttttggtagtatgtacctagtagaaatttgttcatttcacctaagataccaaatttattggcttaaaagtgttcatgatacttgcatatgattttaatttttaaagct

SEQ ID NO: 302745 - DNA, 608 bp, Homo sapiens
agcaggagacatctaatttatcactatgttttcttgtrgtttcaggaatcctcttgacccttcctctttaaggccattagctttgttagggatactaggatacagtagttttcttcattttatcagacacaatgtacttttttcccccatcttcatatacttattttactactttaaaatggaagcagtactctcatctgagtgccaagatggaacaacatctaagatcctcactacaaagctccatgctaatctatgctggaagaactcaggcatagtatctctttccattttccaaaactttatcagattcagtcctggttttgattgcgtgtgtgtgtgtgcgcgctcggctcgagaaaaaaggaaatgttgctgagtgtatcaggctggtagcagctcttatgaaagctgcttaattagagttaaaaaggcatgactctacatgggtttctttaaatttcacagaccaagacttggaccaaaaaccaggcatgagaataaggaagcagggagcaggagtcatctttctttagctaattgctcatcaccactaaccaaaaaagtcatcacttaggctcctagaggaaagggccagtttcataaat

SEQ ID NO: 302746 - DNA, 608 bp, Homo sapiens
agcaggagacatctaatttatcactatgttttcttgtagtttcaggaatcctcttgacccttcctctttaaggccattagctttgttagggatactaggatacagtagttttcttcattttatcagacacaatgtacttttttcccccatcttcatatacttattttactactttaaaatggaagcagtactctcatctgagtgccaagatggaacaacatctaagatcctcactacaaagctccatgctaatctatgctggaagaactcaggcatagtatctctttccattttccaaaactttatcagattcagtcctggttttgattgcgtgtgtgtgtgtgcgcgctcggctcgagaaaaaaggaaatgttgctgagtgtatcasgctggtagcagctcttatgaaagctgcttaattagagttaaaaaggcatgactctacatgggtttctttaaatttcacagaccaagacttggaccaaaaaccaggcatgagaataaggaagcagggagcaggagtcatctttctttagctaattgctcatcaccactaaccaaaaaagtcatcacttaggctcctagaggaaagggccagtttcataaat

SEQ ID NO: 302747 - DNA, 574 bp, Homo sapiens
tactttacctatcccaggtcagagacttttctggatctctagaagaaaaatggaaggattgtacattgccctgttcctcaagagtggtgtagaatgaactaattatttttgttggtttgtttattatttctgggttttgttccccctgccccccaatcctggaatttggaccaacagtggttgacaaggagtgtgcacaattgatagccaagtgcatagcacagtacctggcccatagcaggagctcagcaaatctgtgttcctaagtctaattctaaatttctcttcacagcaagtgagaaacagatggtggtggtgtgcaaggagtccccaaaggagtatctccagcctttcaaggacaaactagaggagttcttccaaaaaggtaggaagctttgtcagccrcacatacacgtggccctgaaacatccttcattccatgaatctttctctgaggcccacgcccctggcatcctggctgaccacaggcagctctggtgatttcattagcccatctttccatggtggttacatactcacggtagataaagttgtcctgtagctttcatatcac

SEQ ID NO: 302748 - DNA, 605 bp, Homo sapiens
cttaagagacagttagccagctgccattttaatatcttcatgtttccaagttgttaactacacgtttcccaaatcctaactttatatcacagtattggttaagagtcttggaacaaataaggatactgaattggcttcaaatttgacatgttaaaactctcttaaattcatcactttccaacaaagcattgatctggaagttcagtagattgcccattccttgggaagggagatgaagaattgtgaaaccaaaatgcagtgcctctaataaggtgtcaacagcggacaggtgtgcagaaatgacacaaaatgggcttcccagtcacagacaagctgtgtaactgagcccggttatgcctggattcaattgctaatggagagatgaatatcattatgtaagtctaaagaagaaagatatgctragtcaagtatttgaagatgcttttctttaagccacttctatactaataacagtttccaggcagctggattgtttctctctatagctggaaaatggaaatatatccaacaagttatttgcattttggaaaggctaaaaattatccactcttttcaaatcctatcagcttggccacacagactgg

SEQ ID NO: 302749 - DNA, 554 bp, Homo sapiens
gtccattgcagcaacatagatggagctgcagatcattatcctaagtgaaataactcagaaagagaaaatcaaatactgcatggtctcacttataagtgggagctaaacagtggttacacatggacatatagagggaaataacagacgctgggggtggggagagtgggaagacagtgagggtcaacaaataatctactgggtacaaggttcactcttcaggtgatggatacagtagaagcccaaaccctgccactatgaaatacatccgtgtaacaaacctgcacaaatccatgtacctcctgaattgataaaaacaaaaaaaaataaaggttatatggcaatccttacaraagaatttggaaatataggaaacaaacaaacatatcagagaaagaaaatatatattctcaattgataaacgtctcagtaaaatttttgaaaactttatcttttcctctttctcattatcatgcatatgctccctaaggagttattgggagccccagtaaataccaagtgctgccaaagtctactgaggaaagacacaagtgtaa

SEQ ID NO: 302750 - DNA, 554 bp, Homo sapiens
gtccattgcagcaacatagatggagctgcagatcattatcctaagtgaaataactcagaaagagaaaatcaaatactgcatggtctcacttataagtgggagctaaacagtggttacacatggacatatagagggaaataacagacgctgggggtggggagagtgggaagacagtgagggtcaacaaataatctactgggtacaaggttcactcttcaggtgatggatacagtagaagcccaaaccctgccactatgaaatacatccgtgtaacaaacctgcacaaatccatgtacctcctgaattgataaaaacaaaaaaaaataaaggttatatggcaatccttacagaagaatttggaaatataggaaacaaacaaacatatcagagaaagaaaatatatattctcaattgataaacgtctcagtaaaatttttgaaaactttatcttttcctctttctcattatcatgcatatgctccctaaggagttattgggagccccagtaaataccaagtgctgccaaagwctactgaggaaagacacaagtgtaa

SEQ ID NO: 302751 - DNA, 570 bp, Homo sapiens
aataaaacaatcgccagctctgttcttgactgtattactttcagtttgtttagaaaaaaagaaggaagtggagatcctttggattcatggctatgcaagcctcaaacctctttggagctcaaatcaaaaccttagagagcatctgtccgcactccatttccctagcttggcagagaacaatggaaacctaaagtatgtctccttcattcagcctagaatatttctaaattacttatctgtgggactcctgacagctcctgccttgggcagagatgcaacagggggctgcctgggtagaatgatttgaggggcgccagagagactccttactccagacaatcttccctgtttcctcacccttttgttccagtcacccatgcaaacaggctctcagtgctagtttttggtgagactcagtaggtggtagaggtttcaaaaccaaaagggggagcttgcatctgctagcacatgcatgtcttcattatcgggattggaaatgtcttccaaagactaatgcatttcaattaaatttgcaaatttaygacacagggctgatttcagttttcaaac

SEQ ID NO: 302752 - DNA, 561 bp, Homo sapiens
ctgcctaagtaagttgtatatctttgactctgtggaagattcacaatccacagagagattcttctcatgtcagtcaaccaaatgagtgaagttagagggagacctccttagcccctgcaaaggggactggagtttttgccaatatccttatctctcgtagattctttcccagatagctcaacctcagcgtggctcctaggtggataggggccatgaactgtgactctaccttttaatactcctggaaagatcacagacctaccaggaaattgacagccctggttccagtctctgccatgccacttactaacctaaccacctggtaggccttttccccatttgaaatgacaggatcccagtggtggcacttggtgatttttttagcttttattaattccttacagttgacaaagcattcacataggtgtcccatagttttttctagaactttcctgtakatggtgaaagtaggaggtggcatattataagggcagggggtctgttacccctggattcagatcctgactcagctacttactgtctgtgtgactttactaatac

SEQ ID NO: 302753 - DNA, 561 bp, Homo sapiens
ctgcctaagtaagttgtatatctttgactctgtggaagattcacaatccacagagagattcttctcatgtcagtcaaccaaatgagtgaagttagagggagacctccttagcccctgcaaaggggactggagtttttgccaatatccttatctctcgtagattctttcccagatagctcaacctcagcgtggctcctaggtggataggggccatgaactgtgactctaccttttaatactcctggaaagatcacagacctaccaggaaattgacagccctggttccagtctctgccatgccacttactaacctaaccacctggtaggccttttccccatttgaaatgacaggatcccagtggtggcacttggtgatttttttagcttttattaattccttacagttgacaaagcattcacataggtgtcccatagttttttctagaactttcctgtagatggtgaaagtaggaggyggcatattataagggcagggggtctgttacccctggattcagatcctgactcagctacttactgtctgtgtgactttactaatac

SEQ ID NO: 302754 - DNA, 496 bp, Homo sapiens
agaatcaatcagcagcagacatttcaggaagccaaatatatttggtcctttttagggaaaacaaaggattcatttaaaggagcatttatcaatattgccctggctggagtgaggggacggagggttggggaaggcgagtctactcaagctctttttatgcttcacttttgacctgaggatagacattctaaactgcaattcctccactgtatttcccactctatggaacataaaagaaccctacaacagacatatctgttactgcttttaccataagctgcctgtgtgactttggtcaagtcactggtatcctgcagtgtaaaatgagggtgatggttgtataatctagaaaccattacatttctgatgtctgtagctttgtataaagcaaatgagagaaaaatatctgaagaaattgtgtgccctyttgctaatgatggcactgtaagtttatctaaatccttcaaatgggatgatactggttgtcacctagcca

SEQ ID NO: 302755 - DNA, 579 bp, Homo sapiens
attacctgggaggctgaggtgggagaattgcttgaaccctggaggcggagattgcagtgagccgagagcactccagcctgggtgacagagcgagaccctgtttcaaaagaaaaaaaaaattcattctaaattcttaccttctttcaaaacttaacatgacccagaaggtaaaataacagtatgaaaatgccttaatctttaggcaaaacagttacatgtgaatacccagtttcccagtgcaaagagaacgtagcaccaattgttgatgcagacataacagtgtattgtttattgtgatcaaacaaacaatctgactaatgggttgtgtatttagcctattaaaattacagtagcagtgatgacagctttatagtrcagattatattataccatattgattgccaagttggataatcccacccattgaatacatagtaaaggagtccccagctacatttatgcatacacttcttggatttattaatgctatagttctatgaaatccatgagtaaatatagaaacattgaaattccttctctctctttagagttttcttggtacgggatagtcagagtaac

SEQ ID NO: 302756 - DNA, 580 bp, Homo sapiens
tctcactatgcaaaggcttcagctctagccatccaaccagagattggtgataatgttcttttatttttgtgtagaaagakaataggggaaagataatatttattagctgctattttaccaaatacattatattaattagctcttttaaagctctcagtacctcagaagattatattttatacatgcccccaaaaatgtactgattttatggcttaaggacatattcactggccccagattaactaaggtttgaatactgactcgaatatttgcccactgagtgatctagggcaagttatttaatgtctctgaaaataggaatcataataattctggtcacatacattttatgtgtgtgtgtgtttgtgtgtgtgggtgtacatgtatacatataataactcaatccacaataaaaggtttagaatagtgtccagaactcagtaagttatcagtatataatgggcaacacttgtagagcactcactcaaggtcactcagctagtaagtgttagaataagagtcccaacctttgtcaaaataggcaattgtaaaatatctgactgatggagtttctcttagc

SEQ ID NO: 302757 - DNA, 580 bp, Homo sapiens
tctcactatgcaaaggcttcagctctagccatccaaccagagattggtgataatgttcttttatttttgtgtagaaagataataggggaaagatratatttattagctgctattttaccaaatacattatattaattagctcttttaaagctctcagtacctcagaagattatattttatacatgcccccaaaaatgtactgattttatggcttaaggacatattcactggccccagattaactaaggtttgaatactgactcgaatatttgcccactgagtgatctagggcaagttatttaatgtctctgaaaataggaatcataataattctggtcacatacattttatgtgtgtgtgtgtttgtgtgtgtgggtgtacatgtatacatataataactcaatccacaataaaaggtttagaatagtgtccagaactcagtaagttatcagtatataatgggcaacacttgtagagcactcactcaaggtcactcagctagtaagtgttagaataagagtcccaacctttgtcaaaataggcaattgtaaaatatctgactgatggagtttctcttagc

SEQ ID NO: 302758 - DNA, 590 bp, Homo sapiens
gtgcccagatgcagcctgggagtcccaccgcttcaaagtgctttttttttcccccagcgagtgcttctccctgtcattacatggtttccctgtgctctcatcattacaatagaatccataaaaccaaacacagaaacaaagggataacttattggcaactaatgaaacacagagagattgttcaagcagtgtaaatgcgaaagggctttaaaccagtttaaacaatctacgtgtattccatcgccccattgttaacacaggcgtgaaggcaagtgtctcagcttcataaaaattacaccatcrttgccttaaagatctgctctcttgttgcctctgcctctggcgctctttttagagggctggtttgctttttgtccacttattcaaattctgcccattgatcaagactggttcatcttccaagttttctgagaaattgtccatgaacactgcagactccactgagctttccttgcttttcttttctccaataacttaggtgtgtgccacttatttagccagccagagataaggcaagtataggcaatattgagaatccatgaaacagcacaagtggaccaaggcacctt

SEQ ID NO: 302759 - DNA, 461 bp, Homo sapiens
ctctaactccaaagctgatgcttttattattttttaaaatatagtaacttgtttttaagagtgacaaagttttatggaattatattttaaaattagaaatgagtaatcattcttagtttaatcttattcatctgatgagtttaaagtatatatattcatttgcttttacagtaactctgtaagatattaagtaggcaaatactatcattccctataacacaaaagtattattaagaataagtttatacagaaaagatcagtagtaatatcaatgttaatgcaaagcmgaatacgtgagactgtaaatcttgatatagagtgtgtttttctccctgggaattaattcttccactttgtatttaacagttcttctatatatttatagtttcagttacttcttttctgattcattccataaaatatctagtagtatttaaaataattgtcacacataattgctg

SEQ ID NO: 302760 - DNA, 461 bp, Homo sapiens
ctctaactccaaagctgatgcttttattattttttaaaatatagtaacttgtttttaagagtgacaaagttttatggaattatattttaaaattagaaatgagtaatcattcttagtttaatcttattcatctgatgagtttaaagtatatatattcatttgcttttacagtaactctgtaagatattaagtaggcaaatactatcattccctataacacaaaagtattattaagaataagtttatacagaaaagatcagtagtaatatcaatgttaatgcaaagcagartacgtgagactgtaaatcttgatatagagtgtgtttttctccctgggaattaattcttccactttgtatttaacagttcttctatatatttatagtttcagttacttcttttctgattcattccataaaatatctagtagtatttaaaataattgtcacacataattgctg

SEQ ID NO: 302761 - DNA, 562 bp, Homo sapiens
acaaaaatactcagatattgacaatttatttaattcaacctaaattattttcctttctctttaaaaatccatttgtttcacactgtggccagagaagtcttcccaaaacacaaatataagcgtatctcacccctgttcaacccctttaacagttttacattgttcccaggatagggtccaaattcctctttgtgacctacaaggtcctgcaagagcttgtctctattgatttcttcagtagcactttttgcaacttttcacccttgcagtttttcyaggttgtatgtatctactcttttgtagatatcatttcttccacatggactgtcttcactgcctcttttcttggcttaatccagttgatcttttagatctcaaagtagccaacactttatctgcctctccaggtgtgcattagaagttcccttaggtgcttctatagtatatttaatttttcttgtttatttttccatttctctacctaatatgcttcatgaaggcaagggctatgtcttcgtggttgaaccttgggcttctagtgctaactcatgggagataatac

SEQ ID NO: 302762 - DNA, 566 bp, Homo sapiens
tgttttaccttagaacaggatcattttggctgctctgttgagaacagaccaaagctagtgcaatgtagacaagaaggtatgggctaaagtgtacaatgagtggaggggttggccacgttaggagacaattctccatgaaattattatgtctttacatgttctgtgaacaatgtcacttattgcctttttgttctagactctctttttaaggatgtttgtacagtaaagagcctgggaagttagagatattatctrtctccatttggagagaaagcaggtttgcttactaccaaatgtaataaagataatgttttcctctaaggaaaaatcagatgaggttgcttatgtcctgttataaaatattcaaattccttaagctcaaattttgttatctgtaatgcaacccgctgcatatgcagatttcacttggtcctcattacattgccctgtgagaattgaggtcgagggaactgtattcgggttctccagaggatcagaaccaataggagattttatacacatacacatatatattacatattgtgttatatatgatctataagaat

SEQ ID NO: 302763 - DNA, 524 bp, Homo sapiens
atctcctcatgctgttccgcagagtgggagctgcaagttagtcctgcctcctgttcctttacttctctttagttattttgtgtgtgttattttgtctccttwcatacattgtaaattcctagaggaagttatgatgctgtcatcagggatgaatagatatatttgtctacatgcttatatgtttacctatataatggttacatagatacacatgtgcagaagtttatatgcacatacattatcacttaaacataaatgtgtattctacagtgctgcctggtttctgtgtctagtctatgtccattatgttatatagtctttggcatacaagtgttgacattttatgcaacgcattggtgtctttcaagtaaaaattcttttgagaatttttatgggaggttattattattctattttcatgcatctatagttgtcaatgacaacactgttgcttctttatgggttaaactgtcttttttctctggcagtttttcaaacattcttataagctttggtgtgcagta

SEQ ID NO: 302764 - DNA, 524 bp, Homo sapiens
atctcctcatgctgttccgcagagtgggagctgcaagttagtcctgcctcctgttcctttacttctctttagttattttgtgtgtgttattttgtctccttacatacattgtaaattcctagaggaagttatgatgctgtcatcagggatgaatagatatatttgtctacatgcttatatgtttacctatataatggttacatagatacacatgtgcagaagtttatatgcacatacattatcacttaaacataaatgtgtattctacagtgctgcctggtttctgtgtctagtctatgtccattatgttatatagtctttggcatacaagtgttgacattttatgcaacgcattggtgtctttcaagtaaaaattcttttgagaatttttatgggaggttattattattctatttkcatgcatctatagttgtcaatgacaacactgttgcttctttatgggttaaactgtcttttttctctggcagtttttcaaacattcttataagctttggtgtgcagta

SEQ ID NO: 302765 - DNA, 543 bp, Homo sapiens
tggttaaaaaaacaatactaaagtattttacctggccccaaaattatgataggaaatttgagtcttatgtactgtgctaggtctgcatgaaaacctaagaatcattaagatcaggaatggaaacagatttctcatgggtctctacaattgactgtttggggctctgtttgcaattatcaattttcttctcactccacattctccagttaggtgaattcatcaaccccattgttttaaatgccagcatccccaactgtctactccattttgcttgttttgtgatacattaaaagtaatatgtctaaatacaatgcttgacamcccccatcatcaattacccttcatgttcttttattttagaaaatgccacaatttaccctttcacttaagttagaagtcagagaatcatgcttaataccttcctgtattgtataccctttatatccaagacactggaaagttctgttgtttttacatccataaatacaccctgaattggttcacttactgtcattatctaccttatgaatttggatcaaagca

SEQ ID NO: 302766 - DNA, 543 bp, Homo sapiens
tggttaaaaaaacaatactaaagtattttacctggccccaaaattatgataggaaatttgagtcttatgtactgtgctaggtctgcatgaaaacctaagaatcattaagatcaggaatggaaacagatttctcatgggtctctacaattgactgtttggggctctgtttgcaattatcaattttcttctcactccacattctccagttaggtgaattcatcaaccccattgttttaaatgccagcatccccaactgtctactccattttgcttgttttgtgatacattaaaagtaatatgtctaaatacaatgcttgacaccccccatcatcaattacccttcatgttcttttattttagaaaatgccacaatttaccctttcacttaagttagaagtcagagaatcatgcttaataccttcctgtattgtataccctttatatccaagacactggaaagttctgttgtttttacatccrtaaatacaccctgaattggttcacttactgtcattatctaccttatgaatttggatcaaagca

SEQ ID NO: 302767 - DNA, 469 bp, Homo sapiens
cagtagtatgtgagaattacatctttaatattattaayttacatgaaggaaacttagaatctgttttgggaagtagttgtgttgactttggtgtctctataaaatctcacttttccagattatttgggaagaatcaggggcctaaaagatgccagtactctttaccagcctttgttgcttttcatccggggactattttcagcgattaacatataagtttttagtatatattgtagtataaaactttagttatatttttaaaggaacaatattattttctttcttttcctaacttttccaggtatacattttgagaaaggaaatgagaaaaaaaattctcaaaccataatgaacatcttagctatataaaggatgtaacagccaccccatcagcctttgaagtgagaatcaatcagcagcagacatttcaggaagccaaatatatttggtcctttttagggaaaacaaa

SEQ ID NO: 302768 - DNA, 433 bp, Homo sapiens
agcttatttcagggagggagaaatgtgaactacaggatgaattgattgactcatgcagtgaacaagcattttgagcataaattcgtgccagacactataccagggtatgatgacttaccaaggaacaagacactggtctctgctctcggggagtcaagactctttctgaggagttggcaattgacataaatgacaggtagccaagatagggagggacctaggagaagagcctcccagttagacggaagagccctgggcagaagggagtctggcatgtgtggggaacaggggagggcaatgaggcagggatgccgtgagtgatggggaaccacaggagatgtcagagagaggaacagcagcrcatgtgctgagcaacacggaggatttggggttttgctctaaaccccgtggttgcaaatcacggatggtttta

SEQ ID NO: 302769 - DNA, 610 bp, Homo sapiens
  misc_feature (1)...(610): n = A,T,C or G
tgatactgtatgatattgagccttccataatttgtgttatttttgcccattacgttttacagattttagcattattggtcagttccttcagttttgggcattttattacattatttgtggatcatttatatttttactatctgtgagtgcgatcttttttccacattatttgcaaaataatttttgctgttaatgrgaaaatgattattgtggctctgctgatgtttgatttttttaaattctctataaagagaatcatatcactgctaagtaacgatttcctcctgcgtaaataggaaagcagacatgcacatatatgcatttccggggaaatttaaatcatactaaaagtgtgccacacgagtaggcaggcggagggaacgtggctatcagcttctcctttggcaccagcctacccaggtttgtttgaatattctaaattgtgtgtgtattgctttaatactttttaatattgaggaggttgattgactatttcatagtgttcttctttacactaaaaacctccttacattaaacacattattaaccacttaacatgatactccatttgaattacagtttcttnnnnnnnnnnnnnnnnnnnnnnnnn

SEQ ID NO: 302770 - DNA, 609 bp, Homo sapiens
tgaacagagttttctaatcacataaacacacacacacacacatacaaacacacatacaaatacacatgcacgtgcacacacacgtaatagcatttttttttaacaaggaatgtgatattgatttctcagaaactggttgttactaaaatctctataacctttttgtgtccaatgaaaaggttaccagaaagaaaarcctgtaatttttgaagctcttttacaattattttcctgttgtgctgaagtaattttgctttccacctttcttaaccctactataatattgtcatttgagttttgggtggaagtctaggaagacgtcctatattttcactttttccttcttcctttcctatgctgaaggggtatcaacacaaattgtaattatatatgtcacacacttcttatgaggcaagagaaagaaaaattaatatgatgacattaccacagctttgtgtttctaaaagcagcaatgttgttaccaagtgatgggcttgctacctgatgacgccattatggtgcaagcttttgagaaaagcaaaggctttactgaaaggttaactggcaaggagatatgaggcaatactcaaagctggggcatgggggcag

SEQ ID NO: 302771 - DNA, 609 bp, Homo sapiens
tgaacagagttttctaatcacataaacacacacacacacacatacaaacacacatacaaatacacatgcacgtgcacacacacgtaatagcatttttttttaacaaggaatgtgatattgatttctcagaaactggttgttactaaaatctctataacctttttgtgtccaatgaaaaggttaccagaaagaaaagcctgtaatttttgaagctcttttacaattattttcctgttgtgctgaagtaattttgctttycacctttcttaaccctactataatattgtcatttgagttttgggtggaagtctaggaagacgtcctatattttcactttttccttcttcctttcctatgctgaaggggtatcaacacaaattgtaattatatatgtcacacacttcttatgaggcaagagaaagaaaaattaatatgatgacattaccacagctttgtgtttctaaaagcagcaatgttgttaccaagtgatgggcttgctacctgatgacgccattatggtgcaagcttttgagaaaagcaaaggctttactgaaaggttaactggcaaggagatatgaggcaatactcaaagctggggcatgggggcag

SEQ ID NO: 302772 - DNA, 609 bp, Homo sapiens
ttcatataaatttaaaaattaacttgtcaagttccctaaaaaacctagttttttttkttgttgttgttggagttacattggctctatggattaattggaggtaaactgacacttttgtgtcattatgcatttctatccctgaacatggtatatccatttctttaattttttgtgaatgtttattcaacctgaattattagcaaattatttatttttaaaatgttataatcaagatatgttttgtattaatattttgtcataaattatttttctataacacaggataccccttcaatctatagatttagctcttccttaatacagcaaaatcaaagaaataaaaaacaaaaatccaaaaacttttattcgtaaatatattttttattttctttctgggattctcagctccaaagtcagaatgtattcctatattggatcatctctgttatttgggccggtcaccttctttctaattctttaaatccctttgcctttttgcttaaattaaccaagattatctcaaattttctttatgccaataattctatttttcaccaatggctattcctcagtttcagtttttctttggcactgttttagtcctcaatg

SEQ ID NO: 302773 - DNA, 593 bp, Homo sapiens
gtgcctgagttcactcaactctgtgtgtgcccatgtgctgagaaggggaatggaaataagggcaaaaggttagtattatatttcttccacgygcttggataatcttgggcttcagattatcattccaatttatctctctgtctcagatccctgcttttgatagagaaatacatccttggatgatctctttttttattatcaatcctacaactacccaaaaagataaaagggaaaagaaatataaaaattgatttctcacctttgcataacaagttcacagagtagaaagaaaaatattacctgttccctctgtgttctttttccactccctctgggtctttccaaagtttgtatcatatttattatgtcttctgtttgactatactcatttctgaatgcttatgatccatctgcctttgatcgcagctgggattgacacaatgacaagcccagtgattgtctctgcctctggcataagatagagtcaatcagaaaagaaaatatctcctcaaactgttataccctcatagccaagtcagggaacaggacccatcccagataactgacaagaagaactttagtatcggtaagta

SEQ ID NO: 302774 - DNA, 580 bp, Homo sapiens
ctgttcacatttcagctggtccctgatacatttcttggtagatggaattgatcatgtactgaagcaaatgtggtgccaccaagtgtgctcaaggttcaccttactctgtttatactccacaacacctggacaaggtaagaccccaggaactgaggcccagtgagcttcagtgaccctcccaagttgcataagtagtgaaagtgtcamgacaggtgcccagagctgcaactctgtgactctgggctcttcctcataaaccccatgtggtctccagcaggcaaacacagcccttttgttttgaaaatgccatttctcctgataattattagggtgtaaagtgcttggaagggtcacagcagtgtttaatggcctttggatgtcactgtaatttgcagtgacaaataagacttgcagattttgttgggaggctgaagtgggtggatcacgaggtcaggagatcaagaccatcctggctaacacagtgaaatcctgtctctactaaaaatacaaagtatcagccgggcgtggtggcgggtgcctgtagtcccagctactcgggaggctgaggcaggagaatggc

SEQ ID NO: 302775 - DNA, 541 bp, Homo sapiens
tggggcagttagtcttctgggctcctgattcctcatggatgaaatggggctgacagtgctttctcggaggatggttgtaaggatttctggagtcaatgcgtaaaagcacgttggtaaaaatagtaatgtgcttcacctgcagattcttttaattattgtcctcgcagctcagttcatttctctctgtcttccccaagtggcatagagaccttaaggccgtcatgagtttgagtggggaggcgaccccttaaatcctgttcccagaataaaccataagtaatgagactygccagaacaagagctgtgtctaaaaatgggtggggcctgactgtggaggggccttctgatggtctcttccaatacctgctcttcttcctttcaagaaacaaaagaaacaaacaaaaaaacccaaaacaataacaaaaacctgggccgggtgtggtggctcacacctgtaatcccaacactttgggaggctgaggcaggcaggtggtttgagtccatgagtttgagaccagcctgggacaatatgatgagacct

SEQ ID NO: 302776 - DNA, 563 bp, Homo sapiens
gaagctaagaagtctgctcttagcttcagggtgtggagtcggctcttcacactcctaactgtgaaacctggggcagttagtcttctgggctcctgattcctcatggatgaaatggggctgacagtgctttctcggaggatggttgtaaggatttctggagtcaatgcgtaaaagcacgttggtaaaaatagtaatgtgcttcacctgcagattcttttaattattgtcctcgcagctcagttcatttctctctgtcttccccaagtggcatagagaccttaaggccgtcatgagtttgagtggggaggcgaccccttaaatcctgttcccagaataaaccataagtaatgagactcgccagaacaagagytgtgtctaaaaatgggtggggcctgactgtggaggggccttctgatggtctcttccaatacctgctcttcttcctttcaagaaacaaaagaaacaaacaaaaaaacccaaaacaataacaaaaacctgggccgggtgtggtggctcacacctgtaatcccaacactttgggaggctgaggcaggcaggtggtt

SEQ ID NO: 302777 - DNA, 465 bp, Homo sapiens
gcagtggttacccccatgccatgctgctattctcatgatagtgagtgagttctcatgagatctgatggttttataaggggcttttcccctttgctcagcacttctccttccagctttcacatgaagaaggatgtgtttgcttccccttctgccatgattgtaggtttcctgaggcctccccagtcctgcagaactgtgagtcaattaaacctctttcctttataaattacccrgtcttgggcagttctttatagcagcatgagaacacactaatacaaagactaaacattctaaaaaaaattccttttataaaaacagctggactgaatcccatagtctaaggacacagtggaagataaaggtgttttactcacattttgccaaagcaaatcccacacaagcactccctgggagaacttcctaaagccacaatggagccagtaacactatttatgttcacaccca

SEQ ID NO: 302778 - DNA, 520 bp, Homo sapiens
ctgtgcatatggttatatggtggcatttttcacaaacaggcatttacttacatgaatcaatcatacaggagagagagagagaagtttaaatagtttatttaaatgtctactttcccaaactacctaatcagcttatctccacaataatgagttggtagagatgtaaccagtgattctcaactccagctgcacataagaatcactgcgagagctttttaaagaccctgaaaccagggcctcaccccagaccaatgttggggtcagatggtcctaatgagccaytgctattgaaaacaactacctcagtgcatctcagttcctgagctcctctcatggtgcaaacaccttaatgtgcttgcatttgactctgggttattttccacacatggccttgaaacccacaccactgcttcatgtagagcctagccaaagaacctagtctctgacccaatgctaaatggaaagtaggtggggtggaattatggggacaatgacatccactcatccttccaatatttca

SEQ ID NO: 302779 - DNA, 616 bp, Homo sapiens
tgtacggtctgaatcacactgtggcttcctgcccattcactcattcattcgttcactcagcacacactgactgaatatcttatgtgccagactcagcaatgacccaaacacacgattactgccctctcgaaacatactgtcttatagaggcagacttaaaaaaaaatgcatagtatctcaggtatctcaaagtgctgtaaaaagagaaaaagcaggtaatgtagataagagggtatgggggacagrgggaagaggatgctattttctccaatgtcgctagcagtggccattcagaggacatggcatttgaggagagaccaaaataagggaggaagtaaccaagggcatatccagggaggacactgaagacctgccaggtgtgtatgaataacagcaaggagatccgggtggcaagaagagtagaggggaatgcaacacgttactgaaggtgcagtgggccgatataaggaaattgaatgttttcagacttgaagccactggaaatttttttttttttgagacggagtccgacgtctgtcgcccgggctacagtgcagtggcactatcttggctcactgcaagctccgcctcccgggttcacactattctcctgcct

SEQ ID NO: 302780 - DNA, 515 bp, Homo sapiens
tggcggtgccgtatcactagcatttttattaagaacaaaagcagaatatctctaacgccagcactcagcattggaagttatagcgaagacaagaaacccataaaaaataaatgagcaacgtatgaatttggaagattaaaaaaatcattattttcagatgaaatgattgtccatatattttttttaaaatgcaagatactccactgacaagtctgaaatagtttttccttattttaaaaaaatctaaagaaaaaaatcacaaaatgttaacatttattcattttggatggtcagtaaatgagggacggctacattgtttttggtagtatgtgtgtgtaacatttaccaaaaaaaggtaatgaggatgggaaatgaggccctggtggtcctgcatataaattaattcacatattcaagaaaaatatatacatacacacacacacacacacacacmcccccacactctttaacctgtgccttaccatacagaaagtagagcggcccccaaaatacca

SEQ ID NO: 302781 - DNA, 571 bp, Homo sapiens
aaggaaagttatttcccactggaaaattgaggctgaaggtgccaaaggcttatggccattaagagaagagatctcttgatgtttcaaaaatggtatcctgctacatttgccctgtatgtatttgttcatgggctatgaagtaacatctgtcagaatttcaagaatttgtgccatgccacatggggaacacttgacatcaaagtcaatgtagaaattcctcaggagatggcattttggctgaaatgacacaaatcataatttccccaaagctctccataaagccttctgttggacataattcagggccctaaaatgctaaaattacatctttaatgtcataattaaattcaaaggcctgagrtcacctgaatagtgtgtacaggaaatccttgagataacagaaagtggccggaaagtataaatacattcttgcaccatcaacttactttatcagtgtgagctctatatcatcttatcatagaattaccctactaatttttaaggaactggattggttttgaagtgatttttttttcaataggtaccaaaagaatgtatagcacaaaccaga

SEQ ID NO: 302782 - DNA, 590 bp, Homo sapiens
attccttctctttcctatccatgccactcctgattttctgcaagtaaggctttggatgtcaatgaggacaccgtgaaatatcaaacatttgggcggaatgccaccccagctgcagatgacaagcagcgaccttgcccagtctcctaccagagtgagtttcctgctstaccagaaccaggcatgggagagccaccagcactgtgcagagtcccctctcaagctgccagagaaaagtacaaatcgcccctgttcactggttgagtgtcgctgcagttttcgaggctgtcacgtttctgcatccgttagcatgtctgtgacagaaactgaggccaactaacaaagggatggaagcaacaaagggatggaagcatccctgcagaagggatgcgagaagataaataaaaacagaaaaatgcaggagaaaatcaaagagaaaaggataaaatctccataaatggcatccagttgcgatctgttaaaagggttctgactttattcctgcctcccaggcccctcctcctacactctgtccccacagatcagcacctacaggcattaaatttgttgcacaaaaatatgcacctgccata

SEQ ID NO: 302783 - DNA, 594 bp, Homo sapiens
atcagggcaggttcccccataaatataaagttaaccttgtgaatgtaagttcagtaatgttaagtgtttccatgatctagtcctgtgattataatagactagagaattataattttcattttagaaaactggaatygtgctgcaaattctataaatgagatatcttacatcttttcctattattcagtattacccagtattaaccgtgagaggtaaagatatctttaagaaggtcaaaaatgaatatttaacctatccacgagaacatctcagatgaaaaatttagttcagatggtctattcttttcttttagaaatatttgataatactaataattgatctgaaatttctttacagctgtaaataatttagataagaacttttgatagttggggttcagtatggccaaaagacaacacttttaaaactccgcagcagtaaaacatcaagaatttaatcctgatgaattagtgtggttctccaacattcaccccttagaaaaatacaatatttaaacctcagtgattattactcatgtcaaaataaacaattactttctacctggatagtcaaaaccattcaaaatcaaatatt

SEQ ID NO: 302784 - DNA, 578 bp, Homo sapiens
ttagaaagacggatgggagtttttgaagtgcataagagattataactattcaggaaggggtaagaaatagtatttggcagttagagaagaatggaaccatctgatgattaaatgtggatgtaggatacagctgagataatcctgctgatgtagccaggaccacctcacagcaccctaggttatttagactttctctggaaggaaacatggagcaattaagggggttcagtcaggagacagaggagtcatttttttccttccaaactgtcactcttgaagcaatccaaaggatgagttaaagaggaagaaccaggagaaacagatagaagccctttccaaaactgaaatatgttgaagacttgaattaagacagtgtcagaagaaatggaaaggggagaaaggattggagatatatttagaaggtaaaactagctgaatctagagattaatttcatataaggrtatgaaagaacataaagccttgttggtattcttatttggtgtgagaaactatgtagattatagtatgaataaaagtataggagccaagatgaaattatatttgcatattgctatgg

SEQ ID NO: 302785 - DNA, 569 bp, Homo sapiens
agaagtacaggaccattctccagctggccttgtgctgatctagcttccccatctctcacttgcagttctcagaaatagctgtggaatgtgctgagaatgtaccaacctgagataggaaaggaatgacaatagcagcccaggctctgttccaattaccccagaacaggatgtcctaaacgctttggttcagcatgtcccataatccagaaatataaaactgcaatatgggttgctttctacttgyagccccactcagatgaggtgcaagtaaggcaagtgcaggcaaaattccattcgccccaggcagctttccatagccttggagggctggctggcaataagtcccagtcttctattttttctcactacttatctgtaagtaataaaactacctcatgtaatttgttgtgtgtgtagatgttctgtctcactagactcagccaagttggtaagcagagcatgggagtgaacatgcttcacaagaagtatccctctgtctcccctaaatatttcctgaggtgtctctgcctccattggccaaatgggaacccagatatataacctcctgg

SEQ ID NO: 302786 - DNA, 611 bp, Homo sapiens
  misc_feature (1)...(611): n = A,T,C or G
agggaaccaaatggtttttcctcatcagaccctggacgatatttcctgcactttgatttggatcaaaattccagtagatttttactcagcagtggaagcccacmacgccccctccttccaaagttcttgcctctataaaccacactagccacaactctccaatactgcaaatgagttttcctaatagtcttcaaagtgctaaccactttaggatcacacatttctgggacagtaagaatagcatatgtacaacgtaccaaaccccaattaaagacacncggttatccatgtctaaggtgttagccacacaaattaagcaaatgggcccatggactaaaactcttggttgaatcttaccatacgttagtggccattatgttagataattccatagtcctagatttttttattggctaccaaatgaggggtctgtactccagttaaacatcttgcggtatgtggataggtaggaacatggagcaaagggccataatagcactgtactgcccaaacagattgagcaaattaaagtcttttctgagctgtttgctttgcttttccttagtacatggtcaaacaagctgcaaacaccttctgaaatcctaattcac

SEQ ID NO: 302787 - DNA, 611 bp, Homo sapiens
  misc_feature (1)...(611): n = A,T,C or G
agggaaccaaatggtttttcctcatcagaccctggacgatatttcctgcactttgatttggatcaaaattccagtagatttttactcagcagtggaagcccacaacgccccctccttccaaagttcttgcctctataaaccacactagccacaactctccaatactgcaaatgagttttcctaatagtcttcaaaktgctaaccactttaggatcacacatttctgggacagtaagaatagcatatgtacaacgtaccaaaccccaattaaagacacncggttatccatgtctaaggtgttagccacacaaattaagcaaatgggcccatggactaaaactcttggttgaatcttaccatacgttagtggccattatgttagataattccatagtcctagatttttttattggctaccaaatgaggggtctgtactccagttaaacatcttgcggtatgtggataggtaggaacatggagcaaagggccataatagcactgtactgcccaaacagattgagcaaattaaagtcttttctgagctgtttgctttgcttttccttagtacatggtcaaacaagctgcaaacaccttctgaaatcctaattcac

SEQ ID NO: 302788 - DNA, 456 bp, Homo sapiens
tatagctgctgatctgagaagctcagtaaatcccagtgaaagactactataccaaaatacattataatcaaatatttcaaaactagtgatgagagaaaatttttttaaaaatccaaaggaaagaaacatgttatgtacagagaaaaaaakaagattacatcagatatttcatttgaaacaatgcaaacaagaagagagtagatacaaatatttaaagatctagagtgctgcagaaaaagaaactgtcaacctagaatggtatagccagtgaaaacatccttccaaaaaaaaaagtgagtttaaaaagggaataataaatacagtttaaggcaatgaaaagttgaaataattaatcaccagcatactctcaccacctaaatgttaagctatatttttcaggcagaagaaaaagtgatacttgatataaacacacatctatgccaggggttggcaaac

SEQ ID NO: 302789 - DNA, 456 bp, Homo sapiens
tatagctgctgatctgagaagctcagtaaatcccagtgaaagactactataccaaaatacattataatcaaatatttcaaaactagtgatgagagaaaatttttttaaaaatccaaaggaaagaaacatgttatgtacagagaaaaaaataagattacatcagatatttcatttgaaacaatgcaaacaagaagagagtagatacaaatatttaaagatctagagtgctgcagaaaaagaaactgtcaacctagaatggtatagccagtgaaaacatccttcmaaaaaaaaaagtgagtttaaaaagggaataataaatacagtttaaggcaatgaaaagttgaaataattaatcaccagcatactctcaccacctaaatgttaagctatatttttcaggcagaagaaaaagtgatacttgatataaacacacatctatgccaggggttggcaaac

SEQ ID NO: 302790 - DNA, 594 bp, Homo sapiens
taattttgtaaatgttcatactgactggtaccttttaaagacagcagaggaaggtctacagtcccagcttgaggccttatgtttatattatgcatcttcttgctacttctattttgagtgatcattcctagctagccactgagtcctagctgagactgtgtctacttctaaaaccactaactagctctaggacaagaaatcccagtaatgttgtaaattatattttttaaaagaccctaaaaagaacagacatttaaacaaaactcacaatgaaaagaaacggcacattcagaattatgctgaagagggcagcatgggatccatatataaataacaagtgctggtttggggctaacattttcattcaacaaatgtttattacagtattatagggatgtaggacactccagtgaataaaacagacaaaaatgtcttcaatcccatggagcttatattttcttgtctattctcttacttgtcccatctacctgtaaaaataggggcttagacagactgmagaattttattgagttcagaaaagtgtgactgagcttggtctatagttgactgtgcctgaaaaactgagctaggtta

SEQ ID NO: 302791 - DNA, 614 bp, Homo sapiens
agggaatagtaatacattaattcttaaacatatagaagaaataaatatgatgttactaatttaactttaattttcctaaagacccagaattaaattataccttcttttttgaaagtcaagagtagcataaaactctgaatattgcttatcttttcttgctagcaataactaatagaagaaaaaatgtagggaaaactgaggagtcagtagaaaacaaacagctcagaaaatccacaaaaatattgttagctcactaaaaattcagttattactagaacatgccagttttctgtctttaaaataacaacaacttcccaccactgagaggtgctctcacacctggagctacaatatttccaaatactatcatattaaagcttrtgcaaatatttttcaaacataatattaaacatagggcatttttgcttaaaaatgattatatgccatagtatgaaaacagataattttgttgttacacaaacaatggtttgcctgtgataaagtcatccttatttagttgccctttagtccgcatatcaaaggaataataatccctaacatgttaagtttttgatgtattatgttttaaagcaataccttatatgcactcaatt

SEQ ID NO: 302792 - DNA, 552 bp, Homo sapiens
ctaacatgttaagtttttgatgtattatgttttaaagcaataccttatatgcactcaattaatgaggttttggcattgtcttagaacgttgtaaatgtacaggaactacttatttacacctgcccttttatttgtcctcctaagctgcttaaaaccttcttgctttgtcataatttttacttatttatgttaaatattattaacatttgtaagcttctagtgaatttgcctgaagggatgactgcttcaragaaatattattcttttatttggctgggtattttataacacttgaaatatggtgttacaatcaaacattagacctaattgctgactttgaaggctggctctgcttctcacctgttctgcaaccaaaaagatgaatttaaacatctctgtatcttattccttctcatttgtaacactgtggtgataacaaagtatctatcttcatgatttgttgtgcagatcaaacgatctaattcatgtaaaacccttcaaatagtgcctggcatatggtaaatgcccaataaatgttacccataataatat

SEQ ID NO: 302793 - DNA, 562 bp, Homo sapiens
gtttggctatctccttaccttaatatagtactacctgacaatattctacattttatcagtttatatgtaatagtgatacaggagctagaaataaattatttaggtagatagtcagaataaaagaggcctcaataaggttccttttaataaaaagcagcccccaaaatcatttcttggctgggtgcagtggctcatgcccataatcytagcactttgggaggctgaggtgagcagatcatctgaagtcaagagttcaagaccagcctggccaacatggtgaaacccatctctactaaaaacacaaaaaaattagccggacatggtggcttgcacctgtaatcccagctactcgggagccgaaggcaggagaatcgcttgaaccccggaggcggagattgcagagagctgagattgcgccattgcactacagcctgggtgacagagcagactccatctcaaaaataaataaataaataaataaataaataaataaataaataaataaaatgatttcttttctaacaaaaagcagcctgaaaaatcaagctgcaagcatagaaaa

SEQ ID NO: 302794 - DNA, 562 bp, Homo sapiens
gtttggctatctccttaccttaatatagtactacctgacaatattctacattttatcagtttatatgtaatagtgatacaggagctagaaataaattatttaggtagatagtcagaataaaagaggcctcaataaggttccttttaataaaaagcagcccccaaaatcatttcttggctgggtgcagtggctcatgcccataatcctagcactttgggaggctgaggtgagcagatcatctgaagtcaagagttcaagaccagcctggccaacatggtgaaacccatctctactaaaaacacaaaaaaattagccggacatggtggcttgcacctgtaatcccagctactcgggagccgaaggcaggagaatcgcttgaaccccggaggcggagattgcagwgagctgagattgcgccattgcactacagcctgggtgacagagcagactccatctcaaaaataaataaataaataaataaataaataaataaataaataaataaaatgatttcttttctaacaaaaagcagcctgaaaaatcaagctgcaagcatagaaaa

SEQ ID NO: 302795 - DNA, 574 bp, Homo sapiens
gtcaaaataattgttcatgggtagatttaaaagcaattcataagaatatcttaattgctttcaacactatatctagcagaataaccattaattttaatatcttgtatatttgtttaaatattttttgaataaagcttaagaggatatcaagttgcataaataagtatctctgtccytctcatctaaataagattaaactttctaattgaaagttacatacaatttggagtgaaatgatcatttaaatcattttaactctcttaataaaatcactttgatttgtatacacagtgcttaggatgataatacactggaggacaatattataaatgataaacagttgtgctactttgagataagcaaattttatcccatttacttcaattgcagaaatacattgagcctaaactacatgttggtgcagttctagttctaggcattgtgtatagagtagtgaccaaaaatagtctttgacctacagagttcaaatgtaatttgaattctttgtaatcttgttcaaaattatgtttgaattccatagggtcaaagactgttttgcagaaacaaaggggca

SEQ ID NO: 302796 - DNA, 616 bp, Homo sapiens
atatttgaaacattatacatttgtgcgtgtgtgtgtgtgtatatacctgcatgtgtgtatgagagtagctagcatgatgttaacttatacacacaaacttaaaagacatatgaacttaaaaaaaaataaaataaaatattaaagtgatttgaaatgagacttttttctggtttcacttttattaacttcttattcaaaatattctttttccttctttggttatactccattagcacaggtgttcaaatggggcaggtccttggttgatgactctattttggaataatttatgccataaaatcttcagctgtactggctaagacagagcatttgatacaggaatgcaaagctgcttcaacattggaaaattaattaacataagtcacccawctaacaaactgaaaaagaaaaactatattaacatctcaacagatgcagaaaatgtattttacaaaattcattttccattcatgataaatagtggcaaaatatattaataaaatggaacttctttaacctgatagaacatctacaaaaagaaaaaagaaaaaatcttacctatagtttaatcaatggtaaaagactaaatgttttctccataagatcaggaacaaag

SEQ ID NO: 302797 - DNA, 600 bp, Homo sapiens
tatagggtacacttactttctatatttatatattaatcatttttccttgtttaactcaccactgtgttgtggcagcttattctggaatcaaactagaaaggataggttagaatggcagatagagatatgaagcaggaagaagagaataacacatgttttctttattatgactgcatttatttaaactagaaaatatattaagtattttaattgcagtttgaatcctacgtttttgaatttcattgctttatatgtgtaatcccaaatttccaaakatacatattttttataaacataattcagtaaagaaaattacttatttcttagttcaagtgtttccaaaaagtgcacagaaatccacataatttataattgactattgagtgaattacttatttaacaaggagacgtatgttagaattattatttctcatgactagcctgattcaaatgcattcaaacaattctctttatagccaaagtatacagtaggctacgtaacacatcaacctacattttctagaagaaatttcctaagggaatcacttctcatttaaaaatcagcctcatggattaattgacattctcatctattgtttt

SEQ ID NO: 302798 - DNA, 579 bp, Homo sapiens
aaaatattgtatataagaaggggaaatgctaggagtagaataaaaagaagatgatgattgagattagggccattgtgtgtgtcttgggggtgtggagtgggtgggcttgaaggacacagaaataggtttcaagccatatttcagtaactattacaatgcttaagtttaagaataaaatcctattgaaaaaaaagacaaaaaaaattcagcgatgagaatatacttggcatgtctcagaaacagaaaggaggttgaaagcagaataagaaaccagagaatgatggtagagaaaaaaatgtaacttcatatactagggttttcctaargtttctgaagtagttggccttcgtggctttgagctgtgaatgtttaaaggcatattccaatgtcagaagatttagctttgataatgttatgtctgatctcttcattccacttatggggtaaagtatgacagcttctgttgcagtctttgtgaagcactcagcatggggtcttaaagcagcatttaacctatatctttagatccttaagactctcagttctctagactgtaagtttctgaagagcatgtctata

SEQ ID NO: 302799 - DNA, 523 bp, Homo sapiens
aataaaagtcaaagttttagtagaaaaagaaaactatgttcaatgacctcaagtggagagtgattgctctctgttcatgacacaccaaaaaggcagactgagatacagggagaatggtagaaagacaaaacagacagataggcattgaagtaggcttgtcatctagaatctgataagaacagctttaacactacaaaataggaaatggatctgttaaacccaatcttaggaagactttggaaagatattttcccctctaagtcacagaggggaaagaaacataactgtccatattttggataactaaaaagaagcctatagattatatataatctatataattcatctatatgattaattggcagcctataaattaatctatgtgtaatttatgtctctcaaaagaaccagaaggagaatctgagcttgagaattagaaaagagtagctgcctcattctcatttttwcctagtcctcaaatctttcaattgtgttttgcaaatatcttaataccccttaatta

SEQ ID NO: 302800 - DNA, 455 bp, Homo sapiens
tttgaaattttacattttttatgatttttttccagtgaagtatgagcttatttmagcatttttgaaagtctgcttgtgaggacctctaatcttatttgatgagataaaaatattttggtgctataataaagttaacatggaaaaaggaacatatttttttgttgttgttggagactgataacgcaaagtctttagtgagatttgagagcacacagtaaagaaacctgttgaatttgtttaacccagtgtttctcaaatacatttggtcatggaagactttagtgagcctatggtaatgatggtagttttgcttagttatgtcctcaatggctaatcactgcaacaatcttctctattggcagagctttgtcttccacagtagagtctaaatacccaaacaatcttttccccagacttgcattcagctagccatgtggcccagttctaacaaacaa

SEQ ID NO: 302801 - DNA, 629 bp, Homo sapiens
agatttgagagcacacagtaaagaaacctgttgaatttgtttaacccagtgtttctcaaatacatttggtcatggaagactttagtgagcctatggtaatgatggtagttttgcttagttatgtcctcaatggctaatcactgcaacaatcttctctattggcagagctttgtcttccacagtagagtctaaatacccaaacaatcttttccccagacttgcattcagctagccatgtggcccagttctaacaaacaacaacaaaaaagggctcttgaaaaaagaaatatgaagagggcccctttgctacagagactcctggttttggtcattgttgtgaagctttaagcatttgcctccaccttgtgaccaagagggaaaacttcctgatgccctgcgatagcagagtggaagagaggaactagcaactttgatgctattcaagggccaaaccaaaagctacccttcgacttatttttcctaggaaagtatcaacttctttgatttaatcaaytttatttggacattatgttacccagttaaacgcatgtaaaacaaatagcatttgaggatgctgttgtgagcttaggagtatacagcagagatttttggtttgaagtaaacacagc

SEQ ID NO: 302802 - DNA, 173 bp, Homo sapiens
tccaattaccagaaaacatttaccttatgtcctctactattggwcttcaaagtctaatttctcatcacacaattcctccatcctagtggaagaagttcacattaaaaaaagaaaaaaatcaacactagtgcttattttactttttagccatctttttccttaatgtatgtaat

SEQ ID NO: 302803 - DNA, 665 bp, Homo sapiens
aaaagatttcacttcttttgagcatataactagcagtaggattgctaggttatatggtagctctattttcgttttttttgagaaacctcccaactgttttccatagtgattgtactgatttaagttcccaccaaacagtgtctgagagttcccctttctccacattctcaccagcatttgcaattgcctgtcttttagacataagccacttgagctgtagtgagaagacatttcattgtaattttgatttgcatttctggtgatcagcaacgttgagcaccttttcatatgcctgtctgccagtatgtcttcttttgaaaagtgtctatttaagtattttgmccattttaattcagattattagattttttttcctagggagttgtttgagctccttgtatgttctggtattaatcctttgtcagatgggtggtttgcaaatattttctcccattctgtgggttattgcttcactttgttgactgtttccttggctgtgcagaagctttttaacttgatgtgatcccatttgtctatttttgcgttagttgcctatgcttgtggggtatcactcaagaaatttttgcccagaccaatgtcctggagagtttcttgcagtattttaatagtttgaggccttagacttaagcctttattccattttg

SEQ ID NO: 302804 - DNA, 569 bp, Homo sapiens
gggtctagtttcattattcttcatatggatatccagttttaccagaaccatttgttaaagagactgtcttttccccaatccatgtccttggcaccctcatcgaaaatgagttcactgtaggtgtgaggatttgtttctgggttctctattctattacattggcctctgtgtctgtttttatgccagtaccatgttgttttggttactacaactgtgtagaataatttgaagtcaggtaatgtgattcctccagtcttcttcttttgcttaggatatctttgcttattctgagtcttttgtggttccatataaattttaggatttttttctattttggtgaagaatgccattggtgttttgatagggattacattgaatctatatattacttagggtagtrtggacattttaacaatactgattcttccaataaatgaacatggaatatctttccattttttagtgtcctcttcaatttctttcatcagtgttttatagttttcattatagaaatctttcacttatttaagttaattcctaggtatttgattttatttgtggctattgta

SEQ ID NO: 302805 - DNA, 593 bp, Homo sapiens
ttctaatgaaggaaaacattttcatgattaggagaaatttattgtatcaaggattacaattattaaaataatattaaaaagttggtattgtggaataattatgttggcaagtaatataaattttctctttttaaatttaacttaattaaatgtatttatttatttattttgagacagagtctcgctctgtcacccagactggagtgcagtggcgcaatcttggctcactgcaacctctgcccactggattcaagcaattctcctgcctcagctaccctgagtatctgggcttacaggcatatgccaccatgctcagttaatttttgtatttttagtagagatggggttttgccacattggccaggctggcctcaaactcctgacctcaagtgatccacccaccttagcctcccaaagtgctgggattacaggcgtgagccatagcaactgsccataacatttctaataaattaatttttacttttatataagggcaaagtgataatctctctgtccattataaaaatttagtttattacagttacagtattattataaataaatatgaaccatggctctggtgagcattccac

SEQ ID NO: 302806 - DNA, 591 bp, Homo sapiens
ttgctcatagtagccactatttgtatttctgtgttatcagttgtaatgtgtcctttatcattccttattttatttgtttggaacttctctctatttttttagttggtttgactaagtttgtcagttttatttaactttacaaaaatagctttttgttttattgatcctctgtattcctatttattgtttacttcattycaatttcatttatttcttcttggatctttattacttcttttattctactatttttgcatttggtttgcctttgcttttatacttctttaaaatgcatcattaggttgtctatttgaagttttgcctctttttgatgtacttggaggcacttatagctataaaattccctcttagtactgcttttgctgtatcccataggttttggtaggctgtgtttccactgtcatttgtttccgaatattttgtttccttcttaatttcgtcattgactcactggtcattcaggagcatattgtttgcattccatgtgtttgtatagttccaaaattccactagttattgatttctagttttatttcatcctggtcaaagaagatgctttcatattattta

SEQ ID NO: 302807 - DNA, 588 bp, Homo sapiens
gactaagtctacaaccaatataaatatgaagaatgaaaaaaatatttagaaccacttgaagaaatttgagggaaacatatacaggcaaggcttgaggacattacttaacagaaagaacaagcaggtaagcttcatatttatgattgctttgtctttgaggaaattttccaaatcacagcaatgaataagtaggttccaagctgaaggcagyactttttacaggactgaaaggcagagtttaaagtgcaagtctgtctcaacatgactaggacttgaagatgacaaaatcccaaagagtgggggaaacatattgtagcagacagactctaaaaggccctccaaatcctcatctccttgtattcatggctttgttgaatcttctctcttagttgtgtgggcaagattcataatttgctaccaaccaatggagtaaagcaaagatgataatcacttccatgatcatattacatgagattgtatttttcatcttgctagaagactctcttttttgctggctttgaagaagcataatgtcatcttggggaacccaagaatctgagagaagtctccaactaatcatcagctagg

SEQ ID NO: 302808 - DNA, 635 bp, Homo sapiens
attaatagagtaagcaggtagaatatcaatatcaagtaagcaggatatcaaggctatggatgacctggagacaaacaacaaatttgtcctaataaacatttatataatactttatgcaatagcagaacatacatttttacccatgtcataggaagaattaaccttagcaatgttaaaaccatagactttaacaaatttaaaaactagtacaagtcatataaaatattttattggttcataacaaaattaaactagataccagtaacagaaatatatgtaaaaattcctaaatatttagaaatttatgatgcatttctaagtgagatgaacaaaaactattttaggctaygtgaaaacaagaatgcaacttatcaaaattttaaatattcatgttagatgataatttataatattaaatgcatttgttagaaaagaagaaatatctaaatcagtaaactaaacttttggaaaatgaaagtaagaagagcaacttatatctagaataagcagaaagaacagaataatgaatattatagcagaaaacaaaaaaatggaaagagaaaacaacatagaaaataattgaaagcaaaagctcaacgatagttctgtagccagcctaaggaagaaaaaagagg

SEQ ID NO: 302809 - DNA, 551 bp, Homo sapiens
tgtgatactaaataaaattattttttaatttctttttgagatagtttgctgttaatgtatagaaagaaaactgattttttatattaatatttttaacctgcaacttggcagaactagtttattagttctaaaaggggtgtgtgtgtgtgtgtgtgtgtgtgtgtgtttagtcygtaggattttctgtttagaagaccaagtcatctgcaagcagagataattgtacttattcctttccagttttgatgtcatttatcactttttttctaattgttttggttgacttccagcactaaattaaatagaggtggtaagaatgggcatcaccatatccaaaatcacctcagaatggattaaagaattatacataagacctaacactgtaaagaggtatctgtgtattcacattaattgcactgttattcacagtagccaagatatggaaataacttaaatgtctgtggacagatggatgattaataaaaatatgatatatacagacaatagaatattttcagacttttaaatgaaggaaagcctgccatttgtga

SEQ ID NO: 302810 - DNA, 628 bp, Homo sapiens
gatatctattaacatattacttcattttaatttatgaattccttaaatgctttgctctcttaaaatgagtcccagaagaagcatcagactctttatgtctgaatatacatctatattttatatgtatattgacataggttggatatttgtccctgccccaatctcatgttgaattataatccccaatgctggtggtagggcctggtgggaggtgtttgtatcacgggggcagatccctcatgaacgtcttgggccattcgtttggtgataagtgagctcttgccctgagttcacaggmggtctggtggtttaaaagtgtgtggcaccatcccctcactctggtttgcttctgctcttgccacatgacatgcaagctcccacttcaccttccatcatgaatagaaattttctgaggcctcattagaagccatgtttcctgtatagcctgcagaaccatgggccaattaaaccttttttctttacaaattacccagtcttaggtatttctttaagcaatgcaagaattgtctaatatatatatagtctatatctgtatctatatagatacagatagaattatcacagtggatataacatataaaattagaaagagaaaattttgattatt

SEQ ID NO: 302811 - DNA, 516 bp, Homo sapiens
aagatgaggagaccaacctgcccccaagaacctcacagcctgtggaggagctttcagtctgcccttgggagaggttatggttgatccgtaagcaaactgacacaggagtcaaggggacgcgtgtcctcactgagtgggagtgcaagggacgagctatgattctagccattgtctcaacggccatgtcctcttcaaacatttaaggactgacaatgctcagtgaggtctaatgggcagctctgcctaatcctcccacacccaaaagagcaggctgtttgatttctaactcgttaacacaaataatgcttgaagatctgtggctctgatgtgacgttagctcgttttccaagtttagctgtaaatcacaggctgagttaaggtgtatgaggtctcaagcaaattcacatggcctctattaaattgtatgaggttaagaaatatattggrttctggggacatatatgctgctaaccaaaattacacaccagccatttgtcatattcgcgtgggtgtcac

SEQ ID NO: 302812 - DNA, 634 bp, Homo sapiens
  misc_feature (1)...(634): n = A,T,C or G
aggtggcactaatttcgttcaggaaagagcactagttctaggacaaacatgaattattcttgctgtaaaacaagagatgactgcctgtaagtttacttgttttatcctggaggtgctgttgagtttgcccagcctggaagaatcttacagcagatctgaaattattaatgttttaaaaatataaatgttagcatttaaacatgtttgaaaaactttaatttcctaaaaatggattaaaggaaatggcaaaagattaaaattgatatagaaatatataatgttgtttaataaatattcacttcaattttactgattcatatcatctgngggataaaaaccagaccataataataactactattcttattgatataaagcatatttcaaagaacagtggtaacacgaataccttaaaattatttcaaatgattcagaatgataccatatgctttttggctatgatgtgacttctaacttttcttcktaattatgtcagctgttataatgaattcaatgacacctttttccagcctagattttgcaacaatatatgttttgcaacatatctataaaagagccttatgtatctttatctttattgggaatatactcccaataaacggggtatccatta

SEQ ID NO: 302813 - DNA, 636 bp, Homo sapiens
gagttttaaaacttttttagtgagattaaacatttcaaatatgttgtatatgtttgcttgtttaagcaccttacactataagtcattgtaataaggcatacatttacaagcaaatgtatttctgctccatagaaattaatgaaaactacagggaacttgaatatagaaattggaaatgattttataaaatatatttttaaggaggctccattctggaatgtttgttttcctrtgaggattctcttatgagcagctatttgtttacagcataaactgttttaaaattattttaggtcatgttcgattatatgaaaacaagtatcctaatatacatgtttataaatataaagtgaattagtatttgaagttgttttattaattttttaaagaattcctttcttttgtacgatgtgcatgacttgttatttctggattctttcttttagtttccttacattagattttcatttaaaatatcattttaattctcaaaatttctatttagtctccactatatatcttaattgcatgagaatgcatatccctagagaattggatagtgtactttatttctaaggtcagtgatctgattatcttctcattctctccattttagccacgctattttctttccat

SEQ ID NO: 302814 - DNA, 615 bp, Homo sapiens
acgaaaacctggcagagacatcatgaaaaaagaaaacttcaaaccaataaccctgatgaatatagatgcaaacatcctaaacaaaacactggcaaatcaaaaccagcagcatattaaaaagctaatcagccacaatcaagtaggctttattcctgggatgcaaggttgtttcaacacacacagattaataaacgtgatttattacataagcggaactaaaaaaaccacatgwtcatctcaatagacacagaaaaggccaacaaactaggcatcaaaggcacattcctcaaaataataggaaatatcttcaacaaacccacagccaacatcacacttaatgggcaaaaactgaaagtattcctcttgagaaccaaaacaagacaaagatagcccctgtcatcactcatgttcaatattgtactggaagtgctagcccaggcaaagacatcatgatgaagtctccaaaatcaattgcaataaaaacaaaaattgacaaatgagacttaattaaactaaggagctcctgcacagcaaaagaaactatcaacagagtaaacacacaacctacagaatgggagaaaatatttgcaaactctgcatctgacaacggtctga

SEQ ID NO: 302815 - DNA, 615 bp, Homo sapiens
acgaaaacctggcagagacatcatgaaaaaagaaaacttcaaaccaataaccctgatgaatatagatgcaaacatcctaaacaaaacactggcaaatcaaaaccagcagcatattaaaaagctaatcagccacaatcaagtaggctttattcctgggatgcaaggttgtttcaacacacacagattaataaacgtgatttattacataagcggaactaaaaaaaccacatgatcatctcaatagacacagaaaaggccaacaaactaggcatcaaaggcacattcctcaaaataataggaaatatcttcaacaaacccacagccaacatcacacttaatgggcaaaaactgaaagtattcctcttgagaaccaaaacaagacaaagatascccctgtcatcactcatgttcaatattgtactggaagtgctagcccaggcaaagacatcatgatgaagtctccaaaatcaattgcaataaaaacaaaaattgacaaatgagacttaattaaactaaggagctcctgcacagcaaaagaaactatcaacagagtaaacacacaacctacagaatgggagaaaatatttgcaaactctgcatctgacaacggtctga

SEQ ID NO: 302816 - DNA, 590 bp, Homo sapiens
tagaattttttcagggcatctctgcctgccttctggaattgatacaagttgataatatgtaaacaaagactcatacctattgcacccaggccttrcaaaagaccaaatcagttacgttattttctaaggtacactaagtatgctttttattttgatgagttacttagcaggacttgtttattcaaacaaactttctgaaaaccctttagaatttctacagttttcaatgattcttattttgcctagtatatattctcaaaattcacagaaattatatgaatcggtttgttctaagcataatttgtatcaaagaggaaataattaggaaatatttattatgttctatccctagaataatacttattctagcgtcttttcagagaacaaatgagcaaaaaaggtgaaagagcaagcaattcaaataatataaacactcaggttaagaaatctagttatttaaaatctgtacttgggagaaaatattcacaaattatgcatcccacaaggtctaatatacagtatctataagaaacataaacaaatcaacaagaaaaaaatattaaaaagtgggtaaaagacatgaacataat

SEQ ID NO: 302817 - DNA, 590 bp, Homo sapiens
tagaattttttcagggcatctctgcctgccttctggaattgatacaagttgataatatgtaaacaaagactcatacctattgcacccaggccttacaaaagaccaaatcagttacgttattttctaaggtacactaagtatgctttttattttgatgagttacttagcaggacttgyttattcaaacaaactttctgaaaaccctttagaatttctacagttttcaatgattcttattttgcctagtatatattctcaaaattcacagaaattatatgaatcggtttgttctaagcataatttgtatcaaagaggaaataattaggaaatatttattatgttctatccctagaataatacttattctagcgtcttttcagagaacaaatgagcaaaaaaggtgaaagagcaagcaattcaaataatataaacactcaggttaagaaatctagttatttaaaatctgtacttgggagaaaatattcacaaattatgcatcccacaaggtctaatatacagtatctataagaaacataaacaaatcaacaagaaaaaaatattaaaaagtgggtaaaagacatgaacataat

SEQ ID NO: 302818 - DNA, 590 bp, Homo sapiens
tagaattttttcagggcatctctgcctgccttctggaattgatacaagttgataatatgtaaacaaagactcatacctattgcacccaggccttacaaaagaccaaatcagttacgttattttctaaggtacactaagtatgctttttattttgatgagttacttagcaggacttgtttattcaaacaaactttctgaaaaccctttagaatttctacagttttcaatgattcttattttgcctagtatatattctcaaaattcacagaaattatatgaatcggtttgttctaagcataatttgtatcaaagaggaaataattaggaaatatttattatgttctatccctagaataatacttattctagcgtcttttcagagaacaaatgagcaaaaaaggtgaaagagcaagcaattcaaataatataarcactcaggttaagaaatctagttatttaaaatctgtacttgggagaaaatattcacaaattatgcatcccacaaggtctaatatacagtatctataagaaacataaacaaatcaacaagaaaaaaatattaaaaagtgggtaaaagacatgaacataat

SEQ ID NO: 302819 - DNA, 587 bp, Homo sapiens
acatatatttggccctctatattcatggagaattggttccaggatctctgcagatacaaaaattcatggatgctcaagttccttrtttgaacctccatattcagaaatgtgaaaactgtgtatacagagggccaattgtatttttttgtttctctgcattcttggagatctttgatttgatccagacattgtagattgtacatcgttgtgtgctggatatttatatattcttacaaatactcttgagctgtattctgggacacaattttgtgtttggaaacaatgtgttttttttttatgtattcattggtaaaaagtacaatgttttaaaaatctgttaaaccaaaggagcagttaatctaaggttaaatcttcaccactgctgaggcaacaaccttgtagatactcttcaatgtcctgtaaatttttagattttatgctttgatcaggagaaatagatgtaccctttcctctaatccatttggttggttctttcccttgccttgaaagatttgctcacatttatgttctgatcactgctgaatagtcaagggatacctttgcagatatcagattctctgtgaagt

SEQ ID NO: 302820 - DNA, 534 bp, Homo sapiens
tttttttttacttttgaaactgttttgttaaaaacgaagacacacacacacacattggcctagacctacgcaggctaggctttgggattgttaagatgtcactaggtgataggaatttcccagctccattataatcttgtgagacccccatcatatatatggtctctcattgaccagaacatcctcatgctgtgcatgactgtacacttttgacttatggtctgtatttgcacaagcctgagagtctgtgccgcctaaaattttctgcccttgtgcttctcatgcctcatcctagttctggctctggtttatatgtccttacctgttaattctaacatctgcrtcagctttgggtcagttttgagtgactggttgaagtattcattgtcacttctattttcttgtttctttgtgcacctgctgatttttaattgatgctagatattgtgagttttacattgttaggtgctggatatttttgtactcctacacatagtcttgagctttgtttggggacacaattaagtacttgga

SEQ ID NO: 302821 - DNA, 534 bp, Homo sapiens
tttttttttacttttgaaactgttttgttaaaaacgaagacacacacacacacattggcctagacctacgcaggctaggctttgggattgttaagatgtcactaggtgataggaatttcccagctccattataatcttgtgagacccccatcatatatatggtctctcattgaccagaacatcctcatgctgtgcatgactgtacacttttgacttatggtctgtatttgcacaagcctgagagtctgtgccgcctaaaattttctgcccttgtgcttctcatgcctcatcctagttctggctctggtttatatgtccttacctgttaattctaacatctgcgtcagctttgggtcagttttgagtgactggttgaagtattcattgtcacttctattttcttgtttcyttgtgcacctgctgatttttaattgatgctagatattgtgagttttacattgttaggtgctggatatttttgtactcctacacatagtcttgagctttgtttggggacacaattaagtacttgga

SEQ ID NO: 302822 - DNA, 579 bp, Homo sapiens
ttgtaacaaatctttcaatgttttcattggcatgcaactttaatacattgactagataaattgacctaaattctctttcatccttcatcctgaactcaaaatctcaagcaagctaagcaataataccccggacttcaaggatgaatgttggggcaagcaggaatgatggtggagaaatgagaggtagctgtagaaatcccgagtaatgaatttagtctctaattgtttgtccttttttcctaagacatttctctcactgctttcaattgagcttactcttaagtctcgctccccctcagagacctggtttacaacaaactggacctgttcaactcatttttgtcttcctcgcatgctatttccatttttracttaaattttcagtgaaacgtgctctcttttttcctacaaagctagttaaattcctgcattattctaaatggtcttatttctcttccacagaacatttctcatatttcaaatggggtctttgaaagggaagggtcacagaaatcctattttcttctttttcttccttttttttttttttgttaactataaaagcacgtggattctaga

SEQ ID NO: 302823 - DNA, 479 bp, Homo sapiens
cagggcgagcacaccatgaccactggctaccatgtgaccactgcctgctgtgaagtttgctacttaatcaaaaagtgacagcccaggccaggtgcagtggctcacgcctataatcccagcaccttgggaagccaaggtaagtggatcacctgaggtcagkagttcaagaccagcctgaccaatacggtgaaaccccatctctactaaaaatacaaaaattctgagacaagagaattgcttgaacctgggaggcagaggttgcagtgagctgagatcatgccactgcactccagcctgggcgacagagcaagactccatctcaaaaaaagccaaaacaaaagtgatggcccttggcctggattcctcggctgcagcacaaacccactgcctgcatgacatacatgtgggcccattgcaccgcctccgtgggacctggggacaaggaaaccaaaaaaccatgcagatgctccggctgctac

SEQ ID NO: 302824 - DNA, 479 bp, Homo sapiens
cagggcgagcacaccatgaccactggctaccatgtgaccactgcctgctgtgaagtttgctacttaatcaaaaagtgacagcccaggccaggtgcagtggctcacgcctataatcccagcaccttgggaagccaaggtaagtggatcacctgaggtcaggagttcaagaccagcctgaccaatayggtgaaaccccatctctactaaaaatacaaaaattctgagacaagagaattgcttgaacctgggaggcagaggttgcagtgagctgagatcatgccactgcactccagcctgggcgacagagcaagactccatctcaaaaaaagccaaaacaaaagtgatggcccttggcctggattcctcggctgcagcacaaacccactgcctgcatgacatacatgtgggcccattgcaccgcctccgtgggacctggggacaaggaaaccaaaaaaccatgcagatgctccggctgctac

SEQ ID NO: 302825 - DNA, 605 bp, Homo sapiens
agtcttttatgaaatagttttccagcacgatgagaataaggagggacgtaactgtctttaaaaaattgtaaaattttacacaaatgagtgtgatagygcacaactggagttcctgctacttgggatgcggaggtgggagggttgcttgagcccaggagttcatgtccagcctgggcaacacagcgaggtcctggctataaaaaaaatgtaaagtttctacaaacccatcatacctcatgtgaaaagcttgagttaaatatgtttcataattcaaatttttttaaattttatgaaatatggtacatatattgcatattacacaacacgtgttagtagcctgaaacacacattaatattttttgtaattgaacatataaataaccatgctaagattattaaagacccaaaatgttcttgtttatattaatttttactgccaaataaatttatgccaaacatacaaattaattttcagtttgcaaagccttttggatttctgaaattgtgtatcagggattgtatatccatattctgaagaaaaaatagtttattttgggtctctccatataggaggatcagggtgtaagtcagccagagagacaagg

SEQ ID NO: 302826 - DNA, 605 bp, Homo sapiens
agtcttttatgaaatagttttccagcacgatgagaataaggagggacgtaactgtctttaaaaaattgtaaaattttacacaaatgagtgtgatagcgcacaactggagttcctgctacttgggatgcggagrtgggagggttgcttgagcccaggagttcatgtccagcctgggcaacacagcgaggtcctggctataaaaaaaatgtaaagtttctacaaacccatcatacctcatgtgaaaagcttgagttaaatatgtttcataattcaaatttttttaaattttatgaaatatggtacatatattgcatattacacaacacgtgttagtagcctgaaacacacattaatattttttgtaattgaacatataaataaccatgctaagattattaaagacccaaaatgttcttgtttatattaatttttactgccaaataaatttatgccaaacatacaaattaattttcagtttgcaaagccttttggatttctgaaattgtgtatcagggattgtatatccatattctgaagaaaaaatagtttattttgggtctctccatataggaggatcagggtgtaagtcagccagagagacaagg

SEQ ID NO: 302827 - DNA, 605 bp, Homo sapiens
agtcttttatgaaatagttttccagcacgatgagaataaggagggacgtaactgtctttaaaaaattgtaaaattttacacaaatgagtgtgatagcgcacaactggagttcctgctacttgggatgcggaggtgggagggttgcttgagcccaggrgttcatgtccagcctgggcaacacagcgaggtcctggctataaaaaaaatgtaaagtttctacaaacccatcatacctcatgtgaaaagcttgagttaaatatgtttcataattcaaatttttttaaattttatgaaatatggtacatatattgcatattacacaacacgtgttagtagcctgaaacacacattaatattttttgtaattgaacatataaataaccatgctaagattattaaagacccaaaatgttcttgtttatattaatttttactgccaaataaatttatgccaaacatacaaattaattttcagtttgcaaagccttttggatttctgaaattgtgtatcagggattgtatatccatattctgaagaaaaaatagtttattttgggtctctccatataggaggatcagggtgtaagtcagccagagagacaagg

SEQ ID NO: 302828 - DNA, 488 bp, Homo sapiens
tggtttgacagttttcatggaactcactggttggttggccagtaatttctataactattagtaatgggttattaaatcaacacaaagacaactagtggcagtagcggtagtaattaaaatactattactaataacaagaatgatagttaacacatattcagtgggtattatgtgccagacattgctacaagcatttggcagttatttactcagtgatcatatgagcaaatctgtaagtgggtaattttagtattctccttttgaagctgataggagtggccaaagataaccttgattcacagctagaaagtaaacgttatcatcctgtgagatgaagagccttagatcattctacattatgtttgatatgtaacaaaacttttggctgggtacagaagctcatrcttacaatgccagcaccttgggagggcagagccagaggagtgcttgagcccaggagatctagaccatcctgagcaacatatgga

SEQ ID NO: 302829 - DNA, 552 bp, Homo sapiens
ataggaattcaattttgtctctaatttttaatgaagtagcataacataatatgctaggtgtatttttttaaatttagatctctctcaaaatacttgttatacaccatatcagttaaagtacttagaaactgctcatcatatttcactttagttctttccttgaatgtatacctaggtgaattctggcagagataaatttggggcagagcctaggatctaaagaatgtgaaaaaagttccctatgtccgaagggaaaatcagcaaaaggtaaaagcaaacaaaaaaatgaagtgtaggaatagaggatttaaaatgttatcctctyttgctttctcagatggccttgtttgtgtgaagcacaaaagcagcccctgtgtgtgactaatgaatcttccaaggcattctggggactgtgttgtcagcccttttaatggcctattaagcacaggattgaatagattaagcatgcagccgtccaaattagaccttgagtaatctgactgaccatgttaggccttgtgtgacacagcatcccttaggctgatgttaagg

SEQ ID NO: 302830 - DNA, 558 bp, Homo sapiens
aacacagtccttcccaggacaaaataagccaacaaatatggaaggcaaagtttagttggatggagagtgtcatagaacaagtacttcactcaaagctcaattctgcttgttaataacaatgtgaccttggacaagttatttttcttttcttttttttctttttttttttgagacagagtttcactcttycacccaggctggattgcaatggcacaatcttggttcactgcaacctctgcctcccgggttcaagtgattcataaattacccagactcaggtagttcctttcagcaatgagagaatggactaatacaggctccttcatgagcttctcttcctgtctccttttcatgtttcataatctcgaggcctcgccattctcttatccattcaaaattacttttgagtgcttactttgtgtaagacactatgccatgggctactagactagtacactgttgaataaaacatgtgttttgctcttaaaaaaaaagcttataggttaattagagagaagataataaaagttaatatttattgggcaattattctgtgct

SEQ ID NO: 302831 - DNA, 632 bp, Homo sapiens
ggagggggctatcatttgctcttccatttctttcttggtgctagctgtgacatamgaagtcctaccatccaatgagaacttggcattggtgtggagaaatccttgcaaataaacctgtgggaataatacactcctaacactctagaaacctgggttgagttaaccattaatggtgactgtattagctcattctcacactgctataaggacatacctgagactgggtaatttataaagggaagaggttgaattgactagcagttcagtagggctggggaggcctcatgaaacatacagtcatggcagaaggggaagcaaacatgtccttcttcacatggtggcaggagagagaagaatgagagccaagcgacggaaaaagcctctgataaaaccatcagatctcatgagaacttactcactatctgtgagaatagcatgggggaaactgcccccatgattcaattacctcccactaggtccctcccacgacaattggggattatgggaactacaattcaagatgagatttgggtgaggacacagccaccatataataactttgacatctgatctgtatcagtctatttttcgcatactgtctgcattttatcccagggcccatcagattaaat

SEQ ID NO: 302832 - DNA, 632 bp, Homo sapiens
ggagggggctatcatttgctcttccatttctttcttggtgctagctgtgacataagaagtcctaccatccaatgagaacttggcattggtgtggagaaatccttgcaaataaacctgtgggaataatacactcctaacactctagaaacctgggttgagttaaccattaatggtgactgtattagctcattctcacactgctataaggacatacctgagactgggtaatttataaagggaagaggttgaattgactagcagttcagtagggctggggaggcctcatgaaacatacagtcatggcagaaggggaagcaaacatgtccttcttcacatggtggcaggagagagaagaatgagagccaagcgacggaaaaagcctctgataaaaccatcagatctcatgagaacttactcactatctgtgagaatagcatgggggaaactgcccccatgattcaattacctcccactaggtccctcccacgacaattggggattatgggaactacaattcaagatgagatttgggtgaggacacagccaccatatwataactttgacatctgatctgtatcagtctatttttcgcatactgtctgcattttatcccagggcccatcagattaaat

SEQ ID NO: 302833 - DNA, 587 bp, Homo sapiens
aattacagtaagtggccaagcagttgaatttgcttttacacgtcagtgggtactttgtacttttatagtatcaattaccttagatcttttatcttttaccctcgaatgtaagtattgttcacaactcttcctgacgatgtaacactctgttgaacaaactcagggataaaatcacaaaatgttaccaagaactccatagttgaattttgactagggttcttgtgtatcttggtcatttgaaggatgctagttatgggacaataaaatagtatcacttggtttcatcaagaattgttcttaccctatgctataaaaacctgaacattaattgctggtatcagacccatggggggtctctgcaatggagatcatatttaagataccatcagctagtgtcccaccacgaggacgtttgkagtagaagctctagcttctgtgtatgatggacatggaacatatgctgaataatattccattgtatggatttttaaaatcacatttatccatttgtcagttaatggacacttgagttgtttacatttttggctaataagagaaatgctgctttgaatgatcatacaggtttt

SEQ ID NO: 302834 - DNA, 562 bp, Homo sapiens
aatcaaatataccatcctatgtgccaagacattagaaaccaatataaaaggagaaatctgtgtattatagaatggatatgagaattataagttcatttatcaaaaaagattacctgttcacgattcctaatgagagatcccatttggtgaacatttggctaataactcagcagctgcggaacattattacttaatctacttatttccaaagatgtgtaatctatgtgctataaacaaaaatgcaggccaaacaaagaaatgkgtctctatgtttctaactatttcaaattaatgacagaatgtacaaaaacaatattcacctatgagccccctgtattcccagtgtaatgctaagtccagatcgtcagtaacaaggcatcttggagtataaaagcaattaggcagataattaaaggaaaagcaatcatttgtcccctcctgcctttttacctctttatttcttcaattatcagaaaattaacatgatttttttctttagaaagtgaactgtatgagtaattgctttaattttctgcttgatttttccagaaagtcccatcaa

SEQ ID NO: 302835 - DNA, 562 bp, Homo sapiens
aatcaaatataccatcctatgtgccaagacattagaaaccaatataaaaggagaaatctgtgtattatagaatggatatgagaattataagttcatttatcaaaaaagattacctgttcacgattcctaatgagagatcccatttggtgaacatttggctaataactcagcagctgcggaacattattacttaatctacttatttccaaagatgtgtaatctatgtgctataaacaaaaatgcaggccaaacaaagaaatgtgtctctatgtttctaactatttcaaattaatgacagaatgtacaaaaacaatattcacctatgagccccctgtattcccagtgtaatgctaagtccagatcgtcagtaacaaggcatcttggagtataaaagcaattaggcagataattaaaggaaaagcaatcatttgtcccctcctgcmtttttacctctttatttcttcaattatcagaaaattaacatgatttttttctttagaaagtgaactgtatgagtaattgctttaattttctgcttgatttttccagaaagtcccatcaa

SEQ ID NO: 302836 - DNA, 547 bp, Homo sapiens
ataagccattgacaaagtaaagctaacgagaaataatttgggcaggacaatgcagtctctctatttatgtatggtgatttcactttcagggcaaactgaaagcagtggcatcaccctgaggcaatcagcatcccaattcatcaggatgctgggatgaaagctttgtagatcctgaatttgcccaacaayccactgaatgcttttccaaattgtccctatcaatcggtaagattcgttaataggaagaagcctggggtctatttccaggatggaagattgccttttctgtctacataaagctgtttaaatgatatcccatggtttttatagtaggtatacttaactcataacgttcaaggaagaatcccttaggcaaaacattgtgcataaaaccatgaggagtcaatggagataattatacaagtagctactggcaagacaatttgccacagcagcaatgaggctaaccttaggttggacatggttgttaagaaaatcactgaaatggatattgtagaaacgggaagtcattagaacatttaagaaa

SEQ ID NO: 302837 - DNA, 423 bp, Homo sapiens
gtcaagttggtggattgcaggatgtaaagtattgttcctgaatgtgtctgtgagggtgttgccagagattaacatttgagtcagtagactggaagaagaggaccaccctcaatgtgggtgggcagcatccagcgtggctagaaaaagcaggcggaagaaggtgggagaaactgagttgctaagtcttctggttttcatctttctcccgtgctgggtgcttcctgcccttgaacatcagactccaggttctttggcctctggactcttggaattaacatgagtggcttgctggggaatcttcgtatggccacagactgaaggctgcactgttggcttccctacttttaasgttttggcacttggacccatccaccactggctttcctgctcctcagcgtgcagatggcctatcgtaggacttga

SEQ ID NO: 302838 - DNA, 621 bp, Homo sapiens
gttaacaaatcaacacctcacatacttatcttttgtgatgaaaacacctaaaatctacccttttagctattttaaaatatgcaatgaattattgtttattattgtcaccatgctatgcaatagattattaaaactcattcctcttgtctaactaaaacttcgtatcctttgatcaacagctccctttacccaaccacaccccttcctcggcccttggtgactaccgttcttctgtgagctcaccttttcacattttctttatccattcttctgatgatggacccctagatctcttccacatcttagctattgtgaataacatcgtaatgaacatgggagtgcagatatttcttctgcatatcaacttaaattcctttcgagatatatccagcagtgggattgctggatcatatggytgttctatttttagttttttgaggaacctccacactgtgctttataatggttctattaatttacattcccacagacagtgcacaaggattcccttttcttcacaccctcaccagcattcttcacaccctcaccaaaatgtctatttgctaatagccattctaacaggtgtgaggtgatattccattgtggttttaatttgcattt

SEQ ID NO: 302839 - DNA, 544 bp, Homo sapiens
ttttcaggcctgcttgcaaccctgcagtgctctccccagaaagcctcattatgtgagtagtaaatcccttcaaaccctcctgacgtgtgaggtccatctcacctatgaaggacatctacaaaagaaacaaatcagtttcatgggctgggtagggaggatgaaaggaggtctaaggaatttatttggtgcaaataagtttgagttgcctgttagatatcaggatgaagttgttatgtctgggtacatagatacaagtgtctggagtttagaagttaatcctaggctttagatagaaatttgagagtcattagcttgtggatggttcctaaaaccacagactggagagggtcacctagggaatgaacatagagccgggagagagtacaagaactaagccctggtacttcagccattaaaggttatagaggtgagaaggagycagaaaaaccttctgagaaagagtttgtgccttgtgacccaggaggagaatcaagaaaagtggtgccctcagaagccaagtgaatatattaaatggagaagggca

SEQ ID NO: 302840 - DNA, 573 bp, Homo sapiens
gtcctgaccagaattttgagcaacgaataaaattgcmaagattcctgccctcatagagcttctattctaaattctgcatgcaaaaggaggggtcttgataaacattacaggtatttatttgggatccaaagaactgtctctgactagggtagagatgaattggaaacaaactgaccctcacaagcaggaaacctcaagtttgagtcatttccacacctcattgaattaaggtgatccacctccaacccagctgcctgccagaagtggatgtagatcatttctggagaaagagaatccttctaagattctcaaattatttctataaatttttcatgaaaaaatattgggcaaaaattactatgcatgtaagaaaataacatttgtatgaaaaacaagagaaagaaaatatacaaaaaaacagacacacaggaataaaggtactggaatttcagatatgacttgaaaatctttatgattaacatgttcaggaaattaaagataaggaggtgaatttggcagaaacataaaactattttaaaaatttaaattataaaactgaaaataaaataatat

SEQ ID NO: 302841 - DNA, 617 bp, Homo sapiens
tagacctctcctcctggcaaaggcatcccagagttaatctgaaaaactagttcaggccatgatgggaaggggagcagctagacatgcctcattataacctccttccttttggaatgactgagaagagactctttaagtcataagaaacatttactctctgaagcctactatctggaggctttakctacatgataaattcttggtctccacaatcccttatcacaacccatgcattcctttctttatttttcttttgagacagtgtcttgctctgttgcccaggccggagtgcagtggtgcgatcttggctcactgccacctctgctcctgggtgcaaggattcttctgcctcagcctcttgagtagctggatctacaggccccagaccttgttattcataataattctctcaacaaattgccaatcagaaaatccttcaatctacctgtgatctggaagcccctgctttgagttgtccagcccttctggaccaaaccaatatacatcttacatatgtttatggatgtctcatgtctctctaaaatgtataaaaccaagctctaccctcatcaccttgggcacatgtcatcacgacctcctgaggctgtgtcacaagc

SEQ ID NO: 302842 - DNA, 586 bp, Homo sapiens
agctatctttattgctcaaaacaacaggacaattttctggagcctgggagctcccttctccatagaatccccaatctcccaaaatctggttgagatttaaagtttatttagctgtacagctccttttctggagttttactcacttccaacaaggaaggcgcttgttcctgcttccatggcaatagagaggaggcaactgctttctggagtttcagctcacttccaatagggaaggtgaatttgagggtttttttcccccctgctgctaggatggtagatagcagtcttgaacctgggccccattcctgggtaagtagctgaattgggattttgtcttgaaaattctcctaaataactaaaagttaaaattgacaaccaactgstcttaatttctccttaacattagagcactaagtaatcattgtttgtttttttgttttgcttgctgttgttctggtcttcctttggatttgactggctctacccaacttggtcaaatctgattaggaattccaaattatggagaacaaggcctttgaattggctaaaattccttgcaactgaaaaataaaaacatccagttggt

SEQ ID NO: 302843 - DNA, 500 bp, Homo sapiens
ggttagaactatattttcttataatttgatttactcagtgaaattgcaagaagcttttaatttttaaaatctattatccctttctttttaaaattcttcagattgatacctcagaagttcaacttctgctgtaccctgctgcttcagctctttctccattttagaaggcctgggatggtaactctctcccacttttgttggctactgtgtwattttttttaattaatagtctaaagtaagggaaaatttttgaaaactggcaaatggcaaatgcaaactcttataggatctgcctctgtctgtgtgtttgttatatctatatatttatatgtcatgtggaagtggtatttcactacccattatatgaaaaagctctaatcaattggcttgaaaaacaaaagtaagtgcttctcagactaatagaatctagctcagatgctttttagttcatatgactagcaatctttggtaagattaatttgttaaattaaatctcaatt

SEQ ID NO: 302844 - DNA, 569 bp, Homo sapiens
gaaataagaaacctttgactactgggtggccatgtggtcacccatggtatggagttgcagcagggctgtattcagttactaaaagcaaaagtaaccagtggaatttagatgatggatcatactctaaattccaaaatccaaaagctattcataaatattttgrttttatgacaacatagttatctgcataagtttagtaagaatcccttcttttgaaacaagtcacaattggagacgctggttattttaccaagggtttgactggactaacacattttcaggtaaagttccagcaaagccaacttgaaaagagcctatatggccaatcaattcttgttgcactttatgcaaataatcaagccaagtataataagcctaaaacttattttgcacacaaattggtcttattatttctctttagtagaaaatgagggctaaaaaaggaaattgtttcaaaggaaaactgtaccacatattactagattctagccctgacttttgagtgcagattgaaaaatgaattatttcttggctacaataatcatctaaagagcacagcaccaggttat

SEQ ID NO: 302845 - DNA, 621 bp, Homo sapiens
tgcctcatgcaggtccaaaatctagtggggcatcaaaccttaaagctccagaatgatctcctttgactccatgtctcacatccaggtcacacccccatggccttgggcagctccacccctgtggctttgcaagttatagcccccctcctagcttccttcacagactgtcattgagtgtctgtggcttttccaggygtgcaaggcaagctgttggcagatctaccattttggggtctggaggatggtgactgtcttctcacaggtccactaggcagtgccccagtggggactcagtgtgggggctccaaccccacattttccttctgcactgccctagcagaggttctccatcagggttcagccctggcagcaaacttctgcctagacatccaggcatttccacacatcatctaaaatctaagcagagattcccaaacttcaattcttgacttctgtgcacctacaggcccaacaccatatgtaagccaccaaggcttagggcttgcaccctctgaagcaatggcctgagctgtacattggccccttttagctgtggctggagctgaagcaactgggatacagggcaccatgtcccaaagctgcatagagcaggggggcccg

SEQ ID NO: 302846 - DNA, 621 bp, Homo sapiens
tgcctcatgcaggtccaaaatctagtggggcatcaaaccttaaagctccagaatgatctcctttgactccatgtctcacatccaggtcacacccccatggccttgggcagctccacccctgtggctttgcaagttatagcccccctcctagcttccttcacagactgtcattgagtgtctgtggcttttccaggcgtgcaaggcaagctgttggcagatctaccattttggggtctggaggatggtgactgtcttctcacaggtccactaggcagtgccccagtggggactcagtgtgggggctccaaccccacattttccttctgcactgccctagcagaggttctccatcagggttcagcccyggcagcaaacttctgcctagacatccaggcatttccacacatcatctaaaatctaagcagagattcccaaacttcaattcttgacttctgtgcacctacaggcccaacaccatatgtaagccaccaaggcttagggcttgcaccctctgaagcaatggcctgagctgtacattggccccttttagctgtggctggagctgaagcaactgggatacagggcaccatgtcccaaagctgcatagagcaggggggcccg

SEQ ID NO: 302847 - DNA, 400 bp, Homo sapiens
agggacaattgttaaaggcattytttctttcttttcttccttacagtttccagactagctgataaattacctaaaatgtcatcacatgagagtgacctacattcagtatcttcacaagattaaataaagatatctcatgaaggcaacttatagccaatcaatagtttgttattttaatgaacaatgtaggaactgctttctttttttcctttaaaaactcatttttgatagctgctaattagagcatatattcagggaaaattgaatctgtgtctctcaggttgcagtcctcaaatttggtccaaataaactctctacttattttaattttgcctcagttcctttctttaggttgacaactttgaggccaacttcatatggagaaaataagataacctca

SEQ ID NO: 302848 - DNA, 551 bp, Homo sapiens
cgataataggagtcaaagggcagatgtgatttatgacaaggtaagacagcagagaagtgggaaaggatagccttttaaataaatgatgcaggatcctttggatagccacatggatcagtacctaacactaggaaccaytggtataagcaaaaacatatatgaatctcacaaatataaggttgagtcaaagaagccagatgaagagacagatgaagagagttcctgtgataccatgtcatttctactatgttcataatcagacaaagtaattaacagtgttagaaatcagaacagtgtttaccttgcagggaagaaaaacgaagtggtgattggggaatggcacatgagagtttctgaagtgctgataatgttctatttcttgatttgcatgtcggtgtgttcactttgtgataattcattgcgttgtgtcttatgatttgtgcattttctgctaatatgttgtacttcaactaaaaaaattagaaaactaatactaatactaataggaatagattaacataaacaaaagtagattaaaaattgaggtaaca

SEQ ID NO: 302849 - DNA, 521 bp, Homo sapiens
gatgcttacatgtctattgcccatcataataaacagaaattactaatacaactgaagccccagaatacgcctcccagataatattccctccccatagacatagccaacactttaaattatttgtttattacttccctgttttcccttatgaacatccaaactattatactttactggagctttaggaaattggtcgacatatrttgtagcttataagcttaaccaataataattggttatataactggttagattccataactgtgcagctttgtagacacaaatggtaaagatatcaaacagtgtgtttctggacttgcctttatttcattgatgtggtttggctgtgtccccacccaaatctcatcttgaattgtatctcccacaattcccatgtgttgtgtaagggagccagtgggagaaaagtgaatcatgggggcaggtttttcccatgctgttcttgtgatagtgaataagtctcatgatatctgatggttttataaaaggcagctcccctgcac

SEQ ID NO: 302850 - DNA, 521 bp, Homo sapiens
gatgcttacatgtctattgcccatcataataaacagaaattactaatacaactgaagccccagaatacgcctcccagataatattccctccccatagacatagccaacactttaaattatttgtttattacttccctgttttcccttatgaacatccaaactattatactttactggagctttaggaaattggtcgacatatattgtagcttataagcttaaccaataataattggttatataactggttagattccataactgtgcagctttgtagacacaaatggtaaagatatcaaacrgtgtgtttctggacttgcctttatttcattgatgtggtttggctgtgtccccacccaaatctcatcttgaattgtatctcccacaattcccatgtgttgtgtaagggagccagtgggagaaaagtgaatcatgggggcaggtttttcccatgctgttcttgtgatagtgaataagtctcatgatatctgatggttttataaaaggcagctcccctgcac

SEQ ID NO: 302851 - DNA, 572 bp, Homo sapiens
gaacaccttgttcatatttcctggtacttctctagggtatataaacctagaaatgaagtttctctgtttcagggtatgcccatttcaaatttgctgggaaatttcaaaatatttttctgtttgtgctattctgcattcctaccagcagtgcataaaaatggcctttgttttaaatcactgccaatgtttcagatttacagggatttaaaaaatattcttcwtcttagactaggtaataattaacaataaaaaaagaagaaaaatattttccaatctagtgagtgtaaactatcacagtatgactgagaaatttgcattctcctggtaattaatgaggctgagcatcttgggatgagatgtttattggccatttatatttccttataacatgaggtaggaatccccaatagccaggagtcctggacagtgccccagtacaggatggctcatattcctgagagacatttggaaatgtcataagttgctctataaattaccacattctggataagctggtaattttgttgtccacagtaattcaccaatcccagcaattatttcccagcttgaga

SEQ ID NO: 302852 - DNA, 484 bp, Homo sapiens
cctgaatagcagaggaagtggttctatggaagggaacaggacagcagtaaagaatgtccaacagtacagacgactcggaattctggggaccactgagaactcatgcttctacctgttttaccttttaaacattttcctgctcaccccagtggtgggcccctgagatggagcttggagcattgagatgctgggtaactgtccttgggaaaatcacatgctactaaagactctccccaaccctctttagcatgtcaggattaagattttccggattttgctaacactaaagcaatcaccctgaattcattttgtaaagaatatatttgaagcaaaatcattagagagaaggatttgcctatcacaaggcagggatgaccgaagccrtcatccctttctgtcagagcttgcctgctctctaataatataagaaaattttagaaatacatgactcactttaaacaacgggtatatttctgcgtaatat

SEQ ID NO: 302853 - DNA, 494 bp, Homo sapiens
aagaaatataggaaatacaaaaaaatcctgcctctaattctctctctgatttctaaaaattctctcaaattgcttcagaaactcatttcaatgacttctaatcatgtaatttcagaaactgttagctttcaaacctcttagtccaatagaaagtagtttcaagttttataaagaatcacacggagaatgcctttgaaagtcattttagatttgcttaaaatatagacctgctaagaaaaacattttatacaagaaaaataaaatactgattttaaatataaacaaatacctcccatttttgcatatttgtgctgtagcaaatgaaaagcactgaatttaggacaaacacaaacraagaaactaggttaaaactgacattgattgactccatacctttgtttccttgcttgtttttaaattatacattgggtcgaacatctttgcatatattaaatcttttccaatatttaatcatggtgagggtgatggaatgt

SEQ ID NO: 302854 - DNA, 626 bp, Homo sapiens
cttaaaatggtgagtttagtatgtttattactatggatattgatctatttgtacttgtttcttttgtgttacttttgctttgtaattgtatgactttttctaagctgatgcattttaaggaattgttgaagtttattgcatttatgtttatctaattttatttattcctgtcatttgattgaatgcattcagtgtagattttactctttcagtgattaccctcaaaattttatcatgcatattctctttaaaaatttgaataaacctaaacatctcttatccttccaaacaataaaatatctgtggaataatttaatttgcaaaactccctttctatttgcatgygatttaattcttctttcttagctccacaaattagacttcattgtctgcttttccccccatgaatatacagcataattataatttaatttgcctatcattctttattgtatctctgatgttctccttgaattatttacctatttatgatcctttagaaattatcttatatggttctctttgtgttatcacatgtgggtgtttatacacccacatttttaaatctgtaaaagtctttgcctcacccttattcttaaaggattttttttttctggatattcgat

SEQ ID NO: 302855 - DNA, 578 bp, Homo sapiens
atgcaaagccaattggactcagcatcaaaatagcttatggaataatatcaaatttgatatctggtaaaacttacacagcaattgttaaatcatctttatgcctatttttatcatccatagtattaatctaaaaatgtaaaagtgtaacaatgtgatagattgaaagatctctaaataatttatattttatataactttatgcataaattgacaaaagttaaaagtatttgcattgttttaatgttggaaacaatgttccaagatgccataaaaataataaaaggacagaagtttcttgcgcattcaaaatcatttattatgcatttacaataygcagctgttgtaaacactgtggaattaataatggattttggtctctgcattgaataagttcacattagagggacaattgtaaacacagggtataattcagtttgacaattactgtgatagacattgcttttgatactagcaaggaaaaacccattggtggattaccaaaagtttcatgaggatatgtctgatctatacatcttataaaattaaaattttaaatatatattaattcaaatagtttt

SEQ ID NO: 302856 - DNA, 559 bp, Homo sapiens
ttctcatttgacaaatttgacatgttttcatctattatttctttaaggactattttgatcttgcttcactgttcattgggattccaatgatattaatgttaaytcatttgttactgtcccattggttcaagggcctttgtttattttttatttcctccttgctgttcagaataggtaagtttttttgttcaggacttgagttcacttaatttatcttctatcattctcactccactactgagtttatcaagtgagttttgttattattatcatatatttcagctctgtaattttcaggtgaatttttttaaacttccaattcactgttaagatttttcatttcttaatttgtttacaaagcatttgtaattgcttgttagatcattttcataatagcagctttatttttgtatttttaaatttttcttctttttttccaacttttattttttactcaagggatacatgtgtaggtttgttacatgggtaaattgcatatcatgtggctttggtatacagataaaactgacacctagataatcatcgtaatacctgatat

SEQ ID NO: 302857 - DNA, 639 bp, Homo sapiens
aatacaatttaaaaccacaatgaggtgccaatgtacatgtattagaatggctataattaagaaaggtttgatctggtgcagtggctyacacctatagtcccaggtatttgggaggctgaggcagaaggatcccttgaggccaggagtttgagacaaccctgggcagtattttgagaccccatctcttaaaaaacaaattggaacagtaggaatttgcctgttttgtacaaattttaatgggacttaaatttccacagctgcttaaaaaattaaaaatacagttacaaaaacccctcagttttacccaatacaaataaaattacatggccaccaataatttcacatatacattcatagtatctatattcataatgattaaaatggaaaataaaccataagtttatcaacatttatacaaataaaaagatgtagtatactattcagcaatataaaggaaaaagttatgcatgcaaaaacatgaaaaaaatctcaaaagcattatgctaaccaaaagaaaataagaataaaagaaaacatgctttatgatttcattaatatgaatttctaggacagttaagctaatctataatagcataaatgaaatctatgctgggccctggtgagggcataatggtggaa

SEQ ID NO: 302858 - DNA, 639 bp, Homo sapiens
aatacaatttaaaaccacaatgaggtgccaatgtacatgtattagaatggctataattaagaaaggtttgatctggtgcagtggctcacacctatagtcccaggtatttgggaggctgaggcagaaggatcccttgagrccaggagtttgagacaaccctgggcagtattttgagaccccatctcttaaaaaacaaattggaacagtaggaatttgcctgttttgtacaaattttaatgggacttaaatttccacagctgcttaaaaaattaaaaatacagttacaaaaacccctcagttttacccaatacaaataaaattacatggccaccaataatttcacatatacattcatagtatctatattcataatgattaaaatggaaaataaaccataagtttatcaacatttatacaaataaaaagatgtagtatactattcagcaatataaaggaaaaagttatgcatgcaaaaacatgaaaaaaatctcaaaagcattatgctaaccaaaagaaaataagaataaaagaaaacatgctttatgatttcattaatatgaatttctaggacagttaagctaatctataatagcataaatgaaatctatgctgggccctggtgagggcataatggtggaa

SEQ ID NO: 302859 - DNA, 639 bp, Homo sapiens
aatacaatttaaaaccacaatgaggtgccaatgtacatgtattagaatggctataattaagaaaggtttgatctggtgcagtggctcacacctatagtcccaggtatttgggaggctgaggcagaaggatcccttgaggccaggagtttgagacaaccctgggcagtattttgagaccccatctcttaaaaaacaaattggaacagtaggaatttgcctgttttgtacaaattttaatgggacttaaatttccacagctgcttaaaaaattaaaaatacagttacaaaaacccctcagttttacccaatacaaataaaattacatggccaccaataatttcacatatacattcatagtatctatattcataatgattaaaatggaaaataaaccatawgtttatcaacatttatacaaataaaaagatgtagtatactattcagcaatataaaggaaaaagttatgcatgcaaaaacatgaaaaaaatctcaaaagcattatgctaaccaaaagaaaataagaataaaagaaaacatgctttatgatttcattaatatgaatttctaggacagttaagctaatctataatagcataaatgaaatctatgctgggccctggtgagggcataatggtggaa

SEQ ID NO: 302860 - DNA, 639 bp, Homo sapiens
aatacaatttaaaaccacaatgaggtgccaatgtacatgtattagaatggctataattaagaaaggtttgatctggtgcagtggctcacacctatagtcccaggtatttgggaggctgaggcagaaggatcccttgaggccaggagtttgagacaaccctgggcagtattttgagaccccatctcttaaaaaacaaattggaacagtaggaatttgcctgttttgtacaaattttaatgggacttaaatttccacagctgcttaaaaaattaaaaatacagttacaaaaacccctcagttttacccaatacaaataaaattacatggccaccaataatttcacatatacattcatagtatctatattcataatgattaaaatggaaaataaaccataagtttatcaacatttatacaaataaaaagatrtagtatactattcagcaatataaaggaaaaagttatgcatgcaaaaacatgaaaaaaatctcaaaagcattatgctaaccaaaagaaaataagaataaaagaaaacatgctttatgatttcattaatatgaatttctaggacagttaagctaatctataatagcataaatgaaatctatgctgggccctggtgagggcataatggtggaa

SEQ ID NO: 302861 - DNA, 605 bp, Homo sapiens
ggaattgttgatcatatggtagttctctttttaggtttttgaggaaattccatactattttcaaaaatgcttgtactagttaacatccccaacagtgtacaaggactccatttacttcaggtactcaccaacacttgttatattttgtcttttttgtaatagtcattcaaaagagcttgataaaatatatcatagtgatttgtatttgcatttatttgatgattagagakgttgagcattttttaacatatcttttgaccattcatatgtcttctcttgagatacgtctggccaggttctttgctaattttataatcaggatatttgttttcttgctgttgaattatttagttctttatatattttagatttttgtcctttatcagagatatatggtttgctattatgttctcttaatctgtgggttgtctgttcactttgttcattgtttactttgaagaagctttttagtttcatgcaatcaattcttaaaatttatggaggcttttttttgttctttcctgtagaatgtttcatatttattagagaaggatgtatattctgctgtgtttttttgacatgttctatagatatctcttaggtct

SEQ ID NO: 302862 - DNA, 605 bp, Homo sapiens
ggaattgttgatcatatggtagttctctttttaggtttttgaggaaattccatactattttcaaaaatgcttgtactagttaacatccccaacagtgtacaaggactccatttacttcaggtactcaccaacacttgttatattttgtcttttttgtaatagtcattcaaaagagcttgataaaatatatcatagtgatttgtatttgcatttatttgatgattagagatgttgagcattttttaacatatcttttgaccattcatatgtcttctcttgagatacgtctggccaggttctttgctaattttataatcaggatatttgttttcttgctgttgaattatttagttctttatatattttagatttttgtcctttatcagagatayatggtttgctattatgttctcttaatctgtgggttgtctgttcactttgttcattgtttactttgaagaagctttttagtttcatgcaatcaattcttaaaatttatggaggcttttttttgttctttcctgtagaatgtttcatatttattagagaaggatgtatattctgctgtgtttttttgacatgttctatagatatctcttaggtct

SEQ ID NO: 302863 - DNA, 574 bp, Homo sapiens
actttctcagcatattttggcatacaaaagaaattcagattgtcacacatttctatagttatgctttggaataaacaaggatattttatgattactattccgagggtgtttcttgctgccagttacatgtgcaatccaggaaacagcataaacatgtattacttttttcatgtaggaaatggaagctatttattagttcttgtttaagcagtccaatyctttctgtcaaagtgccaaaataaagtcccttggattcatggtaacgaatcctgtaacaaaaaatatctaaaagggcattaaaaactaaagagaaattgcatcttatctaagaaattcaaaaagtgacagggcacataatgctaaggaaatggcagaaccaatctatttgtcagtgtttcccttctgtcttgtgctgccttttatgttagaaatgcaagaacagctgtgggtggagggcattgtgtgcccatcattatgccatttgataatttttgtaaaattgatttacttcttcctggggcattcattttcagcctcagccacctgtatttatataagcagctaagtatgtaga

SEQ ID NO: 302864 - DNA, 552 bp, Homo sapiens
acgttttcaaaacattcattttacaagatttggttaagtttatcagaaaaaatagatgaggaaataattgagaaacttgttcaagttgacaagctaaaaaaatgtatagtagattaagatcagcaaacatgttaccaaattttcttcattcaagcagataacatggtgtctatctgagaaccttatataggttctttaggttttcccaggcttcaccttcytcatctgtaaaactgagtagcttgatcagatattttttcaggcccatctcgtagtctaaaagtctatctttattcttatctttagagaaattgttgctccttagtgtccacattatcacgatgcttgatgcttgttatttgaaacagggaaggtatgattcctgaaataaggaaaaagtatagtaagctattatgttataatttcaaacaaattttaaacgaaatattgaagttgtctacaatacccagagggaaactttttgagctgattgagtttatccatggtcttgaaaaaacaatagggtctaggtagacaaaagagtggtcaatg

SEQ ID NO: 302865 - DNA, 615 bp, Homo sapiens
aatcaagcaagagaaagaaataaaaagcatccaacttggaaaagagaaaggcaacttgtctctctttgcagatgacctgattttatatatagaaaagccactgaaaaactcttggaattgatcaattcagtaatgttgcaaaatacaaaatcaacatacaaaaataagaagtgtttctatgcaccaataatgagctgtttgaaaacaaaatatcaagaaagcaatcccatttacaagagctaaaaaattaccaggaaattaatttgcccaaggaaatgaaagacctcaacaaggtaaactacaaaacactgaagaaagaaattaaaaagaacacaaacaaatggaaagacatctcatgctcatgaatggaaagaattagttttgttaaaatgaccatgccacrcaaagcaatttccagaatcgatacagtctctgtcaaaattcccatggcatagttcacaataacagaaaaaagaaatcctaaaattcatacagaaccccacagacccaaacagctaaaacaatcatgagcaaaataaataaatacataaagctggaggcatcacatagctgatttcaaaatactccacaaagatatagtaatcaaacagcatg

SEQ ID NO: 302866 - DNA, 567 bp, Homo sapiens
gcagcatgaaaatggactaatacacaactcatacagtttttttttttttccccccagaaacccaatctctggcctatagctcagagaagtagctttcacgttggtggtaaaaccgtgtaactcaggttaatttatttcagcatctaaacaattaaaactgacataaagtggatcccccattggagttgtattatataagtgcattttcttatatgtacaaagtttatgagagttaggtaatgatcatgattagcagaatacataaaaacaagtgatagagatttttctgtaattttcaggctttatcaagaaatgatgcctcggatattttaggatatgatgtgatattttgaagcacaaaattattttgatttcacaaaccaaygcccataagacttgttcatgtttgcatcacataaacacaggtaatgtgataaataatgtttttccacattacccataaacatgtattaaatgctacattattggagctatttttttcattggtagaaaatagctaaatcctcaaatttcatgtcagatgattaaaagaatatatcgtacact

SEQ ID NO: 302867 - DNA, 617 bp, Homo sapiens
aaaatctttcttatctgatccaggagatatttacatgattgttcctagcaacattgtaacaataataaatgttaacacaaacccaaatcttcatcaacaataaaataggtaagtaaattgttcaaaaactaaagataatgtcacatagtagtggaaattagggaactacatacatctcaaaatattaatatggagtaattaagtgaatcacaaaaagtctctttacaatatgatttcgtttacatatgcatgaaaactcatgaaaattattttttattttgtataaatgtatagggtacaagtgcaattttcttacatgcaaatatctcagatagtggtcaagtcaggtcctttagggtttccatctcccaaataatgtactttgtgcccataaagtaattttttatgattcatgccctctcactttcttaccsttttgaaatctccattttctgtcattccattctctgtatctatgtgtggataaatgtaatgaagaacgtcagctaggatttgtgttaaactaatagaaattttatattaactcaaataatttagaatcttactttttaactgtagcctggagattgttaatccaggcatagcagagaggtttc

SEQ ID NO: 302868 - DNA, 617 bp, Homo sapiens
aaaatctttcttatctgatccaggagatatttacatgattgttcctagcaacattgtaacaataataaatgttaacacaaacccaaatcttcatcaacaataaaataggtaagtaaattgttcaaaaactaaagataatgtcacatagtagtggaaattagggaactacatacatctcaaaatattaatatggagtaattaagtgaatcacaaaaagtctctttacaatatgatttcgtttacatatgcatgaaaactcatgaaaattattttttattttgtataaatgtatagggtacaagtgcaattttcttacatgcaaatatctcagatagtggtcaagtcaggtcctttagggtttccatctcccaaataatgtactttgtgcccataaagtaattttttatgattcatgccctctcactttcttaccgttttgaaatctccattttctgtcattccattctctgtatctatgtgtggataaatgtaatgaagaacgtcrgctaggatttgtgttaaactaatagaaattttatattaactcaaataatttagaatcttactttttaactgtagcctggagattgttaatccaggcatagcagagaggtttc

SEQ ID NO: 302869 - DNA, 594 bp, Homo sapiens
atttagtttctttgagtttcaaaagcatccttctctcttagaagaggccttttgtttctgtgtcctagattttatctatcaaggtcccaaaacttacaaagtcctagtgatcctttgggagaagacatttatttattatagtctgtgtggaatatatatgtatgtgtgtgtgtatatatatatgatatatatatgtgtatatatgacaatttatccttgaaactactcaatgtattcactcaccaaaattgcattggcatacttcacctgacatgttgtatgtttttactctactaggagagtaaaatagagaagcattttttcctctcctaatctaagaattctgtaccattaacttcaagttacctctaagtgcttctttaaaagtctaatatatttcccaattttttctcctgaattcatcacctctttttctctatcttcaaacctgggataattctttccccatcattaaccatgaatgaagaccttgcttcttgtaccactgcaaatattagaggcaatcaaagggaacctgtataaaytcccccctaccgtatacatcctgtcactgcttctggcttttgtgcccat

SEQ ID NO: 302870 - DNA, 608 bp, Homo sapiens
atttatttaatgaatagatatgactatatatccattaaaatgaattttaatgaatttttatatattttatatatttatatatttaatgagatattcattaaataaattcactaaatgaatgatataatatatgatatataaataaataattatatatatatacacatacacataaaacttgaaaaacaagtacagcatacttgtttctcaagttacaattaaccagagagaatacatttcatctcccacagagattaaattctggtgaggaactgtattagctgaagtattaaggctaagttagtgacactgtttgttactatcaggtagcatttatagaaaatagagtaattattcaattgttggtgrggagtgtgaaatgtgtgaaaaattgaaacaaaatgataaatatttatgtccataaatttttttatgaaaaaatcaaataattcaaagttacattaccctgacaattgtctcagtttttccaccccacagatataatcaaggaggcaatagtaattgcattttttactagagtcttctcacgctttttaagttctgtgaagaaatgcaatctcagtcactcctataaccaaagcatggac

SEQ ID NO: 302871 - DNA, 484 bp, Homo sapiens
aatttacatgctcgaggtagaattgctgggccaagagaagaaacatcctcaattttaaatgttggttctaagctrcccagtatattgatgtgtaaattcatattctctaaaaaaatttgcattaaaataccatttctctataatgttgccaaatcaatcatgcgtttattgccaacattgtgtatatctaagagtgaaaaattttaaaaagttaacattaagaaatttaattaattcaggatctccgatgatactgtattggtaaagagacgaattccaaaatagatgccaaatctcatgacatagtcttgactgtttctcttcaatgcctctgaagagtgacatgtctgcttggattcacagaaactatgtattaggccatagacttagccagttatggtgggggcagggttccttggcttccatgcgtgagtacaagacagacaatgtctctgataaaaccgggaacagaaacaggatggaa

SEQ ID NO: 302872 - DNA, 524 bp, Homo sapiens
ggatggtaaggaattagatatttgatcaaatatcaaagataattagataccaaaggaaagggttctgaktaaaatgacttagccaagttcttgggtaatgcaaagacagacaagaaagtccaaaggccaaggccttgtctaggtcatggcttggtggagcctgagcaatgtttggtcaagaatcctttgttatattttacagtgtacttcctctgttattttatagtgcttacctctgttagctacaatattagccttagagttttgttttgtaataatagatagatcatattttctacatgcccttgtttagaagtacaaaatgttagaataggaagggaacttagggtatcactaaacacaatatgttcattatatgtcacaaaaattgtggtgcaggaatatgatagatgcaacattagaacacacatttcagagaaccaaatttcttcattgtagttttatactctttttgttatataatactgagatatgaagccacatttttaaatgttcacaaagtt

SEQ ID NO: 302873 - DNA, 524 bp, Homo sapiens
ggatggtaaggaattagatatttgatcaaatatcaaagataattagataccaaaggaaagggttctgagtaaaatgacttagccaagttcttgggtaatgcaaagacagacaagaaagtccaaaggccaaggccttgtctaggtcatggcttggtggagcctgagcaatgtttggtcaagaatcctttgttatattttacagtgtacttcctctgttattttatagtgcttacctctgttagctacaatattagccttagagttttgttttgtaataatagatagatcatattttctacatgyccttgtttagaagtacaaaatgttagaataggaagggaacttagggtatcactaaacacaatatgttcattatatgtcacaaaaattgtggtgcaggaatatgatagatgcaacattagaacacacatttcagagaaccaaatttcttcattgtagttttatactctttttgttatataatactgagatatgaagccacatttttaaatgttcacaaagtt

SEQ ID NO: 302874 - DNA, 603 bp, Homo sapiens
acttatgtttttaactattttcataattgcacatcttttccttatgtgaagacaaaagtccataggtattggcaccattaacatttgaatgcagagtccatgtaccatattcactggttactgttgtaccaacaagggtaatttcactgctaattatcaaaaagtcattcaatatatacagttaaattgttggatatattaatgaataaataattgaattaatactaatttatatctcttttacttaatttagggtatgttggtgtttgtttccttctgatacataaaatagccaataggatgaagatttgttttcttgtttttattttcttttttaatttatctttaaygtttgcgttattggggtaatttgcaatattgaagtaatatttgctttggttttgagaaggtattgaaagtatttacttttttcctatttagtttgctcattaaggttatttattaactaccattttaagaaacaaaaacaagctctaagtttggcatgtaataattccaggcaatatatatagtatacttttgagaggagatgaggaaaataagtcagactgattttcctactaacagtttgataaaacttac

SEQ ID NO: 302875 - DNA, 428 bp, Homo sapiens
ttgttggatatattaatgaataaataattgaattaatactaatttatatctcttttacttaatttagggtatgttggtgtttgtttccttctgatacataaaatagccaataggatgaagatttgttttcttgtttttattttcttttttaatttatctttaacgtttgcgttattggggtaatttgcaatattgaagtaatatttgctttggttttgagaaggtattgaaagtatttacttttttcctatttagtttgytcattaaggttatttattaactaccattttaagaaacaaaaacaagctctaagtttggcatgtaataattccaggcaatatatatagtatacttttgagaggagatgaggaaaataagtcagactgattttcctactaacagtttgataaaacttactattaaaagag

SEQ ID NO: 302876 - DNA, 473 bp, Homo sapiens
aaaaagaaatagaagttttgaataagaaatattccttttgtctatgaaataaattaaaatgcttttcaaataatgttttattgtaatatttttcaaactcttccatggaatagaaacagcaaatatttgccaaattattctatcattccagctaccaaaaaaggcattgataccaaaacagacaaaaacataatgaaaaaaacaactagaagtacatttcattttgctcatacatttaaatgcaaacattttaaacamattattgttgactcaaacacagcagttgctaaataatgtactacactgtaaccaaagtagtttgatggaagaattgctaaatactggaaaatatataaatataaattaccatgtcatatgctttagatgaattctccccttcaaattttatgttgaaaagtaacctccaatgttggaactgagcctagtgggcggtgatttcgtcatgtgggcag

SEQ ID NO: 302877 - DNA, 441 bp, Homo sapiens
gttgtttaaaagtttggaactttcccccttgctctctctctcttgctccttctctcatcatgtgatgtgctgctctcacttcacatgycatcatgattcaaagctccctgacgaagccaagcagatgctggcccaatgtttcctgtacagcctacagaactctgagacaattagacctctttactttataaattatccagtctcaggtatatctgtattagtgatatttctcatattatttctttagtctctattcataatattagataatgttcactttaggtattctcaacagtgttattagaatagtttgttcatttcacaggacttcgtgttgtgtaaatcaagcattgtttacattttattgtatgtgaatacaatgaaatctaatggttgaggtagagtgccaatgcactataagccctgtgacactaattaatt

SEQ ID NO: 302878 - DNA, 555 bp, Homo sapiens
taaatatgacatttgtatttcagaaaatttttttcacactgaatttgaatataaatgagatgaataaatttacatcattgacttacatttatatgtctaggaaataagtataacatttttctttccttcaggcaaaaagttgatatgcctcatggcagtgttccccaggcttgcaaatgttcttatgcataccagaagtcatttttgtactgtaattttgcagagtttaattaaactatatgcatacaaatataggcatsaatttcattttttgtcttttcatgacttctgatatatatgtatttgcatatatatgtatatatataaaacaatggaattaaaatacattgttttatgttatttttcatatgttttatatgataaccttaaatacttcatagtgaccagaaaatgtgagaattgaacttatttttttaatgatgagtttctgagaaatactttggtacaattggatcttatttagataaattccacaagtaatttttaaaaatacagactaccttaaatatttaaaatattgagagcaactagaac

SEQ ID NO: 302879 - DNA, 635 bp, Homo sapiens
ccccaactgcctgttgggtgttggcactagkatctttagtctttcctgtcgttgtttccttcacaactgtcatggttcctatctcttttacatacaatgttaaatgttaagggtgttgttgcaaaccagagatattacggtgtagaatgagcatttggcttagtcatcgaaaatatgaaatggaaggtcaagagtagcacagatgaagcaaagtgtgctttggtatctgcagtaaatttgtaagaaaatgttcttgtcatttccagtttagtgcgaagcaccttgaggcacaaaaaagcactacctcaggaaggaagcttttctgtaaacacgaaggaaaatggtccaaggtcccttatgagcaggccttctttgccttgcagggtaacccagaccttcgccaacattgtctgattgattcaatgtcgttgtacccacctcaggagagtcttcaaggggcaatcccagggaactgaggaagaaaactccaaagttacatccagcagggaatcaacccattctggtccttcctatccaggttatttctcagcttaccccaccttaagaatcctggttttagacaggttcccctctcagctgcccctataacaggtgcctggtgaacacggccccat

SEQ ID NO: 302880 - DNA, 635 bp, Homo sapiens
ccccaactgcctgttgggtgttggcactaggatctttagtctttcctgtcgttgtttccttcacaactgtcatggttcctatctcttttacatacaatgttaaatgttaagggtgttgttgcaaaccagagatattacggtgtagaatgagcatttggcttagtcatcgaaaatatgaaatggaaggtcaagagtagcacagatgaagcaaagtgtgctttggtatctgcagtaaatttgtaagaaaatgttcttgtcatttccagtttagtgcgaagcaccttgaggcacaaaaaagcactacctcaggaaggaagcttttctgtaaacacgaaggaaaatggtccaaggtcccttatgagcaggccttctttgccttgcagggtaacccagaccttcgccaacattgtctgattgattcaatgtcgtwgtacccacctcaggagagtcttcaaggggcaatcccagggaactgaggaagaaaactccaaagttacatccagcagggaatcaacccattctggtccttcctatccaggttatttctcagcttaccccaccttaagaatcctggttttagacaggttcccctctcagctgcccctataacaggtgcctggtgaacacggccccat

SEQ ID NO: 302881 - DNA, 558 bp, Homo sapiens
tttggtatctgcagtaaatttgtaagaaaatgttcttgtcatttccagtttagtgcgaagcaccttgaggcacaaaaaagcactacctcaggaaggaagcttttctgtaaacacgaaggaaaatggtccaaggtcccttatgagcaggccttctttgccttgcagggtaacccagaccttcgccaacattgtctgattgattcaatgtcgttgtacccacctcaggagagtcttcaaggggcaatcccagggaactgaggaagaaaactccaaagttacatccagcagggaatcaacccattctggtccttcctatccaggttrtttctcagcttaccccaccttaagaatcctggttttagacaggttcccctctcagctgcccctataacaggtgcctggtgaacacggccccattaaggtccaggtcccattttctcttcaggacttaagtgaaattaaggggtattttgactggttttcagatggccctgatgaatataaaaaggctttccagagctcaacccaagtgtttgaactctttgtatcaaaccctga

SEQ ID NO: 302882 - DNA, 547 bp, Homo sapiens
gaaaaacatgagtatttactttcactaaaatgactattgacaaaatcttaggattcttagatataacaaaatccagaaccacactgctataagacctagtagctgatagcacaatagggtgactatggccaatgaaaacttaactgtacattttaagataacttgaagagtgtaattgacttgtttgtaactcaaagaataaatgtttgaggagatggatacccccttctccacgatgtgcttatttcacattgcatgcctgtgtcaaaacatctcatgtaccccatacatacacctattatgtaccagcaaaaattaaaaataaaaatttaaaaaagaaataacattgcttatgagagaaacatttaagataacaacaaatagaatattcattatttttgtccatttctggtttgtttttcatttctttgaygttgtaagaagcagaaaatgataccatggaccaacatcaagatatctaaaatagcaatatttatatctgacaaatccagacttgatatgaaaaacaataggcacaaagaggagg

SEQ ID NO: 302883 - DNA, 605 bp, Homo sapiens
gcaaaattcaagatctttgcaaagcaacatttagcctggcacagtttcacggaaactgattaaaaaaaataaggctcttagatcagatacagggaactgtactaatcgcagtacagcaaacactatgagcattagcatattgtgtcatttctcctttttcccaagttctacaggggtaactaactgggccttgatggaggtttccacatgcaatgggctatgttatagggaaagaaacctgaaattaggaagccaaggtttttataatattcagtaactatgtttgtaccttactgcagcatgagatgatatctgtagtatccaggacaataagaatgtctgccctttactttggagaaacatactatctctatattccatggctgtatgcaaggaaactcaacttttgctccccagagaatcactacctctaatttccaaggctgtttgcattataaacattctttaaaaatagctataaataaaacagtcacagtcccttcataaggcattcagaaatgagagacctatagrgaatggtctttcatcaatatccactcctcagtcctacagtgcctcggcttctggctaattttcctataagc

SEQ ID NO: 302884 - DNA, 538 bp, Homo sapiens
gcatgattgtgttttgaaatgtgaagacatgagatttgggagtgcccaggggcagaatggtatggtttggctgtgatctcatgagatctgatgattttataagtgtctggcatttcccctgctggcactcattatctctcctgcaaccctgtaaagaggtgcctctgccatgattgtaagtttcctgaggcctccaaagtcatgtggatctgtgagtcaattaaacctctttcatttataaattacctagtatcgagtatttctttacagcagcatgagaaccaactcatacatcaccctcccctactgttaaatgctgccttaaaaatgttataactgctattgaaatctgtagtaatctatttttcttctgaccttctcaaatgttttgcatagactgtagcccttttgccaagtgtcatmattgaagcatctgtccttgtcttttgtttagctagtgtattcacagacatttcttttaatgggcaaatgctgaaaaataaataaataaacaactttctcctagtatttttacact

SEQ ID NO: 302885 - DNA, 622 bp, Homo sapiens
acttatcacactaaaatcaacatagatcttggatcttatcacagctgatcttatcacagatgatgagatcaagattacagatctgtgactttatcatagatcacaacacggatcctatcacarctgaaatcaacatgcggcagaacttagctgtgcccagagaggaagcacacaaactagccctagccagaagcaacttgttcatcccagcagttaggacctgagttctggcaagccccactattgtgggctaaagtattctaaagtcctaatgtcctacgtatacttgaaagtcagtctaggccaccaggtgcgaattcctgggcatgtcctagtgcaatgctgcaattggagccagtgggcttggggtgcctgtgacctagtgagacactatttgttgtggctaagggagtgcttatgtcacccctctctcagctccaggcagcacagctcacagctctagaacagacccctgccttctgcctgagtaaaagagaggggagagttaagagtactttgtttcctaacttggatactggtttcagtcacagtagaacagggcaccaggtagagatccaagacccctactgcaggctctagctcccagacatttctagacaca

SEQ ID NO: 302886 - DNA, 461 bp, Homo sapiens
attttcccacataaatacttgctctgttcttaaaaaaatgttcaaactgaagacttacatatttytttaattttaggaaattctttgcttatatttcaaatagttttctccagcatgtgttccattttgttcttctgagatttgttagataaaatttgtatctccttaatataaacatcacatcaaagaccatacatcttataatggattaatatccaaaatatataaagaactcaaacaactcaatagtaagaaaacaaataacctgattagaaaatgggcaaaggtcccaaacagacatttcttaaaagaagaaatccaaatggccaacaggtacatgaaaaaaatgcccagtatcaggccaggcgcagtggctcacacctttaatcccagcactttgggaggccaaggcgggtgaatcacgaggtcaggagatggagactgtcctggccaacatgatg

SEQ ID NO: 302887 - DNA, 550 bp, Homo sapiens
ttaaatgtaagccctcaaattataaaaattttagagtaaatcctaggaaatacccttttcaacatatgatttggcaaagaatttatggtgaagtccccaaaagcaatggcaaaaaaaccctaaaattaacaagtgggacctaattaaaataaaaagcatctactcagcaaaagaaactaccaacagagtaaacagcctacagaatggaagaaaatctttacaaagtatacatctgacaaaggtctaatgtccagaaactacaaggaacttaaacaaatgaacaaataataaagtaataattaaattaaaaataggcaaagggcatgaacagcaaaggaatacataaaagcagtcaacaaacatgaaaatatgctcaacataactaatcattaaataaatgtaactcaaaaccacaatgagataccactgcacaccagtcagaatggctattactcaaaggtcagaaaacaacagatgtggatgaggttgaggagaaaaggaaatgcttatamtctgttggtgggagtgcaaactagttcagcaactgtgt

SEQ ID NO: 302888 - DNA, 589 bp, Homo sapiens
aagactctttgaaaagactcctagatttgattaatggatttagtaaagtctcaggttacaaatcaacatacacaaatcagcagcactgctgtacaccaataacaaccaagctgagaatcaaatcaagaactcaatcccatttacaatagctgtaacaacaacaacaaaacacctaggaatatgcttaaccaagtaggtaaaaaatattttcaagaactacaaaacactgatgaaagaaatcacagatgacacaaccatatggaaaatgaccttactgcccaaagtaatcaacagactmaatgcaattgctatccaaataccaatgtcatttctcacagaattagaaaaagtaatcctgaaattcacatggaacaagaaaagtccaaatagcccaaacaatcctaagtaaaaagaacaaatcagaaaccatcacatcatctaacttcaaatcataagacaaggctatattaaccaaaacagcatggtactagtataaaagttagacctatagaccaatggaaaagaatagagagcccagaaataaagctgaattctgaaaaccaactgatctccaacaaagcaggcaact

SEQ ID NO: 302889 - DNA, 563 bp, Homo sapiens
aaaaccaactgatctccaacaaagcaggcaactacactggggaaaagacaccctattcaataaatgatcctgggaaaattggatggccatatttagaagaataaaactatcttctaatatcacttctgatatcactatcactcaycatatacaaaaaattaactcaagatggattaaagacttaaatttaaaacctgaaaccatcaaaattctagaagaaactctagggataactcttctgggcattctagtgaagaatttatgactaagactccaaagcaaaggcaacaaaaacaaaaataaataaatgagatctaattaaactggaaagtttctgcagagaaaaagaaatgatcaccatagtaaacaatctagagaatcagagaaaatatttgcaaactatccatccaaaaaaggactaatatccagaatctacaaggtactcaaagaaatcagcaaaaacaaaacaaataatcccaataaaaagtggacaaatgatataaatgacatttcttaaaagaagatatacaaatgggcaaaatatatgtaaaaaaagctcaagg

SEQ ID NO: 302890 - DNA, 563 bp, Homo sapiens
aaaaccaactgatctccaacaaagcaggcaactacactggggaaaagacaccctattcaataaatgatcctgggaaaattggatggccatatttagaagaataaaactatcttctaatatcacttctgatatcactatcactcatcatatacaaaaaattaactcaagatggattaaagacttaaatttaaaacctgaaaccatcaaaattctagaagaaactctagggataactcttctgggcattctagtgaagaatttatgactaagactccaaagcaaaggcaacaaaaacaaaaataaataaatgagatctaattaaactggaaagtttctgcagagaaaaagaaatgatcaccatagtaaacaatctagagaatcagagaaaatatttgcaaactatccatccaaaaaaggactaatatccagaatctacaaggtactcaaagaaatcagcaaaaacaaaacaaataatcccaataaaaagtggacaaatgayataaatgacatttcttaaaagaagatatacaaatgggcaaaatatatgtaaaaaaagctcaagg

SEQ ID NO: 302891 - DNA, 563 bp, Homo sapiens
aaaaccaactgatctccaacaaagcaggcaactacactggggaaaagacaccctattcaataaatgatcctgggaaaattggatggccatatttagaagaataaaactatcttctaatatcacttctgatatcactatcactcatcatatacaaaaaattaactcaagatggattaaagacttaaatttaaaacctgaaaccatcaaaattctagaagaaactctagggataactcttctgggcattctagtgaagaatttatgactaagactccaaagcaaaggcaacaaaaacaaaaataaataaatgagatctaattaaactggaaagtttctgcagagaaaaagaaatgatcaccatagtaaacaatctagagaatcagagaaaatatttgcaaactatccatccaaaaaaggactaatatccagaatctacaaggtactcaaagaaatcagcaaaaacaaaacaaataatcccaataaaaagtggacaaatgatataaaygacatttcttaaaagaagatatacaaatgggcaaaatatatgtaaaaaaagctcaagg

SEQ ID NO: 302892 - DNA, 661 bp, Homo sapiens
tattacatatgtgtatatgtgtatgtgcattataaaacacaaatgtatatacccctctgtatataggtaaatagatagagatgtatgtatacatagatatacatgcctatattcaactatgtacatacgtatacataaatacatatacattggtaacacatatataatggatatattgtataggtatatgcacacatacatgtattatacacaaaaatactgcatgtatataggtagataggcatatatatgtatatacatatatatacacaggcatatatacacatatattaygtataatatatgttatgcaggcatatgtacacatacatgtacatatatacatattcataggtatgtacataggtaaatagctagatatatgtatgtgtatatatacctatgtatatacatatctatgtgtttatatatacgtatatgtaaaatgtatataatacatacatagagatacatatatacatatctgtctttctatatacacagccatatgtgtatatgtgtgcgtgtgtgtatacatgtttatatgggagaattattagaattagcaaaaaaatgaaatggttggcaataaagtaaatattgatcctcaacagacactatactattgtttactgtgtaatcactaagataatgaattatt

SEQ ID NO: 302893 - DNA, 661 bp, Homo sapiens
tattacatatgtgtatatgtgtatgtgcattataaaacacaaatgtatatacccctctgtatataggtaaatagatagagatgtatgtatacatagatatacatgcctatattcaactatgtacatacgtatacataaatacatatacattggtaacacatatataatggatatattgtataggtatatgcacacatacatgtattatacacaaaaatactgcatgtatataggtagataggcatatatatgtatatacatatatatacacaggcatatatacacatatattacgtataatatatgttatgcaggcatatgtacacatacatgtacatatatacatattcataggtatgtacataggtaaatagctagatatatgtatgtgtatatatacctatgtatatacatatctatgtgtttatatatacgtatatgtaaaatgtatataatacatacatagagatacrtatatacatatctgtctttctatatacacagccatatgtgtatatgtgtgcgtgtgtgtatacatgtttatatgggagaattattagaattagcaaaaaaatgaaatggttggcaataaagtaaatattgatcctcaacagacactatactattgtttactgtgtaatcactaagataatgaattatt

SEQ ID NO: 302894 - DNA, 521 bp, Homo sapiens
atgtacttgcttccctttcatcttctgccatgattgtaagtttcttgaggcctcctaacaatgcttcccgtacagccatgtggaactgtgagtcaattaaacctcttttctttataaattaccaagtcttaggtagttttttatagcagtgagaacagaccaacacatcttgatttcyactacattataattttcataattctactattctctcattttcttacagctccaagaataatgaataacagcatacttatatatttatttctattcatgagcagagaggtaaacagaagtcaaaattatctattttttgttttttatttccaaaaatcagctttactcgtatacttactccagtgctatttattgacctttcctttatatagtcagatgcatagaactgatcctaatgatattttcctatggggttatttataaccttgatatgtatgcaaactctggcccactagtgaactctgccctttgtaattctgataaacagatttataatgcaaact

SEQ ID NO: 302895 - DNA, 590 bp, Homo sapiens
tgtggaactgtgagtcaattaaacctcttttctttataaattaccaagtcttaggtagttttttatagcagtgagaacagaccaacacatcttgatttccactacattataattttcataattctactattctctcattttcttacagctccaagaataatgaataacagcatacttatatatttatttctattcatgagcagagaggtaaacagaagtcaaaattatctattttttgttttttatttccaaaaatcagctttactcgtatacttactccagtgctatttattgacstttcctttatatagtcagatgcatagaactgatcctaatgatattttcctatggggttatttataaccttgatatgtatgcaaactctggcccactagtgaactctgccctttgtaattctgataaacagatttataatgcaaactcctgctttgtttattaatttctgaagaataaatcaaaatgatgagcatgagctgttttcccagtgttcttgtcaggattacatttattacatggaaaaaaaagaaagtttaaactcttcataagactatatgcctcaccaaggattt

SEQ ID NO: 302896 - DNA, 587 bp, Homo sapiens
gatagagaccatggacaaaggtaaaaactttctatatcagtacctkttacatatctttaccctgcctttgaacaaggaaccccagttttcattttgcagtgggccctatagtgagttgacactccactgcttaacacctagctcctgtatctgctgtggatcaggtcaaggtgtttaaattgtcagcagaacatttcttgcctttcagccccttaccccaccccatttagatatatgcagcaatcactggttttcatttatttggaaataataccaaaaatttaaaaactttcttttatggagatgcactttattagaaatgagagaggatggaattcaaaaaattttcactgccctttaaagaaaaactagagttaaaatattgttaggagggatgtcagtaggtgcctagtctccttctccatcttcttagggagatgtgcaggtacagtgaccacccagtctaaattacctgggaaaactccagtgtccacttatgaatctggaataattatcaataacccaacccccttcagatgtgttcaaactgttatggcttgcatgattcattacatgatcaccacaca

SEQ ID NO: 302897 - DNA, 491 bp, Homo sapiens
agaaccaggtctttattaagacctaaaagacccctgattcagtaactaactgcacaagttaaacaattttcagttgcaggaaacagaatatcccaaatcaactcaatctgaggaaaaaaagaataatggttatgaaatatattgactaaaaaataagacacaaaggtggaataaggttaattctatacattgtccaatagtcactacattttttatttccttctctcagytttgccttccacagtctagcactgaggttaagcactgaggctgacttctcttgtattttacagcccttattgcaaactttccatgaagaagattttttttcaatcagtcctcctgtaacggaggaccctgttaaccagcacctccaccaaaaagcattttctaatgccacatttacactaaataggaagaagcatgtgaatgctgtttgaaacttcaaaaacatacatagaaaataagactacatatttgtttattttttg

SEQ ID NO: 302898 - DNA, 491 bp, Homo sapiens
agaaccaggtctttattaagacctaaaagacccctgattcagtaactaactgcacaagttaaacaattttcagttgcaggaaacagaatatcccaaatcaactcaatctgaggaaaaaaagaataatggttatgaaatatattgactaaaaaataagacacaaaggtggaataaggttaattctatacattgtccaatagtcactacattttttatttccttctctcagctttgccttccacagtctagcactgaggttaagcactgaggctgacttctcttgtattttacagcccttattgcaaactttccatgaagaagattttttttcaatcagtcctcctgtaacggaggaccctgttaaccagcacctccaccaaaaagcattttctaaygccacatttacactaaataggaagaagcatgtgaatgctgtttgaaacttcaaaaacatacatagaaaataagactacatatttgtttattttttg

SEQ ID NO: 302899 - DNA, 590 bp, Homo sapiens
acatactaaaaagagcataagagatatttaggatgtagcgaaaaggttaaatatatggttaatctcagttaaaataagaaaaggggatataatggtaccaaagtattatttaaataaacactggccaaaattgtcaaaaactgaggaaagatatcaagccacagattgaagaacaaacaaatccaaactaggacaaatacayagaaaatcactttgctccttcatcatcaaatttgccaaaaacaaaagaaggcaaaagcacaaatatttccataaaaaagaaaaaaaacactcattgtttagaagtaaaataataatgacaattgaataattaataaaaatggtggaagtcagatgtcagttgaaaatgtctattaaaatgattccactataaaattataaaatcagagagaaaaaaatatagatatttctccagacttccctccagaaaattgaaaacaaatttattgacagcagacaaattttaggaaaaaagaactcacttaaaaacatttcctcagattgaaggaatataatcccattataaaatggtgaaaaatagagctatctatgacaaacccacagccaat

SEQ ID NO: 302900 - DNA, 590 bp, Homo sapiens
acatactaaaaagagcataagagatatttaggatgtagcgaaaaggttaaatatatggttaatctcagttaaaataagaaaaggggatataatggtaccaaagtattatttaaataaacactggccaaaattgtcaaaaactgaggaaagatatcaagccacagattgaagaacaaacaaatccaaactaggacaaatacacagaaaatcactttgctccttcatcatcaaatttgccaaaaacaaaagaaggcaaaagcacaaatatttccataaaraagaaaaaaaacactcattgtttagaagtaaaataataatgacaattgaataattaataaaaatggtggaagtcagatgtcagttgaaaatgtctattaaaatgattccactataaaattataaaatcagagagaaaaaaatatagatatttctccagacttccctccagaaaattgaaaacaaatttattgacagcagacaaattttaggaaaaaagaactcacttaaaaacatttcctcagattgaaggaatataatcccattataaaatggtgaaaaatagagctatctatgacaaacccacagccaat

SEQ ID NO: 302901 - DNA, 577 bp, Homo sapiens
agtcatttggagtcttacagctatgtgtgtttattttgccattggccagtagagagtttaaaagctcactttgcagtatcatggaaggcttactgtttcactttattttggcttcaatctggttttctcaccttaaaaacaatttttacaattgattttttaactactttaagttcttagagaaaaaagatgtgatctaaattaactaatacrtaattttcccttaaaatgtttttgtcaaaaagatattgtcactttgagttgtattttactgagtattagtaaaattgagtgttttttcattactggcttatagttcctcattggtggtttgcaatttattttctttgtccatttacttactgaggtctttttttttttcctttataatttgtgttttgtgtggtaagaatatcaagtctatcaaactttttcatatttatcacgaatattttccagttttttttctgactgtgattttttgacttaaaaaagtttctttgttatttagtataattttccacagtatctttggaagtattcagtcaatgaattattattattgttatttgttatt

SEQ ID NO: 302902 - DNA, 577 bp, Homo sapiens
agtcatttggagtcttacagctatgtgtgtttattttgccattggccagtagagagtttaaaagctcactttgcagtatcatggaaggcttactgtttcactttattttggcttcaatctggttttctcaccttaaaaacaatttttacaattgattttttaactactttaagttcttagagaaaaaagatgtgatctaaattaactaatacataattttcccttaaaatgtttttgtcaaaaagatattgtcactttgagttgtattttactgagtattagtaaaattgagtrttttttcattactggcttatagttcctcattggtggtttgcaatttattttctttgtccatttacttactgaggtctttttttttttcctttataatttgtgttttgtgtggtaagaatatcaagtctatcaaactttttcatatttatcacgaatattttccagttttttttctgactgtgattttttgacttaaaaaagtttctttgttatttagtataattttccacagtatctttggaagtattcagtcaatgaattattattattgttatttgttatt

SEQ ID NO: 302903 - DNA, 587 bp, Homo sapiens
acaaagaaaaatcttgagaaacatagtagttacctctggggaaaataagattttaagtggattttccatgaaaattcaagaggccaaaagaaagtggcatattttcaagtgcttataaggaagaacttatcaattaaaaatcctatactcagaaaatatatacttcaggagttaagaaaaaataaagtaactttcagaggaaggagaactaagagaacttttcaatagtaggcttaccctaaaaacagcaaaggaagttctctaaacagaaatagaatgatgtaagaaagaactgtgtaataattatgaaataagaaataacatagtaagcaaaacatagattaattcattaaacatttttctcttgaatttttaaaattatatttgttgaagtaaaaagtataacactgccagatgtgattctaaagatatgagaatcgtagagagaaaatatttaagataattatgttatagatragagagaataaaattacaaaaaagacataagagcttcgcaattcattcaacctgataaaataacatcagtcaactataagttatgtatgtataagttaaggccaagagca

SEQ ID NO: 302904 - DNA, 587 bp, Homo sapiens
acaaagaaaaatcttgagaaacatagtagttacctctggggaaaataagattttaagtggattttccatgaaaattcaagaggccaaaagaaagtggcatattttcaagtgcttataaggaagaacttatcaattaaaaatcctatactcagaaaatatatacttcaggagttaagaaaaaataaagtaactttcagaggaaggagaactaagagaacttttcaatagtaggcttaccctaaaaacagcaaaggaagttctctaaacagaaatagaatgatgtaagaaagaactgtgtaataattatgaaataagaaataacatagtaagcaaaacatagattaattcattaaacatttttctcttgaatttttaaaattatatttgttgaagtaaaaagtataacactgccagatgtgattctaaagatatgagaatcgtagagagaaaatatttaagataattatgttatagatgagagagaataaaattacaaaaaagacataagagcttcgcaattcattcaacctgataaaataacatyagtcaactataagttatgtatgtataagttaaggccaagagca

SEQ ID NO: 302905 - DNA, 602 bp, Homo sapiens
tatatcaagttaaattatatgctgagctataaaataacatcagcaaattaaaaagcattgaaataatatggagtgtcttctgaccacagtagaatcaaataagaaattattaacaaaacctaacaaaaaatcttcaaacaccttgaaactaagcaatatatttctacattattcataagtcaaagaggaaatgtgaaggaaaatgaaataatatatagaattgagtgtaaataaaaatattaaaattttaaaacattaaaatttgtgaggcacagctaaaagagtatataaagtgaaacaagtgaaatttatagcagtaaatgcaacaaaaaaaatctcaaatgaataaacttcaaactccagaacctagggaaaaaaagcataataaactcaaaaaatacatggaatcaaataataagccaaatgaagaaagtagacaaattaaaaccatacaaaaagtcaacaaaacagttggttatttttttaaaaactggcwaacatctaacaagacaatgaaaataaagagaagacaaaaattacaattatcaggcgtgaatgggggatgttactacagatactgaagatatcaaaaggatagtaaa

SEQ ID NO: 302906 - DNA, 603 bp, Homo sapiens
aaaaagaaaactgcagaccaatagtcatcataaatatagatgcaaaaaagccttaactgataatatcaatcagaattatacaatatataaaaacaattatatgcaaaggccaagtggatgttctccaggttgatttgatattgcataatcagtcagtggaatccatcatattaatagttaaagaagaaagagcatatggtcatatcaacttatttagaaaaagacttacaaaacataacatgattcatgatgaaaactctagaaatacagaaataatggtaacttccacaacttgatcaagagcatctacaaaataatattatgactattattgctaatcaagataatattatatgtatatgtaatggtgacagattgctttacctctaagattagaaatacggtaaggatatccactatctccatatttatttaacaaaacactagaagttctaccagcacaataaagcaagaaacagaaataaagggcatgcagatgaaatgatttcctgtgagacaatcccaaggagtctataaaagaacatactagagctagtaaatgagttcartgaatttaggatataagacaaacattaaaaaaca

SEQ ID NO: 302907 - DNA, 510 bp, Homo sapiens
tgtaaccatactcaaaggacacataaccctttggaggatctgtaagcatttctatgctaatggtaaatatttgggaggagggaagttctgagaggcagatggctatggagggactcacgggctcccaattmccctgttcccttgctcagccctcaagccgggtgacctgcaatgaccctaaacattatctctggttctcagtccttgctgctaacgtttaccagccaggattaaatccctctgtgcctcctagtattatcccccttccagactgttcttctgaacagcttttgtaaaacttttaaaagcctcattcaggccatgtcttctgttcacagccctatggcttccagcattctgaaacatcccagtaggccaatctaggcttgaaattctgttccctgcacacacaaattcaaccccaaatttctcaaaggctcctagctcagtggcacatccaatcttcataacactctcccactatccatcacactagaaatcagaaataga

SEQ ID NO: 302908 - DNA, 565 bp, Homo sapiens
cactctgctgatcctctgttacaccaacaaccaggggcaggcctcctctgagagtatcttgatatgtccactctgtgaagcaatccagggctaactcccaatcgcagctctgcaactacgtgggacctgcatgatacaagccccaggaatgctctaagtgcaatgttctccagcatcacatcaccttacaggagctctcggtctcctcaatgagctcccactcctcttgagaagaaaatggccatgtaaccatactcaaaggacacataaccctttggaggatctgtaagcatttctatgctaatggtaaatatttgggaggagggaagttctgagaggcagatggctatggagggactcacgggctcccaattaccctgttcccttgctcagccctcaagccgggtgacctgcaatgaccctaaacattatctctggttctcagtccttgctgctaacgtttaccagccaggattaaatccctctrtgcctcctagtattatcccccttccagactgttcttctgaacagcttttgtaaaacttttaaaagcctcattcaggcc

SEQ ID NO: 302909 - DNA, 569 bp, Homo sapiens
caggcttataggcagtatcctgcagggagggtttatgatcygtgctttgtctgtttccaaggctgacttcccttgggttcttttacaaacttatttatttagacttcccatatgcttccacatttaacatgagcatgtgatttcacagccacggacctaaggctctacatgttgggaggttaaggaagcagaaatttggggtcatgggagaaaattagaagcataaaaaaaagtccttgttaatgttaaacttttgagaaaagcttgttgactactcagaggttttccaccccaacacgggcaagtgccggcagaatagagtcctagagaaaaggaggatcaggagaagaaaagagactagtgaaaattctggccatgaaaatagttgcgaatagtgagaagtggacacaggagccctgaaacattgctgaaatcatcagaaacaaaacaaaacaatagcaacaccaaataaattgtgatcatttttccaccaggcctgtgaaggagacactccatctcaagtttaactcagatacacctaaaatttagtaatttggaaggtaattaaa

SEQ ID NO: 302910 - DNA, 569 bp, Homo sapiens
caggcttataggcagtatcctgcagggagggtttatgatctgtgctttgtctgtttccaaggctgacttcccttgggttcttttacaaacttatttatttagacttcccatatgcttccacatttaacatgagcatgtgatttcacagccacggacctaaggctctacatgttgggaggttaaggaagcagaaatttggggtcatgggagaaaattagaagcataaaaaaaagtccttgttaatgttaaacttttgagaaaagcttgttgactactcagaggttttccaccccmacacgggcaagtgccggcagaatagagtcctagagaaaaggaggatcaggagaagaaaagagactagtgaaaattctggccatgaaaatagttgcgaatagtgagaagtggacacaggagccctgaaacattgctgaaatcatcagaaacaaaacaaaacaatagcaacaccaaataaattgtgatcatttttccaccaggcctgtgaaggagacactccatctcaagtttaactcagatacacctaaaatttagtaatttggaaggtaattaaa

SEQ ID NO: 302911 - DNA, 569 bp, Homo sapiens
caggcttataggcagtatcctgcagggagggtttatgatctgtgctttgtctgtttccaaggctgacttcccttgggttcttttacaaacttatttatttagacttcccatatgcttccacatttaacatgagcatgtgatttcacagccacggacctaaggctctacatgttgggaggttaaggaagcagaaatttggggtcatgggagaaaattagaagcataaaaaaaagtccttgttaatgttaaacttttgagaaaagcttgttgactactcagaggttttccaccccaacacgggcaagtgccggcagaatagagtcctagagaaaaggaggatcaggagaagaaaagagactagtgaaaattctggccatgaaaatagttgcgaatagtgagaagtggacacaggagccctgaaacattgctgaaatcatcagaaacaaaacaaaacaatagcaacaccaaataaattgtgatcatttttccaccargcctgtgaaggagacactccatctcaagtttaactcagatacacctaaaatttagtaatttggaaggtaattaaa

SEQ ID NO: 302912 - DNA, 597 bp, Homo sapiens
gatcactctgcaataatagtcagcagtaaatatccattgctctgttgtctagaacactttccttcttatgagaacaatgtgtcctactgataaggactctttgccttgacctttctctaaccatgattactgtgtctcagttacattaccgggctcaagtccaagcctgacccctcagagtccctcaccaagacttttctcattgcagccaaggaagacactcaacacctcaaggtggcaaaagtaaagttatgaagagttaaatatttcctcatatggaagaagccacacycctgtaggagattgtggagccatgagttggagagacactgggaatactgatgaagaataagcagcactggttttattttctccattgccaagacatgtttctacatgtctacacctgctttggtattttctgagacatgtttctacatgtctacacctgctttggtatttttcgagacaatatttttaaaaattgtgtctaaaataattctggttttgttttctagccaactgcaccaagaaagacctgactgtttctacccagtcattatttggacaagcattgccaaaactttaatatgtggc

SEQ ID NO: 302913 - DNA, 562 bp, Homo sapiens
ggagtctataaaaataaatgcaaagtcttctgtgatagggctacacatgcaaggcaaaccccaaatgccacaggagcaaagaaaccaaagaaaatagacaaatccagtttgtcagtaaagggtgttttattacagaaacttacagactgaagggtggtgtttggccgctgcaagacaggtatatgtacccacagttacttcccagacccarggcttatacaccacagggaaaaggtatatgtgctccagccagacaattgaaggcaaacatttagaacaggcaacaatgttatgtgcatcacatcctataatttgtgtgataacatcaagctttctttgatctaaaggcaggatttatagtgagtacatgttcttacattagtgacaataaagtagggaccaggaggcattcatgggactagggctaatcagaagtcaacatggcggattagcacccaagatggaggcacttttgtcaccataaaaataatttgcacataagcattacattccagtttatagatttgtttgtcatcaggggaaatgcattaacaagtctgac

SEQ ID NO: 302914 - DNA, 397 bp, Homo sapiens
ggtctctaatgccgtcaaatcacacyacagaaaaatcttttgcaaaaggaagagtcaattgatgtggcaaattttattgttgtcttattttaagaaatttccacagacacaccaaccttcagcaaccaccaccctgatccatcagtagccatcaacatcaaggcaggaccttccaccagtgaaaatattacaacaaacaaatgctaagtgattgttagcattatttggcaatataatatttcttatttagggtatgtacatttttagacttactgctattgtacacttaatagactataatattgtgtaaacataatttttatatgtactgggaaaccaaaaaaaaatgtgactgactttattgtgatattcactttattgccacggtctggactaa

SEQ ID NO: 302915 - DNA, 549 bp, Homo sapiens
atttttaataaaattaagtgaatattaggtaactccctgaatattagagggatttctttgaacatttttagaattctatatattttatgttatactaaaataaaggctattttaaatatcttttcctcttacttcccacttcaataattttctcatttcctcagttgtgaaaaggtcactttattgttatgcatcatagtcatttaactacatttctattaaatggtcaagagtttgatgacagcacctctgaagaaactgctttggattatatacaattatatgaaattactaatgtatattgacaacttgcaatgtatcaggtacttaatagacatcatcctatttaattgtcagaacaactctcagaggtatctgttatttccaatttgtgtatgtgtaaactgagagcccagtgaataattatattggttcaaatctgcacagttggtgggcmtgaagccaagacttccattcaagtttttctgactgcatcacctgtagtcctatagacaataaactgtctttactttgtagtagactgtaaaa

SEQ ID NO: 302916 - DNA, 607 bp, Homo sapiens
ttcactctcaagcagtccccagtgactatcattcccatctttgtgttcacgtgtgttcaatgtttaatgctcacttataagtgagagcatgcagtatttggtaatctatttctacattagttcacataggataatgacctacaatggcatctatgttgctgcaaaggacatgatttcgttctttttatggctgcatagtatttyatggtgccacatttttttcatactatttcacatagtatttcatatgtaccatatttttttaatctagtccaacattcatgggcatcttgattgattctatgtctttgctattgtgaatagcattgcaataaacatacaagtgcatgtagaaaattttttggtagaccaatttattttcctttcagtatatgcccaatactgtgatcactgggttgagtagtagttctaagttctttgagaaatctccaaaatactttccacagtagctgaactaatttacctttcctccagcactatataagctttcccatttctctgatgtctcaccaacatgctattctttgacattttattaatagccattctgactagtgtgagatggtatctcattgtggttttaatt

SEQ ID NO: 302917 - DNA, 552 bp, Homo sapiens
tttctctatccaacttagctctctatgtcttttatatcccatttacattcagggtcaatattaacataagagaatttgatcctgtcattgtacagttagctggttgttaggtagatttgattgtatagttgctttatagtgtcagtgggatatgtgcttaagtgtgtttgtgtggtggcaggtatcattgtttcctttccctatttacaactctatttaggagctcttgtaaagcagtctagttgtaatgaatttccttagcatttgcttgtctgaaaaggatgtcatgtctctttcacttatgaagttaagtttggtgggtgtattagtccattttcacatttctgataaagacatacttgagactgggtaatttatacaggaaaaaggggtttattgtacttacagttccatgtggttggggaggcctcacaatcgtgatggagggtgaaagtcatgtctcacatggtgggagacaagagaagaragcttgtgcagggaaactcccctttttaaaaccaacagatctcgtgagacttattcactatcata

SEQ ID NO: 302918 - DNA, 555 bp, Homo sapiens
ctgagtaatttatcaagaaaaaggggtttattggacttacagttccacrtggctggggaggcctcacaataatggcagaaggtgaaaggcatgtctcacatggcagcagacaagaggagacagcttgtgcacagaaattccccttgttaaaaccatcatatctcatgagacttattcactatcacaagaacagcaagaggaagacctactccatgattcagtcacctcccaccaggtccctcccacaacacatgtgacttcaagatgagatttgggtggggacacagccaaattatatcagtgggatatgaaatccttatttggaatttttttaaggatattcaaaataggtcaccaatctcttctggcttgtaaaatttctgctgagaggtctgctgttagtataatgaggttccctttgtaagtgatctgctccttatctctaattgcctttaagattttttctttcatgttgactttggagaagttgatgactatgtgtcttagtgggggtcatcctgcgtagtatctcatggagttctctgaatttcttga

SEQ ID NO: 302919 - DNA, 512 bp, Homo sapiens
ctgacctcaaatttactagggcagggtttttccccaccctagtaagcctgagggtactacaggagaccaaggcatatgtcactccttatctcaactgcataagacagacactgccagagcagccatttatagacctccccccagcaatgcattccttccccagagtattaatccttgctaggaaaataatttagcaatatcttcactacttgcacgtccgtttataggctctctgcaagaagaaaaatatggctgtttttgcctgaccccgcaggcagtcagaccttatggttgtcttcccttgttccctaaaattgctgttattctgttytttttcaaggtgcactgatttcatattgttcaagcacacatgttttccaatcaatttgtacagttaacacaattatcacagtggccctgaggtgacgtacatcctcagcttacaaagataacaggatcaagagattaaagtaagacaggtgtaagaaattatgaaagtattatttgggaac

SEQ ID NO: 302920 - DNA, 513 bp, Homo sapiens
gataatcagaaaaacataaatattattattgaaaagattaatataatttgcaaaatattaggtggtctgtccaataacaaaagaaagacaactaaattcaacaaaattattaataaaaaagatcattactacaaaccttacaaaaataaaaaggcttacaaaggcacactatggtcaaacatatgccaacaaattagatacttgaatagaatgaatgtatttctagaaaacacaaactactgaaaatgattcaagaaatgtaaaatctgagtaaacttaaaacaggtaagggtatttaaatagtaattaaaaagttttccagacccagatggattcactagtgaattctaccaaacttttaaagaataattaacactgatgtttcttacattcttcaaaataatagaatagggagaaaaattcttyaattcaaactataagtctagtgttatcaaaatcatataaagacaacacaagaacagaacatcatagaagaatatgccttatgaatac

SEQ ID NO: 302921 - DNA, 531 bp, Homo sapiens
ttttattcattcaccaattatttttcaaagtttatcatctacaaagccccacagtaaatactctaggcaatgtgataaactatatttgggtcttgaacatctaaattaacatgacctgaattaaaatgtggtaagtgctgaatatgatgtataggtgaagttctaaaggggtttcagagagaaagatttgtgttttgttttgcttttgtttgtttcctggctcagtttagacttggtcctacaaagatcagggataagaattgcaagtcagcagggaatttatttgaactggaaacagaagtgggtttgggaaacatgactttgtttcttagggtagatcacagaaatgagaggaaggaatgggacataactrggtcaagaaatggagccagggttataaatgtcaggctaatgattttagatgtttttgtctatagaaaatggaaaggcattattgctgttgttattgttgttgttttcattgtttttaatttggttatataaagattaatccggagatgcaggctggac

SEQ ID NO: 302922 - DNA, 580 bp, Homo sapiens
gtgataagcagaagcaatgattgctggttgctgaaactaccagtgccagtttaaaactcctgaaaactctcttggctgaagactggattgcacctgaccgttggagcatgtgggtgtccttgcagtgtgtctatatgtgtgttcttgtaagtggggggttaggagtggtagggttggggaaaaccagaagagatcaaataatcacagctatgagaaaggacattttatagaggattcacctttcctcaaatctttagctgcacattttattttactccattctcaattttattaattatttagagatctgtgtgagatctataaatagtacagcatacagattgaagaagcttagcaaacctcacagtatagtccaactagtgaaaatgaaagataaagagagaatctggaaagstgccaaagaaaaatgacactcacttaaaatgcaatggtaattctaaagatggcagacttttcgtcagaaactatggaggacaaagacggcataaagacatttttaaagtgctgaaagaaaaagaaaatcaccaacccagataacacccacaacagccagtgaaat

SEQ ID NO: 302923 - DNA, 580 bp, Homo sapiens
gtgataagcagaagcaatgattgctggttgctgaaactaccagtgccagtttaaaactcctgaaaactctcttggctgaagactggattgcacctgaccgttggagcatgtgggtgtccttgcagtgtgtctatatgtgtgttcttgtaagtggggggttaggagtggtagggttggggaaaaccagaagagatcaaataatcacagctatgagaaaggacattttatagaggattcacctttcctcaaatctttagctgcacattttattttactccattctcaattttattaattatttagagatctgtgtgagatctataaatagtacagcatacagattgaagaagcttagcaaacctcacagtatagtccaactagtgaaaatgaaagataaagagagaatctggaaagctgccaaagaaaaatgacactcacttaaaatgcaatggtaattctaaagatggcagacttttcgtcagaaactatggaggacaaagacggcataaagacrtttttaaagtgctgaaagaaaaagaaaatcaccaacccagataacacccacaacagccagtgaaat

SEQ ID NO: 302924 - DNA, 635 bp, Homo sapiens
agttattgtctggaacactgatgatcctttaatgttctcttttctggacataagaaacccctttctcttttctcttaagttattgtacttttataaacagaaatgaaacatttattctttctcccctcctgattgctccaggattggaaaactcttattgagtatttttattttcatggcaacacagttatttgcatgcattcaataagactatgttttacttgtaacaggatacattggatagattaccaaggcttttactggaatgtcacatgtgagaatctgcggtgaccagacagctttagggargtaaggttaactccaaagagccaatgcttacagagtccacttggaaaaaccatcttggtacctcaattacaggactccccgccttgcaggtgactaaggaaagtcacttcctggcagatccaggaaacttaagatatcttagggatgtctggtagagaagaattcgcccaaatctatagatattgcaggcaaagtctgggtcaactcccgaattgaagaatcttccttgaagatgtttccttgaagaagcttcaaggaatcccccacaacagatcacatctgagtaacccatgcgcccactgctgaataagccactcagaaagttc

SEQ ID NO: 302925 - DNA, 635 bp, Homo sapiens
agttattgtctggaacactgatgatcctttaatgttctcttttctggacataagaaacccctttctcttttctcttaagttattgtacttttataaacagaaatgaaacatttattctttctcccctcctgattgctccaggattggaaaactcttattgagtatttttattttcatggcaacacagttatttgcatgcattcaataagactatgttttacttgtaacaggatacattggatagattaccaaggcttttactggaatgtcacatgtgagaatctgcggtgaccagacagctttagggaagtaaggttaactccaaagagccaatgcttacagagtccacttggaaaaaccatcttggtacctcaattacaggactcccmgccttgcaggtgactaaggaaagtcacttcctggcagatccaggaaacttaagatatcttagggatgtctggtagagaagaattcgcccaaatctatagatattgcaggcaaagtctgggtcaactcccgaattgaagaatcttccttgaagatgtttccttgaagaagcttcaaggaatcccccacaacagatcacatctgagtaacccatgcgcccactgctgaataagccactcagaaagttc

SEQ ID NO: 302926 - DNA, 635 bp, Homo sapiens
agttattgtctggaacactgatgatcctttaatgttctcttttctggacataagaaacccctttctcttttctcttaagttattgtacttttataaacagaaatgaaacatttattctttctcccctcctgattgctccaggattggaaaactcttattgagtatttttattttcatggcaacacagttatttgcatgcattcaataagactatgttttacttgtaacaggatacattggatagattaccaaggcttttactggaatgtcacatgtgagaatctgcggtgaccagacagctttagggaagtaaggttaactccaaagagccaatgcttacagagtccacttggaaaaaccatcttggtacctcaattacaggactccccgccttgcaggtgactaaggaaagtcacttcctggcagatccaggaaacttaagatatcttagggatgtctggtagagaagaattcrcccaaatctatagatattgcaggcaaagtctgggtcaactcccgaattgaagaatcttccttgaagatgtttccttgaagaagcttcaaggaatcccccacaacagatcacatctgagtaacccatgcgcccactgctgaataagccactcagaaagttc

SEQ ID NO: 302927 - DNA, 485 bp, Homo sapiens
tccataatgacttagcagccacagactgtgtgaggtggggtgggggacagtggggacaggaggggtgaccatgcacaacccacaggtggacattccggggccatcgggactgggaagggccagctgatgggggctatayagcatcctggccacagaagggaatagaggcttggcttcttgggggtgctggaggcaagttttgggagggtgcaagaaggcactgtctggtgaataaagttgcctagttgtgcaggtaagagtctctctgggccaggctcagtggctcatacctgttagctcaatactttgggaggtcaaggctgaaggattgcttgaacccaggagttcaaaaccagcctgggcaacagagtgagactccatctctacaaaaagtttttaaaaattaactgagcatggtggtttacacctgtggtcccagctactcaggaggctgagacaggagaatcacttgagcctgggaggtc

SEQ ID NO: 302928 - DNA, 528 bp, Homo sapiens
atagaccctggagccaaattgtcaggacttcaatagtgattacacttcttattatcagtgtggtcttagtaaaatacttaacttattgcatccagatttccttatatgttaaataggtataataatataagattgtcatgaggattaaataactgagtgaagtaaaggctatagaataatgctcactatatttaagtgtttcataagtggtagctattattactaggtgctgtagtggatttaaatcasataggcaaattccttgatactgcatcaatcaaaagtctaattcccttttactcagatttgagctggccttagtgaagcattcctaatgaatagaatgcagggacttccaaggccaatgagaaaaagtgatataacttcaatatgctcttccctctatcttaggatgcccacccttggaacccagacactgctatgaggaaacaagcgactagctcccacttatgtgtgagaacatgtggtaggcattttctgttcctgcattaattcgcttaggattat

SEQ ID NO: 302929 - DNA, 528 bp, Homo sapiens
atagaccctggagccaaattgtcaggacttcaatagtgattacacttcttattatcagtgtggtcttagtaaaatacttaacttattgcatccagatttccttatatgttaaataggtataataatataagattgtcatgaggattaaataactgagtgaagtaaaggctatagaataatgctcactatatttaagtgtttcataagtggtagctattattactaggtgctgtagtggatttaaatcagataggcawattccttgatactgcatcaatcaaaagtctaattcccttttactcagatttgagctggccttagtgaagcattcctaatgaatagaatgcagggacttccaaggccaatgagaaaaagtgatataacttcaatatgctcttccctctatcttaggatgcccacccttggaacccagacactgctatgaggaaacaagcgactagctcccacttatgtgtgagaacatgtggtaggcattttctgttcctgcattaattcgcttaggattat

SEQ ID NO: 302930 - DNA, 589 bp, Homo sapiens
taaggagtccttttcccattgcttgcttttgtcagctttgtcaaagatcagatggctgcagctgtgcagctttatttctgggttctctattgtgttccattggtctaagtgtctgtaccagtacaatgctattttggttactrtagcctagcatagtttgaagtagggtagtgtgatgcctccagctttgttctttttgcttaggattgctttggctatttgcactttcttggttctatatgaagtttggaatttttttttctaatactgtgaagaatgacattagtagtttaataagaaaaacattaaatctgtagattgctttgggcagaatgaccattttaataatattgatttttcaaatctacgagcatagaatgttttttcatttctgtcgtctctgatttctttcagcagtgttttgtagttctccttgtagacacctttcacctccttggttagctgcattcctaggtatttcattttctttgtggctattgtaaatgagatcacgttcttgattggactctcagcctagacattacttgtgaatagaaatgctactgatttttgtacattgcttttgtat

SEQ ID NO: 302931 - DNA, 526 bp, Homo sapiens
gtatcctgaaacctagctaaaattattaatcagttctagtagccttttcacagagtctttagggttttctagatatagaatcatatcatcagtgaagacagatagyttaatttcttcttttactatttggatgccttctttctcttgcctgattgcagtagctaggatttccaatattatgttgaataagagttgtgagagtgggcatccttgacatgttccagttttcaagggaaatacagctttggctcattcagtataatgtgggctgtggggatttcataaatggctcttactattttgaggtatattcctttgatgcctagtctgttgagggttctattataaaatgatattgaattttatcaaaagcattttttgcatccattgagatgatcgcattgttcttttaattctgattatgtggtgaatcacacttattgatttgtgtattttgaatcagacttgcctctcaggaataaagcctacttgatcatggtgtattaactttatgatgtgctgttgg

SEQ ID NO: 302932 - DNA, 530 bp, Homo sapiens
acagctttggctcattcagtataatgtgggctgtggggatttcataaatggctcttactattttgaggtatattcctttgatgcctagtctgttgagggttctattataaaatgatattgaattttatcaaaagcattttttgcatccattgagatgatcgcattgttcttttaattctgattatgtggkgaatcacacttattgatttgtgtattttgaatcagacttgcctctcaggaataaagcctacttgatcatggtgtattaactttatgatgtgctgttggatttggtttgctaatattatattgaggactttttgcatgtatgttcatcagggatattggcatgaagttttgttttactgtgtgtgcctctatcagattttaggattaggctggtgctggtttcataaaataagttgaggagccccttttgcttgatttttttggaatagttttagtagtattgataccagctcttctctgtacatctggtagaattcagctatgaattcatctggtccagg

SEQ ID NO: 302933 - DNA, 592 bp, Homo sapiens
tgtgcataagatgccaacattgacagtagagaaatggaaacaacaaaaataaatagtagttggaataccaaaggtgctatgtgatctttatgtttaagtttttccttttctttttctggctactttcctttttaaatttatacagcatgcatatgatcttgayattttcaaaaatagatgatcataacaaaactgggtggtaataaagtatagtcttcaaagaacagaggtgtgtgtatctctgtgtgtgtgtgtgcattttaatgaggagctagagtaatagctggaaatggcaagggaaaatgatgatgcctaatctccttctagctcctgaggtcagtggagctgtgagaaggaaaaaaaaaatcctgctttacttccagtgcagttaagaaacagtgtcattaggagataggtttctccttggccaaaaagctgaaaaaatattaagaaaaatgttgaagttacaggatatgtatgtatgtatatatatgtatatatagacagttaatatggtcagatggcctttgataaaaattatactaatttctttgctcatcagaaaagtagagtgtctatttccccacattct

SEQ ID NO: 302934 - DNA, 621 bp, Homo sapiens
tatagaataaaagaagatttacatgcattgctgaagggaacataaattaataaaatctttgtggacacaactatgtattgagtttgcaaattgcccatattcagtgacctagaaacctttcatcttgaagttttagctaaggaaataatctgaagcatataataagatactactccttggactattttggtgtttaaatgagataattcattcaatatttaccatatgtactatatatatactatatttcctggtgcatgtaaacacaaaatgaatgttattattattatgaaacaaatctgagccataaaacatattcagaatcactgctagtagtgattatgtagattactgtgttacagagaataataagttcaatttggtttgttatgttattttaaaacttctctcaggaaataatttgacaatcatgacataaaaacccacatcttgaggcattttgtgtctagaagaattctataatataaataatgttctacttgatcattaagaagagtgataaaagtttaaagagaaacttgaaataataagaaacccagtatagtrtttaaccagagaaaggagaatggtacagtagacacttggacaaatatgtgctgt

SEQ ID NO: 302935 - DNA, 613 bp, Homo sapiens
gggataagtgagacggggagaaattgatggttttctgggtccccttcattccctccctctctttgtttcctttcttctcttcctccttttctccctccttccttcttttccttccttcttactttctttcaacatctcaacatttckattttgattcttggcttagctgacctgactctgagttagtctttgcacagcttgagagctgagaatagttatgggtatttccatggatgtatgaaagatgtcttgatgccaagacatcattattcttgtgaagtgagcataagttttagagtgagatagtcctagttgattcccagttatacagcttattagttgtgtgatattgtataagtcactgaacttcactgaacctcagttttcttaattataaattgggttccatatgaccaagtttgcaaggctgcggtacagctttggacatatagtaaatgttcaatatttgttgtcaattattgtacccctccatccggacaaacaaaaaacctcttggattttatgagagatgatttgctgcataggttacagtgcttatcaacctttcttgccaccatggtttatggctcagataacagtcacagaaactcac

SEQ ID NO: 302936 - DNA, 556 bp, Homo sapiens
aatcttctaacactgttgtcagatgaaccctagaaacttagaatcatggaatcatagatgttggcattacaaacagaatttaaagtgacctagtttagttattggatgttccttaatctttctatatcccaagccaaagctatacttaaagaacggtattgctagccttaatctttaaaaataatgtattttaggccagggacagtggctcatgtctgtaatctcagcactttgggaggctgaggaggttggatcacctgaggtcaggagttcaagaccagtctggcaaacatggkgaaaccccatctctactaaaaatacaagaaaattagctgggcatggtggctggcgcctgtagtcccagctactcgggaggctgaggcagaagaattccttgacccccggaggcggaggttgcagtgagccgagattgtgccactgcactccagcctgggctacagagcaagataccatctcaacaaaacaaaacaaaacaaaacatattttaaagtattttttcttctacttatttatcctcttcctcctcctctatctt

SEQ ID NO: 302937 - DNA, 554 bp, Homo sapiens
tttgcatggatccacaaggtctgtgtagtctattctcaagcagaaacaagaagcaaaaatcatattagagctatcttaaatattatgattttctaaattgtgttcatattgcttctctcccaagcatagaggaaaactgtattgattctaatcaaatgtggagaaagcccatatgaattaatgagaaaaaatattaattttaaagcataaaagacatgccattttattacttccaaatacaataactcaagttaatggaataataacaatgctaaaaaggcattctataatttcttgtttaatgaatcagcctgccaacaagtatttattggacaccacctctatacctagtaaacagtcttcagagtttgtgctacaaatttcaaagacacacawttataagaaatcactgtttttaatatgcttagctgctaggcaagaaattattaaagattgccactgagtcaaaaaaatgtatactgttaaaagttatcgtagttgttgctagtccatttgggctgctataaaaaatacgccacaaaatgggtagctta

SEQ ID NO: 302938 - DNA, 636 bp, Homo sapiens
tggttacagaatagatcccaactgcttctttctatagcattgtcacacttgtcattcccaatgaactatckttttttgctctccatgttattttatacatagataactaacaatgcaatctgttttcaatctttaacattagtcatttaatttgatatttatcctagatattacattctgatcatttttgctgataattggcaagattatttccacaattatattttgctttgacctacttcatatttcaatacaatgaaaagtcatcctcactatattatattggtcctttataaatcagtatcaattaatcaggtatgtgatcttcaagatcaagccaatgctgcttgttacaacatctaatccatcacaaacatgatcctctgaaacaaaaatcacatggaataattataatgtctattttcaccaaaatcaataagtttgcacttctacttgatagttttagtaatactgagtcatattctgatcaattatttttaacctgcatactttgctcttcatggctagattctagttgcatgaagacaagaacggatttatgtattatccagcatgaaatatgtcaggagccctagtaggaaaacactatgtccattatcacttaaagctcagtca

SEQ ID NO: 302939 - DNA, 470 bp, Homo sapiens
ttgttaccctatgccttttatgtgagacaattagcccatttacattcaaggttagtattgatatgtgagcttttgatcctgtcattgtgttgttagctggttgttatgcagacttgattggataattgctttatagtgcctgtaggctatgtgcttaactgtctttttgtggtagcaagtgccattgttttgatatcatgtttagtataccattgaggacttattgtaargctggtctagttgaaattatcccctgagcattagcttgtctgagaaagattttatttctccttcacttatgaatcttagtttagtaggatataaaattcttggttagaatttcttttaaggacactgaaaataggccccatctcttctggcttgtacagtttctggtgagaggtcttctgccagtctgatgggtttccctctgtacatgaattgacccttatctcaagctgcctataaga

SEQ ID NO: 302940 - DNA, 555 bp, Homo sapiens
gctattttgtatttcagctcttggattattttactggatgctttggatttcttggattgggtttcaacttccttctgatctcaatgtgcttcctttctacccagattctgaattctctgtttgtcattttagacatttcaatctcattaagaaccattgctagagagcaagtggactttttggaggtaaaggtgayactctggctttctgaattgtcaaaattattgtgctgattctttctcgtctaggagagctgatgttcctttaattgtggtgtaagttgagtacagtcagttggcttcttttttggatacttttagaaggccagggctctgtaaggaattgttatatgtaagtgaattcttgtacttggtttcaacagtgtacatattagcccaataatttttgatggtatagtttgagctctgatccagtagacagtgcttacaagtaatggtttgtagctaggctattacccagttgcacagcctttttggacttcctttcattcaaaggcatactctccagtgtatggatgggagagagatggccccc

SEQ ID NO: 302941 - DNA, 555 bp, Homo sapiens
gctattttgtatttcagctcttggattattttactggatgctttggatttcttggattgggtttcaacttccttctgatctcaatgtgcttcctttctacccagattctgaattctctgtttgtcattttagacatttcaatctcattaagaaccattgctagagagcaagtggactttttggaggtaaaggtgatactctggctttctgaattgtcaaaattattgtgctgattctttctcgtctaggagagctgatgttcctttaattgtggtgtaagttgagtayagtcagttggcttcttttttggatacttttagaaggccagggctctgtaaggaattgttatatgtaagtgaattcttgtacttggtttcaacagtgtacatattagcccaataatttttgatggtatagtttgagctctgatccagtagacagtgcttacaagtaatggtttgtagctaggctattacccagttgcacagcctttttggacttcctttcattcaaaggcatactctccagtgtatggatgggagagagatggccccc

SEQ ID NO: 302942 - DNA, 574 bp, Homo sapiens
ttttaggagtcactcattaaaagaagagagaagtcgactttaaaacttttgagtatgaatgactgatacaggataaaagtgcacttcatataataattaggaatatctacaaataatacatactgactttattttcttgtcttagaaaatgaactcccccttctaaataagctactctccactgtggccactgaatacccctgtttctctagcaagataaaatacgacttttgtgttctatctcttctagaaagtgctttctacttgtttaagtagtgctttcaatgaaaactttatgaacagtactgatcattcccttctctatattccaataactgttgttgtttctactctttatttgaastttcatatgtatttccttgtactgtttttattttaatgtagttgtttttgaattataaaatatatacaaaaagtgtgcaattcataagcgtacaacttgacaaatttcacaaaatgaacacacctaaagtactatgagtgtattagtccatttcatgctgctgagagacatacctgagactgggcaatttacaaaagaaagaggtttact

SEQ ID NO: 302943 - DNA, 574 bp, Homo sapiens
ttttaggagtcactcattaaaagaagagagaagtcgactttaaaacttttgagtatgaatgactgatacaggataaaagtgcacttcatataataattaggaatatctacaaataatacatactgactttattttcttgtcttagaaaatgaactcccccttctaaataagctactctccactgtggccactgaatacccctgtttctctagcaagataaaatacgacttttgtgttctatctcttctagaaagtgctttctacttgtttaagtagtgctttcaatgaaaactttatgaacagtactgatcattcccttctctatattccaataactgttgttgtttctactctttatttgaagtttcatatgtatttccttgtactgtttttattttaatgtagttgtttttgaattataaaatatatacaaaaagtgtgcaattcataagcgtacaacttgacaaatttcacaaaatgaacacacctaaagtaytatgagtgtattagtccatttcatgctgctgagagacatacctgagactgggcaatttacaaaagaaagaggtttact

SEQ ID NO: 302944 - DNA, 585 bp, Homo sapiens
tggtgtgctccttccttttctgttccacggagtgtgtctcttctcttctagggaagagaaaactggaggcaggggccaacattaccatttctccagctggactgttgtcagtgggcagatgctcctcatcactaagcagctacaataaagtcagtgcttctaccaatggatcactataaggaatagccttcctccacctgttctagataccacctaacctgactttccacaaatgaatacagatgccagtgaaagggtaagaagatcttaattgagaaagaattattcaaagctatcccaacctttctctaaaagctgcacatctgttacctattatttgggataccgaatttttctgcctcttacctagggtttacatagatcctcactattgatcgcctctcattaggtcattaactttcctwggaggaaacattattgattgtttttcaacattcatgttctattctcccttcctaacagctttcaggttttaatttggatatccatattcgtgcccatgtaacctacatattttatgtaaagctgattcagattctcagacctcaggggtagaccttggtt

SEQ ID NO: 302945 - DNA, 430 bp, Homo sapiens
ctctgaactggcactcctcgataagaattttggaaaatattgtagctttaactacttgtgcgctatactcttaggacatggggacacttagcaacttgtatcttcagctttggattttagctatttcaggacaacatagaaatctcatttgtcacctaggtgcataatctttatctctatgtttatacctttatctatacttacagccatagccatacctatgcctatrtgaatatccatatacatgcttatatctatatttatacacatatatatccatatttatgcacatgtctatgtataaatatatacatccagctgcatacttaatacagttatgcatcacttaacagcaggtatacattctgataaatgcatcattaggtgattttgtcattgtgcaaacatagagtgtacttacacaaaccta

SEQ ID NO: 302946 - DNA, 494 bp, Homo sapiens
cctggcagggtacaaataaacaataattcacagttattagcatttactttctataaaatttcaaaagaatagatgcaagcaggactgagtgtgcagaatctccgtaaactaaaacattgtctgcatgaagccgtaataaccaatgaaatgaaaaaatacataatcaataaaagtgttttttgattatgtatgaggccaaacaatttcttggatcatattgyttttctgattttaatgaaatcaaccagttgctttcctgtcatatagaaaaagctataaagataaacttcggtattatagaaacatccagatgtaaaaagaattagcaattatggttgggatggaagtctagaaagcatgaaaagatccaacttgaacacagacagtaatgtttaaatttatgttattccaagagaaaggcatataagtaatagaagtagaaaatgtgcatttgcactttccagttaactaaaaaacttggtgtcatcagtagc

SEQ ID NO: 302947 - DNA, 577 bp, Homo sapiens
taattgatgtagctgtactttgaggttaattgcatatggtaagccctcaataaatagctggttaatttatttaccaactaaattcgtattctggaggaaataagcctgtgaaagtcagttcatgaaggggcttacaggtttacccaaataatttggatttattctctaacctaggacctgaaaatgcaaatgtctatagggatcttgtaaaaatgtgaataagttggccaggtgtaaaaaaatagtaattatgaagactataccttattactgtcaacacatggatgtctaatacatactcctggcccttmggctacatacataaataagtacaaacaatatcaatataacatgatgatttgtctccattcatgtaccaaaagcaataagatcataaaggagggcttacttaattcatctgaaggaagcaggaagatattactgatattttatttgaggtgaacttgaggaataagcagaagcttatctctctgtttctagctacactccaacatactccctgcattccaatcaggttggtctcctaagtgtcccgcaacaccccacattcctatgt

SEQ ID NO: 302948 - DNA, 465 bp, Homo sapiens
tgttgcaacactgtttacaataactaagatttggaagcaacttaagtgtccatcaacagatgaatggatacataaatgtggtacttacacataatggagtactattcagccataaaagaatgagattctgttatttgcaacaacatggatggaactggaggtccttatgttaagtgaaattagccaggcacagaaacacaaacactacgtattgtcacttttttgtgggatctgaaaattcaaacaattgaactcatggagatagagaatagagaatagaagtatggttaccagagactgggacggatagtggggaagagggaggtggggatggttaatgggtacaaaacaaaaaattagaaagaatatctaaaacctagtatttgaaagcaggaggactacagtcaataatamtttaattatacatttaaaaataacttacagtgtataattggattgtttgta

SEQ ID NO: 302949 - DNA, 559 bp, Homo sapiens
gtttacaagttttcccatcttccccagttttctgtcaggcttagtcataaacactgtaccatcttctctgagcatgtaatctcagattcaccgtactttttcacttctcatgactctagtagtcaacaaatcaagaaacgttatcatttccctaattccacaaagccataactgtatttttcaaccaaaacctgcccttgagtcagaattggattattccacaggcaaaccaggcaaaggtctgttgggcctcagattaactcgtatttttccagaaagggagaggcagcatcaccagctagctgtaacaatattcttgtccttgataatgacatcacactggatgacaccaatccttgaaaaccttcaaggtagcttgatgttatggaaattacccatgcccctgagcagatttyattagacacttttatttgtgagccaatggtataatcacattgtgctaggaacaactagagagaaaccaagcgtgcacagtctatcacgttaagaacctaaatatggcttgagtggcattattgtattgtggtgaagaacacag

SEQ ID NO: 302950 - DNA, 487 bp, Homo sapiens
tgaactccaaaagcggtaatgaggaaaacacctctctagtatttgtttgtactaactgatgtacgtatgtgtgtgtatatgtatgtgtgtatgtatgtatgtgtgtgttgcatttgaaagagaaggagctgagaataaagccagcagtttgatatttatctgcaggtctatggactgggtttgaatggccatgtttaaaagactgacagaatgataactgtaagagagatctgggaagtgccaagcaggctgtgatggtcagaagctgaagaaactctccagtgagactttgtgaatagcaaacagttactctggagtgttgcagaatagcttctgaaggctgactctrttgattaaccatcacttactgcacttcactttagtctacttgcctagttcaaataaatcgataccccctttagtattgggcacttgaacaaacaaacaaaaacatcctatttagtggggcacaagccataataggaaa

SEQ ID NO: 302951 - DNA, 514 bp, Homo sapiens
tatcactacattttttgagaaggaaagaatttactcagactgaaaaatgaaaagtagctctgaatgcttctgtgcaatagtgtgtctctgtacttagcagcgactgctaaaagtctttcatcgaagtatataatacatttgctccatttaagaattacagcttggcatgcaatgtgtccaattttgtcattacttgagggagaagaaaaagtgtgatcagtatactagaaatcttgttctggaaattcagagttgcattgcttttcttgtaattagcatcttaacctctgggtatattttattagagagacaagaaaaattccagggatcctgtagagttgtaccatstaatacaagcggcaatttaaattcaaatttaaataattaaagttaaataaaagtagaaatttaattcctcagttgcattggccacattttaattgctcagtagcttcttgtagctagttgctacagtattgaacagaacaaatatatagaatattggacagcacag

SEQ ID NO: 302952 - DNA, 514 bp, Homo sapiens
tatcactacattttttgagaaggaaagaatttactcagactgaaaaatgaaaagtagctctgaatgcttctgtgcaatagtgtgtctctgtacttagcagcgactgctaaaagtctttcatcgaagtatataatacatttgctccatttaagaattacagcttggcatgcaatgtgtccaattttgtcattacttgagggagaagaaaaagtgtgatcagtatactagaaatcttgttctggaaattcagagttgcattgcttttcttgtaattagcatcttaacctctgggtatattttattagagagacaagaaaaattccagggatcctgtagagttgtaccatgtaatacaagcggcaatttaaattcaaatttaaataattaaagttaaataaaagtagaaatttaattcctcagttgcattggccacattttaattgctcartagcttcttgtagctagttgctacagtattgaacagaacaaatatatagaatattggacagcacag

SEQ ID NO: 302953 - DNA, 290 bp, Homo sapiens
attcctcaagtagctcatttgtgcaactacaaaatatatttccaaaaagcagttctatagaggaagcagctacttgtgckgctgtttgatagtcagcatgatctaacaatcagatttagaatatctttaccaatagctctaaaagtttagtgtgagttagattcactttgacagttttaaagtgcagattatcctcccacaatctccaaccacaattctgcttagtaggtttgacatgtaatcaagaaatacgactgtttaatagctaacaagatgaacttgatgcttat

SEQ ID NO: 302954 - DNA, 618 bp, Homo sapiens
gtgtattttttttcaatgttgtcaaacatccattgactgtaggtaggtccctttataaatatccactaataaagtgacaaagtgcctttgtcactttattcctggaatttctrttttgctctattgagtattgtgtccatttttatatcagtatcatattgtttttgttactatagccttatagtataattagaaggaatgtaaatttgtcccacctctattaaaacagtatgaaaattttttcaagtattaaagagccacaattcactctatcaatcctatactgggtgtatacccaaaagaaaaaatatcattataccaaaaaagatatttgcactcatttatttatagcagcaatattcatagtaccaaagatattgaatcaacatgtgaccatcaacaaataactggataaagaaaatgatgtgatatacatatatacatatatacacacacatacacgcacaatgaatactacacagctataaaaaataaatcatttcacttgcagcaatatggaaggataattttacactttatgtcttagtctgttttgtgctgctgtaacaaaatacctgagactgggtaatttataaaaaatagaaaattattttctga

SEQ ID NO: 302955 - DNA, 618 bp, Homo sapiens
gtgtattttttttcaatgttgtcaaacatccattgactgtaggtaggtccctttataaatatccactaataaagtgacaaagtgcctttgtcactttattcctggaatttctattttgctctattgagtattgtgtccatttttatatcagtatcatattgtttttgttactatagccttatagtataattagaaggaatgtaaatttgtcccacctctattaaaacagtatgaaaattttttcaagtattaaagagccacaattcactctatcaatcctatactgggtgtatacccaaaagaaaaaatatcattataccaaaaaagatatttgcactcatttatttatagcagcaatattcatartaccaaagatattgaatcaacatgtgaccatcaacaaataactggataaagaaaatgatgtgatatacatatatacatatatacacacacatacacgcacaatgaatactacacagctataaaaaataaatcatttcacttgcagcaatatggaaggataattttacactttatgtcttagtctgttttgtgctgctgtaacaaaatacctgagactgggtaatttataaaaaatagaaaattattttctga

SEQ ID NO: 302956 - DNA, 618 bp, Homo sapiens
gtgtattttttttcaatgttgtcaaacatccattgactgtaggtaggtccctttataaatatccactaataaagtgacaaagtgcctttgtcactttattcctggaatttctattttgctctattgagtattgtgtccatttttatatcagtatcatattgtttttgttactatagccttatagtataattagaaggaatgtaaatttgtcccacctctattaaaacagtatgaaaattttttcaagtattaaagagccacaattcactctatcaatcctatactgggtgtatacccaaaagaaaaaatatcattataccaaaaaagatatttgcactcatttatttatagcagcaatattcatagtaccaaagatattgaatcaacatgtgwccatcaacaaataactggataaagaaaatgatgtgatatacatatatacatatatacacacacatacacgcacaatgaatactacacagctataaaaaataaatcatttcacttgcagcaatatggaaggataattttacactttatgtcttagtctgttttgtgctgctgtaacaaaatacctgagactgggtaatttataaaaaatagaaaattattttctga

SEQ ID NO: 302957 - DNA, 301 bp, Homo sapiens
aaaaaataaatcatttcacttgcagcaatatggaaggataattttacactttatgtcttagtctgttttgtgctgctgtaacaaaatacctgagactgggtaatttataaaaaatagaaaattattttctgatagttctgtaggcaaggaagtcratgatcaagataccagcatgtaatgagggccttctgttgcactctcagatagcattagtttaaatggcaagagaaaggcagaactctatttgagagggctgttgcaaccttacagcatgatacattttgtgaaatgtggttttgaa

SEQ ID NO: 302958 - DNA, 645 bp, Homo sapiens
tgtagtgtagaggagtgtcttagtttgggctgctatacaaaataccatagattgagtggcttacaaataacaaaaaaagtatttcttactgttctaggggttggaagtccaaagtcagagtgccaggatgttctggttttggggagggcccttttgcaggctgcagactgytgggtttttgtataagcacatggggaaagaagtgagagctctcttaggtcccttttataagaacactaagcctattcatgaggcctctactatcacaacctaattacctcctgaaggtcgcacatactaataccattacattgacagttaagatttcaatatacagattttgagggtacactttaaaaattcagtccgtaacattctgccccaggttccccaaattcatgtcttcacatgcaaaatgcagtcattccattccaacaaatccacaagtcttaactcattccagcctcaagtccagtctaaagtccaaggtcttatttaaatattacctaaatcagatgcaggtgagcttcacggtacagttcattctcacaaaatttctcttcatctgtgaacctgtggaatcaaacaatatgaattttcaaaatacaatggtgagacaggcataggataaacattcccattcca

SEQ ID NO: 302959 - DNA, 645 bp, Homo sapiens
tgtagtgtagaggagtgtcttagtttgggctgctatacaaaataccatagattgagtggcttacaaataacaaaaaaagtatttcttactgttctaggggttggaagtccaaagtcagagtgccaggatgttctggttttggggagggcccttttgcaggctgcagactgctgggtttttgtataagcacatggggaaagaagtgagagctctcttaggtcccttttataagaacactaagcctattcatgaggcctctactatcacaacctaattacctcctgaaggtcgcacatactaataccattacattgacagttaagatttcaatatacagattttgagggtacactttaaaaattcagtccgtaacattctgccccaggttccccaaattcatgtcttcacatgcaaaatgcagtcattccattccaacaaatccacaartcttaactcattccagcctcaagtccagtctaaagtccaaggtcttatttaaatattacctaaatcagatgcaggtgagcttcacggtacagttcattctcacaaaatttctcttcatctgtgaacctgtggaatcaaacaatatgaattttcaaaatacaatggtgagacaggcataggataaacattcccattcca

SEQ ID NO: 302960 - DNA, 364 bp, Homo sapiens
ttcacctttcactgtggcacgaagttcacaccagatgccagcaccatgctctttgacagcctccagaactgtgagccaaataaccttctattgtttacagtgctacacagtttgtggtattctgttatagcagcagaaaataaactaagatatgtgtcttcagaggcataagagagaaaaaaccctttttttttttttttttttttttgtattctgtcttctctgaccaggtttgaggtgaactaattgaaactgataggcttcaaactacagttccattggtagtaatgaaakttgggtcgtacgaaagcaagaaaaacaaacaaacatatgttttccttttttagaggaaccaattgtgtgc

SEQ ID NO: 302961 - DNA, 446 bp, Homo sapiens
tcttgtgctcattctgcaaatttctattcttcttccaccttgaataatttttaggcctttcatttttttccttttcccctcagtggtatttcttttattaaaaatcctagattgacatcgttagtgagttacacttctaattttttctttctgtgcccaatagtctaagattattcaaatgtgatagcaccctttgcaccaaaataaatacatttgggcctaattaacttctkttcattaaaaatgaccttgttgcgattaagcaggcattaacacagactcagctttcccagagatacatttagaagtcaccaaaagagaagggaacttttagacactctgagccttccagtcatatgactcagacaacactgaattctgatggcgttattaacaatatcatctttaataagagattcatttgtccaataatgctaatgaatgct

SEQ ID NO: 302962 - DNA, 541 bp, Homo sapiens
caactgcacaaatgcatctctaagtaaattattttaaaagtacagttaaaggaaacaagtaggtgctattaagtacatgatataatatcagggttcaagaaaattttcagagcaaatggcaaatgagatacgtatattcagtctgcccttcaagtctgcaggttcaaccaattgtgcatgaaaactatttggaaacattaataacagtgtaacaagtaaaaatataaataaaaatacattataatgatgatttacatagcatttacattgtattaagtattataaatagagatgatttaaagtagattactaaaatcatctacttcagtaatgttatagcaaatataacatatatggttacctgcaaatactatactatgccattttatattagaaacttgaacatccatggattttggtatctgggggcaggaagttcctgaaaccaattccacatggataccaagggaccactctgttatctagccaaaaatgatgtagtggaaagagraaagagtgtttgaagcaaatgagtgtgtgc

SEQ ID NO: 302963 - DNA, 634 bp, Homo sapiens
aatgtttttccatttgtatgtgtcctctcttatttccttgagcagtgatttgtagttctccttgaagaggtccttcacattccttgttagctgtattcccaagtattttaayctctttgtagcaattctgaatggaagttcactcatgatttggctctctgcttgtctgttgttagtgtataggaatgttgtgatttttgcacgttgattaataaggtaactttttaatgaagaaaacaattagtaatacattaatgcatgtaaggtaagcaaaatagattaaacatttaatttaaagcaaagataatgactttaaaaataattttactattgacattcacattagtgttttcacaaacatagataatcgtttccattgtccttaaatatattttttaatactttctaataaaccactctaatattgtggaaatatatattgagagatatacatattgacattagatcattctacgtaggtttgttgcttttaaataaatattcaagctttgtgaaaagcacatgtaggcaccacatacttgaattattaaggctaaaacttaagaatttggtgctgtgagtacgaataataaaaacgtcattcatttatctcttttctcaattataagctttt

SEQ ID NO: 302964 - DNA, 634 bp, Homo sapiens
aatgtttttccatttgtatgtgtcctctcttatttccttgagcagtgatttgtagttctccttgaagaggtccttcacattccttgttagctgtattcccaagtattttaacctctttgtagcaattctgaatggaagttcactcatgatttggctctctgcttgtctgttgttagtgtataggaatgttgtgatttttgcacgttgattaataaggtaactttttaatgaagaaaacaattagtaatacattaatgcatgtaaggtaagcaaaatagattaaacatttaatttaaagcaaagataatgactttaaaaataattttactattgacattcacattagtgttttcacaaacatagataatcktttccattgtccttaaatatattttttaatactttctaataaaccactctaatattgtggaaatatatattgagagatatacatattgacattagatcattctacgtaggtttgttgcttttaaataaatattcaagctttgtgaaaagcacatgtaggcaccacatacttgaattattaaggctaaaacttaagaatttggtgctgtgagtacgaataataaaaacgtcattcatttatctcttttctcaattataagctttt

SEQ ID NO: 302965 - DNA, 605 bp, Homo sapiens
tgttgtttataattctagggaaaggattcttaaaaggacaaaaagaagcagttcaggaacttcattataaatcataatcatgaaattataatgcaatattttaaggaagacatataatgttttaattctaatatggaaatcacaggggtaggttatatacaatgccaataatcatcccaattatggtctcagtttggctggtacaaaagtcagatgggttctggcaaytatttgtagaatataaatagaattatttataaattttaaaaaaggttgcagcaattagatgaaaactgtgaccacatttctacattgaaagatgatttttaatttctgattggtatgcagccattgatttggcttatgtgatcttacgagtcactgctaatgctggatatcaagagcaatttgtttttctcttttatggccagaagtttgatttagtgttttccgagccacctggatatttaaattatctggcatgatatcataatccactaagatgagctttaaacagatggcctcaacctaactcaaatgctaaagttgctcattacattggtgccgtattaacagcagtaattgtgaaaaaattgtgtgatgct

SEQ ID NO: 302966 - DNA, 605 bp, Homo sapiens
tgttgtttataattctagggaaaggattcttaaaaggacaaaaagaagcagttcaggaacttcattataaatcataatcatgaaattataatgcaatattttaaggaagacatataatgttttaattctaatatggaaatcacaggggtaggttatatacaatgccaataatcatcccaattatggtctcagtttggctggtacaaaagtcagatgggttctggcaactatttgtagaatataaatagaattatttataaattttaaaaaaggttgcagcaattagatgaaaactgtgaccacatttctacattgaaagatgatttttaatttctgattggtatgcagccattgatttggcttatgtgatcttacgagtcactgytaatgctggatatcaagagcaatttgtttttctcttttatggccagaagtttgatttagtgttttccgagccacctggatatttaaattatctggcatgatatcataatccactaagatgagctttaaacagatggcctcaacctaactcaaatgctaaagttgctcattacattggtgccgtattaacagcagtaattgtgaaaaaattgtgtgatgct

SEQ ID NO: 302967 - DNA, 673 bp, Homo sapiens
tcagtttggctggtacaaaagtcagatgggttctggcaactatttgtagaatataaatagaattatttataaattttaaaaaaggttgcagcaattagatgaaaactgtgaccacatttctacattgaaagatgatttttaatttctgattggtatgcagccattgatttggcttatgtgatcttacgagtcactgctaatgctggatatcaagagcaatttgtttttctcttttatggccagaagtttgatttagtgttttccgagccacctggatatttaaattatctggcatgatatcataatccactaagatgagctttaaacagatggcctcaacctaactcaaatgctaaagttgctcattacattggtgccgtattaacmgcagtaattgtgaaaaaattgtgtgatgctctgtctttattgattttattgcaaaaaagggtgtgttattacatagaaaatcatatacatggcttcccagacagtatagtcccagttatcagggacaaatatactcaagactagacagaaactattatccttgagccccctaaataccaaaactaatacttagaaagaaactttctaatatatttttaggagcagcatttatcacatctagtatgatcatgcctcttaatatggttgctttaaaattttttaaaaa

SEQ ID NO: 302968 - DNA, 673 bp, Homo sapiens
tcagtttggctggtacaaaagtcagatgggttctggcaactatttgtagaatataaatagaattatttataaattttaaaaaaggttgcagcaattagatgaaaactgtgaccacatttctacattgaaagatgatttttaatttctgattggtatgcagccattgatttggcttatgtgatcttacgagtcactgctaatgctggatatcaagagcaatttgtttttctcttttatggccagaagtttgatttagtgttttccgagccacctggatatttaaattatctggcatgatatcataatccactaagatgagctttaaacagatggcctcaacctaactcaaatgctaaagttgctcattacattggtgccgtattaacagcagtaattrtgaaaaaattgtgtgatgctctgtctttattgattttattgcaaaaaagggtgtgttattacatagaaaatcatatacatggcttcccagacagtatagtcccagttatcagggacaaatatactcaagactagacagaaactattatccttgagccccctaaataccaaaactaatacttagaaagaaactttctaatatatttttaggagcagcatttatcacatctagtatgatcatgcctcttaatatggttgctttaaaattttttaaaaa

SEQ ID NO: 302969 - DNA, 576 bp, Homo sapiens
ctcattacattggtgccgtattaacagcagtaattgtgaaaaaattgtgtgatgctctgtctttattgattttattgcaaaaaagggtgtgttattacatagaaaatcatatacatggcttcccagacagtatagtcccagttatcagggacaaatatactcaagactagacagaaactattatccttgagccccctaaataccaaaactaatacttagaaagaaactttctaatatatttttaggagcagcatttatcacatctagtatgatcatgcctcttaatatggttgctttaaaattttttaaaaaaatttttagatattatctcattctatcaccgaggctggtctgaagtggtgcaatcatggctcactgaagccacaacctcctagacttaagcgatcctcccacctcagcctcctgagtagctgggactaaaggcacatgccaccatacccagctaattatttaaattttttatagagctggcrtcttcctatgttgcccaggctagtcttgaactcctgggaacaagcgatcctctcgtctcggcctcccaaagagctgggatta

SEQ ID NO: 302970 - DNA, 597 bp, Homo sapiens
taagttcaagtatcaagcttttcctaataacagctcctagtacttattgggaattaaactctcttagtattctttattttttatacatccatgtttttttcttttattaagacaattaataaatstaaaaatccatatatttttggtggtgctttggtatatgtatacatatgaaagattaaatcaaatttaaatcaagctaagggacataaccataaccttacatatttatctttttttgctgtgagaacattcaagatctacttatttaccaattttcaagaatacaatgcattgttattaaatctactcaccatgcgataccatagatatccagaacatattcctcctatctgactgaagatgtttaccctttgaccaaaatctctgtatttccactcccatccccaagatccaacaaccacccttctgtatccatgtgttttcatcatttagcaccattgtgtctgccgcctgtatgaattcaacttttttatattccacgtgtaagtgagatcaggcagtatgtctttctgttcctggcttatttacatagcataatgtccttcaggtttctccatgctgttgcaaataaca

SEQ ID NO: 302971 - DNA, 597 bp, Homo sapiens
taagttcaagtatcaagcttttcctaataacagctcctagtacttattgggaattaaactctcttagtattctttattttttatacatccatgtttttttcttttattaagacaattaataaatctaaaaatccatatatttttggtggtgctttggtatatgtatacatatgaaagattaaatcaaatttaaatcaagctaagkgacataaccataaccttacatatttatctttttttgctgtgagaacattcaagatctacttatttaccaattttcaagaatacaatgcattgttattaaatctactcaccatgcgataccatagatatccagaacatattcctcctatctgactgaagatgtttaccctttgaccaaaatctctgtatttccactcccatccccaagatccaacaaccacccttctgtatccatgtgttttcatcatttagcaccattgtgtctgccgcctgtatgaattcaacttttttatattccacgtgtaagtgagatcaggcagtatgtctttctgttcctggcttatttacatagcataatgtccttcaggtttctccatgctgttgcaaataaca

SEQ ID NO: 302972 - DNA, 597 bp, Homo sapiens
taagttcaagtatcaagcttttcctaataacagctcctagtacttattgggaattaaactctcttagtattctttattttttatacatccatgtttttttcttttattaagacaattaataaatctaaaaatccatatatttttggtggtgctttggtatatgtatacatatgaaagattaaatcaaatttaaatcaagctaagggacataaccataaccttacatatttatctttttttgctgtgagaacattcaagatctacttatttaccaattttcaagaatacaatrcattgttattaaatctactcaccatgcgataccatagatatccagaacatattcctcctatctgactgaagatgtttaccctttgaccaaaatctctgtatttccactcccatccccaagatccaacaaccacccttctgtatccatgtgttttcatcatttagcaccattgtgtctgccgcctgtatgaattcaacttttttatattccacgtgtaagtgagatcaggcagtatgtctttctgttcctggcttatttacatagcataatgtccttcaggtttctccatgctgttgcaaataaca

SEQ ID NO: 302973 - DNA, 597 bp, Homo sapiens
taagttcaagtatcaagcttttcctaataacagctcctagtacttattgggaattaaactctcttagtattctttattttttatacatccatgtttttttcttttattaagacaattaataaatctaaaaatccatatatttttggtggtgctttggtatatgtatacatatgaaagattaaatcaaatttaaatcaagctaagggacataaccataaccttacatatttatctttttttgctgtgagaacattcaagatctacttatttaccaattttcaagaatacaatgcattgttattaaatctastcaccatgcgataccatagatatccagaacatattcctcctatctgactgaagatgtttaccctttgaccaaaatctctgtatttccactcccatccccaagatccaacaaccacccttctgtatccatgtgttttcatcatttagcaccattgtgtctgccgcctgtatgaattcaacttttttatattccacgtgtaagtgagatcaggcagtatgtctttctgttcctggcttatttacatagcataatgtccttcaggtttctccatgctgttgcaaataaca

SEQ ID NO: 302974 - DNA, 609 bp, Homo sapiens
tatttgttttatatatttagctgctccaatattgggtgcatatatatttacatttgttatatcctgttcatgaattaacccctttatttttacataattattttccttgtttctttacagtttttgatctaaagtctacattgtcagatataaataacttcccctacaatattttggcttccatttgcatgaaatatctttttccatcccttcatttccagtctatgtgttccttatgggtaaagtgagacttttgtaagcagyatatatttgggtcttttttttttttatttttatacatccattcagtcactgtatgtcttttgttgtacttactagtgagtattgtactttcatgttactaattatcatccattttttttcaccttgaaaaagtcccattagcatttcttgaaaggcatatccagtgatgatgaccttcctcagctttatttgtctgggaaagactttttttctccttcatttcagaaggacatctttgtgagttaaagtattctttcttggcaaaataaccacattcttgttccctttcatcacttcaattagataatcccactgttttctggcctgcaaagtttctgctgataa

SEQ ID NO: 302975 - DNA, 609 bp, Homo sapiens
tatttgttttatatatttagctgctccaatattgggtgcatatatatttacatttgttatatcctgttcatgaattaacccctttatttttacataattattttccttgtttctttacagtttttgatctaaagtctacattgtcagatataaataacttcccctacaatattttggcttccatttgcatgaaatatctttttccatcccttcatttccagtctatgtgttccttatgggtaaagtgagacttttgtaagcagtatatatttgggtcttttttttttttatttttatacatccattcagtcactgtatgtcttttgttgtacttactagtgagtattgtactttcatgttactaattatcatccattttttttcaccttgaaaaagtcccattagcatttcttgaaaggcatatccagtgatgatgaccttcctcagctttatttgtctgggaaagactttttttctccttcatttcagaaggacatctttgtgagttaaagtattctttcttggcaaaataaccacattcttgttccctttcatcacttcrattagataatcccactgttttctggcctgcaaagtttctgctgataa

SEQ ID NO: 302976 - DNA, 609 bp, Homo sapiens
tatttgttttatatatttagctgctccaatattgggtgcatatatatttacatttgttatatcctgttcatgaattaacccctttatttttacataattattttccttgtttctttacagtttttgatctaaagtctacattgtcagatataaataacttcccctacaatattttggcttccatttgcatgaaatatctttttccatcccttcatttccagtctatgtgttccttatgggtaaagtgagacttttgtaagcagtatatatttgggtcttttttttttttatttttatacatccattcagtcactgtatgtcttttgttgtacttactagtgagtattgtactttcatgttactaattatcatccattttttttcaccttgaaaaagtcccattagcatttcttgaaaggcatatccagtgatgatgaccttcctcagctttatttgtctgggaaagactttttttctccttcatttcagaaggacatctttgtgagttaaagtattctttcttggcaaaataaccacattcttgttccctttcatcacttcaattagataatcccactgttttctggcytgcaaagtttctgctgataa

SEQ ID NO: 302977 - DNA, 552 bp, Homo sapiens
aagttaacaggttctttcgcccactcgatcaattctgctgctgactgactctttttcattttattcattgyattcttcagcttcataattactgtttggttctttttgtataatgccaatctctctgttaaacattttctggatgttgtttaattgtcagtttgtgttgacttgaagtgtgctgaactccttaaaacaattattttgaattatttgtctgacaattcacatatcttaatttctttggtgtaaatcacaggaaaattattgtgttctttttgtggtgttgattccttggtcttctatagttcttgttacctttcattaatgtatgtacatttcaccccttgccaactttatggattgattttacactggaaagtccttccctacaggtataagtgatggcactgtctaggatgggtgcagatgttctggctctgatgagaatgcagtggtcatagtctctgtgaagcttatcagctgatgttggtgtcagcaaaaaccccagggatctttaacagccaaggctgtggctatctgcaccaataa

SEQ ID NO: 302978 - DNA, 552 bp, Homo sapiens
aagttaacaggttctttcgcccactcgatcaattctgctgctgactgactctttttcattttattcattgtattcttcagcttcataattactgtttggttctttttgtataatgccaatctctctgttaaacattttctggatgttgtttaattgtcagtttgtgttgacttgwagtgtgctgaactccttaaaacaattattttgaattatttgtctgacaattcacatatcttaatttctttggtgtaaatcacaggaaaattattgtgttctttttgtggtgttgattccttggtcttctatagttcttgttacctttcattaatgtatgtacatttcaccccttgccaactttatggattgattttacactggaaagtccttccctacaggtataagtgatggcactgtctaggatgggtgcagatgttctggctctgatgagaatgcagtggtcatagtctctgtgaagcttatcagctgatgttggtgtcagcaaaaaccccagggatctttaacagccaaggctgtggctatctgcaccaataa

SEQ ID NO: 302979 - DNA, 552 bp, Homo sapiens
aagttaacaggttctttcgcccactcgatcaattctgctgctgactgactctttttcattttattcattgtattcttcagcttcataattactgtttggttctttttgtataatgccaatctctctgttaaacattttctggatgttgtttaattgtcagtttgtgttgacttgaagtgtgctgaactccttaaaacaattattttgaattatttgtctgacaattcacatatcttaatttctttggtgtaaatcacaggaaaattattgtgttctttttgtggtgttgattccttggtcttctatagttcttgttacctttcattaatgtatgtacatttcaccccttgccaactttatggattgattttacactggaaagtccttccctacaggtataagtgatggcactgtctasgatgggtgcagatgttctggctctgatgagaatgcagtggtcatagtctctgtgaagcttatcagctgatgttggtgtcagcaaaaaccccagggatctttaacagccaaggctgtggctatctgcaccaataa

SEQ ID NO: 302980 - DNA, 585 bp, Homo sapiens
aggttacagcacgctaccagttacctcactcaggtcctaatataatgtttatgttatgcagcctcctccatgatttctagataatgaaaatatttgattgtaggagtattcttaccatatctggtactttcatagttcttttggctcttgacaagaaagcagcatatttgttagtcaagttaggtaattcatcagaaattcccacaccctgtgaatgccaaaattcctgttgaaagaaggggttaaaaagagtacatcatttatttttatcaatacaagaggcactataaataataagtttgcaatgaagttcatcagtattatctggcattaaataaagacacatattcataaacaaataaaattttcaaaatatgacacagaaagaaaaagctgtaagtcaatgagatattaaaatggaaaaagaattgattatatgaacctctaggtaagtataatggatctgcacacattacttaaacatattagctatgttctatttcataaccagcaagttctgtytcaataatatattagtataagatacttagccaattatatagtattatttaacaatttattatt

SEQ ID NO: 302981 - DNA, 508 bp, Homo sapiens
tggtgtttatcttgctatagtaatgctgtgatattgaatatgggaaaaaatcactaagggaattaagacaccaagatacagtgccaaaaaaactttccttcgtcatttctgaatattttttgtcccaaatgaaacaagtataaatggtagtagtaaaaaagaaaaaaaagtagaaaagtatagttctatattgaatcagtaggaatacagcagaaacttgactctgggatattttgccctattattcaatgatacatgttgcttaatattactatagtattacaaagaaaaaaaacactaaaaattaacatagaaaataatatttatataagtytggtcttataatcaattggaaatgattaaagagaactatataatgagttaatctatgcatgaattcttgttagatgttttagtctgttctcatactgctaataaagatgtacctgagactgagaagtcttatgagaattacatctataatttctggcaaaatttaatctttctg

SEQ ID NO: 302982 - DNA, 600 bp, Homo sapiens
attttagaaaacacattttttcttgttccttacatccatattatcaccctcaagcatatgctaacaacattatcttccacttccaaagaatcacaaaatatggtaagatcatgactaggggaggggattcttacatgaaaaccccacttctggtttgagtcccatgttaaacatgaaatgtcatgataggtaagtcatcaaagaaatgctggacaccattttctttttgtctgcatcaagagtatatacagtaaaactaggctgaaaataagcaacagaggcaatatttccatggattatttgtgtatcttttggggctgcctctatggtatgtgaaaagaaacyggaagagattataaaaacacaaagagatcctgtgcatacaatatgcctagtgtaaataggaaagctttgcgaagatcttgattgtgcctactatacactttagttttcttatcagaagacattattgttcccatttcctgtaacaccctacgtggtgtcaccatctatttcttcttccagtgcctagactggatataattgataagtttggctactgccacacagaaactattttttttaataacttgaagcaaa

SEQ ID NO: 302983 - DNA, 599 bp, Homo sapiens
accattgtcagggaaaaatagtatttgtagatgagatcatcaaatttgttggcgattctttatacatcatagaaaataaagaagggacatgaagaatggatataatagacatttctcatggttttttggtggttttttttttctctttttggcttattgcatgacttttttctcataccaatatttaaatcctgttcttgcatttgggaaattccacattatacagcagagaatctgggtcccaacacaaaagctaaaaatgtctggctctcatcttcctggtctcattttttagctagaacatgaatcctggtcataggcttagtgtcctgacttcctcatctggaaaaccaaagccctaccctaaaataacataaagaagcatagaatttgtatgattaatgtgcataaaattcttaaaatgttttctgacacataaggagtagcagtgttggctttcattgctatcatcattgccattggcattaatatctttattrggtataggacttacgaacccctcagtgatatctcccttgcctgaagagagatgctaatgggatatcaaaacggaattccctagtattttaagctacaaa

SEQ ID NO: 302984 - DNA, 629 bp, Homo sapiens
atagttttatatcttcatagtagattgccttttagcccagaaaatgttcttcattacaattaatactttttggattgaattgtaatttttataatattatgatcacagactttttattataatgttgattacatttgcctggtatacatgcttcatctttgcttacccttttatttttcccagacttttgaaatccctttgtttcatatatgtagttttgttcatataattgtatgtattttattattttgttacctatatgaaaattattttattttaacaagtgagttaagtttattcacatttatttctgtgagtaatatatgtagtttctattctgtcataatattttgttatatcacattttcrtgaaaatgtgtaggcaggagctttctttttcctgtccataccttttggcttagatattcctttagctatgaatgtattatcaagaacatacatattgtgttttctgggagaaataattttaatcccttaggatatgacatgattttaagagaggacagggcagaagttatcatatttgaataggacacatcagattattttgatgatgttaaatataaattagcacataaggagaaataattgtgtgctggttgaaagaa

SEQ ID NO: 302985 - DNA, 594 bp, Homo sapiens
ccttgaactcctgagctaaagggatcctcctgcttcagcctccagagtagctgggactacaggtacaccaccatgcttagctaatctgtgtgtgtgtgtgtgtgtgtgtgtgtgtgtgtgtgtgtgtgtgtagatggggtctcgctatgttgccaggttaatctttacattctggcttcaagcaatcctcccgcctcagcctcccaaaacgctgcgattataggagggatccactgctcccagcctcaagaatcttatcggaatgccattataaatcagtggctcccaagtttcatgtatttaagaatcaccaaggcatcctacatgcaaaagcagactctagkgtcctcattgccttaggtagactttgagaacctgagtcttaagtatctccagttgatgctgataacacatgatccatggagaaatatcagtctgaataaccttttccccctcagatattttaactctggaattgtgttttaaacctatgaataatatattatttctcatgagcacagaagaaaatcgaatatgctattgtgttaatattaaatccaatatcaaatccaaagcaacaatcagccaagatat

SEQ ID NO: 302986 - DNA, 589 bp, Homo sapiens
tatcggaatgccattataaatcagtggctcccaagtttcatgtatttaagaatcaccaaggcatcctacatgcaaaagcagactctagtgtcctcattgccttaggtagactttgagaacctgagtcttaagtatctccagttgatgctgataacacatgatccatggagaaatatcagtctgaataaccttttccccctcagatattttaactctggaattgtgttttaaacctatgaataatatattatttctcatgagcacagaagaaaatcgaatatgctattgtgttaatattaaatccaatatcaaatccaaagcaacaatcagccaagatattccttttgcaatggttaaaatctttttttttttaaagcctgctagggcttttaatgcacagtcaatcttttaaattagacatcagccaagcgttasgtcacaatctatattgctaagtactaaaagctggcccagcattctggcaagaaagatgagctgtgaagagtgagtcttgacaactaaaatggtgtgaagtgcttagatcacctttggggaaatcttggcactaatgctaatctctgtttcccag

SEQ ID NO: 302987 - DNA, 589 bp, Homo sapiens
tatcggaatgccattataaatcagtggctcccaagtttcatgtatttaagaatcaccaaggcatcctacatgcaaaagcagactctagtgtcctcattgccttaggtagactttgagaacctgagtcttaagtatctccagttgatgctgataacacatgatccatggagaaatatcagtctgaataaccttttccccctcagatattttaactctggaattgtgttttaaacctatgaataatatattatttctcatgagcacagaagaaaatcgaatatgctattgtgttaatattaaatccaatatcaaatccaaagcaacaatcagccaagatattccttttgcaatggttaaaatctttttttttttaaagcctgctagggcttttaatgcacagtcaatcttttaaattagacatcagccaagcgttacstcacaatctatattgctaagtactaaaagctggcccagcattctggcaagaaagatgagctgtgaagagtgagtcttgacaactaaaatggtgtgaagtgcttagatcacctttggggaaatcttggcactaatgctaatctctgtttcccag

SEQ ID NO: 302988 - DNA, 607 bp, Homo sapiens
tccctttctctctcacctctggtggactttgtttcctgtgtctcatatcttcctttttcctaatccttttttgtggtgaagaatattctccaagagtttccttaaaattttgcatagggataaatattttgaaattttgcacattcaaaatatgtccctattctaccctcacaactgattgtttgactgtataaaattctagattgaaatcatttcctttagtattttgaaggcatttcttcatggctttttaccttccaatattgcttggcagaaggcaaaaaccactctaattactgattcttttttatgttccttgtcccagaagcttacaggcctgaaatttcactaaaagtacttaagtgtggatctattttcattgactttgctggaagtttgatgaccttttacatctgcaactttatgtccttccagtcttgaaatattcttgagatgttttgtggatttttctccccttcattttcttgcctctttttttttgaataactattattcaaatattggactgtatagaatggtcctctaatttttctacactttctytcctatttttcatctctttgtctctttttctctactttttgga

SEQ ID NO: 302989 - DNA, 544 bp, Homo sapiens
aatggcatacaagaattatgtgcataatttaacttctctgtaaagtctgaagttatttcaaagtaaaaaatatagtcaatccaagtataggcgggaaaagcaataaccaaccaatccatatcaaaataattgacagaatttcctttaagaatctatagcaattaatatgaagtagttttgtgaaacttcacctggttttttcaaatcatcagatttctacatcacttctatattacataaaacttctgattacctaagttcaacttctgatatttcttaaataataaarctcatcatttaaaagacaaacatgctcaaacatgtcacattttcctcttgggattctcagtagttagatttatccaactgattaactcattaacaagtagttattgaatgaaagacattgtctagatgcttaaactgaatacatctacatctggttcattccgtctcttagttcagtgccaataacaagccaccatataagatttacccagtgggcttttccaaatgaagtatctatctggtacaatgaccagat

SEQ ID NO: 302990 - DNA, 626 bp, Homo sapiens
cctttagtttggcttctgatgtttcttcataactagattgaggttatgctttctttaggagaaatgctgtagaattgttgtggtatttgccgtaggacatcacatcaaaaggaacatgatgttggtctgtcccatcacgtcaagaagaagagaacgttgatctgttccattacccagtacttggttaagatgttttctgtcaggattttacatggtaaagtcactatttttccttttgacgttaataattaatatatggaaaacactttggaactatgtaaatgttctcrttctcattaaaatttcacccactaattttggtatctattagtaatttttgtctgatcaattattactctgatgtttgccaaattgtaactttctgactatattattttttccacaattcttagttgtcattttactgtaagaaagagccttttcagttgggcccagtggctcattcttgcaatcccaccacttttggaggccaaggaaggatgatcacttgtggccaagaatttgagaccagccttggcaatatagtgagaccctgtctccatcaaaaaataaaataaaataaaataaaataaattttaaaaaatagccgggcatgatggtgtgtg

SEQ ID NO: 302991 - DNA, 490 bp, Homo sapiens
aaaatggtcagtgaccattttctttgctagtcttagttctctttatttttcccctttatatcatatcatattcacatcttaatggtttagtctaccactgaatacataattttctttctaatcttttgaatagtctaaaagaagtacttgttaaatgtttcatggtgtatgtggtgtgagaaaaatctataattgttcttgatttggacatttcacaaggcaatcaaaccccagatattataagccaagataaatgayagcacattttatctttgcatttgtgaaatcttattacactgttctgcaaatgtataaacgttttcttttcataaagccgtaggcctaaattatagctgctcattaacaaatggtttccatactcggaaatgtgtgcgggcaagccttattcaagcagcagcagctatcatttgcattgtctggagtagtactgggtcatttagcatttaacaatacctgtcttggctttttg

SEQ ID NO: 302992 - DNA, 584 bp, Homo sapiens
gttatgaatactaaatgagttaatacctctaaaacaagcattttaaacagtatggcatgtagtatattctcaattactgggaattaatattactattaagtagtgaggaattgctgcaagtaaaagggggaggtattagaacttgtaatttctaattagttttccagattattaaagtgttgtggtaatatatgaagatgagaatcactgatctaggaacctgtaaaatacagagcatagtgaaagagagaataaatggaaatgtcaggaaaaatkattcaatctagccttgtgtttgttttgttgtcatatacactagaagactgatctactgatttaattatttaagccgttcaaaatgtggatactaatttgtgatgtctactagacacttagcaaagcatttatcaaataacttcctaggtactgataatataaatacaggcatacttcagagataatgtgggttgtgtttcagaccaccacagtaaagtgagtcacacaaatttttggtttcttcgtgcatatgtttacactgtgctgtagtctattaagtagccaatagccttatgtcgaaataaaca

SEQ ID NO: 302993 - DNA, 573 bp, Homo sapiens
caaagtgctgcagagccaaaagctcatctgtggatggaatcacttaaaactattttaaagggtcatcagtaagagrgtgcttatttttagaaatgagttttcttttgatacaaagaaaaatgttggccatttcctttatgtttataacaacattccaatttaatcttcagtttaaaaattctttaattattgcacaacagtgctttgttgattgcacaacacccacatctctgtttgatagtaaaatctagacttttttacaagtgttgggggggtatgtactcatgaacacccattcttatccttatatcatactataagtagtgatatatttgaaaaccacgttttatcattttaattctgctctcaggagagagctataaacatgaatgatgggggaaaaagtctgttataaaaaagttatacttttaatcagtttataattacccacatctttttcaagcaacagcaatagggctagaaagaagcatagtattgtgcaggttttattttattttattttattttattttattttattttattttattttattttattttgttttgtttt

SEQ ID NO: 302994 - DNA, 594 bp, Homo sapiens
agcacttcataagtctaagtgttttcacatacagtagtacttatcattttatcttatgttcatgtgtctgtcccagacgtaaactgtgaactcatgtagagaagggctatgatgtttctgggttttgtggtttttaaaatttatttattggtacttaatcccaaatagccaggcacacaaagcagtcaatactgccatttgacgcattaggaaattggagaataagaaatacatgattttggtcatgatcacctgataataaaagaaaactaaagttttccraaagatacattttttaaccttttaccttcaagtccaattttttccattatgccattctgaacattcattgattcattcattcaataatttattgagggcctaataagagccagacattagggattcagtagtgaaccagatagatatcatacataaataaatgaaaatgacagtctaggacaggcattgaccaactacaattgacccttgaacacatcacagtttgaaaaaactcacagacaacaatgtagctgagaaatattgacgaaattaaaataaagttgtcatgaatgtataaaaatatgtagctac

SEQ ID NO: 302995 - DNA, 609 bp, Homo sapiens
ggaattaatgagtcaacctacaaaaacatttataataaggcttttgatttataattcctctttttattaaatttagtcttctgccatcagtgactgaaactgaatttaaacaaatayactagagtttatgtatcccaaagtacatcctccttgaagtgttctttctgcacagataattgtttatataacatgctccaaatactgaaaatctcctttatgaattgccttcaaagcctaaaacataacctgtagctattttcattggtggtaatcttaaatttttagaatagatttgattttcagaaatagaagtcttttgaattcatttcttatgacttagaataaactggataaattgcctttaatgaaagtcttagtacatatctacctggatgaagcaggattttgacccacatctgtctgacttccaagcccatgtacttaaccactaggcttacagtcagcaggcaaatatttatgtagtacccactatattctaagcactgtggtaggtaccaagcatagagtaagggccaaaagaggcatgcttttggttcttatacctctaagagactagcttgtaagaaactttcttctttcagttatact

SEQ ID NO: 302996 - DNA, 609 bp, Homo sapiens
ggaattaatgagtcaacctacaaaaacatttataataaggcttttgatttataattcctctttttattaaatttagtcttctgccatcagtgactgaaactgaatttaaacaaatacactagagtttatgtatcccaaagtacatcctccttgaagtgttctttctgcacagataattgtttatataacatgctccaaatactgaaaatctcctttatgaattgccttcaaagcctaaaacataacctgtagctattttcattggtggtaatcttaaatttttaraatagatttgattttcagaaatagaagtcttttgaattcatttcttatgacttagaataaactggataaattgcctttaatgaaagtcttagtacatatctacctggatgaagcaggattttgacccacatctgtctgacttccaagcccatgtacttaaccactaggcttacagtcagcaggcaaatatttatgtagtacccactatattctaagcactgtggtaggtaccaagcatagagtaagggccaaaagaggcatgcttttggttcttatacctctaagagactagcttgtaagaaactttcttctttcagttatact

SEQ ID NO: 302997 - DNA, 609 bp, Homo sapiens
ggaattaatgagtcaacctacaaaaacatttataataaggcttttgatttataattcctctttttattaaatttagtcttctgccatcagtgactgaaactgaatttaaacaaatacactagagtttatgtatcccaaagtacatcctccttgaagtgttctttctgcacagataattgtttatataacatgctccaaatactgaaaatctcctttatgaattgccttcaaagcctaaaacataacctgtagctattttcattggtggtaatcttaaatttttagaatagatttgattttcagaaatagaagtcttttgaattcatttcttatgacttagaataaactggataaattgcctttaatgaaagtcttagtacatatctacctggatgaagcaggattttgacccacatctgtctgacttccaagcccatgtacttaaccactaggcttacagycagcaggcaaatatttatgtagtacccactatattctaagcactgtggtaggtaccaagcatagagtaagggccaaaagaggcatgcttttggttcttatacctctaagagactagcttgtaagaaactttcttctttcagttatact

SEQ ID NO: 302998 - DNA, 546 bp, Homo sapiens
atcagcagcggtgactgcagaacagcggattttcatgaaccgcgaatgctgctgtctgatcgttcctctagaagttttgtctcagaggagtacctggccgtgtgaggtgtcagtctgcccctactggggggtgcctcccagttaggctgctcgggkgtcaggggtcagggacccacttgaggaggcagtctgcccgttctcagatctccagctgcgtgctgggagaaccactgctctcttcaaagctgtcagacagggacatttaagtctgcagaggttactgctgtcttttcatttgtgtgtgccctgcccccagaggtaaatgacactgttaagaaaatgaaaacacaagccatagacatggagaaattgcttgaaaatctcatatctgacaaagacgttggatctagaatatatatgaactcttaaaactcaaaaatgagaaaatgaagaatctaattttaaaatgggcaaaagatttgaacaaatggttcatcaaagaaggtatacagatgacaaataaacacatgaaaatatgttcaacac

SEQ ID NO: 302999 - DNA, 496 bp, Homo sapiens
tggaagtctctctttttatttaaatctcaaccctgattatattcagattaagaactgttttaatggaaaagtatgagaatgaatgaaaccacccttccaaagtagtttataaagagtgagaagtcaagaatttaaaagtccctcccccgcacacctttttttttttttttttttttgagatggaatctctctgttgccaaggctggaatgtgcagtgacatgatcttggctcactgaaacctctgcctcccaggttcaagcgattctctggctgcagcctccccagtagctgagactgcaggtgtgcgccaccacaccaggctaatttttgtatttttagtagagacagsgtttcaccatgttggccaggccggtcttgaactcctgatctcaggtgatctgcccgccttggccacccaaagtgctgggaattcaggcatgagcaccacgcccagcaaaaaggctccttctttgatgggaccactacaatttaaaa

SEQ ID NO: 303000 - DNA, 496 bp, Homo sapiens
tggaagtctctctttttatttaaatctcaaccctgattatattcagattaagaactgttttaatggaaaagtatgagaatgaatgaaaccacccttccaaagtagtttataaagagtgagaagtcaagaatttaaaagtccctcccccgcacacctttttttttttttttttttttgagatggaatctctctgttgccaaggctggaatgtgcagtgacatgatcttggctcactgaaacctctgcctcccaggttcaagcgattctctggctgcagcctccccagtagctgagactgcaggtgtgcgccaccacaccaggctaatttttgtatttttagtagagacagggtttcaccatgttggccaggcyggtcttgaactcctgatctcaggtgatctgcccgccttggccacccaaagtgctgggaattcaggcatgagcaccacgcccagcaaaaaggctccttctttgatgggaccactacaatttaaaa

SEQ ID NO: 303001 - DNA, 589 bp, Homo sapiens
caatatatagttgttcctatgacttcctcaagttgtgttatatgcaatggaaaaggagagttgagctcgcaggctgcctcagctatcctcacatcagtgcactgtaatagtttcctaagayatccttctagttctcctctccactcccacagttctggtccaaccaacccgcattctatcagactaatgctccccaagcacccatttcatcatgacatttcctgggtcaaacagttacaacctagacaggattcatctaagaaatatttatgatttggcagtctgggtggctgagctacagcaaagcaaatctgaatctgccatatgcgttgtcctcaggatgctcagagtctagccagatgtgaggggcaggggagtatcatggtttgggacccaggatccttctctgggcagaactgagctgtggtcctcactggatatacaaacttggacacatggttgcatcttgtggtgctccatttttctcatctgacagataaaaattgtgattgcctaccatagagtagttgtgaggattacatgcaagaagtcaaactaggaacaagctaccaagagttcagtagatatc

SEQ ID NO: 303002 - DNA, 589 bp, Homo sapiens
caatatatagttgttcctatgacttcctcaagttgtgttatatgcaatggaaaaggagagttgagctcgcaggctgcctcagctatcctcacatcagtgcactgtaatagtttcctaagacatccttctagttctcctctccactcccacagttctggtccaaccaaccygcattctatcagactaatgctccccaagcacccatttcatcatgacatttcctgggtcaaacagttacaacctagacaggattcatctaagaaatatttatgatttggcagtctgggtggctgagctacagcaaagcaaatctgaatctgccatatgcgttgtcctcaggatgctcagagtctagccagatgtgaggggcaggggagtatcatggtttgggacccaggatccttctctgggcagaactgagctgtggtcctcactggatatacaaacttggacacatggttgcatcttgtggtgctccatttttctcatctgacagataaaaattgtgattgcctaccatagagtagttgtgaggattacatgcaagaagtcaaactaggaacaagctaccaagagttcagtagatatc

SEQ ID NO: 303003 - DNA, 589 bp, Homo sapiens
caatatatagttgttcctatgacttcctcaagttgtgttatatgcaatggaaaaggagagttgagctcgcaggctgcctcagctatcctcacatcagtgcactgtaatagtttcctaagacatccttctagttctcctctccactcccacagttctggtccaaccaacccgcattctatcagactaatgctccccaagcacccatttcatcatgacatttcctgggtcaaacagttacaacctagacaggattcatctaagaaatatttatgatttggcagtctgggtggctgagctacagcaaagcaaatctgaatctgccatatgygttgtcctcaggatgctcagagtctagccagatgtgaggggcaggggagtatcatggtttgggacccaggatccttctctgggcagaactgagctgtggtcctcactggatatacaaacttggacacatggttgcatcttgtggtgctccatttttctcatctgacagataaaaattgtgattgcctaccatagagtagttgtgaggattacatgcaagaagtcaaactaggaacaagctaccaagagttcagtagatatc

SEQ ID NO: 303004 - DNA, 589 bp, Homo sapiens
caatatatagttgttcctatgacttcctcaagttgtgttatatgcaatggaaaaggagagttgagctcgcaggctgcctcagctatcctcacatcagtgcactgtaatagtttcctaagacatccttctagttctcctctccactcccacagttctggtccaaccaacccgcattctatcagactaatgctccccaagcacccatttcatcatgacatttcctgggtcaaacagttacaacctagacaggattcatctaagaaatatttatgatttggcagtctgggtggctgagctacagcaaagcaaatctgaatctgccatatgcgttgtcctcaggatgctcagagtctagccagatgtgaggggcaggggagyatcatggtttgggacccaggatccttctctgggcagaactgagctgtggtcctcactggatatacaaacttggacacatggttgcatcttgtggtgctccatttttctcatctgacagataaaaattgtgattgcctaccatagagtagttgtgaggattacatgcaagaagtcaaactaggaacaagctaccaagagttcagtagatatc

SEQ ID NO: 303005 - DNA, 633 bp, Homo sapiens
gattctgtatatatccagatgatctttcatttcacttaggacattgtttgttctggcttttgattatcttgccaactttttgtgactcttccaacaagtctcattcctactttaggtagccactccaacctaactgcttactttctttcacatttcagccaaaagaagggagttgtgcatctacttagaataagagaaaacggtttccagatggctaatgaatggttaggtttctccgtcacatgrcaacaagtcttacttcctcaaatgctggttctaaggactactgtgaaatcctactattgagattcatctagatccaattccatctcattattgtggagatacggtgcagagaacaatacatgaataaatacaactggattctgctctactgagtacgttattatcatggctgaatattccaacacatgtttactttaactcccacatcatcctgtagagtatgggttatcttataaaattttttgataagacaactgaaatgcatggaaaagaaataattagtcactcaattagcaagtgccagagtcacactttacatcctcacttcaaaattcaaattctgtctcttgtactgtcctaactctcgtaagagcataagatcatttt

SEQ ID NO: 303006 - DNA, 593 bp, Homo sapiens
ctttctgtgtctcaatttcatcatggaatatacctcttagtgtgtttgaagggatacctggaattaattgggtaaatcctgagactagtgcctgacccacataagcattataggagggccrtaatcaccctcatagcaaagatgactctcatgatggccctcatgatggtgataatcggattatgtagaaacctttaagaggaagaaaaattagaggtgcattaatgactgttctagcccagctaacacaaagtgataaagttgtttgtttgtttgttttatttttgagaccgagtctcactctgttgcccaggctggagtgcagtggtgcaatctctgctcactgcaaccttcgcctcctgggttcaagcaattctcctgcctcagcctcccgagtagctgggattacactaccgagtagctgggcgcccactaccacacccagctaatttttgcgttgttagtagagatgggctttcaccatgttggccaggctggtctcgaactcctgacctcatgtgacccccccacctctgcctcccaaagggctgggattacaggtatgagccaccgtgcccagccccatgagcctt

SEQ ID NO: 303007 - DNA, 593 bp, Homo sapiens
ctttctgtgtctcaatttcatcatggaatatacctcttagtgtgtttgaagggatacctggaattaattgggtaaatcctgagactagtgcctgacccacataagcattataggagggccataatcaccctcatagcaaagatgactctcatgatggccctcatgatggtgataatcggattatgtagaaacctttaagargaagaaaaattagaggtgcattaatgactgttctagcccagctaacacaaagtgataaagttgtttgtttgtttgttttatttttgagaccgagtctcactctgttgcccaggctggagtgcagtggtgcaatctctgctcactgcaaccttcgcctcctgggttcaagcaattctcctgcctcagcctcccgagtagctgggattacactaccgagtagctgggcgcccactaccacacccagctaatttttgcgttgttagtagagatgggctttcaccatgttggccaggctggtctcgaactcctgacctcatgtgacccccccacctctgcctcccaaagggctgggattacaggtatgagccaccgtgcccagccccatgagcctt

SEQ ID NO: 303008 - DNA, 593 bp, Homo sapiens
ctttctgtgtctcaatttcatcatggaatatacctcttagtgtgtttgaagggatacctggaattaattgggtaaatcctgagactagtgcctgacccacataagcattataggagggccataatcaccctcatagcaaagatgactctcatgatggccctcatgatggtgataatcggattatgtagaaacctttaagaggaagaaaaattagaggtgcattaatgactgttctagcccagctaacacaaagtgataaagttgtttgtttgtttgttttatttttgagaccgagtctcactctgttgcccaggctggagtgcagtggtgcaatctctgctcactgcaaccttcgcctcctgggttcaagcaattctcctgcctcagcctcccgagtagctgggattacactaccgagtagctgggcgcccactaccacacccagctaatttttgcgttgttagtagagatgggctttcaccatgttggccaggctggtctcsaactcctgacctcatgtgacccccccacctctgcctcccaaagggctgggattacaggtatgagccaccgtgcccagccccatgagcctt

SEQ ID NO: 303009 - DNA, 593 bp, Homo sapiens
ctttctgtgtctcaatttcatcatggaatatacctcttagtgtgtttgaagggatacctggaattaattgggtaaatcctgagactagtgcctgacccacataagcattataggagggccataatcaccctcatagcaaagatgactctcatgatggccctcatgatggtgataatcggattatgtagaaacctttaagaggaagaaaaattagaggtgcattaatgactgttctagcccagctaacacaaagtgataaagttgtttgtttgtttgttttatttttgagaccgagtctcactctgttgcccaggctggagtgcagtggtgcaatctctgctcactgcaaccttcgcctcctgggttcaagcaattctcctgcctcagcctcccgagtagctgggattacactaccgagtagctgggcgcccactaccacacccagctaatttttgcgttgttagtagagatgggctttcaccatgttggccaggctggtctcgaactcctgacctcatgtgaccccccmacctctgcctcccaaagggctgggattacaggtatgagccaccgtgcccagccccatgagcctt

SEQ ID NO: 303010 - DNA, 570 bp, Homo sapiens
gtcatttgcacatttttaattgggttatttgtcttatcattragtctcaaaattctgtgatttgtgaatattttttttcaactctgtggctttaattttcattatcttatcattatctttcacagagtacacatttttcatttgaatacactccactttaatgtttatctttcatggattatgcttttagcattttatctgaaagctcatcaccaaaccaaaagtaatgtaaaatttctcctatgatttgtctacaagtgttagaattttgatatacatttagggcaaaaatgcattttagttaattctggggaaaaatgagagacctttgtctaggctcattttttaaaaatatatatctgcaaatatcccagtgccttttcttgaaaagactactctttttcatggtattgtgtttattttacataaatcagtttaccatatttatataagcctatttcttgcttctttattctgttcccttgatctatgtgtctattttcaccattgctacactatctcattgactagttttatagtaagagttgatatcaggtcatgtgagccttc

SEQ ID NO: 303011 - DNA, 591 bp, Homo sapiens
tttttaaaattttttggtgttatggaaaatgttactatttctaaaaaattttaattccaattgttttttggaaatgagcaattgagttttatatattagctgtttatcctgaaaccttgctatttgttcacttactagttccaaaaggttttcttcatcaattctttgagattttccatgtagaaaaaaatcacataatctgaaagtaatggcagatttacttttttctttccagtttctatatcttattttctcttcttgttttgatgcattagccaggacttccagtgagttgtagagggggaatgggagatygcatctttgccttattcacaatcttatggcaacagcatccaatttctcataaagtatgatgttagctataggttgtctgtagaaattctttatcaaattaggcaagctccactttattcctgctttatggagagtatttgtcatgaatgagtgttgtcttttgtccaatcacctatctttacaactaatatggttagaacacgttttttgtttgttgctgtggttgattaaattgattagtattttaatgttaaattagccttgcataactaatcc

SEQ ID NO: 303012 - DNA, 591 bp, Homo sapiens
tttttaaaattttttggtgttatggaaaatgttactatttctaaaaaattttaattccaattgttttttggaaatgagcaattgagttttatatattagctgtttatcctgaaaccttgctatttgttcacttactagttccaaaaggttttcttcatcaattctttgagattttccatgtagaaaaaaatcacataatctgaaagtaatggcagatttacttttttctttccagtttctatatcttattttctcttcttgttttgatgcattagccaggacttccagtgagttgtagagggggaatgggagattgcatctttgccttattcacaatcttatggcaacagcatccartttctcataaagtatgatgttagctataggttgtctgtagaaattctttatcaaattaggcaagctccactttattcctgctttatggagagtatttgtcatgaatgagtgttgtcttttgtccaatcacctatctttacaactaatatggttagaacacgttttttgtttgttgctgtggttgattaaattgattagtattttaatgttaaattagccttgcataactaatcc

SEQ ID NO: 303013 - DNA, 556 bp, Homo sapiens
agacatttctttatcgcagtgcaaaagtggactaatacacccatcctttcaaaatcaatgaaagcatcactgattgagagttgtgtgcctgacayttcatattcctacagctgctctttgaggtaggtattactgttctcattttaatgttgagaaagctaagagtccaagatgtgagtgacttgctcatgattactcagctagcatgtggcagagatagagatgggtagaaagcagattttgggttaactaatggctgtataggccaagaggcaagaatagagaataggtgaaatacaatttgctaattaatatgaagacataatcatgtttttctttaatagaatcatcaacttgcaaagtggagtcaatttcttctgctctctttgctttgtctgcaattcctgggcatacagaataacctgtacatgtttctcatccagtcgttatcgactcaagtgaatgtgatggtttccaagtgtttcccatagcctgccacctttttgaacccacaggggcgaatgaggagcgtctttacaatgtcagcaattgaaac

SEQ ID NO: 303014 - DNA, 572 bp, Homo sapiens
gtcaattagttgcattagctgttaggtagaattctccagagagaaccaataggatatatacataaatgacggagtatgtactctctctctctctctctctctctatatatatatatatatacacacacacacacacacatatatgcctgtgagtgayatatatatccctgtgagtgatatatatatacatatatatatatatatccctgtgagtgatatatatatacatatatatatatcccgtgagtgatatatatatgtatccctcacatatgtgtgtgtgtgtgtgtgtgtgaaagagagagagagagagtgtgtgtgtgtgtgtatgtgtatgtagaaacagagaaagaaagagaggaattgttttaaagaatcatctcatgcaattgtgggagctggcaagtctgaaatcccatggcgaggccaacagcctgcggatgcaggtgcgattcgatgtgaacttcttgagtccaaaatcctcagggcagcaggctggaaactcaggcagggttcctctgttgcaatcttgaggccaaattccttcttctttgggagacctcagtattgta

SEQ ID NO: 303015 - DNA, 572 bp, Homo sapiens
gtcaattagttgcattagctgttaggtagaattctccagagagaaccaataggatatatacataaatgacggagtatgtactctctctctctctctctctctctatatatatatatatatacacacacacacacacacatatatgcctgtgagtgatatatatatccctgtgagtgatatatatatacatatatatatatatatccctgtgagtgatatatatatacatatatatatatcccgtgagtgatatatatatgtatccctcacatatgtgtgtgtgtgtgtgtgtgtgaragagagagagagagagtgtgtgtgtgtgtgtatgtgtatgtagaaacagagaaagaaagagaggaattgttttaaagaatcatctcatgcaattgtgggagctggcaagtctgaaatcccatggcgaggccaacagcctgcggatgcaggtgcgattcgatgtgaacttcttgagtccaaaatcctcagggcagcaggctggaaactcaggcagggttcctctgttgcaatcttgaggccaaattccttcttctttgggagacctcagtattgta

SEQ ID NO: 303016 - DNA, 572 bp, Homo sapiens
gtcaattagttgcattagctgttaggtagaattctccagagagaaccaataggatatatacataaatgacggagtatgtactctctctctctctctctctctctatatatatatatatatacacacacacacacacacatatatgcctgtgagtgatatatatatccctgtgagtgatatatatatacatatatatatatatatccctgtgagtgatatatatatacatatatatatatcccgtgagtgatatatatatgtatccctcacatatgtgtgtgtgtgtgtgtgtgtgaaagagagagagagagagtgtgtgtgtgtgtgtatgtgtatgtagaaacagagaaagaaagagaggaattgttttaaagaatcatctcatgcaattgtgggagctggcaagtctgaaatcccatggcgaggccaacagcctgcggatgcaggtgcgattcgatgtgaacttcttgagtccaaaatcctcagggcagcaggctggaaactcaggcaggsttcctctgttgcaatcttgaggccaaattccttcttctttgggagacctcagtattgta

SEQ ID NO: 303017 - DNA, 583 bp, Homo sapiens
gaggagcgtgtgcagatggccacacaggaagcttccaggagtcaggcccggaggcagcccaggcctccactgaccacgacccagtccccaccaccaccgtgaactccccaggagtgggaagtgtcgactagctctgtgccctgcagaaaagggagatgggcctggacaacatctcctgtttccccgccataagagagaaactccctttctccttctcttattttgaacagacaggaccctagaaaatgaagacagcaagtggagatgttcaaagcaatgtgtagaatgtagtcactgaaaaaactgtaacctctgaatgaaaagacatttgggagaaagagaagctagaaaaatagcaaaagaaacagtwacaaagaaaggtgaacatctttaaattagaatcaaatccatagatcttattttattaagaaaaattatattaagataaacaattttgctgacctatttaacctacgcttcacaaattatcttatttgataaaaaattatttggagccaaacaaaggctctagatatttgcaagtgagttctcatggttatgggtagaacaaatgcgtgaaaac

SEQ ID NO: 303018 - DNA, 527 bp, Homo sapiens
ctgaatgaaaagacatttgggagaaagagaagctagaaaaatagcaaaagaaacagttacaaagaaaggtgaacatctttaaattagaatcaaatccatagatcttattttattaagaaaaattatattaagataaacaattttgctgacctatttaacctacgcttcacaaattatcttatttgataaaaaattatttggagccaaacaaaggctctagatatttgcaagtgagttctcatggytatgggtagaacaaatgcgtgaaaacacggactggaattattccttcctggaataattgtattttaacttctccagaatgctgacagagcacttcagaattgggcaatttaaaacgatacatgggttttgcccatttcttaatgatgcttaaaatgatgcagaaaacgatgcgaaagcactggaaaggaatacacacgtgagcccaggcttagggaagcataaagcctcctggcagcccgcactgtgttagtcattgtgaccctgccgcctttgtccacaag

SEQ ID NO: 303019 - DNA, 613 bp, Homo sapiens
tatgattcaattgccttgcaccaggtacctcttacacaacacataagaattatgggaactataagtcaagatgagatttgggtggggacacaaccaaaccatatcaaggttctcatgatctttcatgcagggtgaagaaggaaaggggcctgtcctgattctgttcccttggagcctgggagctatggttctaggatcggagaaagaagtcaggcatggaccaggagagaaaatgagccagaagaatgggctcagccacctcagaggctccrctcccatcggctgtggtgagggagacctggtcagattatagcttcctgacagactccagagcatctacccttgagaagagagctgggacctgattgctttgtggtgacattgtgtgccaaatgtgagagagatttggagctaaatattttatttatatttttcccttgatttaaaacatgtggggacaaagaatgtgaccagcttgtgtacaacagaaacacaggacaaaagatgacagtttttataaccctgacacttgttcctaccacagcaatcagtatttggtggggaccaggcactctgtgcctgtcactttcaatatcagttagctacttaacat

SEQ ID NO: 303020 - DNA, 599 bp, Homo sapiens
cgttgtccaacagcttgtgtaatttgatgcatcccatcaggttaactcacgcttaaggtgatctagggatctagggcaccaaatgacacccttgtgtggcaaggtgtggaaaacgcagctttttcttctttcagggtcccagcttactaatgaatctagcaagttaaatgacacctggtgctcaccagctttcaactctcttttcttgagtagcacaacacagaatcattctgttctgtttggcatctttacattcacatagcattttgcatgactaaggatgacccaacatcaattatgcctgtatctattcctttgtctttatctggatctatgtccctgtctttatctgtatgtatagctacagctacatttatgtaagccaacatgaatttctcygcactgcacatatttagattataattttaaaagaaaactgcctggtagaaatactgagaaaataataatcacattactatagtaccctaaagtttttttaaaagtagctgaatttttattcttttcaagagaaaaccttcccccacttaatcgaatcagcatgtgcacttttttttatctttcttcctaagattttattt

SEQ ID NO: 303021 - DNA, 599 bp, Homo sapiens
cgttgtccaacagcttgtgtaatttgatgcatcccatcaggttaactcacgcttaaggtgatctagggatctagggcaccaaatgacacccttgtgtggcaaggtgtggaaaacgcagctttttcttctttcagggtcccagcttactaatgaatctagcaagttaaatgacacctggtgctcaccagctttcaactctcttttcttgagtagcacaacacagaatcattctgttctgtttggcatctttacattcacatagcattttgcatgactaaggatgacccaacatcaattatgcctgtatctattcctttgtctttatctggatctatgtccctgtctttatctgtatgtatagctacagctacatttatgtaagccaacatgaatttctccgsactgcacatatttagattataattttaaaagaaaactgcctggtagaaatactgagaaaataataatcacattactatagtaccctaaagtttttttaaaagtagctgaatttttattcttttcaagagaaaaccttcccccacttaatcgaatcagcatgtgcacttttttttatctttcttcctaagattttattt

SEQ ID NO: 303022 - DNA, 479 bp, Homo sapiens
gagaaatacttaatgtagatggtaggttgatgggtgcagcaaaccaccatggcatgtgtaaacctatgtaacaaacctacacgttctgcacatgtatcccagaacttgaagtataataataatactattaataagtcaataataatactaactatactaaattgacttaaccactaaaaataaacatgcactcctaataatgataaaagaggagtattcacggrttttgttatggatatcaacattaatgtcattattttacaaaaagaaaaagcataaagaaaaagtgcttgtttttatctgtccatatttatatttttatttacttagcattcaatttactaaattgttatttttatacattttgaaatatttcactgtatattctcccaattaaatatattaaaatacatcatttaatacagataagtaattggacttcaggtttgatacatattaagagtattacagaaaaccct

SEQ ID NO: 303023 - DNA, 581 bp, Homo sapiens
tttgttacaaaaacaccgatcacaaaagacctatgcattctcaaaggaccctgaatagtcaaaacataatgaaaaaaaaaatgaagaattcaaacttcttgatttcaaaacttattttaaaaccacagtaatcaaaatagtgtggtaatggcataaagacagacatatataccgatggaataaaatagagaatctagaactaaattcttgcatatattacaaaatattttttargaagtttagcaagaccattaaataagaaaagagaaattttcaagaaacgatgctgggaaaactatatatccagatgcaaaagaataaaattggacccttacataacaccatatccaattaactcaaaatagatcaaacacataaatgtaagacttaaaactataaaactctttgaggaaaacatagggcaaaaacttcatgacactagatttggcaatgatttctttgatatgacaccaaagacagactacgaaagaaaaaatagacaaattagacctcataaacttttaaattgaacattagaaaacaatataaacaaaataaaagggcagccctgaaatagaaga

SEQ ID NO: 303024 - DNA, 565 bp, Homo sapiens
gttctcttaattgtgatgagttagttttctttttcgcctttgaagattttctctttgccttttcctttaaatgttttgacgcttatgggtctaattgtggatttctttatgtttattctacttagaggytgctgaacttttttgatgtgcaggtgtttgggtttctttgtatttctgttttggccaaattttggggatttttcagacaattacgtggaaattctttttctgttcttttctccatctcctctccttctggtactctcccattatgtatctgtggtgtacttaatgtcccacatttctctgagtctgtgctcatttaccttcattctttcacctctccgttcttcacattgcatcatcatcaatgtatcttccagcttgcggattcttctctgtcaactcagatctactgttgcacctatctagctgattcttacttcacttataatgcaaaattagaatttccattctgttctttttaataatttctatctcttcactgatattctttatttaataagacattgtcaacctatctttctttaattctttaaatatg

SEQ ID NO: 303025 - DNA, 565 bp, Homo sapiens
gttctcttaattgtgatgagttagttttctttttcgcctttgaagattttctctttgccttttcctttaaatgttttgacgcttatgggtctaattgtggatttctttatgtttattctacttagaggctgctgaacttttttgatgtgcaggtgtttgggtttctttgtatttctgttttggccaaattttggggatttttcagacaattacgtggaaattctttttctgttcttttctccatctcctctccttctggtactctcccattatgtatctgtggtgtacttaatgtcccacatttctctgagtctgtgctcatttaccttcattctttcacctctccrttcttcacattgcatcatcatcaatgtatcttccagcttgcggattcttctctgtcaactcagatctactgttgcacctatctagctgattcttacttcacttataatgcaaaattagaatttccattctgttctttttaataatttctatctcttcactgatattctttatttaataagacattgtcaacctatctttctttaattctttaaatatg

SEQ ID NO: 303026 - DNA, 556 bp, Homo sapiens
ttatgggtctaattgtggatttctttatgtttattctacttagaggctgctgaacttttttgatgtgcaggtgtttgggtttctttgtatttctgttttggccaaattttggggatttttcagacaattacgtggaaattctttttctgttcttttctccatctcctctccttctggtactctcccattatgtatctgtggtgtacttaatgtcccacatttctctgagtctgtgctcatttaccttcattctttcacctctccgttcttcacattgcatcatcatcaatgtatcttccagcttgcggattcttctctgtcaactcagatctactgttgcacctatctagytgattcttacttcacttataatgcaaaattagaatttccattctgttctttttaataatttctatctcttcactgatattctttatttaataagacattgtcaacctatctttctttaattctttaaatatgacttcctttagttcatggaatatatttagaaaggttcatcgaagtctttgtctgctaagtccaatgtttgggc

SEQ ID NO: 303027 - DNA, 537 bp, Homo sapiens
ttcaggcatttcttttattttataaagaaaaatctctcttttcccttgacttccagatagccacttttccccatgtccatagggaaggtccagctttttccatttctccttgtagtttctgtttttcctgtgatcttggtgaagaaaattaatttagtgctttcagttatcttagagtctttgatccttacttaaatactgtgatgaaatatgattattttcctcctttaasagagatagaaataaagcttcagatatcccaaggtcatagagcaggtagattacacatagttggcattttattttaaaactgtgtacatgtacatgtataaaatctgtagtcaaaagggagggaggaagaaaggaagagagacagggagaaaggaagggagagagggagggagggagggagaaatggagaggaaggagaagggagagagagagaaggaataataaattataccaggtcttctgagacccaaatctctaattgttcagttgtacctgtagcctgatgatttcctacatcaccttgtt

SEQ ID NO: 303028 - DNA, 450 bp, Homo sapiens
aagacaatggtttgcagtaattgatgtaataaagtagtgggtagaaagagtcacaattccctaaactagataaaataagcaattactcttgctatcagaatggcagcatcaatgggaaygctgtctgtgtctgaacacaacccaaccagccctgttgcatttaagcatcagaggccatggccttattatctttccaggatgtgcatgtataataagcttccccaacaaatgaaggggggatgtttctggcaaaatgaaaaatggtgctaaactatgtccagatgattaattcacagaaactctccatcacacagcaacgacatatgcccatctcctctgttgtccccttggagattttcctactaaacgtatgtgcatatttttcatggccactgatatttgaattgcagcctgctcccatgcagaacatgaaacacttcaaactgcata

SEQ ID NO: 303029 - DNA, 563 bp, Homo sapiens
aagcattaaagccactcttgcttcaagaattatttttagttgtatagaaaaaaatgcaaacacatgtccagccattattatcaaagcttagctaatctttccaatgatggatgcatcagtttatctaataacttggaggtttcttcgagatcctggcactgttttatcgaaacgaatcatggataacatggtcaatttatctcagtctcctgtctccagaagtttcagtacatgaccggacactctgagaaaggcagagcgtctttgctgcagagctgaggacaatactcctccatggggaatgctctcatcttcccagctaggcagcaactgagatcctaaatgtgatcattaatgggctttgacattttatcatatttagagcaactacagatgctagtctgattccagtgttgcatatgtgatccattatttactgtgcctaaggaatttgcattcatattttattgtgatgmaaatagctacaataatgatatattctacaccctgtgtatattctgcaccctgtgtagaatgatatactctgcaccctgtgtagaatg

SEQ ID NO: 303030 - DNA, 563 bp, Homo sapiens
aagcattaaagccactcttgcttcaagaattatttttagttgtatagaaaaaaatgcaaacacatgtccagccattattatcaaagcttagctaatctttccaatgatggatgcatcagtttatctaataacttggaggtttcttcgagatcctggcactgttttatcgaaacgaatcatggataacatggtcaatttatctcagtctcctgtctccagaagtttcagtacatgaccggacactctgagaaaggcagagcgtctttgctgcagagctgaggacaatactcctccatggggaatgctctcatcttcccagctaggcagcaactgagatcctaaatgtgatcattaatgggctttgacattttatcatatttagagcaactacagatgctagtctgattccagtgttgcatatgtgatccattatttactgtgcctaaggaatttgcattcatattttattgtgatgaaaatagctacaataatgatatattctacaccctgtgtatattctgcaccctgtgtagaatgatataytctgcaccctgtgtagaatg

SEQ ID NO: 303031 - DNA, 502 bp, Homo sapiens
aggcaattatttctttaaggaaaaacctctgaccgttccagaatttaaaaggtccattgtagtctgtttgccacaacacatagtggctggttggtctcctcaagtaacagtaacacactgaggctcagcactcatctttgtgccttgcctatttgacagtcagcagctagatcagctttggtaagtgccatcccagcagggttaattgttacccttcatctctgtaagcatgcagtctgttcatgtgctattgtgcaaattytgtgctggacagcgatgatggctgattagtgtcaaacagctgggttattttgcctatttagttggtcagtgtttgtcttcccataggcattagcacacgatacaaatgtcttcatgtatctgatatggtctggctctgtgtccccactcaaatctcatctcaaattgtaatccccatgtgttgggagagggacctcatgggaggtgataacatcatgggagcagtttgcccatgctgttc

SEQ ID NO: 303032 - DNA, 502 bp, Homo sapiens
aggcaattatttctttaaggaaaaacctctgaccgttccagaatttaaaaggtccattgtagtctgtttgccacaacacatagtggctggttggtctcctcaagtaacagtaacacactgaggctcagcactcatctttgtgccttgcctatttgacagtcagcagctagatcagctttggtaagtgccatcccagcagggttaattgttacccttcatctctgtaagcatgcagtctgttcatgtgctattgtgcaaattttgtgctggacagcgatgatggctgattagtgtcaaacagctgggttattttgcctatttagttggtcagtgtttgtcttcccataggcattagcacacgatacaaatgtcttcatgtatctgatatggtctggctctgtgtccccactcaaatctcatctcaaattgtaatccccrtgtgttgggagagggacctcatgggaggtgataacatcatgggagcagtttgcccatgctgttc

SEQ ID NO: 303033 - DNA, 635 bp, Homo sapiens
gattcagtcaagtgactgcaaagacttgggcccaggccacactttgaaattctaagcagatgagaacaccaacaaatcattcagctatttgttctggctaatcatttcccctgctgaaaaagggtaaacacagactgrgaattctgatgtggtttgcaagtttattcctcagaggtaaaatgtgggatgatgactattttattatctctaattactacattataccatgtttaataaaacagagtgttatcacttcatgcttttcaaaatgtttcacaactgttatctcaagctattaaaaaaaaagagaggagaatgagttctgtgacttcttcaattaatcttcaatttttcatgtgttatatttttctttattgtatatttctgttttatcccaaaaagtcagtgttcctttcttgtggaagcaattaaaaaaatcaccaattacaatataaagttcctttgttaattgtccatagacattttcatcaggttttcagaactcatgctatcctaattcagaagctggacacgggacaagcattacttcagcatccagagcactgccataggaaacaaatagaagcaaaggggaaaagccatagtgaaaccaaagtctcctcattaaaacatga

SEQ ID NO: 303034 - DNA, 635 bp, Homo sapiens
gattcagtcaagtgactgcaaagacttgggcccaggccacactttgaaattctaagcagatgagaacaccaacaaatcattcagctatttgttctggctaatcatttcccctgctgaaaaagggtaaacacagactgggaattctgatgtggtttgcaagtttattcctcagaggtaaaatgtgggatgatgactattttattatctctaattactacattataccatgtttaataaaacagagtgttatcacttcatgcttttcaaaatgtttcacaactgttatctcaagctattaaaaaaaaagagaggagaatgagttctgtgacttcttcaattaatcttcaatttttcatgtgttatattttyctttattgtatatttctgttttatcccaaaaagtcagtgttcctttcttgtggaagcaattaaaaaaatcaccaattacaatataaagttcctttgttaattgtccatagacattttcatcaggttttcagaactcatgctatcctaattcagaagctggacacgggacaagcattacttcagcatccagagcactgccataggaaacaaatagaagcaaaggggaaaagccatagtgaaaccaaagtctcctcattaaaacatga

SEQ ID NO: 303035 - DNA, 635 bp, Homo sapiens
gattcagtcaagtgactgcaaagacttgggcccaggccacactttgaaattctaagcagatgagaacaccaacaaatcattcagctatttgttctggctaatcatttcccctgctgaaaaagggtaaacacagactgggaattctgatgtggtttgcaagtttattcctcagaggtaaaatgtgggatgatgactattttattatctctaattactacattataccatgtttaataaaacagagtgttatcacttcatgcttttcaaaatgtttcacaactgttatctcaagctattaaaaaaaaagagaggagaatgagttctgtgacttcttcaattaatcttcaatttttcatgtgttatatttttctttattgtatatttctgttttatcccaaaaagtcrgtgttcctttcttgtggaagcaattaaaaaaatcaccaattacaatataaagttcctttgttaattgtccatagacattttcatcaggttttcagaactcatgctatcctaattcagaagctggacacgggacaagcattacttcagcatccagagcactgccataggaaacaaatagaagcaaaggggaaaagccatagtgaaaccaaagtctcctcattaaaacatga

SEQ ID NO: 303036 - DNA, 611 bp, Homo sapiens
cttactaaaaccatatgataattaaagtggtttattggtacaaatatcaaatattatagtagactaacagctattacaattgatgctgtaataaaaaatactgcacatgctgtccgggtgtggtggttcacgtctgtaatcccagcactttgggaggccaggtgggcrgatcacctgaggtcaggagttcgagacgagcctgcccaaaatgctgaaaccctgtccctaataaaaatacaaaaattaaccggctgtggtggtgggcacctataatcccaactgccggagaggctgaggcaggagaattgcttgaacccaggaggcggaggttgcagtgagctgagattgcgccactgcactccagcctgggcaacagagtgagactcggtctcaaaaataaataaataaaataaaaattgcacacgtctttggagtacacatgtgtttttttctcttggataaacatgtaggagttaaattgctgctggaccactgggccatagaacatacatatctaaagtttagtgaatattgtcaaaccattttccaaagtaattgtaccaaatcacacttccatttatatatgaaatttttatctttccctaatgtac

SEQ ID NO: 303037 - DNA, 608 bp, Homo sapiens
tctttaattattttggctactgttggactttataaattttaaaataaatgtatccagttctgtaggggaaaaatgagaaatttgatgtaaatttcattgtttgtattaaatmaattggggaaaacgatgtgcttatctcattcatgaatatgggatgtcttcctatttgtcttcttttatgtctttcaataaggctttatggtctctaaaataaaaatcttatattttagttatgtttatacatatatatattcagtcatcgctattttggaagagattttttaaattaattctattttataatcaattgctgcttatgtttaagagcacaattatttttttctatactgatatcatatttaacaatttgttgaactctccaattaattctaatagttgtcttcaaattttcctgcattttccatgaagaatattatatcatttgagaacatggacagttttatatatcaccttttaataattttacctcatattttacattagagaaactcaatataattcactttattaacagtttaaagagacaaaaattcctcggtaaaccaaaaaccaccatcaattcaaaaggctctctagatttcacctct

SEQ ID NO: 303038 - DNA, 567 bp, Homo sapiens
gtaatatatctcaagaaagtttctcacgctaaatacacttaatggtaacaacagaaatgtttattagaaaatgtaatcttatgactgcatacaccagtacaccaggtacatatctatagcatttgactctgcaattgacacctgattggctgatcaagatttcccatgttatagagrgcagtgtgctttcctgcagtgtgacgttttcttaaactttctgcctaataatatcattggttttcaccactgggtttactccactttccacatcacttgatgagtgtgaggaaacaactgaccaaggccagtaagtgcacagatgtagcagtagtggccacatacttgtcctcaatgagcaaggaatcattcttgcaggctggctttaaaaatacatatgctattaaacagttacaagttaatctcaatgggtttctttgctcagatggtcatggtctgcagtgccaaacacaaacaacaaccccatcttgataagtagaacatatgttctagcttcacctctaaaggcagcctaattaacacctgacactgtctactcatatttactgg

SEQ ID NO: 303039 - DNA, 575 bp, Homo sapiens
ttgaactggaagctggtggtgatctcatccctgtcaagaaagtcaccattgatttatttaacatctctggaggtgttgtgggtgacatttcttaatacataaattggtaataacaaagtaattctagctacaaagagtttgttttcttgttttgcacactcaggaaaaatgagccctagaagaggaaacactaggactatgtgtcttagtctaacatagactatggctgaagcaacagaaatttatttcttctamttttggaggctagaagtctgagaccagggtgccagcatggccaggttcaggttgaactgaatgatgtcccccttgaaattcatcttcatatggttgaagctctaacctccaatgcaactggattttgaatatggcttttaaaaagtaactgatgttaatgagctcataacagtggggtcctaatccaataagactggtgttctcataaaaagaaagagagacaccagggatgtacaggtatagaagaaaggacacagaagaaggcagccacctgcaagccgagaagagaggccttggggaaagcaaacctgccgagaaat

SEQ ID NO: 303040 - DNA, 575 bp, Homo sapiens
ttgaactggaagctggtggtgatctcatccctgtcaagaaagtcaccattgatttatttaacatctctggaggtgttgtgggtgacatttcttaatacataaattggtaataacaaagtaattctagctacaaagagtttgttttcttgttttgcacactcaggaaaaatgagccctagaagaggaaacactaggactatgtgtcttagtctaacatagactatggctgaagcaacagaaatttatttcttctaattttggaggctagaagtctgagaccagggtgccagcatggccaggttcaggttgaactgaaygatgtcccccttgaaattcatcttcatatggttgaagctctaacctccaatgcaactggattttgaatatggcttttaaaaagtaactgatgttaatgagctcataacagtggggtcctaatccaataagactggtgttctcataaaaagaaagagagacaccagggatgtacaggtatagaagaaaggacacagaagaaggcagccacctgcaagccgagaagagaggccttggggaaagcaaacctgccgagaaat

SEQ ID NO: 303041 - DNA, 575 bp, Homo sapiens
ttgaactggaagctggtggtgatctcatccctgtcaagaaagtcaccattgatttatttaacatctctggaggtgttgtgggtgacatttcttaatacataaattggtaataacaaagtaattctagctacaaagagtttgttttcttgttttgcacactcaggaaaaatgagccctagaagaggaaacactaggactatgtgtcttagtctaacatagactatggctgaagcaacagaaatttatttcttctaattttggaggctagaagtctgagaccagggtgccagcatggccaggttcaggttgaactgaatgatgtcccccttgaaattcatcttcatatggttgaagctctaacctccaatgcaactggattttgaatatggcttttaaaaagtaactgatgttaatgagctcataacagtggggtcctaatccartaagactggtgttctcataaaaagaaagagagacaccagggatgtacaggtatagaagaaaggacacagaagaaggcagccacctgcaagccgagaagagaggccttggggaaagcaaacctgccgagaaat

SEQ ID NO: 303042 - DNA, 492 bp, Homo sapiens
tagtgaaaaagccaatctcaaattgtatatgccacatgagcccatttatataattttgttggaataagaaagatacagagattgagaacacataagtagttgcagggaacygggatggagatataactggctgcagagggagatcctctaaaacacgggtcccccacccccggggctatggagctgtactgatctgtggcctattgggaactgactgaacagcaggtgagtgagcattcctgcctgaactccacctcccgtctgatcagccatggcattcgattctcacaggagcacacgccctattgtgaactgtgcatgtgagggatctatgttgcacattccttatgagaatctaactaatgcctgatgatatgaggtggaacagtttcatctcaaaaaaccatctccaccacccctgtccatagaaaaaccatcttccacatatccagtccctggtgccaagaagcttggggaccactggtctaaagc

SEQ ID NO: 303043 - DNA, 492 bp, Homo sapiens
tagtgaaaaagccaatctcaaattgtatatgccacatgagcccatttatataattttgttggaataagaaagatacagagattgagaacacataagtagttgcagggaaccgggatggagatataactggctgcagagggagatcctctaaaacacgggtcccccacccccggggctatggagctgtactgatctgtggcctattgggaactgactgarcagcaggtgagtgagcattcctgcctgaactccacctcccgtctgatcagccatggcattcgattctcacaggagcacacgccctattgtgaactgtgcatgtgagggatctatgttgcacattccttatgagaatctaactaatgcctgatgatatgaggtggaacagtttcatctcaaaaaaccatctccaccacccctgtccatagaaaaaccatcttccacatatccagtccctggtgccaagaagcttggggaccactggtctaaagc

SEQ ID NO: 303044 - DNA, 630 bp, Homo sapiens
gattataagaacaaaaaataggaagacattaatgaaactgaaagttgcttctttgattataataagagatcaatattgataataaaactctaccaaaatcaactgagaaaaaaaataagtaggtaaatcctaactaccaatattagtaatgagagagaggaaaaaaaaaawatatatatatatatacacttaaagacaataaaaggcaaatgatgaaaaattaatcatgcatttatttgtattagtccattctcacactgctatgaagaaatacccaagactgggtaatttataatggaaaaaggtttaattgactcacagttccttatggctggggaggaaacttaaaattgtggtggaaggcacctcttcacagggaagcaggagacagaatgagcatccagtgaagggggaagccttttataaaatcatcagatatcgtgagaactaactgactatcatgagaacgggatggggggtaaacacccccatgattcaattacctcccactgggtccctctcagacacgtggggattatggaaactacaattcaagatgagatttgggtgaggacatagccaaaccataacacttatgccccaaaattctgatatcttagaggaaatgaa

SEQ ID NO: 303045 - DNA, 422 bp, Homo sapiens
tgatgtgtcttataaattttttgtgtgtaaatttttgaaataaatacttaaatgtgaaaagcagaattttaaacacacttatggtcaacaagatgaatatttttattttaaggtagagttttttwaaaaacatgacagcaaaaggaaaaattgttaagcaaaaagactgatatatttgacttaagaaaagagagattctggtcttataaagtgtaaatggaaagctatcaacctgaaaaaagacacgtgcaataaataaaatagacaaagaaccagtgtcttaaatatatgtacctcctacaaatcaataagaaaaaataaataacatgttataaaaattaataatataatgtgcttgtctaaacaatagacaaacacatgaagataaaacccagtcaatcatataatgaatttaaattatg

SEQ ID NO: 303046 - DNA, 661 bp, Homo sapiens
gctgctgtaacaaattagcacaaatgttatgatgtaaaacaacagaaatttattctctcacagttttggaggccagaagtctagggtcagttttactgagaagaaatcaaggtgccatcaggartgtgttcccttgggagattttaggaaagaatcaattccttgcatttttcagcttcttgtggctgccagcattccttagcttgtaatcacataactcaaatctttctctggtgtcacatcgccttttctccttattaaatctccctttgcctcctaaatataaatatagcatgatagatagatgatagatagatagatagatagatagatagatagatagatagatagatagatagcattcagaacctactcacataatacagggtaaacgcctcaccctaagaagataacctaataacattttatatgatataaggtaacattcataggttcctgagattaggacacaggtatcttctgaagagctagtattggcctgccacaagtaagaaatcatttcttgagcaagttgtttctggagtttattaatcagaggtctccagtggaacataacaatagaatagatagatagatacatgaataggaaaatatatagatacatacatatataggtatatgaataaacagacagtcagat

SEQ ID NO: 303047 - DNA, 566 bp, Homo sapiens
gtgtgaaatctgtacacagaaaaataacaaaacactccataaagagattagaaaaaatcaaagtgagccaggcacagtggctcatgcctgtaatcccagcactttgggaggctgaggtgggtggatcacaaggtcaggagattgagacaatcctggccaatgtggtaaaaccccgtctctactaaaamtacaaaaattagctgggcatggcggcgtgtgcctgtaatcccagctactcaggaggctgaggcaggaaaatcgcttgaacccaggaggcagaggttgcagtgagcagagattgcacccactgcattccagcctggcgacagagttagactctgtctcaaacaaataaaaaaatttaaaaaatctaggtgaatgcagatatcttccatgtgtatgaattaaaatgaccaatgttgttataataatacttttcctcaaattgatttataggtccaatacaatttcaatcaaaattccaattctaagagttttgttttcctcttttagaagtggacaggctgattatgaaagttatagggaaaaaaaattttaaggccaaa

SEQ ID NO: 303048 - DNA, 627 bp, Homo sapiens
actattttttttttttggcttcaatatagtgtgtgtgaatctcattctctccattccacattactatcaactttttctcctcctaaaaggctcagtttgttggctaagtatcattaaattcattttgctgtgtctgaaagggaagtgagccattaagggaaagctccattggatctgtgagtcgtaatggtttgataaaacttttacaatttttttaaaatttcatattagatataaaaatgtagastctctttcttatgaaatgggtgggttttgcttgggctgtattatttgcccaactgaatgtggggccctggaatctcttttaataaaatgaattgtggtggacaggggctgagatgatactgaatgattgtgtcatttggtgacaccatgattgtgtcattcatggtgttcacacttttgtgttatccccttcctttgagttttggcaggacctgtgactagcctccaaccaatggacaatgacaaagatgataggctgtcacatagctaggtttctcacatagaatttcatatcagccaacaggagctggaaactcttcttgcagtcttgagaaagtaggtggtcatgtggaacaaactgtagacagcttaaaggcaaat

SEQ ID NO: 303049 - DNA, 616 bp, Homo sapiens
ggatacaatgtacatatcactacaatatctatctatagatttctttatgataaaattgacttttgtaaagctatatccagatagtgctgaaataaattattccacctcctttgtaacattagaaagtgctttccaggcactttcaagaagattacattggtaagttttacgtcttgactgtctgctttttctgtgtgtagagatatgaagaacctatggggggcgttaagaaaagttcccacataattatggggatgtgagaagaraagaatgctgatttcatatatttcattcatttaaaatagacaatttcagtgactactttatcctattctaaggcctagagacctcaagatgggcggggtggggggggtgtgaggagatgctgcaggtagcagctactctcaagtaagtccctcacaatgcagttccaagacaaatatataaataacgacagactaaatgataatttctaagaatgaaagtgtacacaaagtacagttgtattgtaagagaaagatacacttatattggaagtagtcagggggacatcacaaaggaagcaacatctgagctaaaatttttaaaaggaattcttaagagtgacaagcaggag

SEQ ID NO: 303050 - DNA, 521 bp, Homo sapiens
cctcacatggttagagaggcctgctggtctaggtttgcatgatcaatcacaagctaccttcctgagagagaaagtaccaaaatgtgtgtgcctaagtcacttcaaacatgtatmagatagccttagagttcaggatctaactagaaagttgggtagatatctcagggtttagaatgttgtgtaatggatggtggggtaccagaaaccctggttcttttggccattgaggacctgaagggttttttttttttcattcataaaacttttattccacttacatgaatttaatacacgtgttcttaacaattatgcttggattattaatgaaaatttcataagatattaaacaaagctagccatcatctcaagttatttccttgttaactatttttacagcacatgcatgttaggcaagtatcaaaaaaaatcacaacagcaaaaaaactaaaaaaaaagaagttaaatacatgggtttttctttttttgttttactgctgtgcttgatatacgtgaagtaatga

SEQ ID NO: 303051 - DNA, 620 bp, Homo sapiens
cttacacagtcatatcactatgacttaaagaaaacaaattatcacgtatatacacagattcacataagtgacagaagcaaatgtattagtcaaaggatatcttcatctatattgaagtacaagctagaaagtaaacttcttgaaggcagagattttttttttaagttgtgtggctctaccacctaacataggttatgtacagaatagacatcaatagtgaatgaacagatgaattagttaatgagttaatgatggatttttagcacattttctctcttttttaggaacttaagaccccaactgagttgtttagaggaaggggccttaggctggggccaaattctatgtcttctatgcagacktgagataatgtgaaatgttttccttttacagggtgtttcccctggcttttcagcattcttctcaattctttaattgccatttaaagatttgtatgctgtggatgagctgatggaggggaatgtttccctgaggacatggcttctcatggcagccaaggttttgtgcctgattaactcgctgattgaatcactggcctctggaggcaccaagggagggagcatgagtatatttaagcagccagaactctctgtgcctgt

SEQ ID NO: 303052 - DNA, 533 bp, Homo sapiens
gcctcactggcagttattgtgagaatttaaataaggcagtatatatggagagtggagactagtgcctggcatatggtaagcattcaaaaatgttgtgtaggctgggcatggtcgtcacgcctgtaatcccagcactttgggaggctgaggcgggtggaatcactgcggtcaagagtttgagatcagcctggccaacatggtgaaacacaatctttactaaaaataaaaaaataaaaaaaaaaagaaaagaaaattagctggacatggtggtgcacacctgtaattccagctactcrggaggctgaggtaggagaatcacttgaacccgggaggcggaggttgcagtgagccgagattgcaccactgcactccagcctgggcgacacagtaagactctgtctcaaaaaaaataatgttgtgtattattataataatcattattgcttaacttcttccctgattgaaactctgttaggccagggaccatgtctattttattattatatctatagttcttagcacaggtgtattag

SEQ ID NO: 303053 - DNA, 607 bp, Homo sapiens
tagccaatgtgcttgtataaaaatatatttatagatgatgcttccagtctgcaaaagttgacaggtaaagacaaattcatttttcagtttttaaatttttctttggttcaaaaagcaaaagtrtaaatgctctactaaaactatctataaagccaaaaacagagctgcatcctaattattctttcccacttgagaaaaacaggcctatattttatcttagtcttctgttatgtaaaagaatttatgatgtaattggggtgatgaattatttcccttaagacttaacatatttcacttaattagaccaaatgatgagccagatgatattcaggtgacaataggtaagagttaaagaactgtgtgtgaaatcgttttattctaggagaagagtgtgaaaagatttctaaacatgtatattttatttcttctgacacattacctcccagcttaaagtgtgaggagttaaaatctgaagaaaaggcataattcaaagaaactaactagttttatttttcaggtcttaattctgaaggactataccgagtatcaggatttagtgacctaattgaagatgtcaagatggctttcgacagaggtatgtttttca

SEQ ID NO: 303054 - DNA, 594 bp, Homo sapiens
ggaaacagagatgttatagacgtcttgctgatwtggtatagccctacttagaatgtagtatgtggatatcagattccaggatttgtttacattattttaaaacagaaaataagtaaatagataatacagatggaagaatatatttgtgtatttgtgtatacttactaaaaagcaggttttaaaagaaccagtttaataacaacgtacatagtaagccccggcatgttactcttttaggcccctagcttgtttaaatctattttccattgattggttaactcaaaaatattaagcagctactatatgccaggcaccatgttctttagaacatttatagagcatagacgaggtgccatgaatcctgccgagcactttagatatgatggttaaccatgtacgcttggtccttgcactcatggagggctcacattaaataataatcacacagtggctattgattttattttaataagggctataaaggaaaatattaataactggggagtttacctgtctagtagggcaggtaaggcatgctggagatcagaagaggctctttcacagaaaattaatcattaatatgtaacgtagcac

SEQ ID NO: 303055 - DNA, 594 bp, Homo sapiens
gtttctgtaattggaagaatggatatttatcaagatgtttctggttacttgatgagctcaaatagaggcctgctgaataaattaggttcagggttccgatcattctttttttttttaatttctttttgttagttttttgtcttttatatcttttgttttgagttctgatcattttaaataaaataactcacaggcactgccccaaagctgattatagattatggtcaagtccactaaaagatcacaaagtgtttttatagcttgatttgcccataacaactgcaagacactcacatttgtccattagagctgagccgaactggtagtgcccttcgtgtatctcatcaccatgcatcacatgcccactgaacatccaggttggttctgccccttagctagcatgcattgtggtagaggggaatgcaaagaagtctggcatcagcaaggatctgtcagcctaatttttagagatctagttctcacttgcattatatcttaaaaaaaaaaaaaaaaatctgcatcccttgtrgcatctctgctactcattccgtacacagatcctgtgtgccaagcactgtgctagaacttggaaca

SEQ ID NO: 303056 - DNA, 572 bp, Homo sapiens
gagatgttgtcattcattttgaacaaaagtggttctgagcagcttctggagtaaaggccagattttgaaactgacattgaagactaatccattaatgaaacacgaatgtttgtatagcaactaagtggttattttcttagcaaaaaatgagacttgaaagttgaataggatttaaagcaggatgtcattggttttcgccagtcaccagtgaaagctgcaagctttgtagaaacagcaaaatgtttcatgaaccaaacctaagaagtattgttttaatttaatagtaaagtgcatgactatcactttaagacttaggaatgtcttaagtagatgactgcaaaacattattatagcagcactacctatattttaaaaagtcattccctaatttgaccaccctatcacagttgattgccttttggattggtctttttcatcttttcctacaatcatatacgtttctcatttacacaaygtataaaaaaattgtgtatgaggtgtgctgtgactaattttacagacgtggcaggacttaaacattagtcaaataataaacattatttgaatgttta

SEQ ID NO: 303057 - DNA, 503 bp, Homo sapiens
ttaccatgccctaccacccaccccctaccatatgccaggcactgtgtgaagtattggagagacatcataccaagacacagtccttaccttgagagcctttaggtttagaaagttagatgggcaagttaaccaatgaccaaccatggctgtgacaggggcatgcatgggactctcggagccctgggagaggcaccaaccttgggttggggtgggggagtggtcagaaaggcttcccagaagagttggtttctgtataaagatgaaggatgagtaggagttacctaagcacataaggaaggagagagagacwgtgtgtgtgtgtgtgtgtgtgtgtgtgtgtgtgtgtgtgtgtgtgtgtaagccagaggatacatgaagcacagcatcttccaggagctcttaagtagctctgtttggcagcataacatagtagttaagatcatgatctcaaagccagaccacctaagtttgaattctgactgctgctatgtgacgtagggcaa

SEQ ID NO: 303058 - DNA, 502 bp, Homo sapiens
ctatagagtgttcccagatgtcaaatggcaaataggactttgatgaagaaacacccygtaaagccatattgctctggtttttgtgtgtgaatgtgtgtgtgtgtgtgtgtgtgtgtgtatgtgtgtgtatttttttctcttctgaaaactgtaaatagaggaattttcattacaaatgaaaatgtttctgttccatatttatttcctgtctaatgtactttgctcttcttggatctagtaaggatctcagcttgtcttttttatacctgcaaaaaattatgtcagtgcttcatttttcatgtcaattactgacatgttttcaagtcttcacaagttatttctgaagattttggtgcatcaaggagagactgtcattgtagttaaagaagtttctaaataggttatattgaataaaatttcagagcttgtttctctggaaagcatagacatagtggtgttatgggtagttaaacataaaatagctccacaaagtgttgtgtac

SEQ ID NO: 303059 - DNA, 502 bp, Homo sapiens
ctatagagtgttcccagatgtcaaatggcaaataggactttgatgaagaaacaccccgtaaagccatattgctctggtttttgtgtgtgaatgtgtgtgtgtgtgtgtgtgtgtgtgtatgtgtgtgtatttttttctcttctgaaaactgtaaatagaggaattttcattacaaatgaaaatgtttctgttccatatttatttcctgtctaatgtactttgctcttcttggatctagtaaggatctcagcttgtcttttttatacctgcaaaaaattatgtcagtgcttcatttttcatgtcaattactgacatgttttcaagtcttcacaagttatttctgaagattttggtgcatcaaggagagactgtcattgtagttaaagaagtttytaaataggttatattgaataaaatttcagagcttgtttctctggaaagcatagacatagtggtgttatgggtagttaaacataaaatagctccacaaagtgttgtgtac

SEQ ID NO: 303060 - DNA, 560 bp, Homo sapiens
cctcttctctttctcagaggaacacaaaatacccaatgctcattctgtagctcaacaggaaaacacattctcaggtgagctggaaagaaagtcgctcatctaataatgacacaattttaaaagactggtcaattcaactacatcaaagacaaacaaaacaaaattttttgcatggcaagaaaagactaccaccacagtcagaaaacaaatgaaagagtrggaaaataggtttgcaacttatatcatagacaaaggggtgctatctctcatatacaaatagttcttacaaatttaggggaaatagaccaacaatatattgaaaaaattaaaaagatacgcatagagatttcataggaaaataattggaagttgatcttaaacatgtgaaaagttacgcaacatggctcataagaagataagtgtaaattaaacatatttctatgctctgttgttaggtgcatacacacatgcaggattgtcatgtcttcttggagaattgactcctttttcttaggtaatgtccttctgtatctatggtaacttttattgctctttaaggc

SEQ ID NO: 303061 - DNA, 560 bp, Homo sapiens
cctcttctctttctcagaggaacacaaaatacccaatgctcattctgtagctcaacaggaaaacacattctcaggtgagctggaaagaaagtcgctcatctaataatgacacaattttaaaagactggtcaattcaactacatcaaagacaaacaaaacaaaattttttgcatggcaagaaaagactaccaccacagtcagaaaacaaatgaaagagtaggaaaataggtttgcaacttatatcatagacaaaggggtgctatctctmatatacaaatagttcttacaaatttaggggaaatagaccaacaatatattgaaaaaattaaaaagatacgcatagagatttcataggaaaataattggaagttgatcttaaacatgtgaaaagttacgcaacatggctcataagaagataagtgtaaattaaacatatttctatgctctgttgttaggtgcatacacacatgcaggattgtcatgtcttcttggagaattgactcctttttcttaggtaatgtccttctgtatctatggtaacttttattgctctttaaggc

SEQ ID NO: 303062 - DNA, 560 bp, Homo sapiens
cctcttctctttctcagaggaacacaaaatacccaatgctcattctgtagctcaacaggaaaacacattctcaggtgagctggaaagaaagtcgctcatctaataatgacacaattttaaaagactggtcaattcaactacatcaaagacaaacaaaacaaaattttttgcatggcaagaaaagactaccaccacagtcagaaaacaaatgaaagagtaggaaaataggtttgcaacttatatcatagacaaaggggtgctatctctcatatacaaatagttcttacaaatttaggggaaatagaccaacaatatattgaaaaaattaaaaagatacrcatagagatttcataggaaaataattggaagttgatcttaaacatgtgaaaagttacgcaacatggctcataagaagataagtgtaaattaaacatatttctatgctctgttgttaggtgcatacacacatgcaggattgtcatgtcttcttggagaattgactcctttttcttaggtaatgtccttctgtatctatggtaacttttattgctctttaaggc

SEQ ID NO: 303063 - DNA, 560 bp, Homo sapiens
cctcttctctttctcagaggaacacaaaatacccaatgctcattctgtagctcaacaggaaaacacattctcaggtgagctggaaagaaagtcgctcatctaataatgacacaattttaaaagactggtcaattcaactacatcaaagacaaacaaaacaaaattttttgcatggcaagaaaagactaccaccacagtcagaaaacaaatgaaagagtaggaaaataggtttgcaacttatatcatagacaaaggggtgctatctctcatatacaaatagttcttacaaatttaggggaaatagaccaacaatatattgaaaaaattaaaaagatacgcakagagatttcataggaaaataattggaagttgatcttaaacatgtgaaaagttacgcaacatggctcataagaagataagtgtaaattaaacatatttctatgctctgttgttaggtgcatacacacatgcaggattgtcatgtcttcttggagaattgactcctttttcttaggtaatgtccttctgtatctatggtaacttttattgctctttaaggc

SEQ ID NO: 303064 - DNA, 551 bp, Homo sapiens
acaaaggggtgctatctctcatatacaaatagttcttacaaatttaggggaaatagaccaacaatatattgaaaaaattaaaaagatacgcatagagatttcataggaaaataattggaagttgatcttaaacatgtgaaaagttacgcaacatggctcataagaagataagtgtaaattaaacatatttctatgctctgttgttaggtgcatacacacatgcaggattgtcatgtcttcttggagaattgactcctttttcttaggtaatgtccttctgtatctatggtaacttttattgctctttaaggctgctctgcctgaaattaatagagatatgttgggggtgtttttgataagtgttagtatggtatatctttctgcatccctttaatttatgcaggtgcatctttatatttagaatgtgtttcttgtagactacatatagttgagtccractttttaatctacactgacaatctcttttattttatttctgtcttcccaccttttattttaggttcaaagggtacgtacgtgcgaaggttttt

SEQ ID NO: 303065 - DNA, 456 bp, Homo sapiens
ggtgataaaaggaccctctggcccccactcttaatgtaactgcatttgtgttatgtatgtgtttccatttgtgctcttttaaaattatgtctgtacgtatattaatatattatgtagttacacacatacacacacacacacacacacacacacacacacacayatatatattctgcacaactccagtctcaactcagttatccctcttctgtatgtccaagttctcttgtgggcatctgcaagtgatggcatactctttctcaattgactcgtggccagtctcagaacggtgggtccatatgttacggatacccatttatgaatggcctatacctatagacagctggcctgctctttccaggccccttactaagagtattgtggaaaaccttagagcttttgaaaagtaattggacttttagctagaagaaatgaagaaattgcccagaattatca

SEQ ID NO: 303066 - DNA, 516 bp, Homo sapiens
tccagaaactggtttctatattgacataattcttcaaatcctggaagcctggaggtgtggcccagctaaagcttctgaaaacttacgcagtgtctttgcgaagaattagaaaaggtaccggatgaattagaaaagggctagatgaggaaggttaggctgagtttcattctctatttctcctctccttttattcctgctgtgtatatgaggctctctaagtcaagggtcttgatgtgttgatagagaacagattcttggagccagtacccaggtagaaggatgaaatgcagacttgatggctttaccattaaatcagctgtagtacagtcacttccaaatagtgtatcagcaaaacatttctcattcatatggatgaggagattgtccttcctaagaatgcaytcatttaacaaatgtttattgaggacctactatgtactgggaggaaaaatgcttccctctacctcttcatccctttctttctgcctaaagtattctatttctgtgtgtttggta

SEQ ID NO: 303067 - DNA, 583 bp, Homo sapiens
cctgccttcaccaacctacaagtctgagtgacctaattcttcctagatgccagacaaggacccaggtaccaagaaggcagagtgtaaaagactgtcatcttgactctccactgagctggtttaagacttgccatccacggacagcagctgctaaaacagcatgaattgtaacacgctcctagacactaccatggggctggagcccaaaagcgctcaccccagctcctgcacctacccatctgcatgctccccttcccataaggggtttgagcagccagcaaacaagccacaccccatcacaagtcctgcaaggggttcagggtactctcccgtttcactgggagacccaatgcattagtctgtttgtgttgctaagaacacctgagtctgggtattcataaagaaaagaggtttatttggctcatggtactgaaggctgtataagaarcatggcaccagcatttgcttctggtaaggactcaggaagcttttactcatggccaaaggggagcaggcatgtcacatgtgagagagggagcgggagagagaaggatggaggtaccagattaaaaatccaattttg

SEQ ID NO: 303068 - DNA, 588 bp, Homo sapiens
aaatatcacatagaacatagcttcttaaaccttttataggtcacctgttatcaactaccatggctaaacaaaggttctcattcagtgaactgaaggtcgttctgctrtttagcatgtgtatcatgctctcagtgtgctaatgatcctgctggattctggatacatgttgagtagcaaagaattttcataatttaaaaaaggttacaccaatgttcaggtttttctgttgttttggtttctttgtcaagaaatatttttcatttgtttgtaaaatgattgttatgtatgtcatacaatttcctgatttttaagctgtgtctatgacttaataaagttatgttgctatgtgacaagtgcaagtatattcaaatgtattctgaggccatgcataactggcaaaagttttcactattttgtgaaaatactgaccatgttgggctttcagctgtcagttcctcattatcaccatcacttctgaaagcgcattcgtcagaaccacctttccctctatactttcctgtagagttgttcactgaggggtccttccacaagatttggaagtcagaagagaatgattcaatgctcatt

SEQ ID NO: 303069 - DNA, 588 bp, Homo sapiens
aaatatcacatagaacatagcttcttaaaccttttataggtcacctgttatcaactaccatggctaaacaaaggttctcattcagtgaactgaaggtcgttctgctgtttagcatrtgtatcatgctctcagtgtgctaatgatcctgctggattctggatacatgttgagtagcaaagaattttcataatttaaaaaaggttacaccaatgttcaggtttttctgttgttttggtttctttgtcaagaaatatttttcatttgtttgtaaaatgattgttatgtatgtcatacaatttcctgatttttaagctgtgtctatgacttaataaagttatgttgctatgtgacaagtgcaagtatattcaaatgtattctgaggccatgcataactggcaaaagttttcactattttgtgaaaatactgaccatgttgggctttcagctgtcagttcctcattatcaccatcacttctgaaagcgcattcgtcagaaccacctttccctctatactttcctgtagagttgttcactgaggggtccttccacaagatttggaagtcagaagagaatgattcaatgctcatt

SEQ ID NO: 303070 - DNA, 588 bp, Homo sapiens
aaatatcacatagaacatagcttcttaaaccttttataggtcacctgttatcaactaccatggctaaacaaaggttctcattcagtgaactgaaggtcgttctgctgtttagcatgtgtatcatgctctcagtgtgctaatgatcctgctggattctggatacatgttgagtagcaaagaattttcataatttaaaaaaggttacaccaatgttcaggtttttctgttgttttggtttctttgtyaagaaatatttttcatttgtttgtaaaatgattgttatgtatgtcatacaatttcctgatttttaagctgtgtctatgacttaataaagttatgttgctatgtgacaagtgcaagtatattcaaatgtattctgaggccatgcataactggcaaaagttttcactattttgtgaaaatactgaccatgttgggctttcagctgtcagttcctcattatcaccatcacttctgaaagcgcattcgtcagaaccacctttccctctatactttcctgtagagttgttcactgaggggtccttccacaagatttggaagtcagaagagaatgattcaatgctcatt

SEQ ID NO: 303071 - DNA, 588 bp, Homo sapiens
aaatatcacatagaacatagcttcttaaaccttttataggtcacctgttatcaactaccatggctaaacaaaggttctcattcagtgaactgaaggtcgttctgctgtttagcatgtgtatcatgctctcagtgtgctaatgatcctgctggattctggatacatgttgagtagcaaagaattttcataatttaaaaaaggttacaccaatgttcaggtttttctgttgttttggtttctttgtcaagaaatatttttcatttgtttgtaaaatgattgttatgtatgtcatacaatttcctgatttttaagctgtgtctatgacttaataaagttatgttgctatgtgacaagtgcaagtatattcaaatgtattctgaggccatgcataactggcaaaagttttcactattttgtgaaaatactgaccatgttgggctttcagctgtcagttcctcattatcaccatcacttctgaaagcgcattcktcagaaccacctttccctctatactttcctgtagagttgttcactgaggggtccttccacaagatttggaagtcagaagagaatgattcaatgctcatt

SEQ ID NO: 303072 - DNA, 473 bp, Homo sapiens
gtaacttatataacaatgcaaaaactgagaatctgtcaacaataggaacaggatttggtggttgacgaggtcttagatagaactccaggatagatcatgacaaatccagcagaataaaagaagtctgtgcctgaatctggcatgaaagtcagataattyttgcaaggaatctgcacttttcagaaggcagattcagattttctctttaagtatgaatttgctaggttaagtggcagatcataatatttctggaaagtgataacttttttatttgggactaagaatggctgcccacctcatctcctgtccaaagcctcctgctctgccctgacagagaagagacaatgaaggttaattttattgctatggacttggctgcagtgcaggagcttccagtttttcagttgttatgaaaggtcgctaacgagacatagacatgaccttcctcccctttatactttttgagtttatgg

SEQ ID NO: 303073 - DNA, 473 bp, Homo sapiens
gtaacttatataacaatgcaaaaactgagaatctgtcaacaataggaacaggatttggtggttgacgaggtcttagatagaactccaggatagatcatgacaaatccagcagaataaaagaagtctgtgcctgaatctggcatgaaagtcagataattcttgcaaggaatcwgcacttttcagaaggcagattcagattttctctttaagtatgaatttgctaggttaagtggcagatcataatatttctggaaagtgataacttttttatttgggactaagaatggctgcccacctcatctcctgtccaaagcctcctgctctgccctgacagagaagagacaatgaaggttaattttattgctatggacttggctgcagtgcaggagcttccagtttttcagttgttatgaaaggtcgctaacgagacatagacatgaccttcctcccctttatactttttgagtttatgg

SEQ ID NO: 303074 - DNA, 618 bp, Homo sapiens
agattagtataaaacacctcaaaaacagtgaatttaaatgacagtagaatgtctccatatcaaattatagaattattttaaatatagattaagaaaagaaagccaagtaattgaaaaattctcagattcttctgagtgacttacgggtgattttaataaaggattggaagaaaatttatgggtgactgtatttaacattctgttttacatttaaaaatagccaggagagaataacttcaatatttctagtttaaataaaacatacatatttaaggtaatgtgtatctctgttaccctcattagattatatagatggatcaaatcatcacacgtacactgaaaatatatgcatctatttattaatttaaaaattctaaatggaaagaaaatttcatcctcacttttttaaatttcagtaaagtgatgtcttatattttatctagtgaatgctgtgttcatagataatgcaaaataaaatgtgttttaggctatatcagattttgaatgaatcattactttttgactcttgttaaaagttttttaaagtaatatttkgtatactcctaagttgcttaactaatttatttcacttttccataatcttggagctgttttagc

SEQ ID NO: 303075 - DNA, 570 bp, Homo sapiens
tgcagactcacccttaaacccataacaaatagtgacaggcattataatggcacagccagacaataatttgtccttataaattatctaccmtaaagactaaactgaaaatccagttgatatctgacacaacttttgttactgaactgcagtaaacctgataacctaaaacaaggtagaaaaggcacggtctcttctccattatctatttctgattcaaagactaatctgtgtcactggaaaatgggagtcttggatcttcagcatgtaagctacttaaagagggcccattgattcttttcaccctagaacactacagggagccccctgaaacactgcaaatgtttgaaagctgagtgtacaaaagtcaaagtacaaatgtatatgttgttagattgttattgggaatattcttcacagaagattaaaacattaaaaattttaaaatccaattatcgtcattatatagattctgccttattcagatccacaaaaaccagcaagcttaagaaccttcatagacactcagatacccaagagagagactgctggaaaagtctccctcctaagtac

SEQ ID NO: 303076 - DNA, 570 bp, Homo sapiens
tgcagactcacccttaaacccataacaaatagtgacaggcattataatggcacagccagacaataatttgtccttataaattatctaccctaaagrctaaactgaaaatccagttgatatctgacacaacttttgttactgaactgcagtaaacctgataacctaaaacaaggtagaaaaggcacggtctcttctccattatctatttctgattcaaagactaatctgtgtcactggaaaatgggagtcttggatcttcagcatgtaagctacttaaagagggcccattgattcttttcaccctagaacactacagggagccccctgaaacactgcaaatgtttgaaagctgagtgtacaaaagtcaaagtacaaatgtatatgttgttagattgttattgggaatattcttcacagaagattaaaacattaaaaattttaaaatccaattatcgtcattatatagattctgccttattcagatccacaaaaaccagcaagcttaagaaccttcatagacactcagatacccaagagagagactgctggaaaagtctccctcctaagtac

SEQ ID NO: 303077 - DNA, 570 bp, Homo sapiens
tgcagactcacccttaaacccataacaaatagtgacaggcattataatggcacagccagacaataatttgtccttataaattatctaccctaaagactaaactgaaaatccagttgatatctgacacaacttttgttactgaactgsagtaaacctgataacctaaaacaaggtagaaaaggcacggtctcttctccattatctatttctgattcaaagactaatctgtgtcactggaaaatgggagtcttggatcttcagcatgtaagctacttaaagagggcccattgattcttttcaccctagaacactacagggagccccctgaaacactgcaaatgtttgaaagctgagtgtacaaaagtcaaagtacaaatgtatatgttgttagattgttattgggaatattcttcacagaagattaaaacattaaaaattttaaaatccaattatcgtcattatatagattctgccttattcagatccacaaaaaccagcaagcttaagaaccttcatagacactcagatacccaagagagagactgctggaaaagtctccctcctaagtac

SEQ ID NO: 303078 - DNA, 570 bp, Homo sapiens
tgcagactcacccttaaacccataacaaatagtgacaggcattataatggcacagccagacaataatttgtccttataaattatctaccctaaagactaaactgaaaatccagttgatatctgacacaacttttgttactgaactgcagtmaacctgataacctaaaacaaggtagaaaaggcacggtctcttctccattatctatttctgattcaaagactaatctgtgtcactggaaaatgggagtcttggatcttcagcatgtaagctacttaaagagggcccattgattcttttcaccctagaacactacagggagccccctgaaacactgcaaatgtttgaaagctgagtgtacaaaagtcaaagtacaaatgtatatgttgttagattgttattgggaatattcttcacagaagattaaaacattaaaaattttaaaatccaattatcgtcattatatagattctgccttattcagatccacaaaaaccagcaagcttaagaaccttcatagacactcagatacccaagagagagactgctggaaaagtctccctcctaagtac

SEQ ID NO: 303079 - DNA, 482 bp, Homo sapiens
ctaacttgtacaaattccttcttcacaacagcagccccatgtcctcctctctcccatagacacagtttcatagtttctattcactcacatcagtttcatcgagtatcaactctcattttatctttacggctttattttacatgagggttattatcaaagactcagcaaactatgttacatattttcttctacacaagagattactgagcagtaaataagaatttctttggatataaacacttttatgtacacaaactttttgtgaagctaatttatggttaaatacacattacaccattatgtgttatgtgttccagataaacagaactctaaaattttattaaacatrtttaattttaaaacttctgcaattacaatgacatagtctctgctcaatgcagcaacatcttcagaaatcacttgtgaagacttgggaaaatgtcagtcatttacatgaaaaatgagagcattaagtgacaaca

SEQ ID NO: 303080 - DNA, 482 bp, Homo sapiens
ctaacttgtacaaattccttcttcacaacagcagccccatgtcctcctctctcccatagacacagtttcatagtttctattcactcacatcagtttcatcgagtatcaactctcattttatctttacggctttattttacatgagggttattatcaaagactcagcaaactatgttacatattttcttctacacaagagattactgagcagtaaataagaatttctttggatataaacacttttatgtacacaaactttttgtgaagctaatttatggttaaatacacattacaccattatgtgttatgtgttccagataaacagaactctaaaattttattaaacatatttaattttaaaacttctgcaattacaatgacatagtctctgctcaatgcagcaacatcttcagaaatcacttgtgaagacttgggaaaatgtcagtcatttacrtgaaaaatgagagcattaagtgacaaca

SEQ ID NO: 303081 - DNA, 564 bp, Homo sapiens
aataatttgtccttataaattatctaccctaaagactaaactgaaaatccaattgatatctgacacaacttttgttactgaactgcagtaaacctgataacctaaaacaaggtagaaaaggcacggtctcttctccattatctatttctgattcaaagactaatctgtgtcactggaaaatgggagtcttagatcttcagcatgtaagctacttaaagagggcccaytgattctcttcaccctagaacactacagggaaccccctgaaacactgcaaatgtttgaaagctgagtgtacaaaagtcaaagtacaaatgtactttgggaatattcttcacagaagattaaaacattaaaaattataaaatccaattattgtcattatatagatcctgccttattcaggtccacaaaaaccagcaagcttaagaaccttcatagacactcagatatccaagagagggactagtggaaaagtctccctcctgagtacttagagcttcatttcattcatcactatctaaatatcttccttcctatgggctcccccttctggatccctct

SEQ ID NO: 303082 - DNA, 564 bp, Homo sapiens
aataatttgtccttataaattatctaccctaaagactaaactgaaaatccaattgatatctgacacaacttttgttactgaactgcagtaaacctgataacctaaaacaaggtagaaaaggcacggtctcttctccattatctatttctgattcaaagactaatctgtgtcactggaaaatgggagtcttagatcttcagcatgtaagctacttaaagagggcccattgattctcttcaccctagaacactacagggaaccccctgaaamactgcaaatgtttgaaagctgagtgtacaaaagtcaaagtacaaatgtactttgggaatattcttcacagaagattaaaacattaaaaattataaaatccaattattgtcattatatagatcctgccttattcaggtccacaaaaaccagcaagcttaagaaccttcatagacactcagatatccaagagagggactagtggaaaagtctccctcctgagtacttagagcttcatttcattcatcactatctaaatatcttccttcctatgggctcccccttctggatccctct

SEQ ID NO: 303083 - DNA, 564 bp, Homo sapiens
aataatttgtccttataaattatctaccctaaagactaaactgaaaatccaattgatatctgacacaacttttgttactgaactgcagtaaacctgataacctaaaacaaggtagaaaaggcacggtctcttctccattatctatttctgattcaaagactaatctgtgtcactggaaaatgggagtcttagatcttcagcatgtaagctacttaaagagggcccattgattctcttcaccctagaacactacagggaaccccctgaaacactgcaaatgtttgaaagctgagtgtacaaaagtcaaagtacaaatgtactttgggaatattcttcacagaagattaaaacattaaaaattataaaatccaattattgtcattatatagatcctgccttattcaggtccacaaaaaccagcaagcttaagaaccttcatagacactcagatayccaagagagggactagtggaaaagtctccctcctgagtacttagagcttcatttcattcatcactatctaaatatcttccttcctatgggctcccccttctggatccctct

SEQ ID NO: 303084 - DNA, 504 bp, Homo sapiens
gactagtggaaaagtctccctcctgagtacttagagcttcatttcattcatcactatctaaatatcttccttcctatgggctcccccttctggatccctcttcagcagggatccatggcaatcyccaatctacatcttcaaatttggctgtcccctgcaaattccattcttatccactttcattgggttcaacagctcattcaattctcatcctcttccactgtgttcactagagccactcctgctttctaaaactaaaatcactcaatgacagaatgatgtaaaagaagactgcgttttgaactaagaaacctgagtgcaattctcatttctctgatttactgtatccaaataattttctttctttgaatttcaggttctccacctgaacaaccacttgatcaggatgttgagcaaggattcaagtatagaagatattttgtttagtctctaggatttcttaacattctgaaattctatgcacctctgattttgtctatagga

SEQ ID NO: 303085 - DNA, 504 bp, Homo sapiens
gactagtggaaaagtctccctcctgagtacttagagcttcatttcattcatcactatctaaatatcttccttcctatgggctcccccttctggatccctcttcagcagggatccatggcaatctccaatctacatcttcaaatttggctgtcccctgcaaattccattcttatccactttcattgggttcaacagctcattcaattctcatcctcttccactgtgttcactagagccactcctkctttctaaaactaaaatcactcaatgacagaatgatgtaaaagaagactgcgttttgaactaagaaacctgagtgcaattctcatttctctgatttactgtatccaaataattttctttctttgaatttcaggttctccacctgaacaaccacttgatcaggatgttgagcaaggattcaagtatagaagatattttgtttagtctctaggatttcttaacattctgaaattctatgcacctctgattttgtctatagga

SEQ ID NO: 303086 - DNA, 504 bp, Homo sapiens
gactagtggaaaagtctccctcctgagtacttagagcttcatttcattcatcactatctaaatatcttccttcctatgggctcccccttctggatccctcttcagcagggatccatggcaatctccaatctacatcttcaaatttggctgtcccctgcaaattccattcttatccactttcattgggttcaacagctcattcaattctcatcctcttccactgtgttcactagagccactcctgctttctaaaactaaaatcactcaatgacagaatgatgtaaaagaagactgcgttttgaactaagaaacctgagtgcaattctcatttctctgatttactgtatccaaataattttctttctttgaatttcaggttctccacctgaacaaccacttgatcaggatgttragcaaggattcaagtatagaagatattttgtttagtctctaggatttcttaacattctgaaattctatgcacctctgattttgtctatagga

SEQ ID NO: 303087 - DNA, 504 bp, Homo sapiens
gactagtggaaaagtctccctcctgagtacttagagcttcatttcattcatcactatctaaatatcttccttcctatgggctcccccttctggatccctcttcagcagggatccatggcaatctccaatctacatcttcaaatttggctgtcccctgcaaattccattcttatccactttcattgggttcaacagctcattcaattctcatcctcttccactgtgttcactagagccactcctgctttctaaaactaaaatcactcaatgacagaatgatgtaaaagaagactgcgttttgaactaagaaacctgagtgcaattctcatttctctgatttactgtatccaaataattttctttctttgaatttcaggttctccacctgaacaaccacttgatcaggatgttgagcaaggattcaagtatagaagatattttgtttagtctctaggatttcttaacattctraaattctatgcacctctgattttgtctatagga

SEQ ID NO: 303088 - DNA, 646 bp, Homo sapiens
ttgcagtataatggtgtaaatcctcttaatttgttgcatgaaagacatgtgggatcatgtagcacctgttttgacattgattctcacgtatatgagttgctcctctgattttagatcacatttgttctcatcactcggcatatccacattgagattgacacggttttattttrgttttcgacacatgacaaatcttaccatgtttgaaatcgtaagggtgtatttcacagagcctgtgttcccttttttcagtgtatttctgtcatgttctgatccccagacacaaagtagaagccatcaaagcctccactaatacaagcaggaggacagaggttgatgctaacactgtgtgaatctatggataattttatcatgtttacatgtgagtgattatgtatcccttttgcttttcagtgtcttctcggaaaaaaccatccttggaggtaatgaaactctcattcatattgtgagctagtaaacgtatagcctatgaaacataccttatttattactttgtttcaaattccattcaggccacaagtgatgagaaggattctttttcgaatataaccagagaaaaaaaggatggagaaatatctaggaaaggtaattttgcgaaacacatttaatgtcatgttcagtccag

SEQ ID NO: 303089 - DNA, 390 bp, Homo sapiens
ttttcctgattgtgtgaaagagtaatgataatgcttcaattatcattatctttttgtaaattkaattaattgtctgtcttttaaggatgttgtaatattaaccagtatatccccaaattaacagactgtccaggaacagtaaacatgccagaaagtttttgttgattaaattaacatagcagcctagaaaaacaatgattcttagctttaccttggagaggtaccttaccttgatttgactgtttttccttggagagtaaaggctagctttttctgatttgggtcaaagtatgagttctgctctaacaatttcaagcaatgtccttctggaaaagtcattatggatggttgttatagttaaataaaataatgagagtagaagagcttagt

SEQ ID NO: 303090 - DNA, 390 bp, Homo sapiens
ttttcctgattgtgtgaaagagtaatgataatgcttcaattatcattatctttttgtaaatttaattaattgtctgtcttttaaggatgttgtaatattaaccagtatatccccaaattaacagactgtccaggaacagtaaacatgccagaaagtttttgttgattaaattaacatagcagcctagaaaaacaatgattcttagctttaccttggagaggtaccttaccttgatttgactgtttttccttggagagtaaaggctagctttttctgatttgggtcaaagtatgagttctgctctaacawtttcaagcaatgtccttctggaaaagtcattatggatggttgttatagttaaataaaataatgagagtagaagagcttagt

SEQ ID NO: 303091 - DNA, 548 bp, Homo sapiens
acaaaaaccttcatcttgggaaggacattgccagaaagccactatgacatgccatccaactagtgaaagggaactccaccccactccagcctcactacagtactcctgtatcacttaaggaacaaaaagaaaaagaaagccttaaactatgggagagacagcttcaaagacacagagtaggaatggtgcagtcagggatggggggaacagagggggaagttccacccttgaaagagggagagaaacagttgtaaaggccacacccctgagacatagacccactgtgtagggcaaagactgaaatataatctgaagggtagaraacattcccctcctccacgctctgccaccatgttatcaggcctccaattacaataatagtagatcacagctgggagagtggtcacaggcagattctcaatgaggagctgctcaaagagaagggccaaagctagagaggagacaataataatttggttcaacagtgccagtccccccaacaacacagttcaaatactgtatattaacagtgagtaatttcataatgt

SEQ ID NO: 303092 - DNA, 503 bp, Homo sapiens
ttagtgtgtgtgtgtgtttgtgtatgtctaagtgtgtgtgcaaactgtatcagctgtgtgaccaaagaactgaaaaatgggaatccagacttctggtcctgttgttgggattataacggaagcagaaacggaaaattttgaatggatttcttgatgctgccaagcgggcaaattctgcggatacatcagtcaggattgagtgagttctaatgtatcccacggttacggattccttcagattttggtgcagatagctatgtatggtattcctaaccttaacacctaaaataatgaacaaatggtaacctcttaacaatatgcacccatttttcctagttcactttaatattttggacatggtatatattaagcagttcgaactattataacttgtcataccatagactcggtggcttaaacagtagacatttatttctcacagttcttgtggctgggaaagtctgaaatcagggtaccagcrtgtcttctggtgaagcctctct

SEQ ID NO: 303093 - DNA, 578 bp, Homo sapiens
gagtaacagacctaaaaattcttcattgttaagtacttcagcatataacttccaagaatatataatttcagtgtaattttcatactcaagtaagttaactgattaatattatctactatacgtactgaagttttcttagttcagtgatgttagttatatcattttcagcttttatttggtataatcaaggatcaaaaataaatttattagtcatgcctctttaatatcctttaatctaaacgcatacccttattcttatagtgttttcattttttayaatccttgccaatttttttgcagaatatttctcaatatagatttttcaaattatgtagttatgattggatgtaagtaaagcatttttgatagataagacctatatgatgccatctacttcccagtgtattacattaaaaggcacatgatttcagtttatactgaaattggtataaaattcattatgctaatttcgatcattgggtttaagtggtgtctgattttattacttttttagtacatctttatttttaatcacagtaagaaagtcattacccatatccaggtcccaggtgaatcta

SEQ ID NO: 303094 - DNA, 605 bp, Homo sapiens
tattttcctaactagtaataatgtaatgatatggagaagatttcatatctaatgaccataaagtgtgtttatttatgatgatttgtatatcatccttatggaatacttgttcaaacgttttgcctgtttttattttttatttttatacatttataataactttattcttgattcaccttttatcagatgtgtctcacaaataaatttctatgaatttgtgacttcattttttaactgtatcttttaatgagttccttttattttgtataaattctgtcattaattttattttatgtttagtaaattttgtgtccatagatgtagtaatttatttttaatttaattttactgtggcaagaaaatatgtactataatatttcagtgttttgaaatggttcagaaacattttatggctctatsttcattaacattttcatatgcacttgaaaaaaatgtgtattcttaatgtttgatgaagtactctatatgtctattagagcacccaagacaagctaccaagtaaccaactcatgattccactaaccatgtaaaagcctggtgcccacttaccacagggggagaaccttagccaagcaacaagctga

SEQ ID NO: 303095 - DNA, 563 bp, Homo sapiens
ataccatctcacactattcagaatggctattactaaaaagtcaaaaaataacaagtgctggcgaggttgcagagaaaagagaatgcttatacactgctggtgggagtgtaaattagttcagccattgtggaaagcagtgtggtgattcctcaaagagctaaaggcaaaactaccatgtgatrcagcaatctcattactggatatatacccagaggaatataaatttttctatacaaagacacatgcatgcatatgttcatcgcagcactattcacaatagcaaagacatggaagctaaataagaacctatagatgcaaagagaacaacagacactggagcctacctgagggtggagggtggtaggatggagaggatcagaaaaaataactatcaggtactaagctttttacctgggtaatgagataatctgtataacaaacccttgtgacacaagtttacctatataactaacctgcatatgtatccctgaatgtaaaataaaagtaatatgtcctctagcagcttatacaatttttttctttattcttgttgttatgaagat

SEQ ID NO: 303096 - DNA, 563 bp, Homo sapiens
ataccatctcacactattcagaatggctattactaaaaagtcaaaaaataacaagtgctggcgaggttgcagagaaaagagaatgcttatacactgctggtgggagtgtaaattagttcagccattgtggaaagcagtgtggtgattcctcaaagagctaaaggcaaaactaccatgtgatgcagcaatctcattactggatatatacccagaggaatataaatttttctatacaaagacacatgcatgcatatgttcatcgcagcactattcacaatagcaaagacatggaagctaaataagaacctatagatgcaaagagaacaacagacactggagcctacctgagggtggagggtggtaggatggagaggatcagaaaaaataactatcaggtactaagctttttacctgggtaatgagataatctgtataacaaacccttgtgacacaagtttacctatataactaacctgcrtatgtatccctgaatgtaaaataaaagtaatatgtcctctagcagcttatacaatttttttctttattcttgttgttatgaagat

SEQ ID NO: 303097 - DNA, 614 bp, Homo sapiens
ttctagtcagacatcttggcactctctaatatagttttgaaaattatgttatttaaataggatttatattgattcttctttctatgatagccatttacttgctttcaaaggaaattcattgttttaactaccaataggaagatgactaaataatttggacagcagcttcctttgatttattttgtcagcaattaacagtcatatagcaataatagctcacattcattttgtcttttacagttcacaakatgtttaatatcataatattcattgacacttccttattcatctgagtcctattatgcaaatatatagtccctgtaataaggcaggaaacttacacgtgagatgaagaaaaaggataagagggttgagctctctgttccacacatttagagggagcttttcctctataaaatattattccttaccaaattccatccaggatttatttttttgctttttgcttttctgtgatctttcctaacctccaaactttatgtttttattctttttttaaatatttctaatccattttattcttacagctatagagaggtagcttttttcttatcctctgttctaccttctgttctaaaagtctaattccaact

SEQ ID NO: 303098 - DNA, 583 bp, Homo sapiens
gtactgactttttctttatatgggccacattttcttctttctttgcatttttcatgaggttttgttgaaaattggacactttaaataatacgttgtagcttttctggattctgacttccccaccctcaggrgttgcgttattgctgttttctgtctcttgtttattacttttcaggactaattaaataaattctatcttcctaggagtatgcagccactgaagcctatgttctatttttaattattttcctcatttttaagcctggcttcccaggagtcaccctgggtcagcataccttgatggccacccaataattgggcaggggttttacttaaatatcttgagtcagtagggcttccactttttgctgaggggatctgtacatggattggatcacatattcaagtttcaggcagtttacaagctactttgactttcactttctgtttatgtaaggacttgtgctcagccaggaaccagtagataactggggccatctctgacctctcctgagtgtgtgaaccctttcagatccccatgaatatattaaagctttcaaagcctaatatcattggccagata

SEQ ID NO: 303099 - DNA, 598 bp, Homo sapiens
gtttgtttattgtttttcaaaagtgtatgcttattactcatactaagttattaactatattgaatgattttaatattttttatgaatttcaagcatttcttccccaayttctagtagtcaggtacagtggtctatattaatctacttttgcaagtatgggaatctataacgaaaaatctgaattatttgtcaaactttagggagagtagagaagaaaacttaggaaaaggaaactgcaaaaagaaaacagattagttgaaagcttcctgtaaattaattagaggcaaggggatgtgtaatcttcttaagtaacttaacataacatagagcataatattaataaatgattttattaattgaaattatacatgtaatttaatttaagatggacagtgaggaaattaacatacccttctgtgctttttctgttgttcttaagggaaatcaaaatcagggctcactttggatgggataatctctgtaagaggaaactaaagtaatatagctagtaagtagaaaaaaacataaaatatgataaacatgtatgatttctacaggtgtgagaataacacaaaagaacgttaagaacaaaagttaa

SEQ ID NO: 303100 - DNA, 465 bp, Homo sapiens
cattattatcataaaagatgacaactctatgcctgtcatcacccctgaagaccttccagtgggacaagttgtgatggtggaagacagtgatatcaatgatcctgaccctgtgaaggactagaytaatgtgaatttttgtgtcttactttttaacataaaagtttcaaaagtaaaaaaaacataaaaaattttaaaaacagaaaaaagcttatacaataaggttataaagaaggaatttttgttgtttctcttaattccctgagaatattcattttgttttaaattattacaaaagtcaatatttttaaaaattttaaattttataaagtaaaagagttacattgagctaagattaatttactattgaagaaaaatatcttctataaattcagtgtagcctaaatgtacagtgcttataaagtctacagtaatgtaatgtcctagaccttcacattcactcagcag

SEQ ID NO: 303101 - DNA, 465 bp, Homo sapiens
cattattatcataaaagatgacaactctatgcctgtcatcacccctgaagaccttccagtgggacaagttgtgatggtggaagacagtgatatcaatgatcctgaccctgtgaaggactagattaatgtgaatttttgtgtcttactttttaacataaaagtttcaaaagtaaaaraaacataaaaaattttaaaaacagaaaaaagcttatacaataaggttataaagaaggaatttttgttgtttctcttaattccctgagaatattcattttgttttaaattattacaaaagtcaatatttttaaaaattttaaattttataaagtaaaagagttacattgagctaagattaatttactattgaagaaaaatatcttctataaattcagtgtagcctaaatgtacagtgcttataaagtctacagtaatgtaatgtcctagaccttcacattcactcagcag

SEQ ID NO: 303102 - DNA, 603 bp, Homo sapiens
ccttgccatttgctggctttgtgacatcgggcaaattattccacttctcttaatttccttttctgtaaaatggagaaaatagcagctgtggtataggaccgtggtgtgacaattaagtgagttaattcattaatatgcrtggcagaatgtctggcacataagaaggactccattcagttattcatacactcttaaattcatgatctactacatggaaattgttttaccaaggccttggtatacagtggaggataaaatagataacatccttgcacttatggagctctatatcctagcttgggggaaaactattcatagtaaaaatgaaagtacctgaagataactgtatctgctaggcaagcaatcaaaacaggtgcacatggtagagagagaccagatggtttctttagttggagtggtaaggaaaggtctgtctaggaactaacattgaaactgagatctgaatggggaaaatttaaagacaggctgcacaaacctgaagggatttgttagccaaggcaaactgtgcttttgtccattagggtcacaggaacatttggaaacttttaagcagataaatgactatttaattcatgctttaaa

SEQ ID NO: 303103 - DNA, 603 bp, Homo sapiens
ccttgccatttgctggctttgtgacatcgggcaaattattccacttctcttaatttccttttctgtaaaatggagaaaatagcagctgtggtataggaccgtggtgtgacaattaagtgagttaattcattaatatgcgtggcagaatgtctggcacataagaaggactccattcagttattcatacactcttaaattcatgatctactacatggaaattgttttaccaaggccttggtatacagtggaggataaaatagataacatccttgcacttatggagctctatatcctagcttgggggaaaactattcatagtaaaaatgaaagtacctgaagataactgtatytgctaggcaagcaatcaaaacaggtgcacatggtagagagagaccagatggtttctttagttggagtggtaaggaaaggtctgtctaggaactaacattgaaactgagatctgaatggggaaaatttaaagacaggctgcacaaacctgaagggatttgttagccaaggcaaactgtgcttttgtccattagggtcacaggaacatttggaaacttttaagcagataaatgactatttaattcatgctttaaa

SEQ ID NO: 303104 - DNA, 592 bp, Homo sapiens
tctctacactgtttattctagttagccattcatctaatctttttttcaaggtttttaccttccttgcaatgggttcgaacatcttcctttagctcggagaactttgttattaccaaccttctgaagcctacttctgtcaaattgtcaggtcatttttcatccarctttgttctgttgctggcaatgagctgtgatcctttggaggagaagaaacgctctagtttttagaattttcagcttttcttctctggtttctccccatctttgtggttttatctgcttttggtctttgatgttggtgacctacagatggggttttggtgtggatgtcctttttgttgatgttgatgctattcctttctgtttgttagttttccttctaacagtcaggtccctcagctgcatgtctgttggagtttgctggaggtccactccagactctgtctgcctgggtatcaccagcagaggctgcagaacagcaaatattcctgcctgatccttcctctggaagcttcatcccagaggggcacccacctgtatgaggtgtcagtcagcccctactgagagatgtctctcagttaggcaacacggg

SEQ ID NO: 303105 - DNA, 592 bp, Homo sapiens
tctctacactgtttattctagttagccattcatctaatctttttttcaaggtttttaccttccttgcaatgggttcgaacatcttcctttagctcggagaactttgttattaccaaccttctgaagcctacttctgtcaaattgtcaggtcatttttcatccagctttgttctgttgctggcaatgagctgtgatcctttggaggagaagaaacgctctagtttttagaattttcagcttttcttctctggtttctccccatctttgtggttttatctrcttttggtctttgatgttggtgacctacagatggggttttggtgtggatgtcctttttgttgatgttgatgctattcctttctgtttgttagttttccttctaacagtcaggtccctcagctgcatgtctgttggagtttgctggaggtccactccagactctgtctgcctgggtatcaccagcagaggctgcagaacagcaaatattcctgcctgatccttcctctggaagcttcatcccagaggggcacccacctgtatgaggtgtcagtcagcccctactgagagatgtctctcagttaggcaacacggg

SEQ ID NO: 303106 - DNA, 580 bp, Homo sapiens
tgggataaaagaatctgaacagcaggccatgagtttcagacctttccaattttgagtagtttttcacagcatagacacaattgcagtgttgggtgcagtagggaaagtccacacttataccccaacaggcaggcgtctctgatcatgaaggctcttggagagggggttcttgtttcscctggcactccagagcagacacagctggggcttcccccataggaatttagtgtggaggcacctgtagacagcctttctagaacaatccagagtgagtgcagccccacagaaggtgcatactccggattctaacccctttctggccacatctttctggtgaaccttggaagggatgatactgaagaaacccctctaactcaaaggaaatggactgcgacactgatttgctgactttggataagtgtcagggtaactgggtaaaggatgggattgggttagagacccaacttagaggagttagaccctctcctaagacagagagggttaaaaagactattctcatttaaggcaaggacactggactgaccttgggtttgaggcccaatttgggaaggttagagtc

SEQ ID NO: 303107 - DNA, 582 bp, Homo sapiens
gctgactttggataagtgtcagggtaactgggtaaaggatgggattgggttagagacccaacttagaggagttagaccctctcctaagacagagagggttaaaaagactaytctcatttaaggcaaggacactggactgaccttgggtttgaggcccaatttgggaaggttagagtccttactaagatttagggggatagaggccccgctcagtaaagtccctttcgcctaagaaagggtttggcaccatggggtgttaactgttatgctctttgtattaatctgccttgtcctctgttgcatgagtcgattacttggttgccgtctcagtttcactgtcattttcagaagacttcatttagctggtcttaggaactttaaattactatttccctatgtgcctcctaatttctgtccatttgcttgtgaaacattgggaacaaaaagcattgaagtctctgtctctaaaattactgactgagatttggtatttaacagctatgagcaataagattagatagatgtggttatgttttgttgcagctatgcccactatgtgtgattaagaggcattaggataga

SEQ ID NO: 303108 - DNA, 628 bp, Homo sapiens
gtgtggccaaagggaaacttctttgcagatgtggcagctaaggcagctgcattaaaggagccagttggacttgtaggcatattagtgtcgtctgccccagtaatgacagaaccaagatatactaaagaggaacaagaatgggctaaaggtcagggtttaattcaagagtcttctggatggcttatgaatgacaacaaactgttgataccaggtgctaatcagtgggaaatagttaagcatttgcatgactccactcacttgggaagagatttcctgtttcaattgatgtcttggctttttataggaaaaggcttacaacagtaaagcaggtaagtcaggcctgtgaactctgtgcccagaataacccaaataaccaatctttacctcttcctttagtaggtcctgttcagcakaggggggtgtttcctggtgaagattggcaagtagattatactcagatgccccagtgtaaagagtttaattatttattagtattctcaacacctttacctgttggatctaggcttttcctaccaggtgtgaaaaggaaattgaatttctaacctcctattaaaggaaataattcctagatttgggctgcctaagagcttgaagagtaataatggct

SEQ ID NO: 303109 - DNA, 521 bp, Homo sapiens
ttaatttgtttttatttttctaatagtaaatrtatgaggaagacatatatatttttaccaggttgatatgggtagaattatctcactttttgcaaaatattacaaaatactgtgtatgtgctgtatttttataaatagaatcatgttggatgaaatattggtcataatatagtttattgttcgagtttgaaggcaaataaacaaaaagtaagtattgagtttatttaaaatgcccattaataatgtagttcttattttttaactttttaaaatgttcaaggattatttttaattgtatttttatttattttccaaactcctaatatgtacggttatacatttttttcttttttaaacaaatgcttggtttgatcagtaggaaaaacagatcttcattctttatatttggaaaagttatttttcatttattttagcttttaaatagtgagtgtagtagtcacaggtcaaacatgaaagagggggcaccctcaaattagaacaatttgagtaaggttgaatta

SEQ ID NO: 303110 - DNA, 521 bp, Homo sapiens
ttaatttgtttttatttttctaatagtaaatatatgaggaagacatatatatttttaccaggttgatatgggtagaattatctcactttttgcaaaatattacaaaatactgtgtatgtgctgtatttttataaatagaatcatgttggatgaaatattggtcataatatagtttattgttcgagtttgaaggcaaataaacaaaaagtaagtattgagtttatttaaaatgcccattaataatgtagttcttattttttaactttttaaaatgttcaaggattwtttttaattgtatttttatttattttccaaactcctaatatgtacggttatacatttttttcttttttaaacaaatgcttggtttgatcagtaggaaaaacagatcttcattctttatatttggaaaagttatttttcatttattttagcttttaaatagtgagtgtagtagtcacaggtcaaacatgaaagagggggcaccctcaaattagaacaatttgagtaaggttgaatta

SEQ ID NO: 303111 - DNA, 608 bp, Homo sapiens
actccttcacccatggaacactgtcaccctgggtaactgctgggagggaacctttgaatacaaatcttgacctcactttcctyactcattcagaagtgtcccaatcagtagccagaagacaagagagcccattgatatagtccatttacctcagcctcccggggcagaaagcaaggtagaaaaatgtggagagtgaatctcacaggggcaaaaagaactctaaaataatgagtgtacatgatagaatgaaaaccggtaagtataaaatctagtgctaagtctttccagcaaaggaatgggagctggggaagaggatttgggccataaaaaccttcttctttgggaagactaaggacctttggaaatggctggcaaggggcaggatatggagaaatggggagttgtagtcctttaacaggccagcttaaactctgtcaattggctaaagattcttagtacaattgatgcaccagaaaaaaaaaatgattagccttgaatctagcatacattcttagtgctaataacaatgatgtgctgattatatcattgctatttactttcagggttgtacctgacaaactgcgttctctggccttgggtgtaagcta

SEQ ID NO: 303112 - DNA, 608 bp, Homo sapiens
actccttcacccatggaacactgtcaccctgggtaactgctgggagggaacctttgaatacaaatcttgacctcactttcctcactcattcagaagtgtcccaatcagtagccagaagacaagagagcccattgatatagtccatttacctcagcctcccggggcagaaagcaaggtagaaaaatgtggagagtgaatctcacaggggcaaaaagaactctaaaataatgagtgtacatgatagaatgaaaaccggtaagtataaaatctagtgctaagtctttccagcaaaggaatgggagctggggaagaggatttgggccataaaaaccttcttctttgggaagacyaaggacctttggaaatggctggcaaggggcaggatatggagaaatggggagttgtagtcctttaacaggccagcttaaactctgtcaattggctaaagattcttagtacaattgatgcaccagaaaaaaaaaatgattagccttgaatctagcatacattcttagtgctaataacaatgatgtgctgattatatcattgctatttactttcagggttgtacctgacaaactgcgttctctggccttgggtgtaagcta

SEQ ID NO: 303113 - DNA, 608 bp, Homo sapiens
actccttcacccatggaacactgtcaccctgggtaactgctgggagggaacctttgaatacaaatcttgacctcactttcctcactcattcagaagtgtcccaatcagtagccagaagacaagagagcccattgatatagtccatttacctcagcctcccggggcagaaagcaaggtagaaaaatgtggagagtgaatctcacaggggcaaaaagaactctaaaataatgagtgtacatgatagaatgaaaaccggtaagtataaaatctagtgctaagtctttccagcaaaggaatgggagctggggaagaggatttgggccataaaaaccttcttctttgggaagactaaggacctttggaaatggctggcaaggggcaggatatggagaaatggggagttgtagtcctttaacaggccagcttaaactctgtcaattggctaaagattcttagtacaaytgatgcaccagaaaaaaaaaatgattagccttgaatctagcatacattcttagtgctaataacaatgatgtgctgattatatcattgctatttactttcagggttgtacctgacaaactgcgttctctggccttgggtgtaagcta

SEQ ID NO: 303114 - DNA, 563 bp, Homo sapiens
ttaaacctatattatttaaacctattaaatctcataaaatgaacttgccctgaaaaacactactaaagggtacattttagcctatagagaaatacttcattcagagatgccatgtgtaccttaagataatcagaagcaaattgtacttttataatacagtttataaaatagctagatttacctattcaatgaattttgtgagattattagttgaggaaaccatttgaacctagaatttcaacttctaatgaaaaatcaaacaatttctgaccaaatacagttagccctccatatccacaggttccatatctgtggatycaaccaaccacagatcaaaaatattcagggaagaaaaataacaatacaccaataaaagaaatataaataaaaatatactataattatttacatagcatttacacgacattagctattatttgtaatctagagatgatttaaagtttataggaggatgtaggtagattgtatacaaataacacaccattttatagaagggacttgagcatgcagattttgttatccatgggggtcctggaaccaat

SEQ ID NO: 303115 - DNA, 591 bp, Homo sapiens
aaggagccgtgaggtttcccaacttccctgttctgtaaaaacaagattgaatgtaatcatattaccattgttttataattattgatgcaaatgtcaagatatcagtgagatccataaaatatgcttattgaaataatttctttttttaacagctttactgaggtctgaggtacaatagactgcacatacttagactaaaatttgaagatttttgatatgtgtatacacttgtgaaatcatcaccaaaatcatgccaacaaacataataatcaaaagtttatttataacaaacataataatwaaaaaaaaaacccaaaagtttccttgtgccccttggtaatttccccactccctagcatacactgatctactttctgttactattcacttgtttgaatttcctaagtgtttatgaaatagaatcatagaatatgtctggtttctttggcttctttcatgcagctggtctttatttggtctttgtatggtcatatgcttccatgtctcttgggtaaatattaagaaatagaatgtttgcatcatgcagtaggtgttcacttaactttttaagaaactgtcagtttttcagaa

SEQ ID NO: 303116 - DNA, 591 bp, Homo sapiens
aaggagccgtgaggtttcccaacttccctgttctgtaaaaacaagattgaatgtaatcatattaccattgttttataattattgatgcaaatgtcaagatatcagtgagatccataaaatatgcttattgaaataatttctttttttaacagctttactgaggtctgaggtacaatagactgcacatacttagactaaaatttgaagatttttgatatgtgtatacacttgtgaaatcatcaccaaaatcatgccaacaaacataataatcaaaagtttatttataacaaacataataataaaaaaaaaarcccaaaagtttccttgtgccccttggtaatttccccactccctagcatacactgatctactttctgttactattcacttgtttgaatttcctaagtgtttatgaaatagaatcatagaatatgtctggtttctttggcttctttcatgcagctggtctttatttggtctttgtatggtcatatgcttccatgtctcttgggtaaatattaagaaatagaatgtttgcatcatgcagtaggtgttcacttaactttttaagaaactgtcagtttttcagaa

SEQ ID NO: 303117 - DNA, 643 bp, Homo sapiens
tctgttttgtgtttagcttttttttgtagtgaaacatttaaattcctttatttatctatttatctatgtatcatctatctatctattgctgtttcctttgtgtttaccatggaaatagcacttaaaatcctaaagttacaacactctaatttgaagttataccagcttaacatcaataatatacaaaaactttgctcctttaatgaattcatctcctacctttgtggttgttggtgtcacaaaattacatctttatacattgtgtactccaaaacataaactartaattctttctaaatttattagtctctaaaattatgtagaaaacaaaatgtaaagttacaaatcaaagttacaataataataatttttagattaatagttgtttttaaaaatgtatgtctgttaaatctagtagaaaacaaaaggaggaggtttaaactgttgttacaataacactagatttaaaattttttcatttattttgctttattgacatttatttcttactacagtttttagttacagttagtgtgttttcatttcattctgcaggactttcttgcagagcacgactactggtaatgaatgagctctctctgcttttgtttatttgggaatgccttaatttctccctcacttg

SEQ ID NO: 303118 - DNA, 537 bp, Homo sapiens
catccagccaggccagcactgtagcagagggaaaacccaagggccccrtatcctggcaatgcagccaggactagtgtccaaaaatatactgggaatggtgctgtgactacatgctgtgaatggaaacagcctgactgcagagggaggagtcaggaggggcttcccagaggacagggtggggtggggttcacccctagtgcagcctcagcaggagaatggggggttgttctctctccactgtgaacctggtgttcttcccttctctggggtctggctcttctactgagagaacaaggtgggcaacagaagtcaccaaaacctcctccagttgtgcaatgctaaccttgagagcagggccaggctgagacaaacacagaacccagcttcttgcagataagatgtgaaaagagtctgttactcattccaggtcctgtggcacttttagcagagatggatgtttccagctggggcttgccttagtttactagagacactgtaacaaaacaccttagactgggtaatttgtaggtaatagac

SEQ ID NO: 303119 - DNA, 546 bp, Homo sapiens
atcctagatgcaagacaaaatcctccccactcttccctctcctctcctcaagtggcaagaatgagtctctttgsaacctggagctgtgcagcctgggattggtggaggggtgatgccagcacttccttgtctgccccagctggtgtctcaatatgtcctgtgcccactcagtccactgtctttgggcttagttcagccctaggacgggcctaacagttgcagttcttatggcctagactgcctttaaagtttactttgggacacagaatgctgtaggccttgcaggcaatcaagtttggacaggtgggattgatgattcccctctggctagtgctggtttaaatgacccttccctgggtgagtgtcagatgagtttggtctagtttcttgtgttctccctcccccagcactgagatgctctctgcataatgtggccactgcccgaggttggggaggggtggtgtccaggattcaggattgttttttctatctgttcagtgactcttttggtgaatgtgaagttaaaacaaggtactatgagtgctg

SEQ ID NO: 303120 - DNA, 576 bp, Homo sapiens
attacaccataacacattgtaatcaaattattcaaaataaatgatataaagcaaatcttaaaattagcaaaaattagcaaaaagtatatgtatatacatatactttatacatatacatatactttatgtataaatgtccaaagataagggtaatggcatatttttatcagaaacaaatgcaggtaagaagacmgtggaataatatttttaaagtccttaaaaaaaagtcacctttaattttatatcaacccagaatatctgtcaaaaaaatgaaggagaaataattttagacgaaaaaagtaagtaattttttttttttgacggatttcgctcttgtcacccaagctggagtgcagtggccaatctcagcccactgcaacctccaccttcagggttcaagtgattctgccacctcagcctcctagtagctgggattacaggcatgtaacctccaccacacccagctaatttttgtatttttagtagagacagggttcaccatattggccaggctggtcttaactcctgacccacactacataaaatgttaaaggaagtctttcagtcagaaataaa

SEQ ID NO: 303121 - DNA, 576 bp, Homo sapiens
attacaccataacacattgtaatcaaattattcaaaataaatgatataaagcaaatcttaaaattagcaaaaattagcaaaaagtatatgtatatacatatactttatacatatacatatactttatgtataaatgtccaaagataagggtaatggcatatttttatcagaaacaaatgcaggtaagaagacagtggaataatatttttaaagtccttaaaaaaaagtcacctktaattttatatcaacccagaatatctgtcaaaaaaatgaaggagaaataattttagacgaaaaaagtaagtaattttttttttttgacggatttcgctcttgtcacccaagctggagtgcagtggccaatctcagcccactgcaacctccaccttcagggttcaagtgattctgccacctcagcctcctagtagctgggattacaggcatgtaacctccaccacacccagctaatttttgtatttttagtagagacagggttcaccatattggccaggctggtcttaactcctgacccacactacataaaatgttaaaggaagtctttcagtcagaaataaa

SEQ ID NO: 303122 - DNA, 544 bp, Homo sapiens
attattggatcaataatgaaatcagtatggaaattaagcatttctttgaactgaacgatgatagtgacacaaacctatcaaaacccctaggatacagcaaaagcaatgctaaaaggacagtttatagcattaaatgcctacatcaagaagtctgaaagagcatgattagaccatctaaggtcacacctcaaggaactggagaaacaagaatgaaccaaacacaaaaccagcagaaggaaagaaataacaaagatcagagcagaactaaatgaaattgaaaccaaaaatacaaaagataaatgaaacacaacactggttctttgaaaagataaacaaaatatatagaccattagtgagattaaccaggaaagaaagaaaggtgattcaaayaagctcaattagaaatgaaatgggagatattacaactgataccacacaaatgcaaaagaacattcaatgccactgatacggtttggctgtgtccctacacaaatctcaccttcaattgtaataacccccacatgataagggcagggccaagtgg

SEQ ID NO: 303123 - DNA, 544 bp, Homo sapiens
attattggatcaataatgaaatcagtatggaaattaagcatttctttgaactgaacgatgatagtgacacaaacctatcaaaacccctaggatacagcaaaagcaatgctaaaaggacagtttatagcattaaatgcctacatcaagaagtctgaaagagcatgattagaccatctaaggtcacacctcaaggaactggagaaacaagaatgaaccaaacacaaaaccagcagaaggaaagaaataacaaagatcagagcagaactaaatgaaattgaaaccaaaaatacaaaagataaatgaaacacaacactggttctttgaaaagataaacaaaatatatagaccattagtgagattaaccaggaaagaaagaaaggtgattcaaacaagctcaattagaaatgaaatgggagatattacaactgataccacacaaatgcaaaagaacattcaatgccactgatayggtttggctgtgtccctacacaaatctcaccttcaattgtaataacccccacatgataagggcagggccaagtgg

SEQ ID NO: 303124 - DNA, 582 bp, Homo sapiens
cacttgtgtctctgccaggttttggtatcagaatgacgttggcctcatagaacrtgttaaggaggagtacctcccccttgatttttttagaatagtttcagtaggattggttatcagctcttctttatgtgtctagtagaatttggctgtgaatctgtctcatgcagagtcttttctggttcgttggtcgtttttcttataattgattcaattttggaactcaatacttgtctgttcagggtttcaatttcttcctggttcaatcttagaaggttgcatgcttccagaaatttatccgtttcttccagattttctagtttgcgtgcatagtggtgcttgtaatagtctctgagggttttttgtataactgtgaggttagtggtaatttcccctttgtcatttctgattatgtttatttgtatcttgtcccttttcttctttatttgtctacctagtggtctatcaatcttatttattctttctaagaacaaacgtttcatttcattgatctttttatggtttttctcatctgcgttttgttcagttcagctccgattttgtttccttcttttcttctgctac

SEQ ID NO: 303125 - DNA, 576 bp, Homo sapiens
attacaccataacacattgtaatcaaattattcaaaataaatgatataaagcaaatcttaaaattagcaaaaattagcaaaaagtatatgtatatacatatactttatacatatacatatactttatgtataaatgtccaaagataagggtaatggcatatttttatcagaaacaaatgcaggtaagaagacagtggaataatatttttaaagtccttaaaaaaaagtcacctttaattttatatcaacccagaatatctgtcaaaaaaatgaaggagaaataattttagacgaaaaaagtaagtaattttttttttttgacggatttcgctcttgtcacccaagctggagtgcagtggccaatctcagcccactgcaacctccaccttcagggttcaagtgattctsccacctcagcctcctagtagctgggattacaggcatgtaacctccaccacacccagctaatttttgtatttttagtagagacagggttcaccatattggccaggctggtcttaactcctgacccacactacataaaatgttaaaggaagtctttcagtcagaaataaa

SEQ ID NO: 303126 - DNA, 628 bp, Homo sapiens
ctgtcacccaggctggagtttgcagtggtgcgatctcagctcactataacctccgcctcctgggcttaagccattctcctgtctcagcctcccaagtagctgggactacaggcgcatgccaccatgactggctaatttttgtatttttggtagagaaggggtttcaccatgttggccaggctggtctcgaactcctgacctaaagtgatccaccygccttggcctcccaaagtgctggaattataggcttgagccaccgcgcccagccaattatctttctcatttaaagataaggaaagtgaggctcagtatggttacatgactggtccaatgcaatccaactggtgaatgttgtagttgggattggacctcagttttgtctacgctgtaatgagatgtttttcttacatgtttatatttgatttttcgtttgtttattttctccattgaaatattgtggagagttagagatggaaaaagaataccccaaagcagaggacccctactctctccctcctaattctgcttgtgttctgtaatacgggcagggggagagggaagcccttttatctgcccttggtatctaagataccacttagtaaatgatccctcagaacccccttggctg

SEQ ID NO: 303127 - DNA, 527 bp, Homo sapiens
ttagatgaattacaccaccccatttccttaaccctcttggattagtgagggttagctgtgtagtttagggcctggagagacacagacacaccccctggtactcctccctctactgatgacaccatatgatgcagtccagcagttgagagcaggcggtgggtaatccaggttagcacaggagaggatgtggggaaactgtggccgtgagccttcaaattagtcaggtctgggtgagaacaccaggctctgccatggactggttctgtgacccctaggggacgtggttgacttctcctagcctcagtttcctcatctgaaatttggggaaaataataggcactttacaggattattgtgagaactgaggcaatgcatgtgaagtattaaacrcatcgtagatttcaataaatagtagtttttaccaccgccctcccttcccgtatctcaagacactttcttatggaggtcaccacctccttgggttacctgccaacatcgctgacccttgtctctgatttccaggcgtc

SEQ ID NO: 303128 - DNA, 571 bp, Homo sapiens
cttgcacagggtctcatagcaactgagagactgaagattagaactcacaaaccccaagtttccggaaggaggagtcaaacttttagaatctattagaaagggcaactaagactgggccagggaagggtggccttggaagtgagaaatgagacctggcacgttggcacccccacccccaactcacaacacatcctctccaaggctggctctcccctgttaaggctgcctgtttctctgcttcctcatctgtagcccctgcaggggcccgtctagaccatgtaagggagcatgctggcgtcttccatcaggtgctcccctcccctccctggattttcagactgtactcttaaaaaaaaaaaaaaaaaaaaaaaaaaaamctaaaattactctggttcccagtagaactcactccatcttcttggcagcttcttgcagctctcacagcccccaactacacacacacctatcctatgcctttcatagaacaggactgcttccctccctcccatgctagctccaggacttcctcctccaggaagacttccatgactgacatttcttggccctggtc

SEQ ID NO: 303129 - DNA, 433 bp, Homo sapiens
ttaattgagcacctttttttttttgtgctagacctcatgaaaaggattgaggttacaacagtgaatgagaccagcatgatctctgctctcatggaactttcctgctgtgcctactatccattctgagaaaagtagccctgcccacagcccttgcacaagggaagccctgagcagttatgttttgtccaatataaccccacacaaacatacccattcacacactacaatttagtgaaccaggacaggttcctggcctaagagtgatcaacccacctgttggccattaacctatgatttggcctatcgtagaraaggaaatttggctagttcggttctttctcaatctttcaggatattacccttggaaacttaaaaaggaaagcaacaaggaaattaccccaggaactgaaagctgaaaggatgcatccagaga

SEQ ID NO: 303130 - DNA, 586 bp, Homo sapiens
actttaaaaattttaggaaaaaacataggattatatattagtggaattaggaattaggaaggatttcataaacaagttcccaatatcataaaccaaaaaataatattattgaaaattttgacttcattaaaatttaaaacttatttatgaaaggacactgtgaatctaaaattaagtcaaagagaggaagaagattcttcctacacaaattaataatgaataataaaagttatgtctaaaatttataatgaacttctaaaaataatgagaaattgtcaaataatctaatataaacacatgttatatacaggcatttcaaagaatgagaaatctgaaagactgtatatgaaaatatatgaaatctcaataacaaccagataaatgtttattaaaatcacaaagaaatgccattcacattcattatatatrcaaatttaaaacttggcaaatatcaagggctgttgaggatagagtcaaaaggctcatatactgctagtggaagggtaaattagaaaagtaacttgggagctcaatttgacaatatcaggtaaatttgaaaatgccgtatcttatgattcagaaattt

SEQ ID NO: 303131 - DNA, 564 bp, Homo sapiens
atgctacagcacatcgaaatgaaaatacaacatgatcagttgggatttatcccagggatgtgaggatgattcaacatacacaagtcaataaacataattattaaggacaaaaaccatataatcatctcaataaacacacttaaaaaattgataaaattcaacagccctttatgataaaagtttgcaacaaacaaggcatagaaggaacatatctcaacataataaaggctatatatgaaaaatacacaaacaacaacattcttacagtggaaaagttaaaggcattccctctaagaactggaacaagacaagaatgcctacttttcaccattctcattcaacatagtgctgaaagtcctcttcagagcaatcagggaagaraaaaaataaaagacatctgaattaaaaaataagaaatcaaattatccctatttgctaatgatatgatcttatatctagaaaactctaaatgctccatcaaaaacctcttagatttaataaatggattcagtaaagtttcaggatacaaaatttatatacagatagcagcattcctatacgcca

SEQ ID NO: 303132 - DNA, 564 bp, Homo sapiens
atgctacagcacatcgaaatgaaaatacaacatgatcagttgggatttatcccagggatgtgaggatgattcaacatacacaagtcaataaacataattattaaggacaaaaaccatataatcatctcaataaacacacttaaaaaattgataaaattcaacagccctttatgataaaagtttgcaacaaacaaggcatagaaggaacatatctcaacataataaaggctatatatgaaaaatacacaaacaacaacattcttacagtggaaaagttaaaggcattccctctaagaactggaacaagacaagaatgcctacttttcaccattctcattcaacatagtgctgaaagtcctcttcagagcaatcagggaagagaaaaaataaaagacatctgaattaaaaaataagaaatcaaattatccctatttgctaatgatatgatcttatatctagaaaactctaaatgctccaycaaaaacctcttagatttaataaatggattcagtaaagtttcaggatacaaaatttatatacagatagcagcattcctatacgcca

SEQ ID NO: 303133 - DNA, 534 bp, Homo sapiens
gttccgttatcttttccttattccttccagcctcaaatataaagcagtagatttcaatatatctattattgttattcaatactgaataccgttacgaagcatctgctgtatacagagcatagagaaagtttctgtacaagcaatgtgagtcaccacagggagtgggtaacagttgagagggaagaagcacttatgctaattaattgtaccaggtgatgtaattccaactgggcttygatgagggctttcttgaggttttttaaaaaaatgctttgaatataaaattgaggaagagcacccttctgggagaagtatgttatctgagctgggccctgcaatttgtttacaattttgttaaacttgcggtgggagaaatgaggaacagtattacagataaaaagaacagcattaataaaacccgaaaggaagacaatgtacagtgtttgagggaaacctccattagactgatgtgcctaaagtcatggtaaggctagaaatttacacctcaggtttggactttctccagcaagaagt

SEQ ID NO: 303134 - DNA, 534 bp, Homo sapiens
gttccgttatcttttccttattccttccagcctcaaatataaagcagtagatttcaatatatctattattgttattcaatactgaataccgttacgaagcatctgctgtatacagagcatagagaaagtttctgtacaagcaatgtgagtcaccacagggagtgggtaacagttgagagggaagaagcacttatgctaattaattgtaccaggtgatgtaattccaactgggcttcgatgagggctttcttgaggttttttaaaaaaatgctttgaatataaaattgaggaagagcacccttctgggagaagtatgttatctgagctgggccctgcaatttgtttacaattttgttaaacttgcggtgggagaaatgaggaacagtattacagataaaaagaacagcattaataaaacccgaaaggaagacaatgtacagtgtttgagggaaacctccattagactgatgygcctaaagtcatggtaaggctagaaatttacacctcaggtttggactttctccagcaagaagt

SEQ ID NO: 303135 - DNA, 581 bp, Homo sapiens
tccaatcaggctcctggaactgctgatgactataatgaattattactttgaagagggcctttttagcagctaccttaaaacaagttagttatgcatctctgagagaatcataattggatatctctggatagtacaagaagtatgaattgcaatcctaacaacttatatgcattaaaatttacactctttcattcattttggggactcttgaaaaagaatagcttccatttaggccaaagtgcccatccgtggatggtttagaaacattctcatctactcactcttacatggatgaatgtcacagatgtgtgcacgtctcatcatttctatggatagaaatgagtggaggtgaagtcattcctgcttctagaattgactctaatcaagacactgactccatgcagaagggatakagttgtacctttctcaaagattttggctttagatttatggatggggttgtatttaagatacaaaatggccttctacttttatgaatcagttgttgcatgcatatatgtagcacatcttgtcttttcttagtgctttgagcactgaagcctctgtcagtgtttgttctt

SEQ ID NO: 303136 - DNA, 490 bp, Homo sapiens
tgttgcatgcatatatgtagcacatcttgtcttttcttagtgctttgagcactgaagcctctgtcagtgtttgttcttaggtctaatccctactttggggcaggggcattctctaatatcttcctagaatctagagcagtattttacaatcttttactcattatcaccctgccccacaacttccttctccatgaaaatttaatacaacagatatatagaatatctgtttatgtattatatgtagatctgtgctatatatataaaaagagtaagacgtttttaagcgccaccctcccacctgagtcaattttctcaacttatgagctgtaaagcccccattgagaatgtatcatctacagaaaaaaaaaaaattccaaactttgtgggactttagaacctcccaaacatctctccaactttatggcttgcctttgttataatccatgctggcgaaaactcagygtttgcatgctctccctcccttgtattt

SEQ ID NO: 303137 - DNA, 604 bp, Homo sapiens
tcattgctattggagtctggtagaacagtttagggatctagtgaaccaagagaatttaaatttggggactgtagagtaagtgaggaccagagctatttttgtacattcaagggaattcttttcaaaaccttataatcaaacctgactctccaagaagaacaaaatgattctagcaagggcagtaacaaccagaaagcaaaagtgtaattccaattaaatgaacagaatctgtgtgacygggttgggaaaggccaggctttaaaaatatttattttatgcttgctcatacaggtgaatgctatttttgtacttgagctaactcacaatgttcatgggcatctaaagtcttataaaccttttccaaagacaataaggagaataaggagttatacttcggctactaaatacttacccagagcttttcgttattcaaagacaaagatgtgtgctttaggggtacagtctacatcaaacacactgtatattttgcacacaaactaacatgtatatatgtactcctctatataccacaatacatatatacatatacatacgtatacatagagagagattgggaaggtgtagcaaccatacatgaaggcat

SEQ ID NO: 303138 - DNA, 604 bp, Homo sapiens
tcattgctattggagtctggtagaacagtttagggatctagtgaaccaagagaatttaaatttggggactgtagagtaagtgaggaccagagctatttttgtacattcaagggaattcttttcaaaaccttataatcaaacctgactctccaagaagaacaaaatgattctagcaagggcagtaacaaccagaaagcaaaagtgtaattccaattaaatgaacagaatctgtgtgaccgggttgggaaaggccaggctttaaaaatatttattttatgcttgctcatacaggtgaatgctatttttgtacttgagctaactcacaatgttcatgggcatctaaagtcttataaaccttttccaaagacaataaggagaataaggagttatacttcggctactaaatacttacccagagcttttcrttattcaaagacaaagatgtgtgctttaggggtacagtctacatcaaacacactgtatattttgcacacaaactaacatgtatatatgtactcctctatataccacaatacatatatacatatacatacgtatacatagagagagattgggaaggtgtagcaaccatacatgaaggcat

SEQ ID NO: 303139 - DNA, 598 bp, Homo sapiens
tgtacatttatctaaaagaaaatttggtctcaggcacttcaaagtatgctgaagttttcattactaagttttaaagttggtaatgggaattgagttgatgtctactctatttaatttgaatggcttttgaatatacaagattaaaatattttgtgatgatggttattagggcagtttaggataaggattaacacagcgagaaagggctttttggaaaagtgaaacgtgccttgtttagcatataagccctcctttggtgtttcttttgagcaatttagaaaaatatacatcctttcttagcccgtagcagcctccaaaaataacttgattataaatcaagtatatctgtcatttttcttctcctctgattcacttaaaagcacaaytgtgactgagaaaactgtgctctttgtatttatgtcttcaagaatgtgtgggtttggcccagcatcatgggaagagcctcaaccactcagatcagaggagggcaggctggagcccctccatgcctctggagatgactttgtagacacgtgggaagaacacacttaccatcgccggaaccccagatgcctgcaatctgaaaagaacatcctat

SEQ ID NO: 303140 - DNA, 598 bp, Homo sapiens
tgtacatttatctaaaagaaaatttggtctcaggcacttcaaagtatgctgaagttttcattactaagttttaaagttggtaatgggaattgagttgatgtctactctatttaatttgaatggcttttgaatatacaagattaaaatattttgtgatgatggttattagggcagtttaggataaggattaacacagcgagaaagggctttttggaaaagtgaaacgtgccttgtttagcatataagccctcctttggtgtttcttttgagcaatttagaaaaatatacatcctttcttagcccgtagcagcctccaaaaataacttgattataaatcaagtatatctgtcatttttcttctcctctgattcacttaaaagcacaattgtgactgagaaaactgtgctctttgtatttatgtcttcaagaatgtgtgggtttggcccagcatcatgggaagagcctcaaccactcagatcagaggagggcaggctggagcccctccatgcctctggagatgactttgtagacacgtgggaagaacacacttaccatcrccggaaccccagatgcctgcaatctgaaaagaacatcctat

SEQ ID NO: 303141 - DNA, 568 bp, Homo sapiens
tgtctttaaagaaaatattgtgcaaaatcctttagcacttcttccctctccccaacagaggtcaaggagaaatttgtgcttagaagtgattttttttttttttggccacttaacgctgtcttcagatgaattacaatattcctatcccccaagcttgcgctagctggagcactgataaaatggaactaaaaatatagtatacttaagaaccatttcatacaatagaattgaagctcataacacagaaaaaattgtcatgcaaaatgttaygcaacaacaatgttattttgtgctgacattgagatttgaaaatgttgcatatgtcagacatagctagacaaaaaatatgtggacatttggaaataaatgctctcttttgagtatctcaaaacctataaaattatacttgagagcccgagtctcagcttagtgttccaaactgaaacaaaatttcaagaagaaaggtgaacagaaaagcaaactaaactagaaagctgccaagtagaggaatgatgaaagtttacggtacttgattttggcctaggcatgcctttgagcctctgatata

SEQ ID NO: 303142 - DNA, 578 bp, Homo sapiens
gtcatgttcaaattttgactctacaactaaccagatgtttaaccttgggggagtgacttaacatgtttctacttcaggatttccatgcatgaatgcataagttcttatttcattgaagtaagaggcacatcgtaacatttctgaaatccggatgcatcttatgtttgatagcatgtcacaatacagtatatgaatggcgcagcttataattgatggccctttagattcaatgaaatatggtaataaaacacttatctcacagggtcatggtgagaattaaatgagatatgtataactacttagcacatactaaattctcaataaacaacaatttttatcataatctgcagcatcacatctttttttctgatagaagagagagacactggtttcatatttgtgggttcacagcatattttaacacatcctttttttycccaaaatctttcttggtgacagtgtttaaaacatgtttctctttgtcctccccacttatggtaaagtatagatgaggtgctagtccacagaataatctgggcttggaaaccctgatttatgcaccactgaaacaaaaagga

SEQ ID NO: 303143 - DNA, 555 bp, Homo sapiens
cagggggttcgtatgggtactaaaattggaaaagccttggtagagatttccctttcgttgtaaagagaagaacaataggacagtagctgaagggagagatgtggtaaagagaggtttttgttgttgttttgtttgtgtttaaagatgagggagaaaatagtatgtttataggcagatgtttatcccccaagcaggcagyctgcttggcagttctatccccagcaggacacaaaaagataagatccaggctcagaaatacttcttcaacatcacggtcccactctgtggacaagtgaatctcagacttcccatcctaagttaatcactacccccctcttctgtcccaaggaaaagcagcagaaactgctttttcaaaggctgagtccagttgagaacatcacagctcagcttagtagaagttgttactcccttttcttccaggtttggagggtggccgagccttcttcaatgctgtcaaggagggagacaccgtgatatttgccagtgacgatgaacaagaccgcatcctgtgggtccaggccatgtatcgggcca

SEQ ID NO: 303144 - DNA, 491 bp, Homo sapiens
catctacaaaaagcctgtgtatgaaaaatgctccatctctcatcctcctgcccttttctggctggctgtcttttttgtaacaatcccatttggagctctgaggggtgtcctccccmccacccacttcctcgcataccactaatgctaacacagtaatttataaaatgtccaacacaccatgcattaccacttgttctgacatcgtctatagaaacagatgagagtgggtgtttctattgtgacagatgccagctgcattgaattaatgcttcagagagaaatatagctagtgcataaatgcatacacagctactgcagggcggggagggggcacacgcccaagcatgctgagagggagcctacggcctggaccaacagggtaatgttttcaaggacagaccagtctgaggtcagtacgtagacgtatctgacacgatggagcaggtaacatataaacacgcccttaaaatgaaaggtggcaaaggaagaaa

SEQ ID NO: 303145 - DNA, 517 bp, Homo sapiens
gcagcaaattggatccccatggggtcagctgtctttgtgagtgcatgtttatagttcgtctttgtggrtatgcccagatgagcattctgctaatctgctaatgaaaataaaagtatttccattaggccaagtcagcaatttaactgtttgtaacagagatcggcaaactttttctataaaggaccagaaagtaaaaattttcggtttgttggccctatattctctgtcataactactcaattctgccattgctgcacaaaagaagccatagacaaaacaaaaatgagtaagctaactatgttctaataaaacgttattgatgggcatcaaaatttgaatttcatataatattcatgtgttgcaaatattcctttgattattttcagccatttgaaaatacaaagcccttattagcttatgagccatacataagcagacccatacccatggccatagtttaacaacccctggtctataatcctaaaatgaagacttacattttttagtgctttctatg

SEQ ID NO: 303146 - DNA, 425 bp, Homo sapiens
ttatttatgttcacaaaaagaaccaaacactaagagttgacttgtggaccaagagttttctgctgtaggtaagagctagctcaggtagtatctggcgcctaycacagtgccctgtatgtgattggtgcttaaatgctcaagcccatgtaaactaaaaataaaattctaagccctccaaccatctgaatggacccctcctctcagccaagggcattccaaagttcaagccatggtgggaaggggaggtgggacacgcctctttatactctcctccctttggaattcaggcacaactgaccagcattaacattaaaacccagattttaagactgatgaagcagactttttgtagcaataagacaccaaattccagcctgactctagtatagcatcacatgacagacagcaggccctgaaagaaatta

SEQ ID NO: 303147 - DNA, 425 bp, Homo sapiens
ttatttatgttcacaaaaagaaccaaacactaagagttgacttgtggaccaagagttttctgctgtaggtaagagctagctcaggtagtatctggcgcctaccacagtgccctgtatgtgattggtgcttaaatgctcaagcccatgtaaactaaaaataaaattctaagccctccaaccatctgaatggacccctyctctcagccaagggcattccaaagttcaagccatggtgggaaggggaggtgggacacgcctctttatactctcctccctttggaattcaggcacaactgaccagcattaacattaaaacccagattttaagactgatgaagcagactttttgtagcaataagacaccaaattccagcctgactctagtatagcatcacatgacagacagcaggccctgaaagaaatta

SEQ ID NO: 303148 - DNA, 581 bp, Homo sapiens
tctttcctgtaacaacatctgattgcttcactcatcatattccagcctgtcaccagctcgtcacggaaatgattgaaatgctactaattctgcattatggccttctggctgggtgaacttggcaaaggctggggagatgtttgtgtatctaagagcaaatggccccgaggtttggaaacggaaatgctcctcccaccacacccaagagaaatgtgcatggtgaggagtcctggggttctcagccccttgtgagtggagccaggacatagatgccagctgccgtggggtttctccagaattctcagctgcacaactgtgaactgagggagttgctttgaggcagtgtggcatacaacaccttatccttttatttgagggacgtgctaaaagtttaagtagtcagctttccaatcctcatcctccttctttcatttacctgtttcctcttcctttttcctcccatcacctttgattctgaatrtttccctctgctgttctgaggtctgtttttagggggctggcttggctaacaggagttaggacagaaagggccggctctgcatgagctctgctttctgcag

SEQ ID NO: 303149 - DNA, 536 bp, Homo sapiens
aggctaggtgcattaaatgcatcttttacttacaatattttcaacttacgagtatactgaatgtaacattgtaagttgaggaacatttggatgctcttgaagctttctaagggttttttctgttcagttattatgttcttcagtcccagaattcctgttttgttctttttttatagtttctatttttttgttaaacttctaactttgttcatgtattttttttaatgattttatttggttgttttcttctgtagttcactgagcttctttaagaggattattttgaattatttgtcaggcagttcatacatctctattttttagggctagttactagttcttttatttttttctctttyagttatgtcagatttccctgattatttgacttttttttttgtcttgcattatgatctatgtatttgaagaagtaagcacctcttccagtcttttttttttttttttttttttttaaacggagtctcactctgtcacccaggctggagtgcagtggtgcaatctctgctcactgcaag

SEQ ID NO: 303150 - DNA, 596 bp, Homo sapiens
actgggtaatttataaaggaaagaggtttaatggactcacagttccacatgactgggaaggcctcacaatcatggtggaaggcaaaggaagagcaaaggcacatcttacatggcggcaggcaagagggcatgtgcaggggaactcccatttataaaaccatcagatctcatgagacttattcactatcacaagaacagcatgggaaaaacccgcccccrtgattcaattacctcccaccaggtccctcctatgacatatggggattatcaaggtagatttgagtagggacacagagccaaaccatatcagatagcatgcatatgtacatagaaaatgtcaaattgttcacgatcagaaaatgtttattctctcccctattcttttccctttcctctgtagctgtgtgcacatatgtattttgattatgaatgaactccatttattctttcaccttccagctgagctcttatcccttccctgattttctctttcacttaaaaatggactaaggaattccactctgtttatattttatagcatatatttaaacatttctttcacattattgttggctaagttttatagttcttcaatg

SEQ ID NO: 303151 - DNA, 601 bp, Homo sapiens
atgtacatagaaaatgtcaaattgttcacgatcagaaaatgtttattctctcccctattcttttccctttcctctgtagctgtgtgcacatatgtattttgattatgaatgaactccatttattctttcaccttccagctgagctcttatcccttccctgattttctctttcacttaaaaatggactaaggaattccactctgtttatattttatagcatatatttaaacatttctttcwcattattgttggctaagttttatagttcttcaatgctgattgctacagtgtctttcaaatccaggaaaaatatgcaactttgatagtcccaatgtgcctgcagatttgtaggtggaaggaccgattgctttatgattaagagtctgcaataatttgtttaaaaactttaacttgcaggctgttaatgattggactaagtgactgaggaaagatcaactttaattgtatgacttaactctactaagagtttcataaacacattttaacagttttgttagaatagttatcataacataaatgtatatatttttttaaaatgtgtaatattgggagtggaatttatatgaaaaccaactaaaac

SEQ ID NO: 303152 - DNA, 601 bp, Homo sapiens
atgtacatagaaaatgtcaaattgttcacgatcagaaaatgtttattctctcccctattcttttccctttcctctgtagctgtgtgcacatatgtattttgattatgaatgaactccatttattctttcaccttccagctgagctcttatcccttccctgattttctctttcacttaaaaatggactaaggaattccactctgtttatattttatagcatatatttaaacatttctttcacattattgttggctaagttttatagttcttcaatgctgattgctacagtgtctttcaaatccaggaaaaatatgcaactttgatagtcccaatgtgcctgcagatttgtaggtggaaggacygattgctttatgattaagagtctgcaataatttgtttaaaaactttaacttgcaggctgttaatgattggactaagtgactgaggaaagatcaactttaattgtatgacttaactctactaagagtttcataaacacattttaacagttttgttagaatagttatcataacataaatgtatatatttttttaaaatgtgtaatattgggagtggaatttatatgaaaaccaactaaaac

SEQ ID NO: 303153 - DNA, 543 bp, Homo sapiens
tgtatgtatgtgtgttttatcagaatgaaattattttcctgttaccaattaatgatccatacaagttttagtttaaactaacttttcctgattatttttgaatgaatcactgaaatacttatgtaggtaaattgaaattccttartctttgatcttcttaagcttaattgcaatcttcatggcaaatttgcgtattcttggtaaatgcatttatttcatttatgatttaaatttgtgcttattaaaataacagctaaccatggtttttggtttgcagaaaggtctttttgtaattctatttacttctccaaatttatgatgaacacattattattattattgtcattttaaatttaaagaatctaaatttcaggtaagttgattttccattgccatgtaaaatattcattagagaaaaaagcctggaacccgtatgtcacaattcctcatttagtatttctttgatatttatcttataaagatacagcaaggatctctactttgctttgtcttttcttgtgtttcttcaatctattctccatc

SEQ ID NO: 303154 - DNA, 543 bp, Homo sapiens
ttcccattcaagttgtaatattttatttttcatttgaatattacattatgagactccagatcctatttaatcttaaagtatagtgcaagagtggagtgagtttctatgttctgctttattctcatccccactggtaccacccaagcgaaggcagacagctgactcacactgcttcattggagacaggtgcagtataagctcagctcctttctaagccccactgacaygagaaaatggagaagcagaggtctgaataataccgctttgtgcttctgggtaggagtcgtaggtcagctcctttctaggcctcactggcaccaggggaggagaaggaaggaagtggagtacaaactagccttgcctctgtccgccttgttctgtctcattgatattgggtagatgaggagacttattgttcccctggaccctactgataccagagatgtgggcagagtgctgccatctggagatggagattcaggatctcattgggttctgacaacacagaaggttgagtgggtgtgtgggaagaatgatgcctag

SEQ ID NO: 303155 - DNA, 600 bp, Homo sapiens
tctggatatatttatttaatttgtaaaaaaaaaatctctcatggcaagtcttctatagttatcaccaaataattctaaatttctgggaagaagactggtttgaaaatccattgattgcrgacatttctaatggttgacccctctttttctcagccccaagaagctataactggatgggtgaaacatgatgtatattgcctttattgcattctatgaagaaatgaaagtcaagctgaagcaattaatgttcttttaaaaatggtctcaaactcagtatataactgttatttaactgatgatttgattaattaactgacttatggatcattttctatcttggtgaggaaaaaagtattcattgtcttttggtggcagctcttcaccaccaaaggttaacatctggagtgacacatagaagatttcttcttaataaaaagaaatccaagctatataacttactttattatttctgcttcaacactgcataaaatacatgtcttttgtcttgcaatgattacattcacaactagataagataactttaaaacaaagatagccaataatacccatcataaaacaagcacagaaacaagacaagat

SEQ ID NO: 303156 - DNA, 600 bp, Homo sapiens
tctggatatatttatttaatttgtaaaaaaaaaatctctcatggcaagtcttctatagttatcaccaaataattctaaatttctgggaagaagactggtttgaaaatccattgattgcggacatttctaatggttgacccctctttttctcagccccaagaagctataactggatgggtgaaacatgatgtatattgcctttattgcattctatgaagaaatgaaagtcaagctgaagcaattaatgttcttttaaaaatggtctcaaactcagtatataactgttatttaactgatgatttgattaattaactgacttatggatcattttctatcttggtgaggaaaaaagtattcattgtcttttggtggcagctcttcaccaccaaaggttaacatctggagtgacacatagaagatttcttcttartaaaaagaaatccaagctatataacttactttattatttctgcttcaacactgcataaaatacatgtcttttgtcttgcaatgattacattcacaactagataagataactttaaaacaaagatagccaataatacccatcataaaacaagcacagaaacaagacaagat

SEQ ID NO: 303157 - DNA, 582 bp, Homo sapiens
tgtattgttctcttctttcataaacatcaagcaaacatcagacgttgctaaaatcccaactgctacatttcaattttactcctttctacagactgtgtttgaagaaagtaatttgaattatttatatccctaagtttacagctattaaatgggaattataatagctattgttcacatgagctgaaaattacaaaatcgctggatttattcatgctccatgtctaaaatgtcttcgaatcactgcatttgtgcttaattaaattcagttgttttccagttttttgccaagtacattaaagttgaagttaaaatctgtttttatttttatttgatgccaagggagcaagatatcaacatatgtcaaatttaaagggaaatatatctattaatacatacacactatcatgcaagatgttccaactgtgcacatttctcaagaggagaggagaaaaaatctacaaaaatgacttttgytgcaagaagaatataaacaagttaaaatcctttcgtgataacaaaagtctcacaaaagaggactggactttgtccatgttttaggaatttgcagatataaagagttag

SEQ ID NO: 303158 - DNA, 640 bp, Homo sapiens
aatttaaagggaaatatatctattaatacatacacactatcatgcaagatgttccaactgtgcacatttctcaagaggagaggagaaaaaatctacaaaaatgacttttgctgcaagaagaatataaacaagttaaaatcctttcgtgataacaaaagtctcacaaaagaggactggactttgtccatgttttaggaatttgcagatataaagagttagttatcttctactccagctctgtaatgtgtagtgtgaaaatatttgctgtcagaaaaaaacaaagtgggaaggcatrgatttcactgacagagagagatcaagaatcctttcacctcatatctttatatttctaactttcatcaaatgcttgcaatatgacaaaaacattgatttttttactactctccccataaccccaaacttttaaaaaatcctgcaagcatcttgttctttggcatgaaattcactgttaaggcatgttgtaagggccctgcttgcctagctgcataatactaagcagtttagtgcagcatagctgataggctactcctttctatttttttccactaaaatgtcagcaagttttaggcaaagaagcatatgaggtaatataacacatacgccaataaggatattaatt

SEQ ID NO: 303159 - DNA, 452 bp, Homo sapiens
attgttttatagttcttccttagagatttttcacctccttggttaaatgtatttctaggttgttgttgttttgtggctgttgtaaatggaattgagttcttgatttggttttcagcttgaatgttattggtgtatagaaatgcaactgattttacgttgattttgtgtcctgaaacttgactgattttatttaagtctaggagtcctttggatatatctttagrgttttttgcttgtatgattatgtcttcagtgaacagagataatttgacttgttcctgtccaatttggatgctttttatttttgtctcttacctgattgctctaataactgcagtactgtgttgaatagcagtggtgagaggagacatccttgtcttgttctggttcttaaggggaatgctttcagctttcccctattctatataatgttggctgtggatttgtcatag

SEQ ID NO: 303160 - DNA, 587 bp, Homo sapiens
tgtctggtcctgggctgttgttgttgttgttgttgaaagattttttatttcttattctatttaattacacattattggtcagttcaggatttatgtttcttcctggttcaattgtggagggtcatgtttccaggaatttatctatttcctctaggctttctattttgtgtgcatagaggtgttcataacagtctggaaatcctttgcatttctgtggtatcagttgtaatgtccccttccttatttctgattttacttatttgaatcttctctcattttttcttggctatgctagctaaccatatgtcaatttttcttatcttttcataaaaacacctttttgttttattaatccattgtatcaatttattagtctcaacctcatttagttctgctctttattatttcttctgatagttttgggtttggattattcttgtttttatagtttctatagtttataatgtggatcaacattaggttgttaatttgggatctttctatctttttgatgtgggcatttaatgcyataaactttactcttagtacttcttttggtgtatctcagaagttttggtatgttgtct

SEQ ID NO: 303161 - DNA, 524 bp, Homo sapiens
aaaaactccttagttattgaagcctttctatggtggctttctcaaatgtttgttgtagtagcaatgtgttaggcatgtgagtaggctcaggaagcttatcacattttccagagctatgcatttgtgtcagcagatttcctcttgttttgtggggttcaacctccatgccagtgggtggtgctgtagtgttagaactggctgcagccaatcgggatgggtatacactaatacttgatccttgtttactatgggaagctctgtgttacccaagacaatgggttgaactgtggaattcacagggttctgagctccctacttatctccagagtgggggaccaaggtaggcagggcccgactggacaggcctgcctcatgtctcataatggcaggcacaagcaccagctgtgttgggggattctagtgcacagccaccaaatgcccasaagtgtgcctaggcatggagttggaaaacctccactgccccaagttttctgcacaggtaggggagtatggcctaaacacaa

SEQ ID NO: 303162 - DNA, 517 bp, Homo sapiens
aggtttcatatcaatttcacttctaggaacactgtgattaattagtmaatgccagagctctatatgaatcagattattctgattgctgctttgcctctgctgtccattacagtagctacacccaccttgcctttgatggttgagtactgacacttggcccctgccacctcgggatccaattattcacactgtatttaaattttgtagtgagtgactgcagtgcccaccattagatctgacctacagagaagagaaattatagggctcctcaaagatgcaggtgctgccctcactactctattttgcaaggcattggtcaaggttatatcttttggaccctctgagctgggatgagtaggtctaaattgactgatctactccaccatcccaatctccctaagcttttggaacccctccctctatattaaaacaagggagatcaggcatttccagcttgctcacagtgggccatcttttaatccatatttcagctaaccaagccaataaactattagaa

SEQ ID NO: 303163 - DNA, 517 bp, Homo sapiens
aggtttcatatcaatttcacttctaggaacactgtgattaattagtcaatgccagagctctatatgaatcagattattctgattgctgctttgcctctgctgtccattacagtagctacacccaccttgcctttgatggttgagtactgacacttggcccctgccacctcgggatccaattattcacactgtatttaaattttgtagtgagtgactgcagtgcccaccattagatctgacctacagagaagagaaattatagggctcctcaaagatgcaggtgctgccctcactactctattttgcaaggcattggtcaaggttatatcttttggaccctctgagctgggatgagtaggtctaaattgactgatctactccaccatcccaatctccctaagcttttggawcccctccctctatattaaaacaagggagatcaggcatttccagcttgctcacagtgggccatcttttaatccatatttcagctaaccaagccaataaactattagaa

SEQ ID NO: 303164 - DNA, 605 bp, Homo sapiens
caaatgttggttgagtattgcctataagcttggcactcactgatttatctaaagtaatattatttttctctattgactcatctaaaattccaatctttgtaaaatatgctcattgtaattatttaattggtttttaccttcaaggtaaatgtaaattgtatcttgaaagaattcattaaaaatgaaaatatggcatattatatttgttcctcatatattttataaacatataattatctatcatctatcttatctatctatctatctatctatctatctatctatctatcatctatctatccacctacctatctatcctgattatgcatcccaatttagagtttcatagaccttctctcaaagagaaggcattctgtcaataaaatgaaatcatgtaggtgtcttctattttacataatagttgattcaaaatgggcaaaattgtattaactacagtagctactggaaacttcatttaatacaaaggctagaccaaaaaaaaaaagccatgcccagtgayctgaataccttacatattagaaaaagggcagtctacaaaggaaaacgttctaaaaatccttggagaaattgaaattcatgggaaa

SEQ ID NO: 303165 - DNA, 602 bp, Homo sapiens
taaagccaataccatcatgtgaggtcccatatttaaagtttaatttctctgtgattatttacataagaatagctccatttttcaaaactttcctttcattaggaacagaaacaaatgtcctctaggaatgaatgaaatatttttctctactattrctgttgtttttaaagttgaaaatttacctatttattaaagtcattccataaccttatccaaccccaaatctgtacatttcacactttgtagaataatgagttgaaaagaaacccagtggatttatgtatgtgtgtgtgtgtgtacatatatatatatacattttttattatgtgggttctggcaaatattttagggctaattttttagctgataaattttagtactatagcaatatttggttatgtcaaattatgtgaaattgtgtagtgatttctaggaataaaatattctgaaaatagcagttgtgaagggaagtctaggttagcctcaacttactgaaagtgaaatcttttgaatattcaaatgaaaaaagtaagagtaatgggaatgaaaaataatcaggacacacaataatgaaaaaatgaaataaaaaaattgtggaaata

SEQ ID NO: 303166 - DNA, 602 bp, Homo sapiens
taaagccaataccatcatgtgaggtcccatatttaaagtttaatttctctgtgattatttacataagaatagctccatttttcaaaactttcctttcattaggaacagaaacaaatgtcctctaggaatgaatgaaatatttttctctactattgctgttgtttttaaagttgaaaayttacctatttattaaagtcattccataaccttatccaaccccaaatctgtacatttcacactttgtagaataatgagttgaaaagaaacccagtggatttatgtatgtgtgtgtgtgtgtacatatatatatatacattttttattatgtgggttctggcaaatattttagggctaattttttagctgataaattttagtactatagcaatatttggttatgtcaaattatgtgaaattgtgtagtgatttctaggaataaaatattctgaaaatagcagttgtgaagggaagtctaggttagcctcaacttactgaaagtgaaatcttttgaatattcaaatgaaaaaagtaagagtaatgggaatgaaaaataatcaggacacacaataatgaaaaaatgaaataaaaaaattgtggaaata

SEQ ID NO: 303167 - DNA, 597 bp, Homo sapiens
tgactcacgagtaaacatatggctcttatgtttttagcaaatatcaagcttttgaatttcaacccaagtaaaatgtttctcccgtggctccctgacagaacattcccagctgtttcaatgcagagctctgacagcttctagagcaagagtcaatattagttaatggtccagctgcarttgcgactattttatttcatcacaatgacaacttagattccttctcctactatttcctttgagattagtgctgctgaactttagtattcacagctactcacagagctgtgactataaaccctttcgagttattcattattagttcctacacaacatgttctaattaactcataataaatcctccaaaatactgcatatgttacatttttcattaggatctaattggaaggaagctgcatcactttccttctgttaataagccatctttctttacattgcatgatgcattttagtttgacatgacgattattccattccatcaatgacccagattacgttcttccttccgtaacagaatgtattgtaaaataatgaaactgaaactgcaaggcagagaagactacacacacacaccatgat

SEQ ID NO: 303168 - DNA, 597 bp, Homo sapiens
tgactcacgagtaaacatatggctcttatgtttttagcaaatatcaagcttttgaatttcaacccaagtaaaatgtttctcccgtggctccctgacagaacattcccagctgtttcaatgcagagctctgacagcttctagagcaagagtcaatattagttaatggtccagctgcaattgcgactattttatttcatcacaatgacaacttagattccttctcctactatttcctttgagattagtgctgctgaactttagtattcacagctactcacagagctgtgactataaaccctttcgagttattcattattagttcctacacaacatgttctaattaactcataataaatcctccaaaatactgcatatgttacatttttcattaggatctaattggaaggaagctgcatcactttccttctgttartaagccatctttctttacattgcatgatgcattttagtttgacatgacgattattccattccatcaatgacccagattacgttcttccttccgtaacagaatgtattgtaaaataatgaaactgaaactgcaaggcagagaagactacacacacacaccatgat

SEQ ID NO: 303169 - DNA, 587 bp, Homo sapiens
aattgtactctattcttgatattcatccaattggctaagatttgccttttatgagtctaatccctgacatctcgaccgtggggaagcacataattgtaggatcttcctatttcagtaggggaaggaaactactcagccagatgaacgtcaattgggccggaattgctgctgaatagaggctcaccttaagtgggaaggaaaatgtgctggttgctaagctactgataggctttgcccttcctctgtttaatgggcagtcactgggtcaaggcacaaatgatgacgttaaagctggcgtttctttgctaattgaatggttacataggaaatgtctaagggtttcctctaaattagttgttcctccttgctattctctgaccttcactcccaggatgaagggtgactggaggctaggagatggaatgaatggaagatttactaaatagtaaaattagctaacattaagatgctatarctgtataaaaaatgaatttgtcagcatttaaaatagtttataataaaaaacaggaggacatgtttcaaacatattggtttatattgttcatcctttccacgtcattattcct

SEQ ID NO: 303170 - DNA, 590 bp, Homo sapiens
ttcatgccgtctgcagtggggaggagcctggcccctcctcttcctgtatgggaaactgggattcaatctatgagatgagggcctgttaacaggaacccctctcttgctttcccgtgttgttttcctttctccttttcrcccaagaaattccatcccccttacccttcaaagtgtctgcaagcctaatctttcctggttgtgtgacaagaacccagattttcctacaagatatctatgtatctatctatgtatctacctatgtatccatctatctacctacctacctacctacctacctacctacctacctacctacctacccatccctattgcttctgtttcctggagaaccctgactaatacaaaactcttgggaaaagaagagaattttatttgctcatttgtttttgttttcatttcttctattttgtggtgtgcaaagaattaagaattatattttagaatggccaagattgttatgattattaagtatcaaagtggaattatatcggaggcattggcttttacagtcatgggaaaaatagaaactgggaaaatacatgtggaatttatcaatgtaaaggctttga

SEQ ID NO: 303171 - DNA, 590 bp, Homo sapiens
ttcatgccgtctgcagtggggaggagcctggcccctcctcttcctgtatgggaaactgggattcaatctatgagatgagggcctgttaacaggaacccctctcttgctttcccgtgttgttttcctttctccttttcgcccaagaaattccatcccccttacccttcaaagtgtctgcaagcctaatctttcctggttgtgtgacaagaacccagattttcctacaagatatctatgtatctatctatgtatctacctatgtatccatctayctacctacctacctacctacctacctacctacctacctacctacctacccatccctattgcttctgtttcctggagaaccctgactaatacaaaactcttgggaaaagaagagaattttatttgctcatttgtttttgttttcatttcttctattttgtggtgtgcaaagaattaagaattatattttagaatggccaagattgttatgattattaagtatcaaagtggaattatatcggaggcattggcttttacagtcatgggaaaaatagaaactgggaaaatacatgtggaatttatcaatgtaaaggctttga

SEQ ID NO: 303172 - DNA, 345 bp, Homo sapiens
ccctattgcttctgtttcctggagaaccctgactaatacaaaactcttgggaaaagaagagaattttatttgctcatttgtttttgttttcatttcttctatyttgtggtgtgcaaagaattaagaattatattttagaatggccaagattgttatgattattaagtatcaaagtggaattatatcggaggcattggcttttacagtcatgggaaaaatagaaactgggaaaatacatgtggaatttatcaatgtaaaggctttgaaagaaatagtacttggcaattacttctggaggacgattaactctgtcaaaatatactgacttggaaaagtaaaaggagg

SEQ ID NO: 303173 - DNA, 590 bp, Homo sapiens
ttcatgccgtctgcagtggggaggagcctggcccctcctcttcctgtatgggaaactgggattcaatctatgagatgagggcctgttaacaggaacccctctcttgctttcccgtgttgttttcctttctccttttcgcccaagaaattccatcccccttacccttcaaagtgtctgcaagcctaatctttcctggttgtgtgacaagaacccagattttcctacaagatatctatgtatctatctatgtatctacctatgtatccatctatctacctacctacctacctacctacctacctacctacctacctacctacccatccctattgcttctgtttcctggagaaccctgactaatacaaaactcttgggaaaagaagagaattttatttgctcatttgtttttgttttcatttcttctattttgtggtrtgcaaagaattaagaattatattttagaatggccaagattgttatgattattaagtatcaaagtggaattatatcggaggcattggcttttacagtcatgggaaaaatagaaactgggaaaatacatgtggaatttatcaatgtaaaggctttga

SEQ ID NO: 303174 - DNA, 345 bp, Homo sapiens
ccctattgcttctgtttcctggagaaccctgactaatacaaaactcttgggaaaagaagagaattttatttgctcatttgtttttgttttcatttcttctattttgtggtgtgcaaagaattaagaattatattttagaatggccaagattgttwtgattattaagtatcaaagtggaattatatcggaggcattggcttttacagtcatgggaaaaatagaaactgggaaaatacatgtggaatttatcaatgtaaaggctttgaaagaaatagtacttggcaattacttctggaggacgattaactctgtcaaaatatactgacttggaaaagtaaaaggagg

SEQ ID NO: 303175 - DNA, 345 bp, Homo sapiens
ccctattgcttctgtttcctggagaaccctgactaatacaaaactcttgggaaaagaagagaattttatttgctcatttgtttttgttttcatttcttctattttgtggtgtgcaaagaattaagaattatattttagaatggccaagattgttatgattattaagtatcaaagtggaattatatcrgaggcattggcttttacagtcatgggaaaaatagaaactgggaaaatacatgtggaatttatcaatgtaaaggctttgaaagaaatagtacttggcaattacttctggaggacgattaactctgtcaaaatatactgacttggaaaagtaaaaggagg

SEQ ID NO: 303176 - DNA, 345 bp, Homo sapiens
ccctattgcttctgtttcctggagaaccctgactaatacaaaactcttgggaaaagaagagaattttatttgctcatttgtttttgttttcatttcttctattttgtggtgtgcaaagaattaagaattatattttagaatggccaagattgttatgattattaagtatcaaagtggaattatatcggaggcattggcttttacagtcatgggaaaaatagaaactgggaaaatacatgtsgaatttatcaatgtaaaggctttgaaagaaatagtacttggcaattacttctggaggacgattaactctgtcaaaatatactgacttggaaaagtaaaaggagg

SEQ ID NO: 303177 - DNA, 585 bp, Homo sapiens
ccagtttatgattgggcaatgacaaactttaakttttagtatatttagggaactatggtaagaacgttagcaaataacactaaatattatgtgatttaataatattatttaatcctcgaaatcactgtatgaaataggttatatcatttgtttattgtacaaatgacaaaattaaggagcagaaagctggaatttatctcacctaaaccagacaacacagttgttcctttgcttttgaaggttaacaaaagcataaaaccttcctaactaagcaaaaaacatgtaactaggaaacagtttaactacttttaatatgtttaaatatcacatttaaaatttttgaagaaaataaataacaggcaattctgttggtcattattagacttataagtagtttcaaatgcttccaatacattcagctttaaagcctaaaaggaaattctcttggacagattccggctaaagagaaggtaatgaagtcattaaacaaattaaccaaacaagtaaataaacaacaaaaaacagcacaattttaaaacatcttcatatagaatacatagaacattttcatgtattcattgaacc

SEQ ID NO: 303178 - DNA, 448 bp, Homo sapiens
tgagggtgttctatgcaccatgccttgggagccaagtgcaaagtctcatatctagactggaagggtgtccagttggtaaaagttacaggcagaagtgatatatgaattgagttttgagataaaaatgggctagataaaccatccatggattgatgagaagggaatagcagtcagaagggggctaattatccatggtcagatcacaaaatacaaggaatgtgtaactagagatamagcaggagagataagctaaaaatgcacaataaacaactttatattagagagtttcaagcatttgctggttgtactgtcattgaaggaatttaagaacaagagtaacatgagtcaaagtattttaattttattaccttttacacctatatatgtcgttttctaaaaacacttatgtatataaagttatttctaaaatatatttcaatttataata

SEQ ID NO: 303179 - DNA, 544 bp, Homo sapiens
ctgtggaaagctgggtcagataagcctctataagagatgacatttaaattaagacgtggatgacataaaggacgtaataatgcagacagccaggtgaagagcatcttagatagacagaacagcaattgtaaaggtcctgaggcagaaattgtgtgttagagcatcacagaaaagsactgatcagaggagcaaggtaagaagttagttcaaagaggtaggaaaatgccagttaatgctaggccttgacaccatgctaaggagtttgggatttattcaaaggatgactgtaagcctctccaagttttgaacattagaatgatagaatctgaattgcttttgtaaaacattgtttcacgtattatgtagacaatggagttgtaaagggctaagagttactccatgtaaggtttttgaagaattgttgcagtaatcaggttaaagaggttggttgctgggactacagagatagctgagaaatggtggtaattgtggaaatttaaggtatcttgaaggtaattcaaaaaggacatgctgatggattgga

SEQ ID NO: 303180 - DNA, 544 bp, Homo sapiens
ctgtggaaagctgggtcagataagcctctataagagatgacatttaaattaagacgtggatgacataaaggacgtaataatgcagacagccaggtgaagagcatcttagatagacagaacagcaattgtaaaggtcctgaggcagaaattgtgtgttagagcatcacagaaaagcamtgatcagaggagcaaggtaagaagttagttcaaagaggtaggaaaatgccagttaatgctaggccttgacaccatgctaaggagtttgggatttattcaaaggatgactgtaagcctctccaagttttgaacattagaatgatagaatctgaattgcttttgtaaaacattgtttcacgtattatgtagacaatggagttgtaaagggctaagagttactccatgtaaggtttttgaagaattgttgcagtaatcaggttaaagaggttggttgctgggactacagagatagctgagaaatggtggtaattgtggaaatttaaggtatcttgaaggtaattcaaaaaggacatgctgatggattgga

SEQ ID NO: 303181 - DNA, 516 bp, Homo sapiens
ttggtgccaagcaccatcttattataatttccaatatttttcattctgccttgccattcatggccaagaagaaattcctttgccatgaaaagcaaataaatatagatgaaaactgaaggataagaacgaggcatctaatacaagtattaaaaagttaataatttggattttatacatatggagtatgaaataactgtactatgagttgttaggattacagccattaataaaagttgaaaaaattgaagcagtagtaattttatctctaaaagcattccagtaggaaccctaaattctgaggggctcagtgtcccagtgtcttttctctgtctgtactctctttctccggctaatctcatttatctcatgtcccatgtcttaaatgcagtccaccaatgagaccctcattaataacaacctcttgcctgaacttcagaaatgtacatcacctacctatgtgkcactttgacttaattgtaacaagcatttcaacttgaccttgtaacctactcaccc

SEQ ID NO: 303182 - DNA, 576 bp, Homo sapiens
ttctccctcaaacatgtcttcacaatcaacctcacactgataagaaattcccagcaccaacaaagagcacatggagacagctactgtccttaaacatcatytccttctacataaatgaataaaaaccccacaaacacaaataataatgaagctatcatgtcagcaataggacttttgtagactgatttctaccttgaaatctagacaattaacctgtcaactttttttcagatctctcttattctaacatagattgaataatttcagatagtaggaatgggttcttaacactgaccttcgtaagttgaaattccaagaatgtgaaacagctgccatttacagagataagcctataaagctttataaagctataaagctgagagatttcaatgtcaaaaaattgggctgctattagcaacaatttaaaagttctgagctttattaagtaaactgaagaataagacataaatagagaatacaaacagatactaatcaccacactcagcctagccttgtggccatcgatgatcttggatatattctacataatgatatctgtgtataaggaaaaagtag

SEQ ID NO: 303183 - DNA, 576 bp, Homo sapiens
ttctccctcaaacatgtcttcacaatcaacctcacactgataagaaattcccagcaccaacaaagagcacatggagacagctactgtccttaaacatcatttccttctacataaatgaataaaaaccccacaaacacaaataataatgaagctatcatgtcagcaayaggacttttgtagactgatttctaccttgaaatctagacaattaacctgtcaactttttttcagatctctcttattctaacatagattgaataatttcagatagtaggaatgggttcttaacactgaccttcgtaagttgaaattccaagaatgtgaaacagctgccatttacagagataagcctataaagctttataaagctataaagctgagagatttcaatgtcaaaaaattgggctgctattagcaacaatttaaaagttctgagctttattaagtaaactgaagaataagacataaatagagaatacaaacagatactaatcaccacactcagcctagccttgtggccatcgatgatcttggatatattctacataatgatatctgtgtataaggaaaaagtag

SEQ ID NO: 303184 - DNA, 576 bp, Homo sapiens
ttctccctcaaacatgtcttcacaatcaacctcacactgataagaaattcccagcaccaacaaagagcacatggagacagctactgtccttaaacatcatttccttctacataaatgaataaaaaccccacaaacacaaataataatgaagctatcatgtcagcaataggacttttgtagactgatttctaccttgaaatctagacaattaacctgtcaactttttttcagatctctcttattctaacatagattgaataatttcagayagtaggaatgggttcttaacactgaccttcgtaagttgaaattccaagaatgtgaaacagctgccatttacagagataagcctataaagctttataaagctataaagctgagagatttcaatgtcaaaaaattgggctgctattagcaacaatttaaaagttctgagctttattaagtaaactgaagaataagacataaatagagaatacaaacagatactaatcaccacactcagcctagccttgtggccatcgatgatcttggatatattctacataatgatatctgtgtataaggaaaaagtag

SEQ ID NO: 303185 - DNA, 606 bp, Homo sapiens
ggactttgaccttgattctaggggcctgaaatttcatcacactctcccattctaggagaaaagataaagtactggcccatttgtgaatcacagtagattcattgggtaaatggacccccttgatggttatttctttaggtccaagaatgtttaattgaaatgatcatattggcctttggcatgatcctcaatgttacttctcctgtaaggtaagacctagcacagtgaggacactcaagtggaagcctttgaaactgcccaactattcctgcctcaccaagagagtgagtaaaargcaataatatgtcttagggagaacaacagatattagtgttaatcttaaagaaagactcttaaagaacttaaatgatgtaggtatattttttctcaatgtatccatgccaccaatttgtcttctataaaatctagaggaatcctggaaaaagtcttctatgcaaacttgagggatcctggaaaacatgaatagactgtaatttcaaggtcatgaggcatggtgcatgcgttcttttgattcctgtgcatgactggtaggcctctctggtctctggaggcaacatattccacatttaagaaaataattccaac

SEQ ID NO: 303186 - DNA, 606 bp, Homo sapiens
ggactttgaccttgattctaggggcctgaaatttcatcacactctcccattctaggagaaaagataaagtactggcccatttgtgaatcacagtagattcattgggtaaatggacccccttgatggttatttctttaggtccaagaatgtttaattgaaatgatcatattggcctttggcatgatcctcaatgttacttctcctgtaaggtaagacctagcacagtgaggacactcaagtggaagcctttgaaactgcccaactattcctgcctcaccaagagagtgagtaaaaggcaataatatgtcttagggagaacaacagatattagtgttaatcttaaagaaagactcttaaagaacttaaatgatgtaggtatattttttctcaatgtatccatgccaccaatttgycttctataaaatctagaggaatcctggaaaaagtcttctatgcaaacttgagggatcctggaaaacatgaatagactgtaatttcaaggtcatgaggcatggtgcatgcgttcttttgattcctgtgcatgactggtaggcctctctggtctctggaggcaacatattccacatttaagaaaataattccaac

SEQ ID NO: 303187 - DNA, 606 bp, Homo sapiens
ggactttgaccttgattctaggggcctgaaatttcatcacactctcccattctaggagaaaagataaagtactggcccatttgtgaatcacagtagattcattgggtaaatggacccccttgatggttatttctttaggtccaagaatgtttaattgaaatgatcatattggcctttggcatgatcctcaatgttacttctcctgtaaggtaagacctagcacagtgaggacactcaagtggaagcctttgaaactgcccaactattcctgcctcaccaagagagtgagtaaaaggcaataatatgtcttagggagaacaacagatattagtgttaatcttaaagaaagactcttaaagaacttaaatgatgtaggtatattttttctcaatgtatccatgccaccaatttgtcttctataaaatctagaggaatcctggaaaaagtcttctatgcaawcttgagggatcctggaaaacatgaatagactgtaatttcaaggtcatgaggcatggtgcatgcgttcttttgattcctgtgcatgactggtaggcctctctggtctctggaggcaacatattccacatttaagaaaataattccaac

SEQ ID NO: 303188 - DNA, 516 bp, Homo sapiens
taatgggaacaaagtataaagatctatgtatgacattttaatacccaccacagaacattcacaaagaagaggcactaacagtgcagatttaacagcagcttgttgatatcagccagcatcgcatctatgctcagacacccttttgctgcagcagagactcaagcacagggtagccrcggtagtggagatggagccatgcagggcctgacagcacagaatcccactcaataaggttgatctggctacttctctagtaaaattcccaataacttagcaactgagatcaactgtcagtctctaatatggcaccttaagataaccaaccaggcatttggtagcaagttgctacccttggacttctgctctaaaagggacatgattcaccttgattatattttaggtattggcttcctgttcctaacctcaagacctaagccagttacactaccacaaagtttactaaatatttgagccatcacacaggattctgcttataatctcttcagataaagggaa

SEQ ID NO: 303189 - DNA, 516 bp, Homo sapiens
taatgggaacaaagtataaagatctatgtatgacattttaatacccaccacagaacattcacaaagaagaggcactaacagtgcagatttaacagcagcttgttgatatcagccagcatcgcatctatgctcagacacccttttgctgcagcagagactcaagcacagggtagccacggtagtggagatggagccatgcagggcctgacagcacagaatcccactcaataaggttgatctggctacttctctagtaaaattcccaatamcttagcaactgagatcaactgtcagtctctaatatggcaccttaagataaccaaccaggcatttggtagcaagttgctacccttggacttctgctctaaaagggacatgattcaccttgattatattttaggtattggcttcctgttcctaacctcaagacctaagccagttacactaccacaaagtttactaaatatttgagccatcacacaggattctgcttataatctcttcagataaagggaa

SEQ ID NO: 303190 - DNA, 516 bp, Homo sapiens
taatgggaacaaagtataaagatctatgtatgacattttaatacccaccacagaacattcacaaagaagaggcactaacagtgcagatttaacagcagcttgttgatatcagccagcatcgcatctatgctcagacacccttttgctgcagcagagactcaagcacagggtagccacggtagtggagatggagccatgcagggcctgacagcacagaatcccactcaataaggttgatctggctacttctctagtaaaattcccaataacttagcaactgagatcaactgtcagtctctratatggcaccttaagataaccaaccaggcatttggtagcaagttgctacccttggacttctgctctaaaagggacatgattcaccttgattatattttaggtattggcttcctgttcctaacctcaagacctaagccagttacactaccacaaagtttactaaatatttgagccatcacacaggattctgcttataatctcttcagataaagggaa

SEQ ID NO: 303191 - DNA, 540 bp, Homo sapiens
ggagatgtccaaaaaaaaaaaacccaagagacaaccttgggttaagtttagactcaacatccagcaacaygaatcataaaaggaaaatgaaatatattggcattcaacaaaattaaaaaaaaaagaacgatttgctctttgaatgacactgttaaaaaaatcaaagaaaaagtcacagtctggtagaaaacatttcaaaacatatatatatataaaatgaaagtctgttactaaaaatatatttaaaattttcacaactgaataatgataaaaaattaaaaatgggcaaaatataaaactttattcaaggaaatatgtggatgcacattaacatatgaaatgattctatacatcattttatttagggaaatgcaaattaagaccacgatgtggtagcgtacatctgttagaatggctttaaagcaaaactggtagtatcaagttgtggtgagcatgcagatcaattggaaatctcatgcaatgctagtggtaatgcaaaatgacacagctatttttgaaaatgatgcagctacttttgaa

SEQ ID NO: 303192 - DNA, 540 bp, Homo sapiens
ggagatgtccaaaaaaaaaaaacccaagagacaaccttgggttaagtttagactcaacatccagcaacatgaatcataaaaggaaaatgaaatatattggcattcaacaaaattwaaaaaaaaagaacgatttgctctttgaatgacactgttaaaaaaatcaaagaaaaagtcacagtctggtagaaaacatttcaaaacatatatatatataaaatgaaagtctgttactaaaaatatatttaaaattttcacaactgaataatgataaaaaattaaaaatgggcaaaatataaaactttattcaaggaaatatgtggatgcacattaacatatgaaatgattctatacatcattttatttagggaaatgcaaattaagaccacgatgtggtagcgtacatctgttagaatggctttaaagcaaaactggtagtatcaagttgtggtgagcatgcagatcaattggaaatctcatgcaatgctagtggtaatgcaaaatgacacagctatttttgaaaatgatgcagctacttttgaa

SEQ ID NO: 303193 - DNA, 540 bp, Homo sapiens
ggagatgtccaaaaaaaaaaaacccaagagacaaccttgggttaagtttagactcaacatccagcaacatgaatcataaaaggaaaatgaaatatattggcattcaacaaaattaaaaaaaaaagaacgatttgctctttgaatgacactgttaaaaaaatcaaagaaaaagtcacagtctggtagaaaacatttcaaaacatatatatatataaaatgaaagtctgttactaaaaatatatttaaaattttcacaactgaataatgataaaaaattaaaaatgggcaaaatataaaactttattcaaggaaatatgtggatgcacattaacatrtgaaatgattctatacatcattttatttagggaaatgcaaattaagaccacgatgtggtagcgtacatctgttagaatggctttaaagcaaaactggtagtatcaagttgtggtgagcatgcagatcaattggaaatctcatgcaatgctagtggtaatgcaaaatgacacagctatttttgaaaatgatgcagctacttttgaa

SEQ ID NO: 303194 - DNA, 540 bp, Homo sapiens
ggagatgtccaaaaaaaaaaaacccaagagacaaccttgggttaagtttagactcaacatccagcaacatgaatcataaaaggaaaatgaaatatattggcattcaacaaaattaaaaaaaaaagaacgatttgctctttgaatgacactgttaaaaaaatcaaagaaaaagtcacagtctggtagaaaacatttcaaaacatatatatatataaaatgaaagtctgttactaaaaatatatttaaaattttcacaactgaataatgataaaaaattaaaaatgggcaaaatataaaactttattcaaggaaatatgtggatgcacattaacatatgaaatgattctatacatcattttatttagggaaatgcaaattaagaccacgatgtggtagcgtacatctgttagaatggctttaaarcaaaactggtagtatcaagttgtggtgagcatgcagatcaattggaaatctcatgcaatgctagtggtaatgcaaaatgacacagctatttttgaaaatgatgcagctacttttgaa

SEQ ID NO: 303195 - DNA, 597 bp, Homo sapiens
tatttgtcatcggattatatgaatattgatataattagcaattggtrggtctccttttggaaatatagtaattgacatgagagctaagtgaacattacaaaattggccttaaataattaggtccccagcttagtcaggagtctcattaatcattttcattctataggaaagtttgccattaatattcaggtcatacaagcaaaagcagatatttatagatagccagaatcgcactgtttagcagacatgcattcataacattatgtgctaagcactaactacacctagtaaagacatcatgttttccacataaaactactatattaagtactctgctagtatgagtattttcttttaccacacagtgacctgtattttactttcggagaaaaattttttcagcttacaaaatgttagctggatatttaccacttttattaccttcatggaagtccagctagactaatacgccttttgaagaatgagctaagatgaggcatttgataaatttcttacagctattgttttccctgatattatttttatggcatggaattaaacgttacaaaatatcagtttacaatgactggaaaatcc

SEQ ID NO: 303196 - DNA, 597 bp, Homo sapiens
tatttgtcatcggattatatgaatattgatataattagcaattggtaggtctccttttggaaatayagtaattgacatgagagctaagtgaacattacaaaattggccttaaataattaggtccccagcttagtcaggagtctcattaatcattttcattctataggaaagtttgccattaatattcaggtcatacaagcaaaagcagatatttatagatagccagaatcgcactgtttagcagacatgcattcataacattatgtgctaagcactaactacacctagtaaagacatcatgttttccacataaaactactatattaagtactctgctagtatgagtattttcttttaccacacagtgacctgtattttactttcggagaaaaattttttcagcttacaaaatgttagctggatatttaccacttttattaccttcatggaagtccagctagactaatacgccttttgaagaatgagctaagatgaggcatttgataaatttcttacagctattgttttccctgatattatttttatggcatggaattaaacgttacaaaatatcagtttacaatgactggaaaatcc

SEQ ID NO: 303197 - DNA, 597 bp, Homo sapiens
tatttgtcatcggattatatgaatattgatataattagcaattggtaggtctccttttggaaatatagtaattgacatgagagctaagtgaacattacaaaattggccttaaataattaggtccccagcttagtcaggagtctcattaatcattttmattctataggaaagtttgccattaatattcaggtcatacaagcaaaagcagatatttatagatagccagaatcgcactgtttagcagacatgcattcataacattatgtgctaagcactaactacacctagtaaagacatcatgttttccacataaaactactatattaagtactctgctagtatgagtattttcttttaccacacagtgacctgtattttactttcggagaaaaattttttcagcttacaaaatgttagctggatatttaccacttttattaccttcatggaagtccagctagactaatacgccttttgaagaatgagctaagatgaggcatttgataaatttcttacagctattgttttccctgatattatttttatggcatggaattaaacgttacaaaatatcagtttacaatgactggaaaatcc

SEQ ID NO: 303198 - DNA, 597 bp, Homo sapiens
tatttgtcatcggattatatgaatattgatataattagcaattggtaggtctccttttggaaatatagtaattgacatgagagctaagtgaacattacaaaattggccttaaataattaggtccccagcttagtcaggagtctcattaatcattttcattctataggaaagtttgccattaatattcaggtcatacaagcaaaagcagatatttatagatagccagaawcgcactgtttagcagacatgcattcataacattatgtgctaagcactaactacacctagtaaagacatcatgttttccacataaaactactatattaagtactctgctagtatgagtattttcttttaccacacagtgacctgtattttactttcggagaaaaattttttcagcttacaaaatgttagctggatatttaccacttttattaccttcatggaagtccagctagactaatacgccttttgaagaatgagctaagatgaggcatttgataaatttcttacagctattgttttccctgatattatttttatggcatggaattaaacgttacaaaatatcagtttacaatgactggaaaatcc

SEQ ID NO: 303199 - DNA, 592 bp, Homo sapiens
accaacgagaaacagaatatgagattttctctttctacaaaattttagaaataaaataagaaaaaaatagttcacctaaattaagcaaatattttcctataaagcacccacattttcttgcaataaatacattaacctggagaaatgtcactaacatgtcaaattaacttctcaattaataaaggccaattttgatgtatttctagcactttcaagctagaaataatgtgaatagttttaaactgaagtgttttacactttagttttacagttttacagttctggtaaatatttggcttctgtgcttttaagttactgttgtaactctgaagccatattttgatttaatcctgaaaggtttcaraaagaaatcatggactacaaaacttgtatagagtaactcttttgttttaagcaaataaatacaatgttaaaaaattctgcattggacaaaagtaaagcagtttagcttactcaaataaaacacagctgaatgatgatcagtgtattcttctatatgttattgtatcttcaacctcaccagacttttggctggtagtcccaacaatgtgtcctaaacttcatattacct

SEQ ID NO: 303200 - DNA, 592 bp, Homo sapiens
accaacgagaaacagaatatgagattttctctttctacaaaattttagaaataaaataagaaaaaaatagttcacctaaattaagcaaatattttcctataaagcacccacattttcttgcaataaatacattaacctggagaaatgtcactaacatgtcaaattaacttctcaattaataaaggccaattttgatgtatttctagcactttcaagctagaaataatgtgaatagttttaaactgaagtgttttacactttagttttacagttttacagttctggtaaatatttggcttctgtgcttttaagttactgttgtaactctgaagccatattttgatttaatcctgaaaggtttcaaaaagaaatcatggactacaaaacttgtatagagtaactcttttgttttaagcaaataaatacaaygttaaaaaattctgcattggacaaaagtaaagcagtttagcttactcaaataaaacacagctgaatgatgatcagtgtattcttctatatgttattgtatcttcaacctcaccagacttttggctggtagtcccaacaatgtgtcctaaacttcatattacct

SEQ ID NO: 303201 - DNA, 493 bp, Homo sapiens
gcagtccatactcgctttctggttgacttaatatataatcacagcttcaatcctacctattcagggatagctgatacaacagcacttctaatatttacctccagcctgagctataggtgaatgatgtctatctttggcaactgaaactagttttgcttttttttaagacacgggcaaagtcacaggtattgtacattttttagagattgcataaaatgagttgttccaataaaatgatgatagaggtagaatccaaataagaataagttgaagaattaaccagtgatgaggaaacagaaaataaacacagatatcctggatgaagtytgtgatgggatacagagacaggttggcagcagtaagggaaagtgaatatttttcaattcaagtacattccacatttgcatgattggtagcaaaagaaaataaaagctatcaatagcttttataagagttaattattatgttagagggctaagcactacaaaattgg

SEQ ID NO: 303202 - DNA, 482 bp, Homo sapiens
gattaaaaacacaacatgtacatacgtgaatatataaaacatacgcaaacccacaaacatatacacacatgcagtcacagatatacaaacgtacatgtatacacataaatacatacacacacacatacatgtacacacacagagattcagaaacacatttgagaagtctgccaggccttctgaaatgtataaagactcctgtgggagaatattttgggctctctggcaagggtagaccagagtttgtttttagtatggatcagagtctgcccagaaaktactccatattgctggccctggtaacccttaccaacttccctgcacctcattttgaccttgcctgtaactgaaaaacaaaagctgctgcttttgttactcttctttaaactgaaatttaagggaaacatggccccgtttcttcctgatcattacgtctcacactttcattcttgttcctctgtcctgggtagcaagtatttttt

SEQ ID NO: 303203 - DNA, 598 bp, Homo sapiens
tgtttcttgcatagattattttgtcacctcagtactaaaccgagtacctactagttactttttctgctcctctccctcctcccaatctccaccatcaggtagggcccggtgtctgttgttcccctttgtaagacactgattttaatggctatcaaaccattaagactgttgatattagaaaattttgtgaggytattgaaaataattatataagttgggcaacaacttattgactttgttctgtaccatataggcaagaagaattctacaagtgaaattgtggttacaacttttaaactatcttagattaattcttgtggtatgcagaatcctaagatggcctccaaaaattctgccccctgtgtatataccttttctatccccttccttaattacagaggaaagctacacatatgatagctgtcactgccatgattgttatataacaaaagagaagcagatttgcacatataattatggttccaaatcagttggactgaagtaatcaaggggagaatatttagcaggcctaatgagacaaaccctttcaaagtggatctggatgtcagagactgtctctcctgctggttttggagta

SEQ ID NO: 303204 - DNA, 598 bp, Homo sapiens
tgtttcttgcatagattattttgtcacctcagtactaaaccgagtacctactagttactttttctgctcctctccctcctcccaatctccaccatcaggtagggcccggtgtctgttgttcccctttgtaagacactgattttaatggctatcaaaccattaagactgttgatattagaaaattttgtgaggttattgaaaataattatataagttgggcaacaacttattgactttgttctgtaccatataggcaagaagaattctacaagtgaaattgtggttacaacttttaaactatcttagattaattcttgtggtatgcagaatcctaagatggcctccaaaaattctgccccctgtgtatataccttttctatccccttccttaattacagaggaaagctacacatatgatagctgtcactgccatgattgttatataacaaaagagaagcagatttgcacatayaattatggttccaaatcagttggactgaagtaatcaaggggagaatatttagcaggcctaatgagacaaaccctttcaaagtggatctggatgtcagagactgtctctcctgctggttttggagta

SEQ ID NO: 303205 - DNA, 584 bp, Homo sapiens
aaagaagtgaaggaagacctaggggaagatagaagctgcagacagccatggcttcaagtcagtgagatgagttagcagatcagcaaaagtctctatgagctgygacatgtcttctccttttcttccttactccaaataaccctacaatcttcatttgtcctgaaatttctatttaattccacactaagtagaaacacacacgaaaggaaattctggaatatgcagttcaagttcagtctagccaagttaaaacattacaaagtcatcacaagcatcaggctttttatgacctagcctggggtgtcacagtataaacttagggtgtttgactgacctagtctattgtcaattccacctgtctgttcttcacagtcccaccgggaataaaaaacctcacatttcataaggataattgtcaaataatttgtggtcatattttaagaggtacacagtagatgtgtgtgtatgtgtgtttgtgtgtgcatgtgtatgtgagagagggaaatcgactggcatagaaaatatggtaaaatgttgaaaattggggaatctgggtgcaggaagtaagaaatattatttttact

SEQ ID NO: 303206 - DNA, 584 bp, Homo sapiens
aaagaagtgaaggaagacctaggggaagatagaagctgcagacagccatggcttcaagtcagtgagatgagttagcagatcagcaaaagtctctatgagctgtgacatgtcttctccttttcttccttactccaaataaccctacaatcttcatttgtcctgaaatttctatttaattccacactaagtagaaacacacacgaaaggaaattctggaatatgcagttcaagttcagtctagccaagttaamacattacaaagtcatcacaagcatcaggctttttatgacctagcctggggtgtcacagtataaacttagggtgtttgactgacctagtctattgtcaattccacctgtctgttcttcacagtcccaccgggaataaaaaacctcacatttcataaggataattgtcaaataatttgtggtcatattttaagaggtacacagtagatgtgtgtgtatgtgtgtttgtgtgtgcatgtgtatgtgagagagggaaatcgactggcatagaaaatatggtaaaatgttgaaaattggggaatctgggtgcaggaagtaagaaatattatttttact

SEQ ID NO: 303207 - DNA, 516 bp, Homo sapiens
tcagtctaggattgaatgtggtcatttcaatcattttccgttccccgaagagactataattctcttataaaatgcttattagggaagacattgggaattcagaacaattttattttctgcttatcttccaagggccatgagatcaggatccagatgttctgactcagccaaaggcaggactgttccctggcaaaggaaaagtgagattatgcatgcaggaagcaaagaggactgggaatgcatatgcctaagtgatagatataccagcatagccacttctaatatatttactgagacagagaacataaaggcttgttagaagactgaagtgtcctttgactgtaaccattgtaaatgcagttgaaaaataaaagattacataacaaattgaaacaagtataacagggttattgagaaaataggttatcttgtttcayacagttgggaaggttcaagttagagtagtagcagggaaagattttaaaagcatcattacacttgctattaaacaggaat

SEQ ID NO: 303208 - DNA, 553 bp, Homo sapiens
cgcagtctcttcgccttcgttttcgggggttccgtcgtgatccatttcagtgttcctcacagggggtacctgctgccaagtctgtcctgcagactctggccgagcgaccggatgaaaggagtattcagacgcaggtattttgtgtaagaatggctaggggactgccggctttagcgcagcccaaaagagagtgcagtcctgataagctggagccgcttgtatttattcggtacagacagaacgccaaaggcctgaagccaacacaatytgtgagtaatgaacattgtcgcccccctttgcagggagcagtcttgcactgatcaagggttggtttctggaggacatatgtaaacaaacttatctagataaatttctttacactaccttgttacctactcttcgccctcagcctcggggtaagagaattagctgccttcagctttattctctctgaagctttgcaaaacctcccagccttccaagaaggtttgcgtctttccttatagcttctcctaccaccctgactgatttcctacagtccgaaacttaaaat

SEQ ID NO: 303209 - DNA, 601 bp, Homo sapiens
aaacattgatcttccaaaaaaaagagataacacagtgtattggccaggcacggtggctcacgctcataatcccagcactttgggaggctgaggtgggtagatcacctgaggtcaggagtttgagaccagactggccaacatggtgaaaccccrtctcgactaaaaatacaaaatttagctgggcgtggtggtgggtgcctgtaatcccagctatttgggaggctggggcagaattgcttgaaccgggaaggcggaggttgcagtgagccaagatcacaccatagcactctacacgccagcctgggtactccgtctcaaaaaaacaaaacaaaacaaaacaaaaaaaagaatatagtatatgtaatatgtatagcatacaaaatatgtgttaactgactatgttattgataggtcaacagcagactatctgtagtcaagttttgggacagtcaaaagttacatttgaattttcaaatgttaagggtggcggggggacagcatcacaaatccctgagttgttcaagtatcaactgtaagggtgtgtgtgtgtgtgtgtgactgtaggggtgtgtgtctgtgtcagagacagagagagaagagc

SEQ ID NO: 303210 - DNA, 525 bp, Homo sapiens
gctgggattacaggcgtgagccaccacgaccagccaaacccttagttcacctacarcaattgctcagagcctcatgatggacaatcatttcatgcactactaactttattcttgattcttttagctttgttttggccaaacccttagttcacctatagcaactgttcagagccttataatgggcatttatttcatgtactaccaactttattcttacttttactttcctattcttattttccttttacataaaattcctcctccacttatttaatcctattttattaagtgtttatttcattaagctgcctcaaattctttcttgaatcaagagataatggtgatatttcagagaaagctactggagccttaggccaattcatattagctcctgagagtgaattgcatgcatccctttgaaactttgtgttcagttactccatgttggtagctgaactatgatgagaatctacactccacagatatcagcaaatgctacaaatcttatctttttaaccttggaga

SEQ ID NO: 303211 - DNA, 498 bp, Homo sapiens
tgggggctatagagcaattccaagtgagcagctaacatacttgtttaaatgaaaaaaaaaccaaatacctctctattctacccataaatagatatgttgtataatttgaggaaagatttctaaatacaaccacaaagtgagaggaycttaaggagtaaggaggcttgatggaggtagaagaaaatattttggctgggcgcagtggctcacaactgtaatcccagcactttgggaggctgaggtgggcagatcacctgaggtcaggagtttgagaccagcctgaccaacatagtgaaaccctatctctactaaaaatacaaaattagccagcgtggtggtgcatacctgtattctcagctacttgggaggctgaggcaggagaatcgcttgaacccgggaggcggaggttacagcgagccaaggtcacactattgtactccagcctgggcaacaagagcaaaactccatctcaaaaactatatatatatatgtatttca

SEQ ID NO: 303212 - DNA, 486 bp, Homo sapiens
gtagggcttccacgtacctatttgagggacagaattccactcatatcaggagaacatcaattctaacaggtacttctgttttgaactgactttttgaatctcccacctatacttatttgactgtaaaaatccagttggctgtttctatctttatctttcttggggggttggggggacagggtctttctctgttgcccaggctagaatgcagtggcacaatcacagctcactgcagccttgacctcccaggctcaagtgattctcctacctcagcctcacaagcagctgggaccacaggtatggacyaccacactgcgataatttttattttttgtagagatgagggtctcactatattgcccaggttggtctccaactactgggctcaagcgatcctcccaccttggcctcccatatttctactttttgaatgacttctagattcctaggctgttgtttttatgttgataattgatattcccaaat

SEQ ID NO: 303213 - DNA, 591 bp, Homo sapiens
ggggcttctctgtgcagcattaaagcccttagcatattatatraaattatttgtaattttattttctgtttcccactagactttaagctcctaaggggtaggggccatcgcttattcagggccttaccacagtgacaagcatactagctggtgaagagcaagcactcaataaatacatttattataagcctgaatactttgttagtttttctcccatgcatgccattttcctatattccagacctcctcttaaaataaatcacactgtatttataatccatgatatgtttaatcctttttactgaggtgactcatcaagtctgagtgattcagaagaaagtacatttattaatctgaagagagaatattgaaactagactgtctcctgaattagtgcatatttatgtcctaattataattaccaaagcattcctctagtgtattcctagatatgttattttcttaatcataatttagccaatataaaattacaaaatttcagcttccaactcttgattagcttacttaagaaggaaagtgtaaaaagttatcatggttacagatgacatttattagatcgaaggtgtctat

SEQ ID NO: 303214 - DNA, 619 bp, Homo sapiens
tatccaataaatgagttaagacaaatttgtttttaggaaaataggtaaagcaaacaattgagtcacaaaaaagatggtcaataaacatagtaagaggtgctcccttattaataattatggaaatgcaaaaatgcaagcccaattgataccagtgttcactcataagattgccaaaacctcacatgtcaaacaatgtgacgtctaagtgagagtgtaagaacacaggaattctcaactattgcacttgggagggtaaattagcacaatttatctatagagcaggagtccacagtgttttcttaaaggtccagacagtaaacattttagacgttgagggtcatgaggcaatactgaggatattctgtgggtacctgtataaccactaaattatagaaaccatttttagctcacaggttgtataatacaggtggtgggctggatttggtatctgggcttgcaggtccctrgtatagagcaatttgggaagtacctaagatctaagcattctacttttggacatatatcctagagaaattcacataagtgggcacgatacataaatgtattgcagcattataaaagtacaactttggaaaacagcctaaatagccatcagaaa

SEQ ID NO: 303215 - DNA, 619 bp, Homo sapiens
tatccaataaatgagttaagacaaatttgtttttaggaaaataggtaaagcaaacaattgagtcacaaaaaagatggtcaataaacatagtaagaggtgctcccttattaataattatggaaatgcaaaaatgcaagcccaattgataccagtgttcactcataagattgccaaaacctcacatgtcaaacaatgtgacgtctaagtgagagtgtaagaacacaggaattctcaactattgcacttgggagggtaaattagcacaatttatctatagagcaggagtccacagtgttttcttaaaggtccagacagtaaacattttagacgttgagggtcatgaggcaatactgaggatattctgtgggtacctgtataaccactaaattatagaaaccatttttagctcacaggttgtataatacaggtggtgggctggatttggtatctgggcttgcaggtccctggtatagagcaatttgggmagtacctaagatctaagcattctacttttggacatatatcctagagaaattcacataagtgggcacgatacataaatgtattgcagcattataaaagtacaactttggaaaacagcctaaatagccatcagaaa

SEQ ID NO: 303216 - DNA, 475 bp, Homo sapiens
cttgtctaaggcatataaaggcatataattttatttttatggtacctttctatcatattattttagctatcatattaaaaacatgggactctttaaaaaagaaatatttctaagtgatattgccacactggacagcttgaagacaaacacatttttcatgatttaaaaaaagtttcaaggcacagggtcaagatcatggaagaagccaagaccaaaaaaacaaacaaacaaacaaaaaaataaaaaatagagcattccaacaaaggccagccaagctaaaaatytcacacactttctgccaatatctttggctagtttcattcttacatatttttctaattaaatatatgtgtatctgtgagtctccaactcatgtatcctatacacattagtagtcaataaatactttttaatgagactatgatgatatctggagcaagttgccccactggagtctagggactctttaaaaaca

SEQ ID NO: 303217 - DNA, 603 bp, Homo sapiens
ttgccactggtcaccctgaagatggttggcaatgtctcgcatgggagagggaggcaggctgaagtcaggacagacagtgagacagggctaatgaggttggagaaagtgatgatttcagagccctctgtttttagatgaaaaagcctaagaaagaaagaggtgacaaaaaaaaaaaaaggatactaaagagatgtgaagaccaaggcttttgttasgaaagggagaggtgacaggtgaacctgagaacaggtgaaatgtgtgggaagtcttggcatctctctttctttcactgtagcttagattgttatcagctccatcctccaccagggcccatcatacagctttgcctgcagagaactctttccctgaagctctaagtgtggatctccaggctggtgacagtagactgcccccgcccagccggtccccactgccccaccttccttcctgcagttccccttccttaccccctggtttgccagcgaagatatgaagggaaacaatgacattctcaggcatggaggggaacgaagcagtgggggttacccaggacaagatgtcccaggaagagtggtgtctccttcagcagggcgtgcagtggtg

SEQ ID NO: 303218 - DNA, 603 bp, Homo sapiens
ttgccactggtcaccctgaagatggttggcaatgtctcgcatgggagagggaggcaggctgaagtcaggacagacagtgagacagggctaatgaggttggagaaagtgatgatttcagagccctctgtttttagatgaaaaagcctaagaaagaaagaggtgacaaaaaaaaaaaaaggatactaaagagatgtgaagaccaaggcttttgttaggaaagggagaggtgacaggtgaacctgagaacaggtgaaatgtgtgggaagtcttggcatctctctttctttcactgtagcttagattgttatcagctccatcctccaccagggcccatcatacagctttgcctgcagagaactctttccctgaagctctaagtgtggatctccaggctggtgacagtagactgcccccgcccagccggtccccactgccccaccttccttcctgcagttccccttccttaccccctggtttgccagcgaagatatgaagggaaacaatgacattctcaggcatggaggggaacgaagcagtgggggttacycaggacaagatgtcccaggaagagtggtgtctccttcagcagggcgtgcagtggtg

SEQ ID NO: 303219 - DNA, 607 bp, Homo sapiens
ttgaagtcctaacccttagtacctgtgaatatgaccttattaggaaatagggtcttcgcagatataaytacttatgaggaggtcatactagaggagggtaatcccttactccaacatacctggtatcctctgaagacacaggcatgtggggaggatggccatgagacggtgaaggcagaggcatcggagctatgctgcccagagccaagggacacctgggctaccagaagctgcaagaggcaaggaaggcgcctcccagaggcttctaagggagaatggccccctgtcaacaccttgattctggacttctagccagaagaactgtgagaacatacatttctgttgttttaagctgcccagtttgtctgcttttttatcattttatcattttagttttttagtttagtctctgtcttctactaactccctttccaattctactttaggactctctaacattgcacctccttcttcctctatttcttattcatcccacatagccacaggtacaccacaggcttgatcttgtccaccccagatacccccagcccacaagatctcctttcacacctctagaaatacatttgtatgcacttctgacctctgc

SEQ ID NO: 303220 - DNA, 573 bp, Homo sapiens
tcggcagagacccgaggcagtgagcatggcagccatggagatgtgcttcccacaaaaggtgctatttgctgacagcttctagctgctggtgctttcaggatctgcctcggtctgtttttttgttttgttttgttttttactgtagtaaaatgtatttagcataaaatttgccacttcaaccatttttaagattttaaagtggtgttaattatattcacaattctgtgcaactatcaccaccactatccagtttcaaaaattgttaacacctcaaacagaaactgtacccgttaaatgataactcctcatttcttccttctgcaagccttggaccttctaatctatattytgtctctatggatttacctgttctaaatatttaccataagtagaagcatacaatatttgtccttttgtgactgttttatttcactgagcacagtgttttcaatgttcatccatgtggtagtgtgtgtcaatacttcattccttttcatggctggataatattccactgaatgtgcatactacgttttgtccatccactcatctgttgatggacatttggttgtt

SEQ ID NO: 303221 - DNA, 552 bp, Homo sapiens
tataccacctcccttttggaattcaggaagagctgaccagcatgtaacatcaacacagaccttaagtctgataagaaayatttacaatctattctctctagagcctgctacctggaggcttcatctgcatgataaaactttggtctcagcaacattttatcataactcagacatttctttctattgatagtaagtctttcaaccaattgccaatcagaaaatgtttaaatctacctataacttggaagctgccccgccaccacccccctgccacttcaggttgtaccacctttctgaatcgaaccaatgtatatcttaaatgtatttgattgatgtcttgtgtctccctaaagtgtataaaaccaagctgtgccccaactaccttgggtacatgttctcagggtctcctgagggctgtcatgagccatggtcactcatatttggctcagaataaatctcttcaaatattttacagaatttgactctcttcattgacactatactctgatcccaaaagctagtgaccaaattgaagtggcaaaactatttcaa

SEQ ID NO: 303222 - DNA, 562 bp, Homo sapiens
aaaaccattgaattgaacacttgaagtgggtgtattgtgtggtatgtggattacatctcaataaagctgttaaaaaggttttaaaaattaaacatctataggaagtttttgactcatttcctattctccctttggttatttttgtttctttggctatgatggtcatattttgaacctaaatctcttttctgggttcaaggtgtagatggtaaaattcttgatcactgtttgaatatttcaacaaaaattccattttaatctgcttcacgtcctctttgaccctaagccatgtctcctcttggcctcctcctttctgtccctggaccagcatcccagcagmagcccagcatcaagcttagggttccctgggctttccctgtccttcttggcccaagtctccattcttactacgatgagtttagtaatgccaacgttacttctttctggattaccagcatgattctttaaaataagaatattttaatgcaaataacacatctttaatttataaagcctggacaaataaaaggaagaaaacttacccacaattgccacagacaaa

SEQ ID NO: 303223 - DNA, 569 bp, Homo sapiens
agtgctctcaagagcctccaggctgtgatttgggctctaggatggaactgagctcacagaagtgggtagctcacaggtgcaccagggtgcatgggtctgagccataacctggaatcctgtggctacacctgggtgcatcacactgccaagaggggctgtcttctcctctggtggtggactgctcagtccaggcatcctgggagctgccttattgccccatgaactgtaatgctgtgttggctttacctacaactgcatgggcctgctgtgtgtcaagggttaaatgggagtggatattcaaccctgggtttgtttggtagcctctgaaattaataaggaagaccaggcatggtggctcacacctgtaatcccagctctttgggaggctgaggcaggtggatcatttgaggttaggagtttaagaccagtttgaccaacatggtgaaaactcgtctctactaaaaatacaaaactagctgggcrtggtggcacacacctgtaatcccagctacttgggaggctgaggcagaagaaatgcttgaacccaggaggcggaggttgcagtgagc

SEQ ID NO: 303224 - DNA, 573 bp, Homo sapiens
caggttgggtccccgccccgccccgccctgccccgcaggaggatgaaagaaaagagcttcgtgaacatgggattagctccttctgtgatcagccttctatccctttaaactatgtccactacctccacytacagtggtcagatcatgatgcagactttcactctagtccacagtcagccctgccctctttagcagagtccattaggagtttccatggaatcccatttttataatatgacatgaagacttaaaaagcagtttattggccaggtgtggtggctcatgcctgtaatcccagcactatgagaggtcaaggggggagctcaactcacttgaggccaggagttggagaccagcctgccaacatggcaaaaccccatctctactaaaaatacaaaaattaaccaggcgtggcacacatgcctgtagtcccagctactcaggaggctgaggcatgagaatcacttgaacctgggaggtagaagttgcagtgagctgagatcatgccactgcactccagcctgggtgacacagtgagaatctgtctcaaaaaaaaaaaaaaagtttattgat

SEQ ID NO: 303225 - DNA, 605 bp, Homo sapiens
aaagggacatgttggagaaatggcaagttatatttatcgaatatccttgaatatattgtttaacatatgtaggataccaacagtcaccttgtttacacattttaaaaatgggtttcacccgcattctaattggtattagagatatttacactccccaaagcttgtacgctccttaggaacaagataccattttagatttacttctatagtacattctagggagtagaaatagaactctttgtaaataaatgaattagaactcagcacgacttggtcattgcgctgtgaaactacaaagaacagacggraagctctttttggagactcagaaggttcttcacgattgtgcaaacctggcatcattgccctacagttgtgcattaagggccagttaacacagagaaggatgagcggctgcttgaagggtgagtattttgaatctcatggctgaggcactgaatcaaacctcctaaaagcaaggacttgttcttctggacagcagttcccatgcactctttgctgttattaagagagaagcagcatcaactaaaaatgagcacaggtaaatccagcagccctgtggatcctctcctaggtgcgtgcct

SEQ ID NO: 303226 - DNA, 605 bp, Homo sapiens
aaagggacatgttggagaaatggcaagttatatttatcgaatatccttgaatatattgtttaacatatgtaggataccaacagtcaccttgtttacacattttaaaaatgggtttcacccgcattctaattggtattagagatatttacactccccaaagcttgtacgctccttaggaacaagataccattttagatttacttctatagtacattctagggagtagaaatagaactctttgtaaataaatgaattagaactcagcacgacttggtcattgcgctgtgaaactacaaagaacagacggaaagctctttttggagactcagaaggttcttcacgattgtgcaaacctggcatcattgccctacagttgtgcattaagggccagttaacacagagaaggatgagcggctgcttgaagggtgagtatttygaatctcatggctgaggcactgaatcaaacctcctaaaagcaaggacttgttcttctggacagcagttcccatgcactctttgctgttattaagagagaagcagcatcaactaaaaatgagcacaggtaaatccagcagccctgtggatcctctcctaggtgcgtgcct

SEQ ID NO: 303227 - DNA, 605 bp, Homo sapiens
aaagggacatgttggagaaatggcaagttatatttatcgaatatccttgaatatattgtttaacatatgtaggataccaacagtcaccttgtttacacattttaaaaatgggtttcacccgcattctaattggtattagagatatttacactccccaaagcttgtacgctccttaggaacaagataccattttagatttacttctatagtacattctagggagtagaaatagaactctttgtaaataaatgaattagaactcagcacgacttggtcattgcgctgtgaaactacaaagaacagacggaaagctctttttggagactcagaaggttcttcacgattgtgcaaacctggcatcattgccctacagttgtgcattaagggccagttaacacagagaaggatgagcggctgcttgaagggtgagtattttgaatctcatggctgaggcactgaatcaaacctcctaaaagcaaggacktgttcttctggacagcagttcccatgcactctttgctgttattaagagagaagcagcatcaactaaaaatgagcacaggtaaatccagcagccctgtggatcctctcctaggtgcgtgcct

SEQ ID NO: 303228 - DNA, 597 bp, Homo sapiens
atcaaaaactctctcattgtttacaggctctataaaacgccgacacctctgagagaactttctggtttttctcagccagataaactagctctctcttctataatcccagcattctgcttgtatttttatttaagattcattaaattttgccttgtattctatttgatttggcaaattctccttgttaattcatgcatgaagtcccagcactcctactgtgtgctaggtttgtgccaagtttggggagagactggtaagaaagacataggcggccctatctcttcttcctactgacagttgagtgctgtgcagtccaatatggtgaccactagctccatgcagcratgtaaatttaaatttatgttaattaaaatgtaataatataaaattaaaactaaaattcagttcctcagttgtgttagccacattttaaatgctccataaccacatatggctagtggctcccgaattggacagtgcagatttccatcactgcagacattttttaacacagcattggtctgtcctacggtgagaaagagataaaataaatgaatgtaagccagtaattcactacagctccttattacaaaggag

SEQ ID NO: 303229 - DNA, 548 bp, Homo sapiens
ggactgcaaggtcctaagaggtctgataccttcttacccatccaaatcttgtactatgctagtactatgtatctatccttcttccagctctgtcatctttccatcacagggacaactacctgaaatgccctccccttatcctacagatggagccatcactcccttggggatgtcttccaagacctctctgatgaagccatctcccactattatctatgttgtcacaggaacacaggctctccttcatctccctcatcatagtcattatactcatagatttgtgagcaattgatgactatctatctacttttctaggatataaggttcacaagagcagcaactatatttgttttgcttattacattcttctcagttactagtactgtgtcttgtactaggaattgagaaccatttattgctgagaaaatacttcaggatgactgagagctcacckaggcttcatacagcccctgatgctgaaggtaaccactggtttaagaaggacgctcactatgttcatgagcacagcgtctcgtattaaggcaagc

SEQ ID NO: 303230 - DNA, 539 bp, Homo sapiens
tataacctttcgaatgctcagtctcgtatgatgtttgcattctgacatttggttttataacgtaactttctttgccatgcacttatattaataactgtttaagtcttaaggaatagtctttagtttagtgctacttactacagaaaaaaattaaacggatttaataaaatacatagagatagtttttctcttatcattttaaaagaatcatttaatgactataaatacaacttatatactacttacatatatatataaycactatgtatttattaatctgcaattatgtaaatgacattagctggattttttttcctgaaagaaagtgcccctaagaattcacgcattcattcgagaaatatctctgtagtgtctcacatgccaggcatttcacaccatttgctttttcccatttggaaagttctccttttataattattgttccataggttagccagctattcagcaactttggataaggtcatattatttctctgcagctccgcattctgggcagaactagcaagacaccctgtaca

SEQ ID NO: 303231 - DNA, 600 bp, Homo sapiens
gtaattccatcaattctatctcctgtaatcctcacaacagctgtctgaagaacatagagccatttatggatgaagaaactggggctgaaagaagttagatgacttgccaaattcaartgtctaagaagacacagggcaaacttgaattcacatcttctgacttaaagtagctagactcatgatatcacagctgacccccagcaaagctccatgcccagcaccttagacaatggtgtttggacacgctttgatttgatcatttgactcattgcccaggagattaaggtctgaagttctgctcagtgtaggtcaatttcaaaatcattgtttgaaaaagggttgtatatggctttttaaaaaggcattcaggctgggtgtggtggctcacgcctgtaaccccagcactttggaaggcccaggtgggcagatcagttgaggtcaggagttcgagaccagcctggccaacatggtgaaatcctatctctactaaaaatacaaatattagctgggcatggtggcacacacctgtaatcccagctacttgggaggctgaggcatgaaaattgcttgaaccctggaagccgaggttgcagtgagcca

SEQ ID NO: 303232 - DNA, 600 bp, Homo sapiens
gtaattccatcaattctatctcctgtaatcctcacaacagctgtctgaagaacatagagccatttatggatgaagaaactggggctgaaagaagttagatgacttgccaaattcaagtgtctaagaagacacagggcaaacttgaattcacatcttctgacttaaagtagctrgactcatgatatcacagctgacccccagcaaagctccatgcccagcaccttagacaatggtgtttggacacgctttgatttgatcatttgactcattgcccaggagattaaggtctgaagttctgctcagtgtaggtcaatttcaaaatcattgtttgaaaaagggttgtatatggctttttaaaaaggcattcaggctgggtgtggtggctcacgcctgtaaccccagcactttggaaggcccaggtgggcagatcagttgaggtcaggagttcgagaccagcctggccaacatggtgaaatcctatctctactaaaaatacaaatattagctgggcatggtggcacacacctgtaatcccagctacttgggaggctgaggcatgaaaattgcttgaaccctggaagccgaggttgcagtgagcca

SEQ ID NO: 303233 - DNA, 564 bp, Homo sapiens
cttgttatgttgcccagggtggctcatggagtgtttgaagcggggtatagggcttgagaatgaagtagaccccagtttgaaatactaaagagatctacccctcagtggagggtaaagcccacttgaactactgtgaatgtctctaacctgactgtttgcttctccttcagacaacctaaaagggtttctatcttttgataggccccacctacttacaaagaaccctcagatgattctgtcagccaaggaaggggcctaacagtgacttacacatctctgcaaagacactcatggaaactaccatactaatgaacatagtcctttattcatcaaygtaaacagaaaaccaaagattgcaaatatattaggaaaaccaacagcatggaagagaagatccaagttggaccaatagaaaaattgaccttggaggaaacagagataatttaggaaagaaagattttataaaaattgtggtcactatcttcagaataatttgagaagatgctgcattcaagaactgagaagaggtggctatgggaaaggaacaagcaaagaacaagaaaa

SEQ ID NO: 303234 - DNA, 571 bp, Homo sapiens
gcaatatattgtctcagaaatgtcaaaaataataccctatctgtcatctatcttggagcyagggttacatttctcttatagggaccttattgcattagcactttgtaaggatgtttcaaagtactgattatgtctgtactactgagtattccacaaaggcagctgctttgccttaatttaaagcaaagcccaacataatattcaaggcaatgcaaagttttgaagagagtttatccccctaacagtgaagaactaaggtctaggatatttatcttgacaaattctattttctagactcttcactaatgcaaaaattagaatttcttactatcacaagcaatgcactcctatctatacaataagcttcattttctacagcatgatgttaagttattcctaatctgattcagctaacttatttaggtgtttatctctcatgagtgcttatgaggaatattgttttcagagcaaggtctactttaccctacattccttatcgacatgtctcaaattccttttaaaatatattttcctaaggaaagagagcatgtcttgttcattttagcatcac

SEQ ID NO: 303235 - DNA, 571 bp, Homo sapiens
gcaatatattgtctcagaaatgtcaaaaataataccctatctgtcatctatcttggagctagggttacatttctcttatagggaccttattgcattagcactttgtaaggatgtttcaaagtactgattatgtctgtactactgagtattccacaaaggcagctgctttgccttaatttaaagcaaagcccaacataatattcaaggcaatgcaaagttttgaagagagtttatccccctaacagtgaagaactaaggtctaggatatttatcttgacaaattctattttctagactcttcactaatgcaaaaattagaatttcttactatcacaagcaatgcactcctatctatacaataagcttcattttctacagcatgatgttaagttattcctaatctgattcagctaacttatttaggtgtttatctctcatgagtgcttatgaggaatattkttttcagagcaaggtctactttaccctacattccttatcgacatgtctcaaattccttttaaaatatattttcctaaggaaagagagcatgtcttgttcattttagcatcac

SEQ ID NO: 303236 - DNA, 568 bp, Homo sapiens
atatttatttataatacctcctagcattatatacatttgttgttgttaatcccagattgcatcaagctacatataggattgaagatttgtttcagaacagtagtacagaaaattatttgcatctccaatattaaatatctaatcatgagcatactaggaatcatattgcatgcttaatgtacaaaactttgtatgtaagtacaattgtactaaattcaataattggattatccgccttttttctcccccacacagtgttcttgtagtgtgtatattcataatatataacaatattagattaaaatttcatgtgacaactacggcttttctatttctcttagaagatatggcatgatacactactcatccaacagtattgtatggtgcttaagaaaagtgatcatctttttactttttatgttagatataattttaccttgggttattttrctgtaagtagcatattaaatttttttcaatccaattacagtcattatttttagtgcttaaaatatttacatttatacaattaactacatttttgggttttctgcagtcaccttgtttc

SEQ ID NO: 303237 - DNA, 584 bp, Homo sapiens
ccagcctgggcgacagagcaagactccatctcagaaaaaaaaaaaaaggtattagatatttcagaaattggraaacatatatatatatgtttatgtattatattatataatatattatatattattacatatattatatataatatataattgcatatattatacataatatataacattatcacatatatttttatatataatatatatattatatataatctgcatagttcagacctctcaagctcaactttcaccatatgcgcagagccaccaattacaacagccttacagcatcttccaacagcagcagccatagatcagaccatcacttaaatctccctattaaaaccttcaatgtctacccattgcttagagaaaacaattcaaacttcttaacctggccttcaaagactctcacaagttagttcctgaatatcaccaccattcttgcacatcctacgcttgtcaggttctaagcctttgctcacattgttgccctagctagaggaggaagcatttagataaattgtagtgacctcaccacctgaaagtaattactactcttgaaattctacaaataa

SEQ ID NO: 303238 - DNA, 493 bp, Homo sapiens
ttccatgtgcataattgtcagactcagattaaatttttatccaggaaagagtagtattcaagatgacttgggtaaattgtctgattaattttgtaaacaaaaataaaataactttattcctcactgtatttcaaatattgcaatagctctgtttaaaatgacaactgtttcattatatctagataatatttcattttccattgcattttatcaattaataaataaaacactattttaggtgaggaaatgatacttagcccttttattttacataccttttggaaaaaatctgaatagaaaattgcaagcataaaagaaactttctataaactttggagttttaggcacatacttgtcactcagctttttaacacatgtatgtaaatttatagcctactttgttgcagacttcaagctcaaattttataactagatattgtggctctactgacrttttttgaatcaattacaaaatgtgtgtgtgtgtgtgtgt

SEQ ID NO: 303239 - DNA, 606 bp, Homo sapiens
gcctcagacactcagttatagctgtagcacaatggaaagtgcgtggataaaaattcaaaatgcttgggagccataagccccagtctcttcaattgaaaatgcggttaaacagccatcactcatgccttccatgagatgtaaatgagaaaaacatgtaaaagatagttgtaaataataacaatttttagaaaaatctttgttagtaatctagtaattggtgttgagaatttttgtcatattccttgaaatctttgtcrtactttgtgtctttctgacgatctgctacaaaagaaaaaaaatacttttacctcagggtttaccacagtctttgcaatgctgagtagaaaatgggactacacagtaatggtctcctattaaatctttccaaacaatctgagttccctgcattatagctctcacatgcttcagaaaagaagaaaaatcacaagtcaataatatagataagagaaaaatcagtgaattgcttggctttgcattgaaagccctccacaacccacatcccacaccccagaccaacctctgaagtaatatgggctgcaaggaggccaggcagaacagctttggagtccccagcacaagggggat

SEQ ID NO: 303240 - DNA, 415 bp, Homo sapiens
gagtatcaccaccatcctggaaactcctgttgttttcccccatctctctacctctagctatttactgcttagataaccataccagcccagatgaagccagagttcactctacccttcaaatgctagagttcagagctttgtgaatagtrtaattatatccagagaaatagaagtttcttggtttctgttttggtattagagatgtggtgtaaatcctctttcccatgatcttaagacaaattacttaacttatctgacgcttagctatatcaataaaagtgcacatgctagtctatgttagtctatatttatcattttaaaatccttatcttagaaagattataaacaaggtagtgtggagtatacaaagatttataagatagtgtctctgccctaaatcactgcagcatcctgt

SEQ ID NO: 303241 - DNA, 207 bp, Homo sapiens
tttccttaacttgcctttccagtatactgccccattattcccctgttcatactcaacatttcagtccaactgggctgtccaatatccctgggcataacaacagctttttcatgtgcattcttctgtgtaattaatgctatttcttcttcttataatatactgkacactttgctactgaaaatcacccaagctttttttttcataaac

SEQ ID NO: 303242 - DNA, 560 bp, Homo sapiens
cccccttaatccactatcgtattcaaaccctatcccttccttttcaaatgtcttcatatgtcccatacttgcaggatcgcatttaagaaataactcaaaaatcaaacccatgcaaatgtaaagtttgaaatgtcacacgatacaattattctcaatcttcaatgaaataatgcmttaaattcacttatttatactgtatgtttctctgagacagaaaatcccacataggctgtctctacaagcatgcatccacaaaagtgatatttggaaacttaaaaatttatgtcttggctctatttatatagtttatttgaaagtaaataaaattccaaatacattcaaacatgtgacaacagagtaattactattgatataaatcaatgattactttcatgaagaatattcaacattagttattcttgaaataacttttaaaatgtaattatcatgatacgtgaataaatccaaaagaaagtttatagatctaagataccattaaagaatgatttgcttgtatttgtcgcttctacctgctttcatttgccactgcataaaaaaaa

SEQ ID NO: 303243 - DNA, 596 bp, Homo sapiens
gcacaggagaaactttggcttattctgaaagaacctattctcaactggtgaagtgatataactcagtaattgtaaacataaacgtagaaagtaagccatatgacaactggtactgtttttagtagttctgttctagtgctgaggcactgaagagacaaaatatggcatttgtatctgtgcataattatgaatctaaaataaatttaagtttctgtatttaatatcattcttctattattttctccagtttgagaaaataagcatttttatagaaagttgtttgaatagaactgtataaacaggtgccttttctcttaacaataacctgattttatctttttttctttttcagaataaaagaagtaaatttgatttaaaatggcatataataacatacttctttttcatcaagaaaatgtggtacaacgaattgtatatgctcttaactagcaagattattttgtgtaggcttgcattttcataacatatttttactccactttaaacattttctcttaaaatgaggaaaggattttcttttccctctttttctgagggtgtttgataagtggaaakaacattccattttggcttgg

SEQ ID NO: 303244 - DNA, 512 bp, Homo sapiens
ctttgtaaattataaaattaagataaaatcaaatacagtgcatttaatagcatttcarttttatgttttataatttgtaactctaccaattaattcttgcatcaaaatacagcatgaacatttataatcaattctaagaggatgtgaagtgaatgtttatactaatatatattccattccgatataattcataagtaataagtatttaggtttgcagtacaaatttatttatcactcaaaaactccaaggcatagaggtcccaggaagtcaaatgttactcaaacttcaataaggttaggcagtatcaaaggcaatatagcaaataattgtgatcaagagatattcagtgttattacagtgaaaatgtcacaaaaaaccatctacatgaaatattctataaggttttatctcaaataaatccaaaaaatttttttccgtttagagatttggctgtcatctcccttaacagattgtagattaaggaggatgacagaggaagagtcagagaaca

SEQ ID NO: 303245 - DNA, 512 bp, Homo sapiens
ctttgtaaattataaaattaagataaaatcaaatacagtgcatttaatagcatttcaattttatgttttataatttgtaactctaccaattaattcttgyatcaaaatacagcatgaacatttataatcaattctaagaggatgtgaagtgaatgtttatactaatatatattccattccgatataattcataagtaataagtatttaggtttgcagtacaaatttatttatcactcaaaaactccaaggcatagaggtcccaggaagtcaaatgttactcaaacttcaataaggttaggcagtatcaaaggcaatatagcaaataattgtgatcaagagatattcagtgttattacagtgaaaatgtcacaaaaaaccatctacatgaaatattctataaggttttatctcaaataaatccaaaaaatttttttccgtttagagatttggctgtcatctcccttaacagattgtagattaaggaggatgacagaggaagagtcagagaaca

SEQ ID NO: 303246 - DNA, 512 bp, Homo sapiens
ctttgtaaattataaaattaagataaaatcaaatacagtgcatttaatagcatttcaattttatgttttataatttgtaactctaccaattaattcttgcatcaaaatacagcatgaacatttataatcaattctaakaggatgtgaagtgaatgtttatactaatatatattccattccgatataattcataagtaataagtatttaggtttgcagtacaaatttatttatcactcaaaaactccaaggcatagaggtcccaggaagtcaaatgttactcaaacttcaataaggttaggcagtatcaaaggcaatatagcaaataattgtgatcaagagatattcagtgttattacagtgaaaatgtcacaaaaaaccatctacatgaaatattctataaggttttatctcaaataaatccaaaaaatttttttccgtttagagatttggctgtcatctcccttaacagattgtagattaaggaggatgacagaggaagagtcagagaaca

SEQ ID NO: 303247 - DNA, 577 bp, Homo sapiens
ctatgaagacaggaagaaaggttgttcacacttgtacacctgaggccatgacaatcttacaccaaaaatacttttgctagggtatctgcccctcaattacctgcccatcttcagacttggcatcaatccttgttattaatctttgtagccaaagacaatactctcaaaacatgtatataattcttttaaaggattttttgcctttaaaaacatttgtcagggtccagcaagatggccaaataggatcagctctggtctgcagctcctagcaatatccatgcagaaggcaggtgatttctgcatttccaactgaggtatctggttcatctcactgggactggttggacagtaggtgcagcccaccgagggcgagttgaagcagggcgggctgtcrcctcacccaggaagcacaaggggtcgggagatttccctttcctagccaagggaagccgtgagagactgtaccagtaggatcctgcccagatactgcacttttcccatggtcttcgcaaccagcataccaggagattccctctggtgcctggctcagcgggtcccatggccaccgagcctagca

SEQ ID NO: 303248 - DNA, 523 bp, Homo sapiens
gggctgacagacacctcatacaggagagctctagctggcaactggcgggtgcacctctatgacaaagcttccagaggaaggatcaggcagcaatagttgatgttctgyagcagcttctgcaggtgatacccaggcaaacacagtgtggagggggcctccagcaaactctaacagacctgcagctgaggggcctgactgttagaaagaaaactaacaaacagaaaggaatagcatcaacatcaacaaaaaggacgtccacaccaaatccctatccacaggtcaccaacatcaaagaccaaatgtagataaaaccacaaagatggggagaaaacagtttcaatagttaaatcaatcaagcagaagaagggttatcagtgactgaagattaacttaatgaaataaagtaagaagacaagattagagataaaagagtgaaaagaagtgaacaaagcttccacgaaatacaggactgtgtgaaaagaccaaacctacatttgattggtgtacctgaaagtgacgggga

SEQ ID NO: 303249 - DNA, 463 bp, Homo sapiens
aagataacacagagaaggaattcagattcttatcagataaatttaacaaatattgaaatgattacaaggaataaagcagacattatggagttgaacatgcaagtgacatactgaagagtgtatcagagtctcttaacagcagatgatcaagcagaagaaataattagtgaacatgaagacaggccatttgaaaatacacagaggagacaaaggaaaaaagtataaaaaataatgaaacatgtctagaaaaagtagaaaatagtctcaaaaggacaaatctaagagttactagccttaacaggaggtgaagggataataacagagaactttccaaaccaagagaaggaaataaatatcgaatagatgtcaaatattgtactttgaatatggaagtacaagaaggttatagaccacttagcagatataaactaaaggaaacyaccttaaagcatttaataatcaa

SEQ ID NO: 303250 - DNA, 549 bp, Homo sapiens
tttccttgcatagatctttcctttgactaagatccctgacattagttattacaaatgtaagaaggagtttctcggaacaatgattccctcagagcctttctttagattaaggaaaagtttatacagaactttatccttccttatatcatggaatatagtttaatcatccatcagcaactccaatacctccaaagaaaatgtcagtgcytaagaaaaaagaaaaagaattaaatcggcaaaagaagtaaataagttagttctttggcctcccagcaatggatttcaaagtataaacattgaattcctgcatcgtcaggatgagcagctatgttatgttgcagtaacaaaagacccccaaaaccttagtggcttacacaaaggttctttccctgtttgtgctccacgtctaatgcagatcatcaagggtctccactcaccattgtcactcagtgacctaggccaacagagcatctccaattggttgcagtgccagagaatagaggtgtggtaactcacacggtctcttcctacttccacccagaaattaca

SEQ ID NO: 303251 - DNA, 458 bp, Homo sapiens
ataagagggagctagggggtgatgaagggaaggggccatcccaggcggacagcagcacrtacccaggacagcactgagggcagagtctgttcactgccagaattgctgtagtaaagggcatcgcctctgtaggggacggcaggatggcaggctgggatggccagcagggtccagttcagggagggtaggctgaggaatttgagctttacattgagagccaaggggaccactggaggtggtaaggcaggggtgaggaggtggcacaacagaattatcctttaggatgattgccctggcttcaatctagggaagaattaggagatgaggtggggtagggaagggcagtggggagacagttgcagccatccaggcgagaaggatcagggcctgaaccaaggcaatgacatcaggaatggagtgggtggggagctgaggacagatggctgagctctggaaag

SEQ ID NO: 303252 - DNA, 566 bp, Homo sapiens
tctcccaaatcacaccctgttggcccgtggagtccctgaggagagatactcagattgtccaagtgtgttcaggcgcasctattcacacaacgagcctaatgttttcttgttggagtggtgttccaaaagtgaaatatttagagtggaaatgggggaaacattgtgtccacactgggacctggaaatatcattgtgtagactctatcaatatagtgctaaatcttaaattgttatgtctcaaaagtcattctgaagtcagggcttactgtgaataatggcttggaaaataaaaataatgtctctcctgggatcagaagcactgacccgaataacaggacgggagggactgactgagagggacagagaagctttcccagagtgtacagttccaggggtctggagcctgggagtctagaatggactgccagtgaccttcatgtgaccgtgagggtctttttgcttccgaggatccttgggtcgctcagtagggatgtgagtgaggagacgctgctggggcctccacgcccgatgtcggtggttctcaccagaatgcctcggctgcatga

SEQ ID NO: 303253 - DNA, 566 bp, Homo sapiens
tctcccaaatcacaccctgttggcccgtggagtccctgaggagagatactcagattgtccaagtgtgttcaggcgcagctattcacacaacgagcctaatgttttcttgttggagtggtgttccaaaagtgaaatatttagagtggaaatgggggaaacattgtgtccacamtgggacctggaaatatcattgtgtagactctatcaatatagtgctaaatcttaaattgttatgtctcaaaagtcattctgaagtcagggcttactgtgaataatggcttggaaaataaaaataatgtctctcctgggatcagaagcactgacccgaataacaggacgggagggactgactgagagggacagagaagctttcccagagtgtacagttccaggggtctggagcctgggagtctagaatggactgccagtgaccttcatgtgaccgtgagggtctttttgcttccgaggatccttgggtcgctcagtagggatgtgagtgaggagacgctgctggggcctccacgcccgatgtcggtggttctcaccagaatgcctcggctgcatga

SEQ ID NO: 303254 - DNA, 556 bp, Homo sapiens
tctttttctaacttctggagatgtatgcttacataatgcattttcagcgtttcttctttactaatctgtttaaggccatgaatttccatttaagttctactttatccgcatccagaatgttttgatacatagtcttttcatcattattctgttaaaatattttcaattcccaatttgaattttccaatttatacattatttagaaatgtttcttaatttcagaaaaattttaaatagtgatttaactaaaattaccactgtcttttaacatatggtgattttagttatttttgttattggcttatatgaataatattataaaatgtgttccgtatgataccaattattttaaatgtgttgaaacttgctttatggcccaagttacggtcagtttttaatgtacattctgagtagttattgggtgcaatgttctatctgccygttaggtcaaatgttctaattattttgttttcaaattgtctctgtctttaatgatctttttgaatgcctgggctctcaacttttgagagtattacatgaatatctgttaccatta

SEQ ID NO: 303255 - DNA, 631 bp, Homo sapiens
ggcctattttctacataataggcatcttagaaatgttcacctaggttaaccctcctcctttcatttcttttaaacaaggcacatattagaaagcaagcatttcttttctttcttttaagtgttggtattagagaaaatgggctgctccagaaagtgaagtatgagttcaaactgatgtggttagggcaatgctgacgtcataaatttgaaatgtggactttctgttgcaaaactttaatttataatcacatataaatcacataatttatatgtctcctcaaattatccatattctcacttaaattctttttggttgtgttgtttctacctaaaatgcaagatggctaaactttggactctgtgtcttaagctccatttggctttaacgaaactcttaatttctacaaaaaaaatgaaattaggatttaaatgtttatttcttggcttggtcataaaaattggtgtgctactttcttaaggaactttagaatgaagtaaaccaaaaaagcaacaacaraaaagaccaacttctttatcttttccaaattagacaaagttcttccctcactgtcctaattccaaggatccagagtcagataaattgtattgtatttttagataactatcaaat

SEQ ID NO: 303256 - DNA, 537 bp, Homo sapiens
ggccttgcagagaatgcagggaaagctgggcctggtggctcatgcctggaatcccagcactttgggagtccagggtgggaggatagcttgagcccaggagtttaaratcagcctgggcaacagagcaagaccgcatttctacaaaatataaaaaattagccaggtgtggcggtacacacttgtagtcccagctactcgggaggctaaggcaggaggattgtttgagcccaggagcttgaggctatggtgagcactactgcactccagcctgggcaacagaaaaaaaagaaagaaaagaaaagaaagaaaagaaagagaaaagaaaagaaaagagaaaaacgcagagaataagatctagacagggccaatgtcccaacagagcaatggccacagaaggacagggtgggaaggccccagtctggagtgacctgccaccgtgcccagtagtgactgggaccctacatttgtgtgtgacctgactctcagggctttgcaggccatcagtgaaaagatggcccctctcagacacacacccaa

SEQ ID NO: 303257 - DNA, 640 bp, Homo sapiens
tctatatggcaggattcattagtttacctagttatatttcctctatcccatccatggggtttccttaggcaaatcattgtgtgaaattgtaacttttctgaatggaagctatgagtctgtgccctttataggggtaatgtggggtccaaaggcaattttggttgggtcatagtcattttctttgatagtgtccatggttctgaccttagaacaagctaggtctggctgcatgtgtcagggtaacagtatctttttacatgctgcttacttctgagattttcaacacaatttactttctacaaagctataacaatcttttttatttttatttttttgcctataagaagaaacagcaatgagctggtgaggtgataacaactttatttagtaaataaagaaacgaaggcatgagctatttgctcaacaagagtacacacgtggcacacctggaagtccagtccttactatgtttcatttatgatctttctcatagagaagattcatccctacactgcatattccaggaaaaattctgttttttcyttattaagagactttgttttttagagcactttgaaattcttagcaagcaaaatgctatgaaaggttcagagatttccatatcccttctgaccgcacc

SEQ ID NO: 303258 - DNA, 435 bp, Homo sapiens
agtacaatttccagctcaacagatatttatayttttaatatataaagatctgagtttttttttaaaaaaagaacatgttgaaggagagataccaagagactggcaggcaggaataaagggaaagaattttccaggaggatgacgatcgcctgtgtcaaatatgaagtccagggcctgggaggctcttctcattctttctgcccaaacacatttaagatttttctctttccaccacaaaaaaatgataagtatgtgaagaaatacatatgttaataagctcaatttacaatgtagacatatttcaaaacatgttttacaaaataaacatacacaattttgtcaatttaaaaaatgaataaataaataagatttttcccttaagatagttaatttttttctaaaaggcaggctctcaagagaatgagaagacaagcc

SEQ ID NO: 303259 - DNA, 435 bp, Homo sapiens
agtacaatttccagctcaacagatatttatacttttaatatataaagatctgagtttttttttaaaaaaagaacatgttgaaggagagataccaagagactggcaggcaggaayaaagggaaagaattttccaggaggatgacgatcgcctgtgtcaaatatgaagtccagggcctgggaggctcttctcattctttctgcccaaacacatttaagatttttctctttccaccacaaaaaaatgataagtatgtgaagaaatacatatgttaataagctcaatttacaatgtagacatatttcaaaacatgttttacaaaataaacatacacaattttgtcaatttaaaaaatgaataaataaataagatttttcccttaagatagttaatttttttctaaaaggcaggctctcaagagaatgagaagacaagcc

SEQ ID NO: 303260 - DNA, 435 bp, Homo sapiens
agtacaatttccagctcaacagatatttatacttttaatatataaagatctgagtttttttttaaaaaaagaacatgttgaaggagagataccaagagactggcaggcaggaataaagggaaagaattttccaggaggatgaygatcgcctgtgtcaaatatgaagtccagggcctgggaggctcttctcattctttctgcccaaacacatttaagatttttctctttccaccacaaaaaaatgataagtatgtgaagaaatacatatgttaataagctcaatttacaatgtagacatatttcaaaacatgttttacaaaataaacatacacaattttgtcaatttaaaaaatgaataaataaataagatttttcccttaagatagttaatttttttctaaaaggcaggctctcaagagaatgagaagacaagcc

SEQ ID NO: 303261 - DNA, 481 bp, Homo sapiens
gctgtccttcttagcctaccccaggctgtggctccagcccctacctgcaggtccatctgggcttagaacaggagagcagaggaaacaggaggcttaaatgtgaattgttcttagactcccccmatcccatgtgtcttcattccctgccagtgtctcctgccttcctttgtccttgttacttaagatccacgtatcctacccagacataccctcaccgtctattcgtgctttcttccctcatgctcctacctctgcaggtatcagtcagcaaatatgatgcagagatcatgagtgcattttaccaagaatgatttagaaggatggatgtcatccaaaatggatgactaatggtggaaatgccagacactcggcagaacaatgcccaaaaaatcagatgcagatggagcctgggttacctgtcaaatcccaacatgaagcaacgtccgacttcccccaagggcagggatgatcctgggtaagc

SEQ ID NO: 303262 - DNA, 481 bp, Homo sapiens
gctgtccttcttagcctaccccaggctgtggctccagcccctacctgcaggtccatctgggcttagaacaggagagcagaggaaacaggaggcttaaatgtgaattgttcttagactcccccaatcccatgtgtcttcattccctgccagtgtctcctgccttcctttgtccttgttacttaagatccacgtatcctacccagacataccctcaccrtctattcgtgctttcttccctcatgctcctacctctgcaggtatcagtcagcaaatatgatgcagagatcatgagtgcattttaccaagaatgatttagaaggatggatgtcatccaaaatggatgactaatggtggaaatgccagacactcggcagaacaatgcccaaaaaatcagatgcagatggagcctgggttacctgtcaaatcccaacatgaagcaacgtccgacttcccccaagggcagggatgatcctgggtaagc

SEQ ID NO: 303263 - DNA, 481 bp, Homo sapiens
gctgtccttcttagcctaccccaggctgtggctccagcccctacctgcaggtccatctgggcttagaacaggagagcagaggaaacaggaggcttaaatgtgaattgttcttagactcccccaatcccatgtgtcttcattccctgccagtgtctcctgccttcctttgtccttgttacttaagatccacgtatcctacccagacataccctcaccgtctattcgtgctttcttccctcatgctcctacctctgcaggtatcagtcagcaaatatgatgcagagatcatgagtgcattttaccargaatgatttagaaggatggatgtcatccaaaatggatgactaatggtggaaatgccagacactcggcagaacaatgcccaaaaaatcagatgcagatggagcctgggttacctgtcaaatcccaacatgaagcaacgtccgacttcccccaagggcagggatgatcctgggtaagc

SEQ ID NO: 303264 - DNA, 589 bp, Homo sapiens
cacattcaagatacagaatatatccattacaccccaaaatatttcccatgccccctttgcagttcatttctccttctgatcctggccccagccaatcactgatttgctggactcactataaattagtttgcattttctacaatttatataaatgaaaccacacagtatgtattctttgtgtcttgtttttatcagccagcatgatgattctgaggttcatccatgttattacctatgtcagtagttcaytcctttttattactaagtagtgttactttgtatagatatactacgacttgtttatccattttccatttgatggacacatgggctgttttacatttttggctactgtgaataaggttgctatgaatatttgcatttaacactttgtgtgaacacatattttttatttctataggttgaatgcttagaactaggatggctggtcatatggtaggtgtatgtttaactttataagaaactgccagttttttgaactactttacattcacaccttgagagtataagctccaattgttccacatcttcactaacatttggtattatcagtctttttaattgtagc

SEQ ID NO: 303265 - DNA, 513 bp, Homo sapiens
tcaaatggaatggascagaatggagtggactggaataaaacggactcaatagtaatggatttcaatgtaattgattcgaattcgaatggaatcgcatggaatgtaatcaaatggaatggagtggaatgcaatagaattgaatagaatggaatgcaatcaaatgcaacgtagtggaatcgagtggaatggaatcgaatggagtgaaatggaatggaatggacttgaaaggaatagactggaacaaaatgaaatcgaacagtaggaatcatacagaacagaaagaaatggaacggaatggaatgcactcgaatggaaaggagtccaatggaagggaatcgaatggaatgaaatagaatggaatggaattgaatggaatcgaaaggaatagaatggaatggatcgttatggaaagatatcgaatggaatggaattgactcgaatggaatggactggaatggaacggactcgaatggaatggactggaatggaatggattgaacggaatggactggg

SEQ ID NO: 303266 - DNA, 513 bp, Homo sapiens
tcaaatggaatggagcagaatgsagtggactggaataaaacggactcaatagtaatggatttcaatgtaattgattcgaattcgaatggaatcgcatggaatgtaatcaaatggaatggagtggaatgcaatagaattgaatagaatggaatgcaatcaaatgcaacgtagtggaatcgagtggaatggaatcgaatggagtgaaatggaatggaatggacttgaaaggaatagactggaacaaaatgaaatcgaacagtaggaatcatacagaacagaaagaaatggaacggaatggaatgcactcgaatggaaaggagtccaatggaagggaatcgaatggaatgaaatagaatggaatggaattgaatggaatcgaaaggaatagaatggaatggatcgttatggaaagatatcgaatggaatggaattgactcgaatggaatggactggaatggaacggactcgaatggaatggactggaatggaatggattgaacggaatggactggg

SEQ ID NO: 303267 - DNA, 513 bp, Homo sapiens
tcaaatggaatggagcagaatggagtggactggaataaaacggactcaatagtaatggatttcaatgtaattgattcgaattcgaatggaatcgcatggaatgtaatcraatggaatggagtggaatgcaatagaattgaatagaatggaatgcaatcaaatgcaacgtagtggaatcgagtggaatggaatcgaatggagtgaaatggaatggaatggacttgaaaggaatagactggaacaaaatgaaatcgaacagtaggaatcatacagaacagaaagaaatggaacggaatggaatgcactcgaatggaaaggagtccaatggaagggaatcgaatggaatgaaatagaatggaatggaattgaatggaatcgaaaggaatagaatggaatggatcgttatggaaagatatcgaatggaatggaattgactcgaatggaatggactggaatggaacggactcgaatggaatggactggaatggaatggattgaacggaatggactggg

SEQ ID NO: 303268 - DNA, 513 bp, Homo sapiens
tcaaatggaatggagcagaatggagtggactggaataaaacggactcaatagtaatggatttcaatgtaattgattcgaattcgaatggaatcgcatggaatgtaatcaaatggaatggartggaatgcaatagaattgaatagaatggaatgcaatcaaatgcaacgtagtggaatcgagtggaatggaatcgaatggagtgaaatggaatggaatggacttgaaaggaatagactggaacaaaatgaaatcgaacagtaggaatcatacagaacagaaagaaatggaacggaatggaatgcactcgaatggaaaggagtccaatggaagggaatcgaatggaatgaaatagaatggaatggaattgaatggaatcgaaaggaatagaatggaatggatcgttatggaaagatatcgaatggaatggaattgactcgaatggaatggactggaatggaacggactcgaatggaatggactggaatggaatggattgaacggaatggactggg

SEQ ID NO: 303269 - DNA, 578 bp, Homo sapiens
tctaccaaacatttaaagaagaactaatatcagttctctacaaactgtctcagaaaaaaacaaacaaacaaaaaaacgaatgggagagaatactttcaaattcttttcaggaccagtattaccctaataccaaagccacacaagcacatcacaagaaatgaaaactacaagccaatatccttgatgagcatagatgcaaaaatcctcaacaaaatactagcaaaccaaatccaacaacacattaataggattattcaccatcatcaagtgggatttatccctgsgttgcaagaatggttgattattctcaaatcaataaatgtgatatatcacatgaacagaatgaaggacaaaaatcatatgaccatctcattaaatgcagaaaaagcatttgacaaaacatcctttcatgataaaaacactcaacaaattaattacagaatgaatatacttcagcacaataaaggccatatataataagcctacagctaacattatactcaacagtaaaaacttggaactctttcttctaagatctggaccaaggatgtcaaggatgtgcactcttgccacttctg

SEQ ID NO: 303270 - DNA, 586 bp, Homo sapiens
caaccagattgttgatcactgcttaagtcttctagacgttaagtttcgtgaagaacctggttgttgtattgccttcactgtgttgcaggtcttgggaggactccagtgcttgttgccctagcattaattgaaagtggaatgaaaaacgaagatgcagtacggtttattagagataaacggcacggcgcttttaacagcaagcaacttttgtatttggagaaatatcattctcaaatgcggcttcgctttgtgtccggaattggtgggttcttggtctcactgacttcaagaatgaagctgcggaccctcgcggtgagtgttaacagttcttaaaggcggcgtgtccggagtttgttccttctgatgttcggatgtgttcggagtttcttccttctggtgggttcrtggtctcgctggctcaggagtgaagctgcagaccttcgtggtgagtgttacagctcttaaggcggtgcgtctggagttgttcgttcctcctggtgggttcgtggtcttgctggcttcaggagtgaagctgcagatctttgtggtgagtgttacagctcgtaaaggtagtgtggtcccaaag

SEQ ID NO: 303271 - DNA, 629 bp, Homo sapiens
gcttcatgtttaccatcctacacgggtcccagtatacatcaggtttgtccaacaggtgattttgttggattctttacacatcttgtggttatttgatgtctttgtctaatctcattttgttatgaaaacctccattttgaaaaatcgacatctgattgaaagttcatgcaaaatccatgttgtacagaagcacatgtgttgaatgtcttcaaataaaaaggccttaccgttaatgtttacggttggggtgtaacttaacacagagggccctgaagacagaatgagaggagactatgaaatatttctagtaaaatgttgttttgatcttgtgcagaacatatggtctaggacttttaatttagtaagtgtttgttaaaaggtaaagatgcattggtccaaggtaaatagagcaaatatggacagaattacaaggaaaattggcaagtttaccgtagcagtgggaagttttattgtycctctttcagaagcagatcaagtagacaaaaatcaagattttgcatatagatttacacaaaacagtcaacaaacttgatcccatgaacatacaaagggcattgcatccaacaatgggagaatacatatttataagagtacatgaactattaaat

SEQ ID NO: 303272 - DNA, 631 bp, Homo sapiens
tgcttttgtcttcctctttgtctccactccctctcctgcccttaactctccagaggcttctggcctcctgggatagttcattgtaagtcctctcaactctctgctgttgttagctgataaccagcaacttaatggttgatctgcctctcaaatactgtctcccaggagctcaacaggtagaggtgtaatccacgtgggaaagcagtcaacagagaggctttggagccactgtctgctggctgtgtgaccttcggcaagttctctgtgggcttgggtggttgaggctggggaggggtagggtcagactgttgtgaaggcacaagtcgyggctttttatttagtagagaacgacaagccagcagaagtctggaagcaggggatgccaggatggggtgaactgcagcatacaggcagagaacgcaaggtgtcacttttcttttgtgtacctcctgccataccagcttccaagttgggcctccaggaactccaggaacctgctgatcggcatttgctctcctctcctcagggcttcagacaagctgtttctcctagaccagtgtgagaagtatcggcgctgcaagcaatgccagaggcgcacctccaacgtgggcgagagcaacctgtggcccct

SEQ ID NO: 303273 - DNA, 631 bp, Homo sapiens
tgcttttgtcttcctctttgtctccactccctctcctgcccttaactctccagaggcttctggcctcctgggatagttcattgtaagtcctctcaactctctgctgttgttagctgataaccagcaacttaatggttgatctgcctctcaaatactgtctcccaggagctcaacaggtagaggtgtaatccacgtgggaaagcagtcaacagagaggctttggagccactgtctgctggctgtgtgaccttcggcaagttctctgtgggcttgggtggttgaggctggggaggggtagggtcagactgttgtgaaggcacaagtcgtggctttttatttagtagagaacgacaagccagcagaagtctggaagcagggratgccaggatggggtgaactgcagcatacaggcagagaacgcaaggtgtcacttttcttttgtgtacctcctgccataccagcttccaagttgggcctccaggaactccaggaacctgctgatcggcatttgctctcctctcctcagggcttcagacaagctgtttctcctagaccagtgtgagaagtatcggcgctgcaagcaatgccagaggcgcacctccaacgtgggcgagagcaacctgtggcccct

SEQ ID NO: 303274 - DNA, 630 bp, Homo sapiens
gggggcaggagagagcttgcagccccctgaaattagatactgctaagatgttaagacatgtggagatggcagcttcctgcctctaatttcattgtataatcaaggaatcaataaatcatgcttagggtcctactcctgctgctacctcagcctcaggatctccactgccagcaacgaataggtcctatatgaccaactctcaaggacaggctagatggactattagacttctagaagagtaattagcagagataccactcacttcttgctcaggtcttattcttccaagaactgcttccttggtgctrgtgctcagccaagaatatcctgagaaaacatccctcctctatgatccttgggatcatagagaatgaaaaactattcagaagagagtttgaagagtgaagctggaatctgaacaccatggagtttttgacactacctttttacatcatgtcccacaatttcctctgtatcgctgctacatatcctttataatcaatatagtagaaaagaaaaacaatagtagagaaaacaaatgaaagcaaaataggttctttgaaaagatcaaataaattaacaaactttagctatactaaccaagacaaaaacaaagaagacacaaattac

SEQ ID NO: 303275 - DNA, 630 bp, Homo sapiens
gggggcaggagagagcttgcagccccctgaaattagatactgctaagatgttaagacatgtggagatggcagcttcctgcctctaatttcattgtataatcaaggaatcaataaatcatgcttagggtcctactcctgctgctacctcagcctcaggatctccactgccagcaacgaataggtcctatatgaccaactctcaaggacaggctagatggactattagacttctagaagagtaattagcagagataccactcacttcttgctcaggtcttattcttccaagaactgcttccttggtgctggtgctcagccaagaataycctgagaaaacatccctcctctatgatccttgggatcatagagaatgaaaaactattcagaagagagtttgaagagtgaagctggaatctgaacaccatggagtttttgacactacctttttacatcatgtcccacaatttcctctgtatcgctgctacatatcctttataatcaatatagtagaaaagaaaaacaatagtagagaaaacaaatgaaagcaaaataggttctttgaaaagatcaaataaattaacaaactttagctatactaaccaagacaaaaacaaagaagacacaaattac

SEQ ID NO: 303276 - DNA, 630 bp, Homo sapiens
gggggcaggagagagcttgcagccccctgaaattagatactgctaagatgttaagacatgtggagatggcagcttcctgcctctaatttcattgtataatcaaggaatcaataaatcatgcttagggtcctactcctgctgctacctcagcctcaggatctccactgccagcaacgaataggtcctatatgaccaactctcaaggacaggctagatggactattagacttctagaagagtaattagcagagataccactcacttcttgctcaggtcttattcttccaagaactgcttccttggtgctggtgctcagccaagaatatcctgagaaaacatccctcctctatgatccttgggatcatagagaatgaaaaactattcagaagagagtttgaagagtgaagctggaatctgaacaccatggagtttttgacactacctttttacatcatgtcccacaatttcctctgtaycgctgctacatatcctttataatcaatatagtagaaaagaaaaacaatagtagagaaaacaaatgaaagcaaaataggttctttgaaaagatcaaataaattaacaaactttagctatactaaccaagacaaaaacaaagaagacacaaattac

SEQ ID NO: 303277 - DNA, 429 bp, Homo sapiens
tggaatataatagaattgaatggatcggcaacgaatggaatggagtggaatggaatggagtggaatagaatagaatggaatggactcgaatgacatggactctaatggaatagaaatgaatggagtgacatcgaatggaatggattgcaatggaattgaatggaatggacccaaatataatggactcgaatggaatggactcaaatagaatggacwtgaaaggaatggtctcgaatggaatttatttgaatagaatggaatcgaatgaaatacaatagtatggagtggcatcgaatggaatggaatcgaacggaatggaccggaatggattggactggaataaaacggactcgaatgtaatgcattgcaatgcaatcgattcgaatggaacggaatcgaatggaatggaatggaacggaatgcgccgga

SEQ ID NO: 303278 - DNA, 429 bp, Homo sapiens
tggaatataatagaattgaatggatcggcaacgaatggaatggagtggaatggaatggagtggaatagaatagaatggaatggactcgaatgacatggactctaatggaatagaaatgaatggagtgacatcgaatggaatggattgcaatggaattgaatggaatggacccaaatataatggactcgaatggaatggactcaaatagaatggacatgaaaggaatggtctcgaatggaatttatttgaatagaatggaatcgaatgaaatacaatagtatggagtggcatcgaatggaatggaatcgaacggaatggaccggaatggattggactggaataaaacggactcgaatgtaawgcattgcaatgcaatcgattcgaatggaacggaatcgaatggaatggaatggaacggaatgcgccgga

SEQ ID NO: 303279 - DNA, 429 bp, Homo sapiens
tggaatataatagaattgaatggatcggcaacgaatggaatggagtggaatggaatggagtggaatagaatagaatggaatggactcgaatgacatggactctaatggaatagaaatgaatggagtgacatcgaatggaatggattgcaatggaattgaatggaatggacccaaatataatggactcgaatggaatggactcaaatagaatggacatgaaaggaatggtctcgaatggaatttatttgaatagaatggaatcgaatgaaatacaatagtatggagtggcatcgaatggaatggaatcgaacggaatggaccggaatggattggactggaataaaacggactcgaatgtaatgcattgcaatgcaatcgattcgaatggaacggaakcgaatggaatggaatggaacggaatgcgccgga

SEQ ID NO: 303280 - DNA, 592 bp, Homo sapiens
ctaccgtggctggcctgtattttcaatagtagtagctacactattagttgagtactgaccagcttattctttaccatgcactgtggtaaattctttatatatgttatttcatttccattcaacaaccccatgaaggagaaattgtcatctcaattttacagatgaggaatctgaggaatagagttgttaaaaaacttgcctagtatcttatgtacagggttgaaatttgaagtaaattctgtctgattcatagtaagtgtacaacaaatacgtaattgttgaaaacgaatgcataaagtatctaggcaaacctaaaacttgtgaaccaagtaggtacctgttcacatatacagactgagcgtgcagaaatcctgtattagactgatgggtatttacttcactccaactcaagacttctgaattagcaaggcaactttatgtatgagactatattgccattgtttctcaaattgtggctcctgaaccagcagcatgaacatcacctgaaaacttgtctaagactrccagatttagggatttagggatgccagattaaatttgaatttcagataaacgatgaataatgaaatct

SEQ ID NO: 303281 - DNA, 622 bp, Homo sapiens
gaagaagggagaaaaagaacagcaagaagcaactgaacatattgatgaagtacaaaatgaagtagacttaataagccaatgaggagactttgaaaacagaacagaaatataacaaactcggccaactgttttttcagatgaggtctgaattgatagccaaaatcccaaactttggggtaacagcatttgtcaaccatccacaaatgtctgcactgcttggggaggaggatgaagaggcactgccgtatttaaccagtgttgaagtgacagaatttgaagatattaaaccaggttacagaatgtttttattttgacaaaaatcctgacttcaaaaataaagttctctccaaaaaatttcatctgaatgagagtgktgctccatcttcaaactcactaaaatcaaatggaaatctggaaaggatttgatgaaaaatgcaagtcaaatgcagaataatgccagcaggaagaggcagcatggggaaccagagagcttcttcacctggcttactggccattctgatgcaggtgcagatgaatgaggaaaggtcatcaaagatggtatttggccaaatcaattacagtattacttggttcccaataatggatgatgaggaaggagaag

SEQ ID NO: 303282 - DNA, 634 bp, Homo sapiens
tagcctcataaagtttgtctcttgaatgactgggagacccctgtggtgatggtggtaattcataatcctggtgagataattttgccctgctcttaatagggaaaaaggacaaacctggaatgattgtgtgactcagacgagtgagtgttattaatgaatgacattaaaattgtgtttcttaaagaataaaaagcctatttggaatccatgtatctctcacgttgtcaactaatttggaaggaaatttagttatggtaatacctgcctctatatattggggatacttggtcctttaattatggagtattaggacacatcaaagtgaaggacaaatagacctagtggcatctcaaaacttaactacacgactctgttataagaaaaatcyacttatctaaacttatgaacccagtttttatttcttaagattttttttcttaaagagatacaccttttcttaatgtcaaaaattagagtgtgatgatacagatttgcagactgttcagtacctatacaaagttgacacttaagaaatatttattttgcctggtggttatttcaagactcataaataataatttcccatgctttttaggttatatgcatgccaaagactggtgaaattgaatttaat

SEQ ID NO: 303283 - DNA, 634 bp, Homo sapiens
tagcctcataaagtttgtctcttgaatgactgggagacccctgtggtgatggtggtaattcataatcctggtgagataattttgccctgctcttaatagggaaaaaggacaaacctggaatgattgtgtgactcagacgagtgagtgttattaatgaatgacattaaaattgtgtttcttaaagaataaaaagcctatttggaatccatgtatctctcacgttgtcaactaatttggaaggaaatttagttatggtaatacctgcctctatatattggggatacttggtcctttaattatggagtattaggacacatcaaagtgaaggacaaatagacctagtggcatctcaaaacttaactacacgactctgttataagaaaaatctacttatctaaacwtatgaacccagtttttatttcttaagattttttttcttaaagagatacaccttttcttaatgtcaaaaattagagtgtgatgatacagatttgcagactgttcagtacctatacaaagttgacacttaagaaatatttattttgcctggtggttatttcaagactcataaataataatttcccatgctttttaggttatatgcatgccaaagactggtgaaattgaatttaat

SEQ ID NO: 303284 - DNA, 451 bp, Homo sapiens
tacttgcagcccaagtatttctaacagctcttcttttaaaaattttccatttcccacttaaaataaatataccagctatatgtagtaaatatgaaaaaattctcaccaagattaaaacaagattttaaaagacagaattgcggagtagggaacataattttgaaaaagaagaaagttggaggactcacactgyctgattttaagacttattcttaaactaagcatttataaagtctttacaaatcaaaacattgttattggtaaaaggacagatacacagatgaatggaacacaatacaaagccccaatgatatggaattgcaaaggagtcatcactctggagcatttctgcagaggaaatatcgaaccacccaaattacctcttctacttaaagtatcaagtcagctcaattcccagggagcttttcttaacctgagataaattctaatc

SEQ ID NO: 303285 - DNA, 451 bp, Homo sapiens
tacttgcagcccaagtatttctaacagctcttcttttaaaaattttccatttcccacttaaaataaatataccagctatatgtagtaaatatgaaaaaattctcaccaagattaaaacaagattttaaaagacagaattgcggagtagggaacataattttgaaaaagaagaaagttggaggactcacactgtctgattttaagacttattcttaaactaagcatttataaagtctttacaaatcaaaacattgttatkggtaaaaggacagatacacagatgaatggaacacaatacaaagccccaatgatatggaattgcaaaggagtcatcactctggagcatttctgcagaggaaatatcgaaccacccaaattacctcttctacttaaagtatcaagtcagctcaattcccagggagcttttcttaacctgagataaattctaatc

SEQ ID NO: 303286 - DNA, 509 bp, Homo sapiens
gtattccatggtgtatatgtgccacattttcttaatccagtctatcgttgatggacatttgggttggttccaagtctttgctattgtgattagtgctgcaataaacatacgagaggtagaggttgcagtgagctaagatcgagccattgtactctagcctggacaacaagagcaaaactccatctcggaaaaaaaaaaaaaggaaaaggaaaaagaaaacataggaagttagggtactaagacaagcaaatctwtaacacaccagaaacacatcaaatgcatttttaccttcaaaggaatcactccagctagactaagctacattacaattattaaataaaatcttttatacctcttattttgtgatcatctccagaatataaatttaattattatacatctattactgtgtaagaatataatgattcaaagaactgaagactgaaagtcaaagaaaaggcaggattctttccctccaggacaaatacactttcaagctttttcttgtc

SEQ ID NO: 303287 - DNA, 589 bp, Homo sapiens
gggtttattggaagactgatgtgatagtttacgaattgaaatgagagctgaaaaaaaacacagtttggaaattacaggaactaggatggttttaggaaatgcggtaccaggaatctaaggacaatttcttcatcactgccattatatgactcagctgcaactgccttctgcctgtatctccactggarattcaaattcccagaagaattaaggtcaagattggggcacaggcctactcctgttgtggtggtgttggtgactgagagccaaaagaatcccaaataatggaaggcaggagttcatcagaggatgggatgtcggacagacaaaatagcagggatccatgactgtgacattgacttgtcatggtcagactttggtcctgaatcttataggcccaggacactgaatttttaggcactctgaaaatgagtacatatcccattttaataaggtttgcagagattgcgcctatcaaatggctagtttactaatttataatgaaaaatacaacagtcaggtgagctacatatttaagatggcctgatcagcacattttgtattagccaaaccacatgtaaatcaaata

SEQ ID NO: 303288 - DNA, 649 bp, Homo sapiens
cagttgtataaaattaggactccattcagttggcctacacaacataataatagaaaaaaatggtctgggcatttgtggctcacttttgctacctgccattttgtgcaatcgactgttgaagctgctgtcccaaatgtattccctacattgatttatttctcttgtattatagagttatgatatttctctcttctttttgcagctaggttgtcttctttttaaaatgcacttgtgagcatttaaactaatcaaggcaacaaatcaatctgtaacaccttgagaaattcttccaggttgaagcaaacggggtgcctatgacagactcttctatgataaggtgtccccacctgccttagggtatggcacaaagtgtgtgtgtgtgtgttctgtctatattggtcctctcyccatgctgttttacacagaaggcagtaatttcagaggtaacaatcagaagtaaattcaatagccccaatataattctaaatgaaatacaactgtaaaatttcagaaaactttagacccttaaatagctagaatattcaaaatacacaatggccctgtattttaaaatttcttgattcattcctcataaatttcttcttgctattaacagatatcccctttggcaggtcagatatcactagtt

SEQ ID NO: 303289 - DNA, 554 bp, Homo sapiens
cttagtattcccctctgtaaaatgagggagctcatttttggcactaggattctgtgaatctttgcttgtttctgatccaaggcttgtttccatggccatgtaattatttttaacttttaattgaagtataacatatacacacacacacacacacacacacatatatatatatatatatatatatatakagagagagagagagagagagagagagagagagagaagtgctcatattatacgtggacagcttattgaatttttgcaaactaaccatgtgtaaccagctcccagatcaaaaagtagaacatgaccagaatctcaaaagcccatcttctgttcccttctggcagcccccattgccacaagggtagccaccatcctgatttttaataccacgcattaaatttacctgttttgaactttaaataaattgaatcatacactgtgtatgcatctgatttctttaactccgtattatattttgaaacttatccatgtgtttggagactattcactctcactgaggcagtgttctattggacaaatacaccaca

SEQ ID NO: 303290 - DNA, 462 bp, Homo sapiens
atatattttctctttttaaaacttaattaatttttaaattggcaaataaaaattgtatatatttatgtacaacatgttgctttgaaatatgtaaatactgtggaatggctacattgagctaattaacatatgtattaagtaatacatatgtgaattacttatgtgaagtcacataactttttttttgttggtgaggacacttaaaatctactctcttcacaattttcaagaatacaatacattgttactaactgtagtcaccatgttgtacaatagatctctcaattctttctatytaatggaaatgtatcccttgaccaacctcaccccctccctcagcccccaccacaaataaaacacgtatcaaatagacaaagccaagcctagccacggattctttgcccctttgtcagctgctgttctgtcctttcagactgtggtagcacctgtcacattactcag

SEQ ID NO: 303291 - DNA, 596 bp, Homo sapiens
gaatgtttccattgtaagggtcagaaaactcaactcacagtgcagtaagttaaatggaatatattggcacaagtcactggatagtttggggagagayctaactggcttcagattgcatttgatccaaagcctaaatgataccagaatttggtttctctctccttcctcttctctgctcttcctttcctgtgttgttgcctttcagggaatcctcttctccatagtcccaagatagctaccagtaacttctgggactaacggtttctaggtctaaatctagatgtgaagaaccagtgatagtgctctaaattttcagcagaatcttgttctctctcattggctctaagtgagtcttatgttcactattaaatcaatttgttcaagaaaatgcattgagtggattgttttcagcctgaaatacttcctccattctgagtcataagtgggaccaactcttctggaagtaccctggatgaaaggtaaaaagagattttgtcgagggaaagttgaagggccattgcaaggaggaagaaaattctgggtgacaaaaacagatgtccagagttctggttccaggtaagatggtgtaaacacat

SEQ ID NO: 303292 - DNA, 596 bp, Homo sapiens
gaatgtttccattgtaagggtcagaaaactcaactcacagtgcagtaagttaaatggaatatattggcacaagtcactggatagtttggggagagacctaactggcttcagattrcatttgatccaaagcctaaatgataccagaatttggtttctctctccttcctcttctctgctcttcctttcctgtgttgttgcctttcagggaatcctcttctccatagtcccaagatagctaccagtaacttctgggactaacggtttctaggtctaaatctagatgtgaagaaccagtgatagtgctctaaattttcagcagaatcttgttctctctcattggctctaagtgagtcttatgttcactattaaatcaatttgttcaagaaaatgcattgagtggattgttttcagcctgaaatacttcctccattctgagtcataagtgggaccaactcttctggaagtaccctggatgaaaggtaaaaagagattttgtcgagggaaagttgaagggccattgcaaggaggaagaaaattctgggtgacaaaaacagatgtccagagttctggttccaggtaagatggtgtaaacacat

SEQ ID NO: 303293 - DNA, 596 bp, Homo sapiens
gaatgtttccattgtaagggtcagaaaactcaactcacagtgcagtaagttaaatggaatatattggcacaagtcactggatagtttggggagagacctaactggcttcagattgcatttgatccaaagcctaaatgataccagaatttggtttctctctccttcctcttctctgctcttcctttcctgtgttgttgcctttcagggaatcctcttctccatagtcccaagatagctaccagtaacttctgggactaacggtttctaggtctaaatctagatgtgaagaaccagtgatagtgctctaaattttcagcagaatcttgttctctctcattggctctragtgagtcttatgttcactattaaatcaatttgttcaagaaaatgcattgagtggattgttttcagcctgaaatacttcctccattctgagtcataagtgggaccaactcttctggaagtaccctggatgaaaggtaaaaagagattttgtcgagggaaagttgaagggccattgcaaggaggaagaaaattctgggtgacaaaaacagatgtccagagttctggttccaggtaagatggtgtaaacacat

SEQ ID NO: 303294 - DNA, 527 bp, Homo sapiens
actaatgaatgagtttagcaaggttgcagtgtataaagccaacacacacaatacaagtgtatttctatatgttaacaatgtaatgtacaaccagaaactaaaaggtaaaaaaataccatttataataacttaaaaaaatagaactataacaagacatgtacagtatttatatgctgaaaactaaaaaatgttaatataagaacttaaagaatatctaaataaatggagagagataatatagtaaagatgwcaattctccctaaaaattatcattagatttaataatactgatgaaaagcaggatgtttttgtagatatgtaccaatagattttaaattttatatgataaagaaaatgaaaaggaagtagaatagctaaaaatatattgataaagaagaataaagttggaggactcatactacccaatttcaacttactagaaagctatagtaatcaacacagtatggtattgacaaagggacagaaatatagatcaatggaacacatctatgagaaagtccagaaac

SEQ ID NO: 303295 - DNA, 412 bp, Homo sapiens
gagcctatttataggacattatcaaaaacataaaattatagtgatggaaaacagatgatggaatagagatgggggagggtgtaattacaaggtgatagcacaaggaattctttagggtgatggaactgttctgcatcttgattatggtggggggtaacatgaaagtacacatttgttaaaattcatagacttgtaaccccatgtgagaagaaagtcaattttatcaatgataattttaaaawtaaaatttccaagtcatacaactgtacactcaacatacacacacacatacacatatgcacacacaacacacacacacacacacaggctcactatggtgcttaacagtattaaggaacaggaaaactgaccaaagaggttacaccagactctagcaccagactccagcact

SEQ ID NO: 303296 - DNA, 420 bp, Homo sapiens
tggatcagactcaggatctccatcattcaactgactcccctggcacagccacagtctcaccactagcctgccagccccgagaattgggttttgtgggacggaacttggaaagctaccaacattttgaaacttgttaacttaaaaaaaatcagtataatttttttttctgtccagttcttaatgatttgtgrattgggtcttcatatactgaagtaaaacccagtagggttcagagattatgaacaaacctgatgccagcattttggttcaccttactcaatgctcatcctgccaactgccctggtccatcccccttgtgcctcctggtgggcctcttatctcactctcagtctagctgaatccaactttctgccacaaaggtttctgagcaagttctcaaattctctcctcctgcagacc

SEQ ID NO: 303297 - DNA, 420 bp, Homo sapiens
tggatcagactcaggatctccatcattcaactgactcccctggcacagccacagtctcaccactagcctgccagccccgagaattgggttttgtgggacggaacttggaaagctaccaacattttgaaacttgttaacttaaaaaaaatcagtataatttttttttctgtccagttcttaatgatttgtggattggktcttcatatactgaagtaaaacccagtagggttcagagattatgaacaaacctgatgccagcattttggttcaccttactcaatgctcatcctgccaactgccctggtccatcccccttgtgcctcctggtgggcctcttatctcactctcagtctagctgaatccaactttctgccacaaaggtttctgagcaagttctcaaattctctcctcctgcagacc

SEQ ID NO: 303298 - DNA, 544 bp, Homo sapiens
tggtccaacaaggcacaaagggacgagtaagtaacagagaaggaatggggatgtattctagaaagtcataatggtggaaatgagggacattacagagcaaaaatttaattatatacttaacatatataatataaccctttacagtcatattttttaaaaggttaatttatattgactaagacaaagcagtgctgtgtgttgctatggtagcacacggattctgctcatgggcaccagggcctcacttttatttctggaataagaatcaatttcatcctcagctgagacatctaattcccaatgtctaggccytgaaatcgatgaaatgcacaaatgcatcaaattaattaagaaatattttaagatattacttaagaatatctactaattaccactgctaagctaacagtaatccatttcaaacagctattgagtgcctccaatggcaaaactctgtggtagacagaggattaaagtggcagataagaggcaagactagcttgcacctccccacttggacagagcagcatgtggagactcacat

SEQ ID NO: 303299 - DNA, 578 bp, Homo sapiens
tactggaagtcctagccagagcaatcagacaaaagaaagaaataaagggcatccaagtcagtaaagagggagacaaactgtcactgtttactgatgatatgattgtatacctagaaaaccctgaagactcatccaaaaagcatctagaatttgtaaatgaactcagcaaagtttcatgatacaaaattaatgtacacaaatcagtagctctgccatataccaacagcgaccaagcgagaatcaaatcaagaactcaatccttttcataatagctccaaaaaaaaataggttggaatatacctaaccaaggacgtgaaagaactctgcaaggaaaactacaaaacattgctgaaagaaatcatagataacacaaaygaagagaaacacagcccatgctcatggatgggtagaatcaatattgtgaaaatgaccatagtgccgaatgtaatctacaaattcaatgcaatcccatcaaaataccaccatcattcttttcaaaactagaaaacacaatcctaaaatacatatgaagccaaaaaagtgcccacatagccaaggcaagactaagcaaaaagaac

SEQ ID NO: 303300 - DNA, 553 bp, Homo sapiens
ggtgagcttgagaaaacacgattgtgcccagcatacatgatatgtaatatcatgctaaaaatggacataaatatattttaaaaactgtatatgatgcatgagtgccattggcaaaggttgaataatgtgtagcacttattacatgaccccaaataaacatttattgaatggaaattgaaaaacatgatttaatatataaccttaaaaccatggttytgaaactttagcatgcatgaaaattatgcacaacttattaacacacgtattgctgagccccacccccagagtttctgatttagtagatctggggagggatccaataatttgcatttctaataagttttcaggtgacattgatacctgctggtctgggaaccacactatgagaaccactgcactacaggaaagaaaacatttcagtgcctggggcagcaataatgtggtagagggcagacctaaattatgatataatgccatatgtaagtgaaaaacttttcagatgtccttaaataatctcagtctttttcagtgtacactttggaatacattactt

SEQ ID NO: 303301 - DNA, 550 bp, Homo sapiens
aatttcgttgaaatatgaggagttagacactatttccaatktattgtgcatagtccactctggttttttatatgcttggaagactaagctaattatcttttggttgctggcaacttctcaataagatatctgtcaagtgtaatactatcacaaggcatttggcaacataaggaagagcaaattatgtaagaaggataaatattttcctccctgggataaggaaagagtgtgaggagaagaaaatcacattagtagtttaaatgttcttttctcatgagaacatttaagaacaataatgttggtttataccagttaacactgagttcccagagatgatgcaattctgtttcaatgtagcctttcctctgacagctcaaagcttggcttagtcccagaaccattttctagcctgatgtgactcctcagttcagctctgaagagaagaggctttcaaaggtttttcatcttgcattatgtttttagaagtttcgtgtcaaggtgtctagaggccctcatataccagattctttaaataatattcttttgagtt

SEQ ID NO: 303302 - DNA, 550 bp, Homo sapiens
aatttcgttgaaatatgaggagttagacactatttccaattwattgtgcatagtccactctggttttttatatgcttggaagactaagctaattatcttttggttgctggcaacttctcaataagatatctgtcaagtgtaatactatcacaaggcatttggcaacataaggaagagcaaattatgtaagaaggataaatattttcctccctgggataaggaaagagtgtgaggagaagaaaatcacattagtagtttaaatgttcttttctcatgagaacatttaagaacaataatgttggtttataccagttaacactgagttcccagagatgatgcaattctgtttcaatgtagcctttcctctgacagctcaaagcttggcttagtcccagaaccattttctagcctgatgtgactcctcagttcagctctgaagagaagaggctttcaaaggtttttcatcttgcattatgtttttagaagtttcgtgtcaaggtgtctagaggccctcatataccagattctttaaataatattcttttgagtt

SEQ ID NO: 303303 - DNA, 575 bp, Homo sapiens
atctcatttacaacagccacacactcaaaaaacctagggatgaatttaaccaaggtggcaaaatgccttgtgatggttaatattaggtgtcaatttgattgaattgaaggatgctagatggctggtaaagtattgtttctgggtgtgtctgtgagggtgttgccagaagagattgacatttgagttggtaaactgggagaggmagacccaccctcaacgtggatagacaccattgaattggctaccagcgaggctagaacaaagcagaagcaaaaaggtgggagaactttgcttgctgggtcttctggctgccttctttttctcatgctggatgcttcttctcactcctcctgcccttggacatcagacatcaggttctttgacatctggactctggggcttacatcactgtattgccaaggactctcatgcttttggccactgagtgaagcctgcactcttttagcttccctgattttaaggctttcagactcagactgagccactaccaaattctctattcctcagctttcagagggcctattgtgggactttgcattgtgatcttgtgagcc

SEQ ID NO: 303304 - DNA, 577 bp, Homo sapiens
catactattagatactaaaggtgaaaagacaaatgaaaaacaatccttgggtcacaagatgcatcctgctagtgtatctattaaaacccttttctaaatctttccttttcttccatgtccattttaaattattccttttccatgatgactttcctgatattactgacttcaattaattgaattgtttcttgaacttttatacaaattgtattcatttatgtaatttcataaaatagctgtattttcattattatataagctctgcgtatttattttactttgcacaatatcacacatcgcctctggtcttgggaatgttttacatataataaatatctattaaatattgattaacacatgaaggtaatcaatagcttgtggttaaagagtgatagtaatattagtttatattttagatattagatgaggttcaatctagtactccctgagcatgtgatatagttcagatgtgtttcccactggaatctcatattgaaatgtaatcccagtgttgraggtggggcccggtggctggtgattgggtcatagggttggatttctcataaatagtttatca

SEQ ID NO: 303305 - DNA, 476 bp, Homo sapiens
gaaaaaaaaaggaaaaacaaaccaagaaagtatgcctttttactttcctattatcctgaatagggcatactccattcacccttaaggttctagaatgaaccagtcttactatgtatctataaccttgcctttatctctattctaatrtggtaatctgttagcctgggagaaacctccatctctgtcctatgagtctcttgctcctgtcgctttgggctggcctatatgcttgtctccatgactttatagtgactcttgctcagagcatagtagcaataaaatgattatctcttctttcatattcccatttcccacgttctttcagtagacaagaaacctatttttcagctaactgccacaaggctctgggacttctgtcccttcaaatgtaaccttcaaggtcttgatgcatgttgggaaggccatggaagtagttagagaaatgaagctacagggggaagtgggagaaatcaaga

SEQ ID NO: 303306 - DNA, 580 bp, Homo sapiens
ttgtctgttaaagagacatgggttaaagagaacgtttccaggaggtctttactcttctaaaagggaaccgttttttaggtcttttctttctcatagtttggagtaaaggagacaatgattaaaaatttagcctcgtaataggctctgtagcagattttactataaaggctatgggtgcacaacagactttaaattgtcttgtgaaagttattctaaataatagaattgctctagattacttactagctaaacagagaagtatctgtgcagctactggcactagttttccatggaaaaatacatcacattaggtatgatagagattcattygtaggggattaacagtctacttagttaaagcgagcagactctttatccagctcgttccttgatctatttaattttaggtgatttggtttatggggaccctggccaaggagcataattcaaactcttgatattgtcctcctgatagtcataatagtagtctccctggtgcaccatgttctctcaagttttaaatgtttgcatgcaaccacctttcaaatgttaaatggtatctcttttttttttttttatt

SEQ ID NO: 303307 - DNA, 449 bp, Homo sapiens
acagccctcatcatcctctgcacccataccccatggtaagtggctgcacacatgttcctggagcagcttgcatagcttgcaggagccacagtgggcaataaggactctgttcccccaaaatcagggatctgtgttctgatcattgactgctgcctctcattaaagaggtatagatatagagatgggaaactgytgtaatctgaaggtttgtattcctctaaaattcatatgttgaaatcctacgtattacttaaaataatagtactaagaggtgggaaatttcagtggtgattaggtcatgggggtggaatcctcatgaatgggattagtgttcctataaacaatgcatgagacagacccctcaccctttccatcatgtgaagacaaagcaataaagcactgtctatgaggaactgtccctcaccagacaccattctggtggtgccatg

SEQ ID NO: 303308 - DNA, 579 bp, Homo sapiens
gctctgaacccacatttcccttcttcactgccttagcacaggttctctatgagggctccactgtggacgcacatgcctttccatacatcctctaaaatctaggtggaggttcccaaacttcaattcttatattcttcccacccacaggaccaatgccacatagaagatgtcaaaactgggggcttgtaccctttgaagcaacattctcagttgtgccttggtgccttttagccatagctggagcagctggatgctttctcgagcctgcacacaacagcaggatcctggacccagcccagaaaaccacttttccctcctaggcctccaggcctatgatgggagggcctgccatgaaggtctctgacatgccctggagacattttcattattgtcttgatgattaacattcagctccttgttactkatgcaaatttctgcatctggcttgaatttttccccaggaaatgggtttttcttttttatcacatcatcaggctgcaaatttttcaaacttttatgctctgcttcctcttggacacttcaccccttagaaatttcttctgctagagaccccacata

SEQ ID NO: 303309 - DNA, 579 bp, Homo sapiens
gctctgaacccacatttcccttcttcactgccttagcacaggttctctatgagggctccactgtggacgcacatgcctttccatacatcctctaaaatctaggtggaggttcccaaacttcaattcttatattcttcccacccacaggaccaatgccacatagaagatgtcaaaactgggggcttgtaccctttgaagcaacattctcagttgtgccttggtgccttttagccatagctggagcagctggatgctttctcgagcctgcacacaacagcaggatcctggacccagcccagaaaaccacttttccctcctaggcctccaggcctatgatgggagggcctgccatgaaggtctctgacatgccctggagacattttcattattgtcttgatgattaacattcagctccttgttacttatgcaaatttctgcatctggcttgaatttttccccaggaaatgggtttttcttttttatcacatcatsaggctgcaaatttttcaaacttttatgctctgcttcctcttggacacttcaccccttagaaatttcttctgctagagaccccacata

SEQ ID NO: 303310 - DNA, 501 bp, Homo sapiens
tgtgtatttcagtattgtagttcttcagggtttcacgtttgtttttctgttcttactctagaatcttttcttgagtaattttttccagtatcatgtcttcaatcgcacccaacgtattacagactgctcaaactstttattgagtagctgtatatagatcttctgcatacgggtgtgtattagtctgttctcaccctgctataaataaccacctgatactgggtaatttatgaagaacagatgtttaattgtgactgggaggcctcaggaaacttacaatcatggcagaaggtgaagaggaagcaagcatgtcatggcaaggcaagagagagagagagaatttggggggaagtgccacacttttaaaccatcagataccgtgagaactcactcactctccacccccatgatccaatcacctcccaccagatccctccttcaacatgtggagattacaatttgacatgagatttgggtggggacacagaaccaaaccatatc

SEQ ID NO: 303311 - DNA, 501 bp, Homo sapiens
tgtgtatttcagtattgtagttcttcagggtttcacgtttgtttttctgttcttactctagaatcttttcttgagtaattttttccagtatcatgtcttcaatcgcacccaacgtattacagactgctcaaactgtttattgagtagctgtatatagatcttctgcatacgggtgtgtattagtctgttctcaccctgctataaataaccacctgatactgggtaatttatgaagaacagatgtttaattgtgactgggaggcctcaggaaayttacaatcatggcagaaggtgaagaggaagcaagcatgtcatggcaaggcaagagagagagagagaatttggggggaagtgccacacttttaaaccatcagataccgtgagaactcactcactctccacccccatgatccaatcacctcccaccagatccctccttcaacatgtggagattacaatttgacatgagatttgggtggggacacagaaccaaaccatatc

SEQ ID NO: 303312 - DNA, 618 bp, Homo sapiens
acttcctagagacttgttgaatggctttgaccaaaatgctgatagcgatatgagcaatgaagtccaggctgaagtcgtctcagatggggaggagaaacttgttgagaactagaataaaggtgactctttctaagttttagcgtagagactagtggcattttgcccctacattagagatctgtgaaactttgaacttgagagagataatttagggtgtctggcatgagaaacttctaaacagcaaagcattcragagggaacttgggtgctgttaaaagaattcaggtttatgtatagacaaaggtatggttgggaattggaatttatgtttaaaagggaaccagagcataaaagtttgaaaactttgaagcctaacaatgtgaccaaaataagaacccacttcctaaggagaaattcaagccagctgcagaaatttgcatgagtaacaagaaacaaatgttagtcaccaaaactgtggggataatgtctctagggtatgtcagaggtcttcacagcagcccctcccaacacaagtctggagacctagaagaaaaaaaatggtttcatggaccaggcccagggccttgctgatttttgcagtcttgggaattggtgccc

SEQ ID NO: 303313 - DNA, 567 bp, Homo sapiens
tctataaagcagctacctattttcattgctaataataaaagattataaccaaactctcattttaaaataatttgtatttacaaattgaggttgaatatgcatatataacagcaatagtttccaaaattaggcaaaaacatcacaaatgattttttataaaatagagtttgggagcccttatggtactcatgaatgaacgaacttttcatgatgattaagaaattactttttagagtaatagaattcatatatgtgtgtatttatattttgtgttaagtggaagagtagtttctgagttaagaaaacaaagtatttgctttgaccatataaatatgtaasaaatattcagcaaaaacaggaaatagaatatcttctacacagagtaacaaaagcagcttttggcattttcactgatgatgggaatatcaatttcaaaacagacagatctgaactactatagaaaactgtgttcataccaagaagcatatatttttacaaagagaaaagcaattatatttaatatctgttaaaagctacagtgtattttcaaagttgcaaaaaatagat

SEQ ID NO: 303314 - DNA, 589 bp, Homo sapiens
gaataccacatgtattataccacaaaggaataccaatgtaccacaacacttagaattgggggtatcatggtgaactcatagattttaattaagacagatatagaaatatataggtaaaggttgagaaataggcatagttatttacaagttctgtccactttgtgggtttagagaaataacacaccagaagaaacatgtttaagtttgtatgcaacattctggaaagtcatttctaatgaagtgatatatttgtataaagccytgaagaaagctaaggaattagtcaagcattaattcagaggaagggcatgctatgtccaaggaaaaagttgtatgaaatgcctgacatgttaaaaaatttagaaagaagataaatgtgaagggaatatagttgataatttcaaaattttaatacagtgcaaaatattataagctcttgcaagtctttgtgaggacaattcgctgttgtacagattaacacattggaaggatacatcttataaatagactgtagaaaggcaatagaataatatctgtcaatgatgatgatgacttggtacaagatgataactaaaggtgaggtaaaaag

SEQ ID NO: 303315 - DNA, 589 bp, Homo sapiens
gaataccacatgtattataccacaaaggaataccaatgtaccacaacacttagaattgggggtatcatggtgaactcatagattttaattaagacagatatagaaatatataggtaaaggttgagaaataggcatagttatttacaagttctgtccactttgtgggtttagagaaataacacaccagaagaaacatgtttaagtttgtatgcaacattctggaaagtcatttctaatgaagtgatatatttgtataaagccctgaagaaagctaaggaattagtcaagcattaattcagaggaagggcatgctatgtccaaggaraaagttgtatgaaatgcctgacatgttaaaaaatttagaaagaagataaatgtgaagggaatatagttgataatttcaaaattttaatacagtgcaaaatattataagctcttgcaagtctttgtgaggacaattcgctgttgtacagattaacacattggaaggatacatcttataaatagactgtagaaaggcaatagaataatatctgtcaatgatgatgatgacttggtacaagatgataactaaaggtgaggtaaaaag

SEQ ID NO: 303316 - DNA, 442 bp, Homo sapiens
actagctatattcactgtgctgtgcagtaggtctcaaaaaacatcaaacttatttctctgacataactgaaattttctacctttttattttcattccattctccctaccataccccccagaccctggtaaccactattccactcattgtttccatgagtttgatttagattccacatataagtgagaaccagtagctcttgtgtttcaatgtttgccttatttcacttagcataaggttttccaattttatccatgttttcataagttacagaattcttttatggtkaaatattattccattgtgtatatttaccacatttactttatccattcatttggtgataaacacttaggttgatgtcataactcagctattgtgaatagcactgtgataaacacgggtttgcagatgtatgtttaacatactgatttcagacctct

SEQ ID NO: 303317 - DNA, 442 bp, Homo sapiens
actagctatattcactgtgctgtgcagtaggtctcaaaaaacatcaaacttatttctctgacataactgaaattttctacctttttattttcattccattctccctaccataccccccagaccctggtaaccactattccactcattgtttccatgagtttgatttagattccacatataagtgagaaccagtagctcttgtgtttcaatgtttgccttatttcacttagcataaggttttccaattttatccatgttttcataagttacagaattcttttatggttmaatattattccattgtgtatatttaccacatttactttatccattcatttggtgataaacacttaggttgatgtcataactcagctattgtgaatagcactgtgataaacacgggtttgcagatgtatgtttaacatactgatttcagacctct

SEQ ID NO: 303318 - DNA, 479 bp, Homo sapiens
ctggcaaactgaattcagcagcacatcaaaaagcttattcaccatgatcaagtcagcttcatccctgggatgcaaggctggttcaacatatgcaagtcaataaatgtaatccatcacacataaactgaagcaacaacaaaaaccacatgattatatcaatagatgcagaaaaggccttcgacaaaattcracagcccttcatgctaaaaactctcaataaactaggtattgatggaatgtatctcaagatatacaaccactagatcaaataaaataacacaaatggaattagaaattgcatagagtaatgaaaacaaaaaacacacataccaaaacttatagaagatggtaaaaatagtgctaaaaacatttatagctataaatgcttacattaaaaataagaaaaatctcaaatcatcaacctaagtttacaacttacaaaactggaaaaagaagcacaaactatacacaaatctgtc

SEQ ID NO: 303319 - DNA, 479 bp, Homo sapiens
ctggcaaactgaattcagcagcacatcaaaaagcttattcaccatgatcaagtcagcttcatccctgggatgcaaggctggttcaacatatgcaagtcaataaatgtaatccatcacacataaactgaagcaacaacaaaaaccacatgattatatcaatagatgcagaaaaggccttcgacaaaattcgacagcccttcatgctaaaaactctcaataaactaggtattgatggaatgtatctcaagatatacaaccactagatcaaataaaataacacaaatggaattagaaattgcatagagtaatgaaaacaaaaaacacacataccaaaacttatagaagatggtaaaaatagtgctaaaaacatttatagctataaatgcttacattaaaaataagaaaaatctcaaatcatcamcctaagtttacaacttacaaaactggaaaaagaagcacaaactatacacaaatctgtc

SEQ ID NO: 303320 - DNA, 579 bp, Homo sapiens
aatcaatggtgaaatactgaaaataaacaatttatctgataagaaattaatacgcagaatatatagagaattgctaaaacttaagaacaacaacagcaaaattctgattcaaaagttgaatggacatttcttcaaagatctacaaatggccaagaagcatatgaaaagatgctgaacaycattaatcactaaagaagtgtatattaaaaccacaatgagatatcacctcacaaccattagaatggctactctttaaaacacacaccacacacacacacaacagcaaataagttttggtgaggatgaagagaaattgaaatcttcgtgcaatgtgcactgttggtgagaatgtgtttttatagtgcatccactatggaatacaatatagcagttcctgaaaaaattaacaattgaattaccatatgatccagcaattccaattctaggtatatgctcaaaagaattaaaaacagggtctcaggaagatatgcattccccatgtttatatcagcattagtcacaacagtgaaagcattgaaaaaactgaccatttatatcagcagaggaaaatagggtata

SEQ ID NO: 303321 - DNA, 522 bp, Homo sapiens
caccactgaaaatacgttaaaaatgattaaaataataaattttacatagtatgcattttaccacaataacaaaaagagagagtgaagagtggtcaaattgtatgctacttaatatctgaaacttcaaaaaagcaagaattcaaaagcagaatatcgagggtgtttatcccaayaaaaagtcatcatcctctgcttagttcccaaactcgagtcaacttttatttccaggttcattgactaaagatgtgtttgggctttgtgaaggaaggaccctacaataccttaataagtatacaccataataattccttcagtccatccccaaagggacctacagtcacttaactgtagaatgagagcagccagactgtaggatacaatatttgatttgatgttggtgcctcaagaacaatgagcaaaatgttattatgtcccactgctaaaataataactagagccggataaacaatgaagtcttggctaaaggccagttcacagtgggtttactgaattcataaatcc

SEQ ID NO: 303322 - DNA, 583 bp, Homo sapiens
aaaaagatttctttttaaaattaagctctaatattatgtgttcagtgaaatttgtcttgaytttaccattcttctctcttccttgaaatcataattagttgaagttgtgtgtgtgtgtgtttatagcatattttatacatttctatttaaactttaacttgaaacatttggaagcatataaatctttctcactggtctttgtgatctaaaaatcagaaacattgtatgaatcatgtttctgtcttcatggccttgttggagctcagaaaccaatacaccaaactatgacactttgatgtgctaaactgaagaatcctcaacatctctctgatctgagcctactcttcctgtctctcaaacctgcctcttccaaagaacaggatgaagttgttcttggaagttaccttatctgcctaaagtctggacataacaaaaaagaaaacaagtatctcaggtcccttctcttgtgttttactaactgaattcacattgcaggaagactgaagtctatcaacacacctgaagagacttcagtgacaaaccagtgttctgccaacccaacagactttgtcccaggtgactg

SEQ ID NO: 303323 - DNA, 583 bp, Homo sapiens
aaaaagatttctttttaaaattaagctctaatattatgtgttcagtgaaatttgtcttgattttaccattcttctctcttccttgaaatcataattagttgaagttgtgtgtgtgtgtgtttatagcatattttatacatttctatttaaactttaacttgaaacatttggaagcatataaatctttctcactggtctttgtgatctaaaaatcagaaacattgtatgaatcatgtttctgtcttcatggccttgttggagctcagaaaccaatacaccaaactatgacactttgatgygctaaactgaagaatcctcaacatctctctgatctgagcctactcttcctgtctctcaaacctgcctcttccaaagaacaggatgaagttgttcttggaagttaccttatctgcctaaagtctggacataacaaaaaagaaaacaagtatctcaggtcccttctcttgtgttttactaactgaattcacattgcaggaagactgaagtctatcaacacacctgaagagacttcagtgacaaaccagtgttctgccaacccaacagactttgtcccaggtgactg

SEQ ID NO: 303324 - DNA, 313 bp, Homo sapiens
gtacatctatctaatatatccttcattatggcctccagcatgcctcacctatgttattgcggtatcctgcaaattggtctgcccacttcagtcttttttctccaatccgttttattttccctaaaataaaatgtagcattttttcagatcttcacaaaactgtcggaattgagaaccagacatayattttaaaaatctgcaaaaataaattctgaaaggtctttttgtttagggcaagcagtcgtggaataagcatgtaaactagttagcttctcaagtatacacagtggcttctctgtttgacgttacaaga

SEQ ID NO: 303325 - DNA, 594 bp, Homo sapiens
atcttaggaaaatgagcaaattataaaaagaactgccatttattacaaaaagtgtattaaatgtagcttgttcttatcacctagaaaaaaattaaacagaaaacattaattgaatggatttctcaaaaatttaaaacactgattatgaagaaartggaaaatcaaaatattgatttgtttctctagtaagcatgacatatttctgaactgaaaagtgccaattactatactcattacattaagccttttggctacttgtgtgctgttataataaaataaagaaattcttatagaaaagaatgcatccacttccattgccctcagtggagatgtaattgtggttattttcccctttctgaagtttctatggaatttttcaggtaaacattatggaattatttttttaaatattactgtacataaaacaatatcataggaatatgtaaaaaagtcagtatattttgtattacagagtaaatgttgaataaatgataattattgttcattattttaaaggttaccattgaatttcactaaaaataaatattttattagtcaaattggttgcagcaggatactaacttttgatagtaa

SEQ ID NO: 303326 - DNA, 603 bp, Homo sapiens
tgttttaaatagaaaaaatagatcttggtgactagatttgggaatgaggaagctcaagaaaactagagagtctccaaggtttcaagttggcggaataacatgtggaactattgacagagatgggggatttaaaaacaaaacctgttttgagacatgatgagttcagtttgggacagactgaaattctatttatgttgcttttgggtatagatgtctagcaagarctcaaaatagaattttagatcactgatttattctactttgatacaactgtatgaatcaaattagttaaagaaaatgtatagattgtttaaagacaagtgaggattaaatagaaggtaataaaggtgatggtaagaataactctaaaatcttatgtgttttttttcctctgcttgagtccctggcttgtttccctagttttaccataaagaatgcctattttatcattctctagtgcctaaattttgtaaaatcaaggacatctgtttatttatattttacagtctacagaagttataataatgtttatagttaggaatatcactaaattttggcccagaaattagcctttagtggagctagctaaacatgtcggcacca

SEQ ID NO: 303327 - DNA, 603 bp, Homo sapiens
tgttttaaatagaaaaaatagatcttggtgactagatttgggaatgaggaagctcaagaaaactagagagtctccaaggtttcaagttggcggaataacatgtggaactattgacagagatgggggatttaaaaacaaaacctgttttgagacatgatgagttcagtttgggacagactgaaattctatttatgttgcttttgggtatagatgtctagcaagaactcaaaatagaattttagatcactgatttattctactttgatacaactgtatgaatcaaattagttaaagaaaatgtatagattgtttaaagacaagtgaggattaaatagaaggtaataaaggtgatggtaagaataactctaaaatcttatgtgttttttttcctctgcttgagtccctggcttgtttccctagttttaccrtaaagaatgcctattttatcattctctagtgcctaaattttgtaaaatcaaggacatctgtttatttatattttacagtctacagaagttataataatgtttatagttaggaatatcactaaattttggcccagaaattagcctttagtggagctagctaaacatgtcggcacca

SEQ ID NO: 303328 - DNA, 408 bp, Homo sapiens
tgttaggcaagaaaatggaatcattaatcacaatgggaattagagatttgttatatgaattaggccttattcatatgtagggagattttgaaagaaaattgaaatgggaacatcagcaaatcagagaaagactcactaaccagttcttgtataatattgctgcatgaataagacctcagaggaaagtacgagaattcaataaatctgcaactgaagagcaatcggtaagcgrggattcagaaagagatctacagaaatttccaggtcctggaaatcttttgcccctttgtaactacctctccaatgggcctccagccatgcactgagtggttgacccggggccacaggggccagcacgattagcagtcaagttgggttccatatctaagtggagtttagatatggaga

SEQ ID NO: 303329 - DNA, 595 bp, Homo sapiens
attaaccatcacagtgtatatgtaccactttttctttattcattcatctgttgatgcacacttaggttgatttcatagtwtgactattctaaatagtggtgcactaaacatggggatatagataactcttcaacacactgctttcatttattttggattacacctagaagtgagattgttgtatgatgtagtagttctgtgaagttagtacaatctcatggctggtttctggttttatgtttgtgtgtgtgtgtgtgtgttttttttctttttaggtgaaattacaattgaacagtcctcatacaattttatctgtatctgggccagattacttacgttaaggtgagataaacacctcatacttctatgtaaaattaaatcacccaggctgctaggctgctgctgctaacatcagtaaatgaactcttatacacctggaagtagtaagcttgtccagaaataaatttgaatttttttcaacttgtcattctccaaacttctgagcatgttttgcagacttgtttcagtttcataaatggtgacacaaaaataattttaataatattttggggccattttaaatacttggttatat

SEQ ID NO: 303330 - DNA, 595 bp, Homo sapiens
attaaccatcacagtgtatatgtaccactttttctttattcattcatctgttgatgcacacttaggttgatttcatagtatgactattctaaatagtggtgcactaaacatggggatatagataactcttcaacacactgctttcatttattttggattacacctagaagtgagattgttgtatgatgtagtagttctgtgaagttagtacaatctcayggctggtttctggttttatgtttgtgtgtgtgtgtgtgtgttttttttctttttaggtgaaattacaattgaacagtcctcatacaattttatctgtatctgggccagattacttacgttaaggtgagataaacacctcatacttctatgtaaaattaaatcacccaggctgctaggctgctgctgctaacatcagtaaatgaactcttatacacctggaagtagtaagcttgtccagaaataaatttgaatttttttcaacttgtcattctccaaacttctgagcatgttttgcagacttgtttcagtttcataaatggtgacacaaaaataattttaataatattttggggccattttaaatacttggttatat

SEQ ID NO: 303331 - DNA, 532 bp, Homo sapiens
gctgctaacatcagtaaatgaactcttatacacctggaagtagtaagcttgtccagaaataaatttgaatttttttcaacttgtcattctccaaacttctgagcatgttttgcagacttgtttcagtttcataaatggtgacacaaaaataattttaataatattttggggccattttaaatacttggttatataaactatttattatgttgaattgcatacccaaaataayaaatatatatatatatgtacagagacaacataattaaaagtgtgaaatagttgctttctcattttattttctataaatatgtatttttaaaaaactcagaaaaacaagtaaacctaataatctgaatgaaataggacaacattcaaacagctgttaaaatctggtttatgtattagtttttaggctattatttcagttataaacttagcctctattcttacttaaaggaccagcttcagtgcaccctatctccacctcactgataccagtagtatctagcctgttgagaccagcagtcat

SEQ ID NO: 303332 - DNA, 613 bp, Homo sapiens
ctttatgctacttcagggtcccctgttattgttagtctcctcgcacataaaatttaaggaatttaaccattctctayaattaaatcccctcagctaaaataactaatatagtttctgttttcctgagtaatgctgactaatatagtcaatgtgttttaaattctattctgcaattgttcatttgtgtgagatacttagtaataaattaaataaacatttctaaaagagtattctacatttttagcctaaacatataagagaaagcatctgaagcagtcatgtcacacagtagagataattgttgatgatgaaataatcacagtagaggtcatatgtcttaccattatttaaaattatagtggaaggctaaggtgggtagatcacttgaggtcaggagtttgagaccaacctggccaacatggaaaaaccccatctctactaaaaatacaaaaatttgctgggcatggtggtgggcccctgtaataccagctacctgggaggctgaggcaggaaaatcgtttgaacccaggaggttacagtgagccgagattgcaccactgcactccagattgggtgacaagagcaagactttgtctccaaaaaacaaaaaaag

SEQ ID NO: 303333 - DNA, 613 bp, Homo sapiens
ctttatgctacttcagggtcccctgttattgttagtctcctcgcacataaaatttaaggaatttaaccattctctacaattaaatcccctcagctaaaataactaatatagtttctgttttcctgagtaatgctgactaatatagtcaatgtgttttaaattctattctgcrattgttcatttgtgtgagatacttagtaataaattaaataaacatttctaaaagagtattctacatttttagcctaaacatataagagaaagcatctgaagcagtcatgtcacacagtagagataattgttgatgatgaaataatcacagtagaggtcatatgtcttaccattatttaaaattatagtggaaggctaaggtgggtagatcacttgaggtcaggagtttgagaccaacctggccaacatggaaaaaccccatctctactaaaaatacaaaaatttgctgggcatggtggtgggcccctgtaataccagctacctgggaggctgaggcaggaaaatcgtttgaacccaggaggttacagtgagccgagattgcaccactgcactccagattgggtgacaagagcaagactttgtctccaaaaaacaaaaaaag

SEQ ID NO: 303334 - DNA, 613 bp, Homo sapiens
ctttatgctacttcagggtcccctgttattgttagtctcctcgcacataaaatttaaggaatttaaccattctctacaattaaatcccctcagctaaaataactaatatagtttctgttttcctgagtaatgctgactaatatagtcaatgtgttttaaattctattctgcaattgttcatttgtgtgagatacttagtaataaattaaataaacatttctaaaagagtattctacatttttagcctaaacatataagagaaagcatctgaagcagtcatgtcacacagtagagataattgttgatgatgaaataatcacagtagaggtcatatgtcttaccattatttaaaattatagtggaaggctaaggtgggtagatcacttgaggtcaggagtttgagaccaacctgrccaacatggaaaaaccccatctctactaaaaatacaaaaatttgctgggcatggtggtgggcccctgtaataccagctacctgggaggctgaggcaggaaaatcgtttgaacccaggaggttacagtgagccgagattgcaccactgcactccagattgggtgacaagagcaagactttgtctccaaaaaacaaaaaaag

SEQ ID NO: 303335 - DNA, 427 bp, Homo sapiens
attactttttactgaatgtttgctaatatatagaaaaaaaatacttgckgtaggcatcaagatggagaataatggtgctgagttcagtaacttacagtcgactatattttcccattttattttgtgtgcatttgaattgcatatgtactatattttatagttgattttagcacaagacccagatgttcttcacacatctgtttacgtacctttatataaatgaactttaaaatgacactggcaactccagggaccgcactagtctcaataaaaagtacatatttttgtcttgtctacatggggatcatctacgtataagtagatgtcgagtaactagtcatttttcatgtgttcttgcaatgctgttatttacatactcctgatttgttatgcctgaccatctggttatggatgaaatactgcagtt

SEQ ID NO: 303336 - DNA, 524 bp, Homo sapiens
ggaattacaaagaagtgaaaatggccagttcctgtcttaactgatgacattccaccattgtggtttgttcctgccccaccttaactaagtgattaaccttgtgaaattccttctcctggctcagaggttccctcactgagccccttgtgacccctgcccctgcccgtaagagaaaaaccccccttgactgtaattttccactacgtacccaaatcctgtaaaacagccccacccctatttcccttccctgactctttttggactcagcctgcctgaacccaggtgaaataaacagccttgttgctcacacaaagcctgtttggtggtctcttcacacagatacgcatgacacaaagaacactaatctcattcatgaggactacattctcatgacctaaactctcaaagacccacctacaaatatcatcatattgagaattagatttcaacrtttgaatttagggaggaaaaaaatattaaatctatgatgtggtctaatgttctatcagattgtatcttgtctg

SEQ ID NO: 303337 - DNA, 527 bp, Homo sapiens
acgcatacatataggtatatgaaacatgtataattttactggaaatagtgacttgagttgtctcacctaggatagtaatgaaatgttttttgcagtctcttatgaaccttctaagcaacctgaaactaaagacactctttattagctaattagagcatttcttcttctttttttgaagtaaaagttatttttaataggcaattgygtgtcgttagaattaaaaaaacaaattctcaaaagaactaacacatgtttctatgcaccttcatttagaactatgaagagttttcagtcaagaaatggtttcaattcaatttaacaaaaataaaaatgtgaatacataagtataacactaaactcattttacagcacatttttacaggtaattacttttatgaaatattttcagattaccttattttgcaaattgcttggaacatgctaaatttagaagacatgtatacctgaaagttacggtaaaacatttagttaatacagctaattaactgtattaacatttagtaaat

SEQ ID NO: 303338 - DNA, 499 bp, Homo sapiens
tgaatgacaaatgataatttatttatgactttgttttcagggtaaggatattctcttctcttctgagtttattataaatctctttaagtcatggatacatggtgaattgtaacaaacactgactttttttctataaatcttcagataatcaattttattttaaattaatgtccatatgatacattacttgaacagatattctgatgttacaacatcttttaactccttaaataaattcacttggtaatgatgtatcatttttatacaatactttatttgatttgtcaatattttaattcgtaattgtgcatatagttcacaattgagactagtatataagttatttttctttcaccagttttctcccatgtgtggattaacaatttgctagcatgctaaaatatattgggattcttcccctatgttattattctctsaagtagttttatcatacagaaatatatatttattaaattttatgaatggtatttaaattcta

SEQ ID NO: 303339 - DNA, 487 bp, Homo sapiens
aatgggacttgtgcagctcaagcttgtgttgttcaaggatcaactaaatattattttggtaattaaatttatgttgagttttatagaatgattctctcatcagatagtcatattttttctttgtattaatgtgtatatttatttcgttgtttttattgaaataagattgcattactcagttaagtcgtacttgtttatgaagttttgaatatcttgtaattttatgtatttgattctttattattattttttaaatttcagattctatatttgtgagagaaatggtcctgttatcatctttttattgtgtacctttattagagttttggyatcaagattctatgggtctcataaaatagttgaaaaattgtaatacatggaagagttattaaaaactactacaatttttttttctcttaaatgaatggatgaattcaaccaacaaaaccatgtgggcctagagatttttttgtgggaaggttttcaa

SEQ ID NO: 303340 - DNA, 623 bp, Homo sapiens
catcacatcaaattagctgggctgtactttcagttgcctatcaaatacataacttttttacagtaaacttgatataccctcttgtgtactagaaggcataattgcttttataaattgaaaagatatttctaacttcaaacctcaatcaaaaatctttatctttacttgaaacagtcccatctctcccgatcctgctatcagtttctttaaatgttgatattaataatatagttagcatcgggcagttaactagagacaagtatgaatatctgctactgtgtgtattaccatttatcctagaatagtttacattgatgttttatactcattttaattgcatcttcacagaaactttatgtagctgtctctgacttatgaaaacctgatttactgatgcctccacccataaatcattgctactgctgcttcttctctttctactcactcttcgtgaccatagtaccttttaccyttttaccacaactatggaggccatataaaagctagtcaaacaaacaagaaaaaaaaaaaaactaaacactaagcacaaaaaaattcaaaagataaataaaatgcttttaaagaatcagtggtaagaagtggaaaaaaacaataaacaagga

SEQ ID NO: 303341 - DNA, 672 bp, Homo sapiens
ttgatgcataaacagtgttagtcttcttcttaactttggcttgatgagaaaattaaagattcttrtaatattctgataaaaaatagcctcctttcccaagatgctagaatattgtttttcacaaaaatggaaaattattgtattccaaatgtaaaaacagaactttgcaagtgcacatttctaggagttcttgatcatgggaatgacatttttaaagcccatgcagagatagggcttgagaatataggctttatgtgagggaaggagctggaggtggttatttgcataaaggagagagttgaaatacactactctctcatccataaatggaaatccatctctgggtggacaaccttaagagtgctatggataagattagaacttgtcttattttctacagctgtatactgaattactcaaaaagttattggcttaaaacagcagcaataaatatctcagtttctaagggtcacggacacacaagtgtcttagctgaatggtcgtgggccttggtttcttaagtggtaacaagtcagagtacattcatctgatggcttgcctgggttgataaattcaatttctttctttcctttttttttcttttgagacagaatcttgctctattgcccaggctggaatacagtggcaccatcttggctcactgcaacctct

SEQ ID NO: 303342 - DNA, 551 bp, Homo sapiens
aagcctaaactgaagttatctatgtgttacagaaatttcagcccacagactttacttatggagatactagttctaagccattccccctgaggtagtcaaacatgcaagttatgtagtacagcaaaaatacagctagtaaagggaatgagcacaacctatgggttctagccaaataggagccatttttgttagtttgtttatttcctastaatcctttaaaatttattcaatagaaagtgcattaaccttcctgtggctaaacatttgttcactttccatgagatttctgataaatcataggtaacagaaaattttgcattagccttaaatagcaaacataatattttcttttttttaatggccaaagcagtttaccagcttttggcatttgagatgaggggcacaagggagatagacgtggaaagacagactttcttccctgtccttgtttttaactgctattactcatttattgaaacacagtaaggataaatggtattaggaaagggatatctttcctcaaccagcattcttgcaagctggggaaatgt

SEQ ID NO: 303343 - DNA, 589 bp, Homo sapiens
aagaattaatgacatcaaaaataagcaatgttctaaactgcttggtgatactttgatagtcctgattaggtttcatttttctccttattcagtgttagaggagtatgttttaatgtccataatatcctctcattccatcaatacctttgaaggtcccaaaatgttcttgatcatcatatcaccatgttagttttaaaaactgattatgcatgtaccccataatcaaaatttatcattagtaagattgatatgggctagttaatcyttaaatttttttttccaaatcacttagagattgtcttgtttagtcagctcaggaacaattattcttattaccacctctttagatgtggtcttggaattagggtgaatttatatcatatatatttgtcaccaatagcctgaaaagagactgttagtggtattccaaaacaaatatatttctcctgaacatataaattggaatttatctctcttatttttttctgtttttcagaagtgttagtgtaagttatatgtagaaaagagggaaaacaaatttcaaacttcctttttttaacctttctttgactatgtaaggcaataccca

SEQ ID NO: 303344 - DNA, 612 bp, Homo sapiens
tatgggctagttaatccttaaatttttttttccaaatcacttagagattgtcttgtttagtcagctcaggaacaattattcttattaccacctctttagatgtggtcttggaattagggtgaatttatatcatatatatttgtcaccaatagcctgaaaagagactgttagtggtattccaaaacaaatatatttctcctgaacatataaattggaatttatctctcttatttttttctgtttttcagaagtgttagtgtaagttatatgtagaaaagagggaaaacaaatttcaaacttcctttttttaacctttctttgactatgtaaggcaatacccataaatctcttcttatcttaaagcctggagatagtatgctgmctgacatacatatctcagaatgtaattctctgctttgttctacaacttttgttgacagcatcagtctagctcctcttttcctggtcactgctgctactgctcctttgttaagtgcctttaaccccaatgggcattttcattaggaccttcatccgggaagccacaaacataatatgagaacatgtactattagctcagcattccatatggcacaattcagttgcatgttc

SEQ ID NO: 303345 - DNA, 531 bp, Homo sapiens
acttaaaaaaaaatggtcagaccagttttgcattctgtgaaccacaaagaaaaaagtagttgctgaatgttttttggtttctgctttacttttcatttggttgtgctagaatggtgaagyctgcctccctagtataaaatgtacatttctactgacatttaaaaaatggctctgagggtttcagacagaagtctctctagatgtgcaagaagtttcaattattctgtttgggaacattgtcattttttttttttttttgagatgctttttggtgtcgggaggcctcagctaagacacgtgggagagttaatgaacagaattgataatgacagataggaaaattgattgtcagacaagaaatggtaggaacataagcagggagatctgtctagggagatggaggatggggctgtcagtgatgggaaatagagatgggttgtggtaggggaaatactatagctactgacagaagacagtgccaacctgagactgggcaatggagctcaaaggcatatgaccatttaggactta

SEQ ID NO: 303346 - DNA, 605 bp, Homo sapiens
tcaatggaagagacccagcaccccgtgagtgattgcaaaggaaggaagatggagtaagtgccaggaggacagcccaaagaagctttaaaaaacacaaaagcaaaaaacccataaccttcttttctgattgagagtagggtggaggtcaggaaaaagcctctaggggagattgcttcaaaattaaacttcaaagggtcaataactctgtgctgttctgccttcttcccaataatgacctaccactgaatatcctgtgaattctttcttttttattttgtgtttttggtattttacagcattttaagaatgtgtttgaagccccaaatgaaaacaactctatcagtcctatttggtcatcacaagcagacttaagctgcacaaacttccaggggcaccattatctgtttatgaacaacaggcaatcaggccaatgaaccatgttattgtcattcctctcatgtctctcaaatcatttttcatcttgactaatcaggagataaagttgatccttctccactttccrcctccatactcatttcagttccctgcagtttcacgctgggctgggctgtttgaaatctagtataaaacacccgagaagagct

SEQ ID NO: 303347 - DNA, 606 bp, Homo sapiens
gccacctgcaccagaacaggtgctggtatccatggctgagagacccatagacagttcacatcacaggactctgtgcagacaagccccagtaccagcctggagccaggtagacttgctgggtggctagacccagaagagagataacaatcactgcagctcggctcacaggaagccacatctataggaaaagaaggagagtactacatcaagggagcaccccatgggacaaaagaatctgaacaatagccttcagccctagactttccctctgacagatcctacccaaatgagaaggaaacagaaaaccaactctggtaatatgaccaaagaaggctctttaacaccccycaaaaaccataccagctcatcagcaattgatccaaaccaagaagaaatccctgatttacctgaaaaagaattcaggaggttagttattaagctaatcagggaggcaccaaagaaaggtaaagcccaatgcaaggaaataaaaaaaagacaatataagtagtgaagggagaaatattccaggaaatagcataaagaaaaaaaatcaaaacttcaggaaatattggacacacttatagaaatgcaaaatgttttggaaag

SEQ ID NO: 303348 - DNA, 455 bp, Homo sapiens
attgtacaggggattcacactgaacctagaaacagttcttgggtctaaattttgattctgctacttggttactaggataacggaggagaccaagttaatatttcatctttgtggggggcagctaaaaactctcatggatgggaagagctttgcactgaatgtgaaggaccaccatggctgtgactggtggtactcatgaaaccattactggcctctaatattcaccttactgaatgtattagtttgctagggctgctgtaacaaagtaccacaaacttagtggcttgaacaacagaaatgtattgtctcacaattctggaggctggaagtcggaaatccagacatcggcagagttggatccttctgagggctgtaaaagagaatctggtccatgcctctcccccrtcttttggtggcttgctggcaacctttgttgttccttggctcatagaaac

SEQ ID NO: 303349 - DNA, 656 bp, Homo sapiens
gaagacctggcacatggaaaacacattagtaaaggtattttacaagagaaaatcgaagtgatccagtggttcttagcctgttctagatgtgctggaagcgatctcccccacaatacacttacatgtgcaaacgtacaaacaatctggggaggggggtgttataatattcctgagacccatatggagaccttatgggccatgatttctgcttaagaactcctgaagaaaactctgtaaggctgtgctttattagttattcagtgacatttcttaagtttgcctgacaactagagaagcactatctagatgttccataaatcaactgaatcataatgttgtacgaataatactctttggcaagggcccgaaatagagtaagagtaggaactttgacgggagaaataaaaagtcccaaatttcacattaactgagaatccagttagcagttatccaaaaataagaaataaagtgcctyattatgattctacaaaattagaaaaagccaaatgtgagatgttaacagtttttagagtctgaatcccagagatgtcaaagtgatctcttggactcctggccgtgctgaccatgaccctgacagtgactatgaccatggccctccatttgcatgggatgtgcctgcccagggctgcccaagc

SEQ ID NO: 303350 - DNA, 555 bp, Homo sapiens
aagtgtggtttcttcttcagataaagccaattagacaacgcaggtggtcttctcaatgaccatggtaaagttagaatgaaccatgtgtgacaaaaggtcctgtcaagttttcttacttgagaaataatgatagtttatcttgaccatgtgtatgtaatgggttgtgtgtgcttgactatatagggggatgagctttctttccgtctttgcagtcctttagcaaaytgcctgcgatgtccatcacattctggttgaatgcttgttcaataataaaaagtgttttctttctcttctatttctgtggaattgttatctggattgagaggcgattttgtttttaattatatttccccaacacctttaagaaggtgggtgtccccacccaaatctcatgtcaaattataatccccatgtgtcaggggaggggcctggtgggggcagatttccccttgctgttcttgtgatagtgagtgagttctcatgagatctgacggttcaaaagtgtggcatttcccacttcgcactctctctctcctgctgccatgtgaaggtgtg

SEQ ID NO: 303351 - DNA, 593 bp, Homo sapiens
ctgtgataggatccacggtgatgcttttatgtttcctttatcttcactgagaccttgggaagaggtttggaagcccgaggaagatttgttattgaaagaggagacttttctggagaatctggcacacaactttgttttgctaggctttcaggaaattaatagtcaggctgcattccagcctcaggacctgggctggtggcagctgctagatatttggtctggcaattaaaaatgtcactattagaaaccttttgcaaattaagacaaatactaggtttgttcctgcttgctgggggacacacttttgccttttcagctagagctaattatctgcacctgagaaaattgctatccaagtgatgatcagcctgggggatctgtgaactgccctccagaactttctgttctcagcagtctttattacctgagaaagctaaagaatttctacattgcatggaagaccgtgtgagagaacgactttcctccttatgtgtgtgttaactcatctatctgattacacrctgagttaagctgatgatctataccacagcttttgtgaaatgcttgtctgatgatgggtgagagtaattgat

SEQ ID NO: 303352 - DNA, 645 bp, Homo sapiens
tgaacaacatagatatagagcatttctaacatgccaacaattcttttggacaggcagctccagatgcttgggtaggatgagttagtctacagaatgaacaccacagctaaggacaattaaaaagaggtctccccatgctgttcttctcaggttctgagattccaaggctggtggtgcaaccaatcagcaccttgtctcccctctcacatcctgccatctccatgtatggtttatttycctatgagactctgagcttcttgggagcactgtctgtcattgattaattttgtttccacagaataaagcacaggacttgatataggataggcctcagtaaaatgtactaaataaaattgtgagttaatgttctttaaccattcagtattatttttaaaacaattgtattcaatacaatggcaaaagaaaaatctgtctttttggtaaagaggaagacatattgaaactagctgttgcttacgtgggaatcagtgttaagtttccttctcctgggggagaaggctctgacactttgctgggggtgaagggcagtaggacaggaggatggcagggctgagcacaggttctcagtaaacataggcttacaaactaatcctccacttggggattagctctgcctcttgcaca

SEQ ID NO: 303353 - DNA, 519 bp, Homo sapiens
agaaaagtatccagtttatgtgtgcagggttagagggtcttctagaaacctttttgcagacagtgcttgcccttaaccagtctctyccactctctttgcactcctcctcccaccctacaggcatttgatgtgacaaataaaaactaaaccctatgcagcacattggactcacaccttattctcaaaaagaaacaaagttttgcaaaagttcttagccaacctaaatgagcaagtggctcattgaaataggaaatgttatatcttatgctccttcactgtaataataacagcaacactaattattcttcacattagtatatcagctggtgatttaaaacatgtattcatctccattatctgcccagtgcctgctatgtgccattctctgaagttggcactgggaagtcaaagatgattgacttgaaagtaggatattttattcatcaggaaaaaatgatcatgaaaacattatgctgagaagatgcaccgcaggaagctctgggaagggatagccaattg

SEQ ID NO: 303354 - DNA, 565 bp, Homo sapiens
tttaatattgaaagcttctttccagatatagacagaaaaactgaaaagtaggtgaaattgatagaacagagctattttcattcttaggctcattattcttcccactgaagctggggaatgggtaagagccacagcagccttttttccctttttactcccaaaggaaccccagaagcatgtctctttcactcttgagcactgaagagcagtttgaaagccataggaccgagggctcttggaatcctctactctgaaagcaagtacttctatgaaactcaccaagaaatctggtttttaaaaaaatgataacagccaatagctaatatttatggaatattgyttatcaggttgtgttctaagagcctttcgcaaccccgtaagttaggcatattgtcatcaccattttagagatgaagtaaatggaacatgaaagggctgtgactcacccagggccatgcaatttttaagaggcaagattcaaacccagacagtacggctccaaaggccatgataataaataataaccattatgctatactgctttttaacagtcccacaaatgtgt

SEQ ID NO: 303355 - DNA, 565 bp, Homo sapiens
tttaatattgaaagcttctttccagatatagacagaaaaactgaaaagtaggtgaaattgatagaacagagctattttcattcttaggctcattattcttcccactgaagctggggaatgggtaagagccacagcagccttttttccctttttactcccaaaggaaccccagaagcatgtctctttcactcttgagcactgaagagcagtttgaaagccataggaccgagggctcttggaatcctctactctgaaagcaagtacttctatgaaactcaccaagaaatctggtttttaaaaaaatgataacagccaatagctaatatttatggaatattgtttatcaggttktgttctaagagcctttcgcaaccccgtaagttaggcatattgtcatcaccattttagagatgaagtaaatggaacatgaaagggctgtgactcacccagggccatgcaatttttaagaggcaagattcaaacccagacagtacggctccaaaggccatgataataaataataaccattatgctatactgctttttaacagtcccacaaatgtgt

SEQ ID NO: 303356 - DNA, 565 bp, Homo sapiens
tttaatattgaaagcttctttccagatatagacagaaaaactgaaaagtaggtgaaattgatagaacagagctattttcattcttaggctcattattcttcccactgaagctggggaatgggtaagagccacagcagccttttttccctttttactcccaaaggaaccccagaagcatgtctctttcactcttgagcactgaagagcagtttgaaagccataggaccgagggctcttggaatcctctactctgaaagcaagtacttctatgaaactcaccaagaaatctggtttttaaaaaaatgataacagccaatagctaatatttatggaatattgtttatcaggttgtgttctaagagcytttcgcaaccccgtaagttaggcatattgtcatcaccattttagagatgaagtaaatggaacatgaaagggctgtgactcacccagggccatgcaatttttaagaggcaagattcaaacccagacagtacggctccaaaggccatgataataaataataaccattatgctatactgctttttaacagtcccacaaatgtgt

SEQ ID NO: 303357 - DNA, 565 bp, Homo sapiens
tttaatattgaaagcttctttccagatatagacagaaaaactgaaaagtaggtgaaattgatagaacagagctattttcattcttaggctcattattcttcccactgaagctggggaatgggtaagagccacagcagccttttttccctttttactcccaaaggaaccccagaagcatgtctctttcactcttgagcactgaagagcagtttgaaagccataggaccgagggctcttggaatcctctactctgaaagcaagtacttctatgaaactcaccaagaaatctggtttttaaaaaaatgataacagccaatagctaatatttatggaatattgtttatcaggttgtgttctaagagcctttcgcaaccccgtaagttaggcatattgtcatcaccattttagagatgaagtaaatggaacatgaaagggctgtgactcacccagggccatgcaatttttaagaggcaagattcaaacccagacagtayggctccaaaggccatgataataaataataaccattatgctatactgctttttaacagtcccacaaatgtgt

SEQ ID NO: 303358 - DNA, 595 bp, Homo sapiens
tcagtgtgtgaggggaggtgccctagccacttcatagagcagggctcatacaccaaaggctacaggactccacttgaaagagcacccagataagaaaaatgtccaaagtgtgtgcccaatttgataamataataatagcgcagatgtagagttccgagatgaactgttcccattcagcactgttcaaggaggtgcccaccttgcactttacattccagttataataaactgattgtattttcccaaattcatcagacattatgcctctatgtctttgaaaatgtggatgtcactgtttgaactgattttctctgtgttaatgtgaaacactcttatttatgcttcaaaactcaactgtaaaaagaaagagacagaaagaatgaaagggaagaaggcagggagggggaaagaagagagagagagagagaaagaaaagaaagaaggaaagagagagagagagagagagaaagagagagagagagagaggtattctcccctccacaccaaaaaagtaagaaaaaaaaaaaaacccaacttacataaatccaactcatagaattctaatataaaatctgtagcatccctagataaagca

SEQ ID NO: 303359 - DNA, 595 bp, Homo sapiens
tcagtgtgtgaggggaggtgccctagccacttcatagagcagggctcatacaccaaaggctacaggactccacttgaaagagcacccagataagaaaaatgtccaaagtgtgtgcccaatttgataacataataatagcgcagatgtagagttccgagatgaactgttcccattcagcactgttcaaggaggtgcccaccttgcactttacattccagttataataaactgattgtattttcccaaattcatcagacattatgcctctatgtctttgaaaatgtggatgtcactgtttgaactgattttctctgtgttaatgtgaaacactcttatttatgcttcaaaactcaactgtaaaaagaaagagacagaaagaatgaaagggaagaaggcagggagggggaaagaagagagagagagagagaaagaaaagaaagaaggaaagagagaragagagagagagaaagagagagagagagagaggtattctcccctccacaccaaaaaagtaagaaaaaaaaaaaaacccaacttacataaatccaactcatagaattctaatataaaatctgtagcatccctagataaagca

SEQ ID NO: 303360 - DNA, 539 bp, Homo sapiens
tatctcgtgttgctgagtttttttccttttcgcccaataaattccatttttctcacccttcaaagagtctgcgagcctaatatttcatggtcatgtgkcaaggacccaatttttagctaaactaaggagaaagtcttacaacattatgatggaaattaagctggagccatcagaaagtctgtccagcacagagaatgatggtattccttcgtttaagagttcaaaatctctgcagctcaaaaatcacctatctagcataactaaacacacacacacacgttattttatcttcctgattacaatcatgacaacctaaattgattgagcatttactatatgccacagaagtttagctcctcatatgctttattaaatttaatccttctcactgtcctattgaaagtttatattattatgtatttcatagataattatgaatattataaattaagtaaccaataatattcagatattactaaacatcataggcatgtagtgagggagccaggatttcaatccaagtgtgtttaataccggga

SEQ ID NO: 303361 - DNA, 539 bp, Homo sapiens
tatctcgtgttgctgagtttttttccttttcgcccaataaattccatttttctcacccttcaaagagtctgcgagcctaatatttcatggtcatgtggcaaggacccmatttttagctaaactaaggagaaagtcttacaacattatgatggaaattaagctggagccatcagaaagtctgtccagcacagagaatgatggtattccttcgtttaagagttcaaaatctctgcagctcaaaaatcacctatctagcataactaaacacacacacacacgttattttatcttcctgattacaatcatgacaacctaaattgattgagcatttactatatgccacagaagtttagctcctcatatgctttattaaatttaatccttctcactgtcctattgaaagtttatattattatgtatttcatagataattatgaatattataaattaagtaaccaataatattcagatattactaaacatcataggcatgtagtgagggagccaggatttcaatccaagtgtgtttaataccggga

SEQ ID NO: 303362 - DNA, 510 bp, Homo sapiens
ctccagagaaagataactttacacagatgaaagcagaattagactgaattcttccatkaaatcttcacaagtatattatataaaagttttgtaaacaaaactttcgggaagtgctgagatggtaaagtgacatagcttcctttattgaaggaattcttggtgatacaaagccatttgcagaaagactaggaattcgcttcatccaacagtcctaaaaggcttaacccattccagcatcaacccaagggcaaaatctcatatgtcatcaactcaaatggtcccaaatgccatctaagtgaggtataggtgagactctggatatgacccatctttgggtaaaattcctgtacatctatggatctatggactaggaaacaagttatatgcttccaaaatggagtgctggagaggcatggagttaacattttcattctcctagggaagcaggagcctaggaaagccagggtgacaccattttaaaaatgacctcatctttaaactagcaaaaca

SEQ ID NO: 303363 - DNA, 548 bp, Homo sapiens
gaagataaaccaaactgtatatacacacaaggagtttaccgtcttgtaaggaagatacacacatatactcccgacagagatacacaatagtattggaaggatggagcagaagggacaaagttaggagacatttgaaaaatggattcaactggattatgatacatgatttttgactgaaatgcattaaacatttccakaagtaggtactttgctaagccctttccatgcaaaatcacatccaatcctcacaataactctatgacatgggtattactatcctcacttacttgcaaatgagaaaactgaagctcagaaagaaaagataggcagctctaccaagctttaaaaaggggataaagttaacatttaagcccagttatgtctggttcctgagtctgctctcttaaccatgatgctatatgactttctgagatactggggttagagaaaggggagataaatatgtggctgagttttcaagtgaaggcaattacaagaatgatggtgtgtttgccacacagcagagcaactcccatgttcagttttta

SEQ ID NO: 303364 - DNA, 548 bp, Homo sapiens
gaagataaaccaaactgtatatacacacaaggagtttaccgtcttgtaaggaagatacacacatatactcccgacagagatacacaatagtattggaaggatggagcagaagggacaaagttaggagacatttgaaaaatggattcaactggattatgatacatgatttttgactgaaatgcattaaacatttccataagtaggtactttgctaagccctttscatgcaaaatcacatccaatcctcacaataactctatgacatgggtattactatcctcacttacttgcaaatgagaaaactgaagctcagaaagaaaagataggcagctctaccaagctttaaaaaggggataaagttaacatttaagcccagttatgtctggttcctgagtctgctctcttaaccatgatgctatatgactttctgagatactggggttagagaaaggggagataaatatgtggctgagttttcaagtgaaggcaattacaagaatgatggtgtgtttgccacacagcagagcaactcccatgttcagttttta

SEQ ID NO: 303365 - DNA, 563 bp, Homo sapiens
acactcacctcatctctggccttaagcaccatcattggcctctggatacctcaggatctcaaaaaaaatggactcccaggaattcagggagttcattttaatggcagcaacttttactgttatttctggcctacagagaagagacttcatgargcttcgcagagctttttgggaggcttcccattcacagccttggtagaaggagtgttgctggtccttctcacaggacataggtaggaggtgaatgagcaagtgttacatgaaaaagccactccagtattccaagctcctcaatccaggataatttcctctatcataaaccaataaaacgttactttaactttatttagtgtaggccactctagggtttaggttccaatcaactaagcaagaaaactatgagagccacttctgtcatttgcccattttctgacaaaatctcttttcctggagagtaggcctttgttatcaagaaggcttggggcatatttcaaaatggttacttttctcctgccatcttggacataacaaacggacctttctcagagccctgacttgaaaac

SEQ ID NO: 303366 - DNA, 593 bp, Homo sapiens
gttcaacatattccctgacaaccataccagtttgatttgagatcaacttagttgaaacagcttgatgcattttattgatttttgatggcaacattaaagaaaaaggcctgagggactgggctgctcatttcgtttttttccctgtggatatgagcgaacagcaaaaaaagactggaaaagtggcaactcgcagtgatattagggatcctgcaaactcccttttcgtggggtgcaaataccccaagttgatcacaagttctcttaaatcttgagtgtggcttcactggagaaggccagaggtggggtttatggccacaggctgcacagacctgcccttccctctgtccaygtctctcactcttcaagctgctcacttggagtgctcagactctttggatggctttgtcttttgaaggggaggacgctcaggtctggaggtcaggaagaatacagtacggagaactaaggaccaggcttgagtttagaccctgaagaatggattccacagcttctatgtcatcagacatatcctgccatcaagaaaagaaggtagatattgaagtgaagaacaaggtctggaaagaaagaaagcc

SEQ ID NO: 303367 - DNA, 552 bp, Homo sapiens
ccagttctacactggagtctctcttcctctattgcaatagtctttggaataaaatctatcttcactgccttaacttctgtcttctgtctggctgtgtttttccctaacagctagtgataacaacggttatcaccttacggggttgttgcttagactaaatgatctgcctttcacaacagtacctggcacacactaagagctcagcaaatgttagctgttattatctaactctttgtaccacattatgtggcttctgaaaaatgtcaacaaacactcactgcatgcatggaagaggtaaagggccaaacactggtggaggagaaagatcagaggctggcagtagaaacatcttgtccagcttgtccctgcagttatctatayggctggtaatctcctctccctctgagatttagatccctcatctgtaaaatggtagtggaatttctccttcttggcagcccttgtgcctgctgtgaagattaaagtctacatcaacatgagagcgattggaaattggctggcactgcgctataagggagtgcaagtgcacag

SEQ ID NO: 303368 - DNA, 605 bp, Homo sapiens
cagttattaatatctattttcccaaaagctactgtatttatggctctgtgttacaccttgtagagacacagaaatgagtattaagagagagagtcaggaaaaatactgaaagagaagagtgtagtaatacaatagatacttgtgcaaatatcatatttttttccttcatagaccatatatttgcaggaggcaaagtggtataaggaaaaagtgtttggtaattgtcatcaaaaaaacctgggtaccatcacrttaactggctgtggaattgaactttcagttcttcttctgtaaatggggataataatatctccttcttggagtatatcgtaagattgaattgagcaataaatataatgtgctcagctcatgacaccaactcaataaataaaccaactcaataaataaatagttgagtaatcagaatttagtccacagaaaaagaatcagatattttctgtgtacctgaaattgagatggtaaaaatccactcaaaataagaacaaacaaaggcaagaaaagtatcatgtagaaggagtttcaaggcatattcttgctcattagtatttactacaatttaaaatgtgtttgctcaccagtattta

SEQ ID NO: 303369 - DNA, 512 bp, Homo sapiens
gcattattttcttccacttaatatgtctgcactggcacctgcttcgcacccagtgaggtgctaggtgctgtgaaaggtattgccgtcaggaacctcacaatctgctggtagaggtagatgcctacacaacagaccattctatacagcagaataatggcagtgctaggaaaaggtaatgcagggctgtgaagggatagaaaggctggggtggtagagagggctccatagtagaggtgccacttgaactggagaacgaaggaagaaaaacaggcaaaggacattccacgccagggatttaggccttgctttacagagaaaatgagaggtttttaaaaatggccccagaacattaaaagtgtactttcagacaataatgctggtcacattaaggaatggttggaatggattttagttttctgtrctagtccatctcttattgatcctaagtgtcacaaagtctgggagaggtgaaagaacacagcatctttgagaaataactaacagtttattgc

SEQ ID NO: 303370 - DNA, 512 bp, Homo sapiens
gcattattttcttccacttaatatgtctgcactggcacctgcttcgcacccagtgaggtgctaggtgctgtgaaaggtattgccgtcaggaacctcacaatctgctggtagaggtagatgcctacacaacagaccattctatacagcagaataatggcagtgctaggaaaaggtaatgcagggctgtgaagggatagaaaggctggggtggtagagagggctccatagtagaggtgccacttgaactggagaacgaaggaagaaaaacaggcaaaggacattccacgccagggatttaggccttgctttacagagaaaatgagaggtttttaaaaatggccccagaacattaaaagtgtactttcagacaataatgctggtcacattaaggaatggttggaatggattttagttttctgtgctagtccatctcttattgatcctaagtgtcacaaagtctkggagaggtgaaagaacacagcatctttgagaaataactaacagtttattgc

SEQ ID NO: 303371 - DNA, 559 bp, Homo sapiens
ccacagccagatctccaactctcacacctgttccagtgtttttcactgctgtaccttaccagctggttattctaagaaggaatcatgtgttcacaaactctggctccagagaccattcccttctctcaagactgaaaaatgtaataataataacttaatgaagattaaaaataaatacaagtaatcccagcttggtacttttaaaataattttgatggctatatgatattctatcactgccagattcctatttagaaaattttaagttttctcttatttaaaaaagttttaccttatttaaaaaactgtttaagaaaacttacttttctttttctaaaaaagggaggaattgctctcaacttctttaggcacaaaatgttttctctactaaaaatcatctctaaaggatatcttccagaagtggagttacrgaatcaaaaggttagactcatttatgttgacaagcttttttcccaaaatagttgtcccagtttacaccaaatttggaacattttagcctcagttatgaatgggaggcttgagagataactgtaggtgt

SEQ ID NO: 303372 - DNA, 530 bp, Homo sapiens
atacatctataaataagcaaaaaaaaaaaagcttgagtttagagatgctcagaataccctattatgtttgcaaactctcttttgctgtagattgcagtgcagttgcatttgagttcttgcatatgagttaggatgttcctggagactctataaatgcaaaatcattataattaaattttggaattttaacttacctttatagctatttataaacgtgtttaatgtgttttggataattaagagaaattagtttttatcctcaacatgaataatttttatgccctgctaaaatgcactgcaattcatggataaggtaatttgaggctttcaaaacccaaatgrggtttttacctggggatgttcttggggttattacgggttactagggaaagtgactgcagactttggatgttgcagcaagctaaaaccttgtgctgtgctcagatggcctgcggtattctgcctaatggtggaatacaaagatggccaaaccaacagactgatgactattttgattcaggaactggaag

SEQ ID NO: 303373 - DNA, 455 bp, Homo sapiens
gggtttctactgagggtgtagcctgttgtacccactgaagcaaatggctttgatcagtccttccctggtggytgggctgcatatgtataaacagaggattattgagtgttgggaatgaattctttgccagacacatattttaatgagattcttagaattgcttcaagctctgttttactaattctattcctagttccttagaaaggaaaagacaattaaggaaagagggcttgggccttgctgacttttcacactccttggaataaagttttggtttccatacagttcttctgagaagagtgaactgaccccagaagggctccatcatatgttttataagtaaaactaaatgggcattttcacataattcaagtaattaacgtccatgagacaagtctgtatgtgacacagaagggatacagaggagcaataattctgtttgcttggtatatggt

SEQ ID NO: 303374 - DNA, 455 bp, Homo sapiens
gggtttctactgagggtgtagcctgttgtacccactgaagcaaatggctttgatcagtccttccctggtggctgggctgcatatgtataaacagaggattattgagtgttgggaatgaattctttgccagacacatattttaatgagattcttagaattgcttcaagctctgttttactaattctattcctagttccttagaaaggaaaagacaattaaggaaagagggcttgggccttgctgacttttcacactccttggaataaagttttggtttccatacagttcttctgagaagagtgaactgaccccaraagggctccatcatatgttttataagtaaaactaaatgggcattttcacataattcaagtaattaacgtccatgagacaagtctgtatgtgacacagaagggatacagaggagcaataattctgtttgcttggtatatggt

SEQ ID NO: 303375 - DNA, 534 bp, Homo sapiens
cttccccttccccagcattcttggcctcaacaccctgtttgtttccttcatagcatttcccaacaatttgagtgttaaaatttgcttccttgttttcagctgccttacccaacagatcatgcataggtaccatgtctttcttgtttaccgtggtttctttagtccttagcacagtgcctgtcatataatagatgctcaataaatacctgttgaatgaataaagaaaytgagccataatccagggtcacctaggcattaggtggtttccccttatgtctggtgggcatctaagctcattcctattcgccacttctgtggtacagtgggctggcggccccaaggttgggagttgttgtggtggcctgtgatcttgtatagtctggacccagtcccagggtgatcctcttactttaaccatcattcatttgataataattctcaacctgagtctacacagcactctttccttacctccagtccacgctcccactgccaactgggcatattttgactgaacgtcagaggcctaagaaa

SEQ ID NO: 303376 - DNA, 534 bp, Homo sapiens
cttccccttccccagcattcttggcctcaacaccctgtttgtttccttcatagcatttcccaacaatttgagtgttaaaatttgcttccttgttttcagctgccttacccaacagatcatgcataggtaccatgtctttcttgtttaccgtggtttctttagtccttagcacagtgcctgtcatataatagatgctcaataaatacctgttgaatgaataaagaaactgagccataatccagggtcacctaggcattaggtggtttccccttatgtctggtgggcatctaagctcattcctattcgccacttctgtggtacagtgggctggcggccccaaggttgggagttgttgtggtggcctgtgatcttgtatagtctggacccagtcccrgggtgatcctcttactttaaccatcattcatttgataataattctcaacctgagtctacacagcactctttccttacctccagtccacgctcccactgccaactgggcatattttgactgaacgtcagaggcctaagaaa

SEQ ID NO: 303377 - DNA, 561 bp, Homo sapiens
ctctcttctccgtcttaactcctaacatccttcttggcaacctccaccttcctacracagactcatccaaactccctgggcctcttattttttacccttcttctccaataatgttttaatttgctgtattgtagatgcccatgattactccaaagacattggcagcacccaaaactgccccttgtttaaaattcttatgcaaacacacttctctttaaactcactttacctccagcttacttgctcaactacctccacctcagtgtgctctgtaacctacagatcccaccacattctcatcagctctccctaatcattcccccactggccctgcttggattccaagtcactcatcataaccactcctttgcaaataccctcacatcctttcctcctcttgtcccatagaattcacctccattcttaatgttaaatacagatacagtgtgttctgttacaagatctgttttcataaaaccaatgagctcaaatgtaattggtgaacaggggaatgaattcactataatgtggaagttgcatcggttcctgggcagtttttct

SEQ ID NO: 303378 - DNA, 615 bp, Homo sapiens
tacaagatctgttttcataaaaccaatgagctcaaatgtaattggtgaacaggggaatgaattcastataatgtggaagttgcatcggttcctgggcagtttttctaaagcaatggggagtaaggtataggagcacactgacagcctccaacaggaaagaaagcaaacagctttcagttcggctaaaatcctctctgctctttttttttttttaattaaaaaaaaaaatccctttagcatgtgaaggtccctccctacaagggcataccccaggtttactggatgtcacgttgtaccaaattgtacttctccctgtgccctcccgaacagaagcccccctgactccgctttgcttccatctgcactgcctctgcacccaaaaactagttttccaccctactctttcttgtgcctttgtattatctcatgagactgacagcaccatgagctggtgaggatgtgacactagaacatctacgtggtgctggtgggaatgcaaatcaggaaaaccactgggaaaacgatttagcagtatctaccaaactactttgtgccccagaaattccacccaagagaaatgagcgaagatgtccaccaaaagatacgcacaagaat

SEQ ID NO: 303379 - DNA, 615 bp, Homo sapiens
tacaagatctgttttcataaaaccaatgagctcaaatgtaattggtgaacaggggaatgaattcactataatgtggaagttgcatcggttcctgggcagtttttctaaagcaatggggagtaagrtataggagcacactgacagcctccaacaggaaagaaagcaaacagctttcagttcggctaaaatcctctctgctctttttttttttttaattaaaaaaaaaaatccctttagcatgtgaaggtccctccctacaagggcataccccaggtttactggatgtcacgttgtaccaaattgtacttctccctgtgccctcccgaacagaagcccccctgactccgctttgcttccatctgcactgcctctgcacccaaaaactagttttccaccctactctttcttgtgcctttgtattatctcatgagactgacagcaccatgagctggtgaggatgtgacactagaacatctacgtggtgctggtgggaatgcaaatcaggaaaaccactgggaaaacgatttagcagtatctaccaaactactttgtgccccagaaattccacccaagagaaatgagcgaagatgtccaccaaaagatacgcacaagaat

SEQ ID NO: 303380 - DNA, 643 bp, Homo sapiens
gttataatgggtaagagtccataccagtcctatttttcccacaagccccaatcctaatattaatgcataattttacagaatgcttttttccagaacttcacgtactttgttataatatttaaaatatacccaacatatacttatttggcatatatttaccaagtgccaggcattattcctatttattgaggatacagcagtgaacaaaacagacaaaaaggccttgccttttaagggcttgcacactaatagataaatgtttttaataggtaytcatatgttatttatcaacagttcccccatggcatataaactccatgagggcaagttctgtcctatgtccactcctaagcacagtgcattatacatagaaggtgcttctaccattcttagagctatcattcttaaagcacttttggccaacctctggatttcacagataaaggcagtttcagagaaatgataatagcagcccaagtcacactgttaataaatatccaaccggaatggaactaggactctttcatacagaacaggacaaactgtaagagctaagggttcttagatatgatacttaagtacaaagtctgaaggggttttagtctttgctcagagaatcattcaagaagaaaaacagtaacaa

SEQ ID NO: 303381 - DNA, 542 bp, Homo sapiens
gcttctggaaccaagtttctaccacccagaaagccctgaggcttgtatgcactaggacgttcaaacacattttaattcagtatttgatctgatggaagaagtacaggagagcacaagaacactgagacctaaaaatgggaaatataactggtgggtgcgtgtggcatcggccacactgcagtaaccacctcactgccttccctacccaagtcagtgtttggtaggcatgtggctttgagagccactgaagtttggtccatgacctcctcactctcccccgtcaccaaggcttgccttttggatcccaaaagctaggcagatggataagaaaaagcctcacttctaaatttttgaggacaagtatcccacttctagcgactataccacaaaacccagattatgtaaggcctgattcctgctgaagattcactggtraactcactcccatgtgcctccactctgagctctcagggttcagggagcagagcagggagagtggggacctaacagctgccttaaggatcctcttgatacacactctg

SEQ ID NO: 303382 - DNA, 275 bp, Homo sapiens
aaaactggggtgaggggtgakttctgataagtagcaactccagtgtgcactgtctatacattggaacattttgcctaagcattattaatgatctataacccataagacaaaatgcaatatcgtgggcaggacaactcttgataatggagcttgtaaattttaaggtagggcctgaagaaaagtagactaagaactaaaaatacgtattaaaattccaaatcaatctagcatcagaccaaaaaagccatttaaacaataattagaaggtgagttta

SEQ ID NO: 303383 - DNA, 517 bp, Homo sapiens
acatatgagaattctaattattcacatcctccccaacgctcattattgtctgtctttcttattttagccatcctagtgtgggagaagttgtatttaatgctggttttgattggcatttccctaatgacgaatgatgttcagtattttttatgtccttattggccatttgtatgtcttctttggagaaatgtctaattaaatcttttgcccagttttgtaattcagttatctttttattgatgaattattttttctttatttttaaagaaacgttttaattaaagtattaatataagaaagtacacaaatcatagwctttcaaaatgatgaattgtggtcaagtgaacacacttgggccaaccagatcacaaaacagaacataatagaaatagaatattacctgtacttcagaaacctccttcctggccctcccaaccttcacttttccctcctcttcttcaaattaactactatacagatatctaatactatcaattagtttagcttgtttggagaa

SEQ ID NO: 303384 - DNA, 617 bp, Homo sapiens
tattgatgaattattttttctttatttttaaagaaacgttttaattaaagtattaatataagaaagtacacaaatcatagactttcaaaatgatgaattgtggtcaagtgaacacacttgggccaaccagatcacaaaacagaacataatagaaatagaatattacctgtacttcagaaacctccttcctggccctcccaaccttcacttttccctcctcttcttcaaattaactactatacagatatctaatactatcaattagtttagcttgtttggagaacatatattatatatgttcttttgtggctggcttcttccaacattattttggggatagtattcatttacgctattgcatatggcaatagctttttttttattattatactttaagttttagggtacatgtgcacagtgtacasgttagttacatatgtatacatgtgccatgctggtgtgctgcacctattaactcgtcatctagcattaggtatatctcctaatgctatccctcccccctcccccctgcatatggcaatagcttggtccttctcattgccatatagcatttcattgtatgaatattccactactgttttatccaccctactgct

SEQ ID NO: 303385 - DNA, 538 bp, Homo sapiens
agtattattagcaagtggaayacagggatatattaaaaaggtaatacatcatgcccaagatgtgtttctcataggaattagaggatacttcagcattagacaaagtattctataaataatgttaacagagtaaagatgaaaaataattatgatcagctcaagatataaagtcttagtgttttctaaaaattgttacaaactagaaataaagaggaatttctttaacttatagagtatatctgctgcaaactgacagtatcattcttaatggtaaatgttagaagcatgccccttaaaatgagaaataaaattacgctattataagcaccacttgtagaatgttgcatcagccttctcctggaggcttaagttaggacagtaagaccagaaaataaggagaaaaaaataataattcaaaagaaggaaagttctattatcatcaattgtattatgtggttttctacttagaaaacccaaaagaatctataaattattaaaaataagaaagttatttccttatcagcagggcacaaaaaat

SEQ ID NO: 303386 - DNA, 601 bp, Homo sapiens
tgccacatcatgaggatatcaagacatcctatggtgaggcctgtgtgacaggaaactgaggcctcctgccaaaagccctgcgaatgagccatcaaaaaagtggatcatccagtcccattcaagccttcagatgactgcagccctgtccaacagcctgattgcaacctcataaggggcactgggccagaactacccagctaagcaactcccaaattcctgacctacagagtctgtgagataataaaggtttgttgttttaagccattaaatttggggtaatgtgttatgcagccatatattgcaaatatatcacaggaaggtcaacagctgaccctctagactagtctaacattccatacactcatgtatactctcatagcattgtgtacttttcctccatgtcactgaacatggccacaattttacactaatttataaaattaattaatccatgtctgtgtatatcatggagtggtaaactccatgagaacagtgactctatgcccattacatgctcagtaattaacacagtgcctgccaacagtaggmgctcaacaaacactgatggcttgattaaatgaaaccgtacaaatgacactgt

SEQ ID NO: 303387 - DNA, 569 bp, Homo sapiens
cgttacaacagctaagacatcactaggggataggaatttttcagctccattataatcttatgggaccattgtcatatgtggcccacagctgactgaaacatcattatgcagtgcatgacagcaggcttgaaaaaaacgtgaaatttacctctaatcccactgtgagagataactgcagtcaacggtgtggcacagacatgtttctagatcttttctacatgaatgtgtgtacaatagtcctcacttatccaaggagaatatattctaatacctccaatagatacctaaaaccacagatagtaccaaaccctgtatatactattatattacctatgatgaagctgaatttacaaattagacacagtaagagattaacaataatamccaataataaaatagaacaattataacaacatgccaacatcactgctcttgggctttggggccattattaagtaaataagggttccttgaacacaagcactacgataccatgacaactgatctgatcaccaagatggctggctacaagtgactaataggaaggtggcatagacagcatggagacc

SEQ ID NO: 303388 - DNA, 519 bp, Homo sapiens
tgtgaaatggaaaaaaggagacctctagacagactccctcaagcctggcagagcttcaggcaatgcctgtatctttcctccatcctgggaacaagcagttcccttcgttggcttcgtattgagaccatcatacttgtctcctccctctatctgctcagggagcagccatccccagctgggtgcctcttctcatgacaggaatgaacacagactgtgccaccacagaccaagctcagagagaagaatttaaccacttccctcccaaaaacagggcagctgaccatgtctgtagacaaatgtagctctgtggaatctggactgtcctcatctcttcaygttccatttttcaaaggaatctttgtttctaaaatgaacattttgaaaaccaggaatagagcatccaagtaagtcagtatgaatgatcccactggaggagattcctttgctggaagagcaaagcttgctggcattgtggtgggacctctgttaaccactgtccccatttcacaccacactgat

SEQ ID NO: 303389 - DNA, 573 bp, Homo sapiens
tttttaaaatacattctacaaaacattatctccacatgttaaaagctgctaattctacatgttaattcaatcacatctttcaatgatatattcttacataacttcaagtgaataatatgtaaagagatatccatagcaacttagaatataaacaaaaaatgacatatagattttaaagtttgtgtatgtccaccatctgtcaattagkttcactaagtaatatattcatatactcacagagttatgtataatcatatttttagattcagatcagcaagaatgctcaagtttagcacagccaaaggctggctagagtgtggaaaagtcagccctctcatgctctgtgggtggatgtcttaagcagcacaactcatttataagggaatgtggtaaaattttaattaattgtcccaccaatcccactactaggaatttgtccagtgaattatttacacaaggaccttagtgtttacgttaaaggatgtctatagcagcattattcagggcacacacaaaaaaaccaaaatgtccaaatccagaataaagaggaaataagaaagataaaaatgacca

SEQ ID NO: 303390 - DNA, 573 bp, Homo sapiens
tttttaaaatacattctacaaaacattatctccacatgttaaaagctgctaattctacatgttaattcaatcacatctttcaatgatatattcttacataacttcaagtgaataatatgtaaagagatatccatagcaacttagaatataaacaaaaaatgacatatagattttaaagtttgtgtatgtccaccatctgtcaattagtttcactaagtaatatattcatatactcacagagttatgtataatcatatttttagattcagatcagcaagaatgctcaagtttagcacagccaaaggctggctagagtgtggaaaagtcagccctctcawgctctgtgggtggatgtcttaagcagcacaactcatttataagggaatgtggtaaaattttaattaattgtcccaccaatcccactactaggaatttgtccagtgaattatttacacaaggaccttagtgtttacgttaaaggatgtctatagcagcattattcagggcacacacaaaaaaaccaaaatgtccaaatccagaataaagaggaaataagaaagataaaaatgacca

SEQ ID NO: 303391 - DNA, 573 bp, Homo sapiens
tttttaaaatacattctacaaaacattatctccacatgttaaaagctgctaattctacatgttaattcaatcacatctttcaatgatatattcttacataacttcaagtgaataatatgtaaagagatatccatagcaacttagaatataaacaaaaaatgacatatagattttaaagtttgtgtatgtccaccatctgtcaattagtttcactaagtaatatattcatatactcacagagttatgtataatcatatttttagattcagatcagcaagaatgctcaagtttagcacagccaaaggctggctagagtgtggaaaagtcagccctctcatgctctgtgggtggatgtcttaagcagcacaactcatttataagggaatgtggtaaaattttaattaattgtcccaccaatcccactactaggaatttgtccagtgaattatttacacaaggaccttagtgtttacrttaaaggatgtctatagcagcattattcagggcacacacaaaaaaaccaaaatgtccaaatccagaataaagaggaaataagaaagataaaaatgacca

SEQ ID NO: 303392 - DNA, 583 bp, Homo sapiens
tgtgcctaaggctgcattttatacttcattaacctagtatttttccagcatcagtggagatctccatcatgccaccagatgacggcgtcacccttcctggactccacatgtgtttactgcaagaagaaactaaaatcttccatactcaagcccttccagttggcctaatagttgcttatactttcatctttactatgaagcaactctgttaaaaaaattatttttcaggtgccaccatggatatatccaccctttgatcagggagaaaagcatatgtgaaattgagaaaggacacgttttccttttcctgggcaggttttggggatgtcagtcactgtaaaaatcttttcttgggaatgccgtccacatctgcaaactgttcctgcaaggtctatgtagaaatgcatttaagaacatagtttttyttaagcaatcctctctggaaaacaccaacctggcctcctcagctgaactataaagtcacattgctttctttttttttctatgacaggacagaaggaagtgattcacacacctgaattccctaagaaacagacattttcacacaggaaggtgttttgat

SEQ ID NO: 303393 - DNA, 593 bp, Homo sapiens
tccaccctttgatcagggagaaaagcatatgtgaaattgagaaaggacacgttttccttttcctgggcaggttttggggatgtcagtcactgtaaaaatcttttcttgggaatgccgtccacatctgcaaactgttcctgcaaggtctatgtagaaatgcatttaagaacatagtttttcttaagcaatcctctctggaaaacaccaacctggcctcctcagctgaactataaagtcacattgctttctttttttttctatgacaggacagaaggaagtgattcacacacctgaattccctaagaaacagacattttcacacaggaaggtgttttgatagcttttctttctttggaagtcacgacgtacatgtgagttttaagggttccttattcagcagggaaagaamacctaagatgggatgataacaatgtgaattataccctatttaaatgatttctgcctttctattttttccttttttttttttttgcactttatcagaagcaagcatgattcaaattataatattggcagaacaaatttgtagtttctaaagaagatattgtcacatctgcaccactattgagctg

SEQ ID NO: 303394 - DNA, 602 bp, Homo sapiens
agagcaggtaacctgcccaagattgtacagttagtgatagcagtgttgggatataaattcagagctatgactccaaagccagtgctaactacttaattaaactgacttttaatgtcttttctgtcctgatgcatttagctcaaaattctgtaaatgaatctgttagattgaacctactatgtttattaagattttgtgtatggcatgtttatgtgtttaggtagtttaaggaaagctgaaagtttctggctttaattttttctattttcagctgatgattaaataatttcttattctttttctcactttgtgactatttttataattcactttgcctcagactacaacctgataaaatgctttgtttctgaatatcagtgcttagaaatgagttactgagtgtgagagacaggctgacataaaaggagaggggatatagagtgaccgagactgagggaggaagggaaaaacatccctcgcgctctcttgctgtctctctctctcacacacatacacayactcacacccactcctcgagagggagaaacaaagacaaatacatgtggaagagagggtatgcacacacattaccctgaaagcaa

SEQ ID NO: 303395 - DNA, 635 bp, Homo sapiens
tagacccatcagtacagaaaaagccatcaaggaaagtgaaaactttttatagtgtctataasttcatttctaggtaatgcccgggatgtgttataaagtaaaatcatttttgcatatgtgccaagggctatttcttaaccatcaattataatatacaagttgttatttactgcatgccctcagaacatatacctaaacaccatgaatttaagtgtatgcaactcaacaaaaaaaattcttttctggtcacaatccactcaccttataaagataccacaatcccttagaaaaaagttcttctgcatttgattcttatactaaatgtagtgtgagctttctactcaagggaataaaaggaaaaagttcatacaagatccaggtcttctttcttaaatgaggcttgcacaaataagtcttacaaactagctatatttgtgttttatgagaagcctagaagaagcagagctaaaaaggtcctaaggctagctctgaattactaccctgttataaagagtaatttatgctatgaaataacagtaacagtcaaaatattcccctcccccgccaaaaagagatgagctaacagactcctattaaaataaggtgcaagatcaaaaagtacatgaaacccaaaa

SEQ ID NO: 303396 - DNA, 562 bp, Homo sapiens
cgcccggctgatttttgtatttttagtagagatggcgtttcaccatgttggtcagactgctctcgatctcctgacctcaagtgattttttcaccttgacctcccaaagtgttgggattacaggcttgagccaccacacctggcccagtcttaatctctatgtttctcttccctttttcatttcttccaagttgctccagaatcttaaaggacatcttcaatgtaagaattctacacctgccctttagaaaaaatatgaactttgaagaccaagagacctcatttcagatcacagttctgtgttcttttgatgtatatcttaatctctctaagcttcatttttggtgttttccaaaaatataatataatacccacctttgagggttattactagaaccataaacaatggatgcttagcatactacctcacatatrgtacaaaatcgacagatgcatctattagtagtagtattttttcttctgttgttataaatagtgttattcaggaacactagcattaaaaagagagattctttagtaagtctatcatgaataacgaactg

SEQ ID NO: 303397 - DNA, 574 bp, Homo sapiens
cacttgggatcttggatctggatattgttttgatcttttgtttcctacccatcgagttacacctgtggctagcttgagttttctcatagagagtggttttatagattcaaaaggcagcatttcaagaagacaaagaccatgtgcaagtacttatcaagcctctgcttgcatcacattactaatgtccccttggtcatgcaaaccacatggccaacctcagagtcactgggcaaggggtatacacaggagtgtaaatactaccaagtgtgattgatgggagaacgccaatggaacaatctactacacctacsttgggaaagcatagaaagctgcattgaattgtgtttttaccatttggtttgtattatcattggaaagacccacttattttgagaagaaagaacatgttctcaattcatcttgtataacaaaaacttcgttgttaactggactcaggtagtgcacagctaatatttgttggataagctgaatgaataaaattcatgtatatcaatatttctaagatgtgagctacaaattcaatcttggaagacactatgtgataaacagagtt

SEQ ID NO: 303398 - DNA, 492 bp, Homo sapiens
caccccttatgtactctcatgtgatacaccatactttcactttgttacatgtgccagtttgcatatctgtgtatgtatttgactggtatgatttcctcacctatagggagccaatctgctttatttaccattacatctgaacacacatgatagataatgaataaatatttttgctttattttctctatcacagaatatatcacaataagcatatttataaatgaactttggctcttctaaagtrcaaattccaagagggcagatactggatctgtttcctaaggtttatcatagttctacatcacagacactcaaaactgtttgttaaatgactggataaataaaatatatggattttactcaatgtcctttattaacacgaagattctttctgagtacctttttggtgtatttcaaagaaattacttctctctactctgttaagattcccatgactgttgcttctaaagtcacctagaaaccaggggaaaa

SEQ ID NO: 303399 - DNA, 596 bp, Homo sapiens
aggcatattcattggggcaaaatttgatgatccaagtttgtcatcagttatttttaaaacagaaagtggtatttgactattattagtaacattttaagaggagatcatatgtacctactctttttacttaaattttacattgacacataataattgaacatatttatggggtacatcgtgactttgtgattcatataatgtagaggtatcagatcagtgtaattaggatatccgtcatctcaaaatttataatttctttatgttgggaacagtcaatatcctctgcctagctatctgaaattatttcatatattattgttaattacagtcatcytagagtgatctagaacattggaatttattcctcctatcaggctgtaattttgtacctttcattttcaacaaatatcttcctattccttcttcctcaacccttcttagcctctagtatcctctgttctactttttacttctatgagatgaaattttttaaagcctccacacatgagtgagaacatgaggtgtatacacaaacagaatactattcagcagtaaaaaacaaacaaaatcctttcgttcatggcaacatggataga

SEQ ID NO: 303400 - DNA, 596 bp, Homo sapiens
aggcatattcattggggcaaaatttgatgatccaagtttgtcatcagttatttttaaaacagaaagtggtatttgactattattagtaacattttaagaggagatcatatgtacctactctttttacttaaattttacattgacacataataattgaacatatttatggggtacatcgtgactttgtgattcatataatgtagaggtatcagatcagtgtaattaggatatccgtcatctcaaaatttataatttctttatgttgggaacagtcaatatcctctgcctagctatctgaaattatttcatatattattgttaattacagtcatcttagagtgatctagaacattggaatttattcctcctatcaggctgtaattttgtacctttcawtttcaacaaatatcttcctattccttcttcctcaacccttcttagcctctagtatcctctgttctactttttacttctatgagatgaaattttttaaagcctccacacatgagtgagaacatgaggtgtatacacaaacagaatactattcagcagtaaaaaacaaacaaaatcctttcgttcatggcaacatggataga

SEQ ID NO: 303401 - DNA, 503 bp, Homo sapiens
ttagtgtatttatctaatgtaattaggtacagctgtgcatctcctgttgaatcaggaccagtcataccaccaagaataaccacaaactctggaaaagatacaaaccactaccagaagactggagactgtccaaaagtaggcagatactgaaaaggaggtgacacttagaaaaaaagaaaagaattacactgggagattttcccatttttacagcttttaccttgtcgtactcaggactcttggatggtcatagttaatcagcttccccaggagttacttttcacttccagtttggattccatcacagataaaatagctgggtgtggtggcatgtgcctgtagtcctagctaatcaagaggctgagacgggaggattgcttgagtcagaagttgaagtatgcggtgagctagagtagcgccactaggctacagagtgagaccatgtccaaaaacaagcaaacaacaaaaagagacttagatamcctctgatactcaagcagttt

SEQ ID NO: 303402 - DNA, 438 bp, Homo sapiens
gtcacttgtgccacataatttctgactaccatagttacataggtagcaaataaacattaggactcaggtaatatgacaaaagaatctatattctcattcactgttggatacaacttcccctgcatacgtaaagctaagagatagaagagaattaagaaagctgattggttaatttggcttacataatttaaataataacacttmacaatttttattgcacttatgtgtttgttcaaatgagataaaaaagaatccctttctcttctctaactacttgatttatctatatttgttttttaaatgtacccagaatattcatttctacaacacaatctaataaaaaataaaacaggaatcaaagtagttatgcattctataactgaatacagatgatctgatggaaagcagctaaaatacttgtctggtagcggagtgttc

SEQ ID NO: 303403 - DNA, 679 bp, Homo sapiens
ctatggttgactttccactcccagaattttctagctttcttatctgacattttcccccgcagtacttaaaaatatttactgtactaaagattagtttatatgtttttattgatcttctttaaatgaataaaggctaggattttcttgtagttgttaactgctgtatccctaatgtcgagcacagtgcttagaacagagtgggagttcaaccaatatttgttaaactgatgaataaatacattaatccatctcagttaatgctggagctcttaggttgccttcagtgattttcagatatagcatcatatcatcacagtgcaagggcttgytaaactgcaccactaaatgctcttcatcattgcttcttttgttaatgccactgctatgtgctttcttggtcttctcctttttaacattgcattggttttgcttgaatgcagttgcctcacactgtattctgggtctgctgttaaaggggtattttatttatttatttggccatctggtctcctaaaatgtctctggcttcatgcttttccttttgtttttgtcaccaggtccacaagtcttagtgttcacatgttaaccttctggcttaggcagagctgtccttccacacaatggaatgtccattttggtttccaagacttccataatctgtcttacttgcattttctat

SEQ ID NO: 303404 - DNA, 351 bp, Homo sapiens
cccttcctcagaagcaaagcraaatactttccttttctctcacataaaaatttgagttcattgaatgtaaacggactgtgagtaggtgaaaggaagtatccatgatgatatgataaatgttaattattgacaggtcattaataaacatgaatttatgttttacagtagctttcaaactattggggtaaaaggaagcaaggaaagtgcccatgcaggggaaagaattagccaaagactctgtgttgggtctaaggaagtcggattatttagatccaggtgtttcacagtaggacagagttaagggcatctggtagagtaaaatagtttgtgcacctaagttagtacagtatg

SEQ ID NO: 303405 - DNA, 351 bp, Homo sapiens
cccttcctcagaagcaaagcgaaatactttccttttctctcacataaaaatttgagttcattgaatgtaaacggactgtgagtaggtgaaaggaagtatccatgatgatatgataaatgttaattattgamaggtcattaataaacatgaatttatgttttacagtagctttcaaactattggggtaaaaggaagcaaggaaagtgcccatgcaggggaaagaattagccaaagactctgtgttgggtctaaggaagtcggattatttagatccaggtgtttcacagtaggacagagttaagggcatctggtagagtaaaatagtttgtgcacctaagttagtacagtatg

SEQ ID NO: 303406 - DNA, 565 bp, Homo sapiens
tgtccatttttattatttctatttgttttaaaatagtttgtttagctaaatttggtcaggtttataacatgtactttctcaaaaaaatgtartgttttccctttcttgtccttgctacaaaatgccctcaatctttatggttccaatgaaaaaatttgtagaagatcattttatgccagacatacttgagggttagttattcacactgagtcatgtacatatcagattaaagtgttcaatggtcgatgactaatgggtcaatattaaattgtgcatataagaagttctcaaaatacttcacacaactgaaaaggtaacaagccaggcaaatggaatacaaaataatactttagatatcagatgagttttacagaacaagctttaattttcctgccgtgccaaaaaatatgacttatatacttctaaaatgaaagttcatatgactgtagggaacataatatttattgagatgaatcttgtctgattttatcatgattgctagagtaaaaaatatgaataaaagagttgcttctaaatttaaagaactttaagatattaatagcca

SEQ ID NO: 303407 - DNA, 422 bp, Homo sapiens
attgcaaattaatgctctaggttcatgattttgatgattaatttatatgagttttatttcatattgtgcaacagaattctcattttattctccatcaagtttaaagawgttttagctttgagcaaatgtaggaatcatattgtcaaaagctgagcctatctgtcatcactggaggtcatgttgcttcattatttattcagctggagtgtgtggacaaaaatataagattctaggacttcaattattccacacatatttacagttggaattatatttatagtttataattatctcttacattaaacacaaccctactgccaataacaaaagagtctccctaaagtacagatgtatatttttaatacttccattaaagaaagttaaatgagattggtataaaaatgacctattatatatggtca

SEQ ID NO: 303408 - DNA, 573 bp, Homo sapiens
tttattgttaaatttgtgaaatgagaggcttttagactgaggcagctccaacaccctgggtttctgcataaaaatgaaacttaagctcagccaatcacaaggtaggcatcacttacattgttttaaacttcttagtgggatagctcaaataactcaattgctcaaacgtcaaccaaattattctcctgcttagcttcgacttcaccctataagagcctttccctgtgcccttttatctgagaccctgttctcttgcagtctagagatgcctgattaatgaatcactatcactcagatacactccttaaaattttaatttgccaaagtgtatctcttaacactatttataaaaatactttgatgaataccttacctcaatgctttataaagaccacacataaatacttsatgatgcctgaatttatattatatactgaaaagtaattattcatttaataagcatacatgtaggatctacacaacatattgtagagtgttgagattagttttaattttcttcttaacaatgcatttgagtggagaaaatgatgtttttattctagttttcttctt

SEQ ID NO: 303409 - DNA, 565 bp, Homo sapiens
tgcttttcctgacttccttttcttctttttgcctccaaatgctttagccattataatttgtggtctgaatgccaattttactactgccactaatctgcattgcacagaatgttgatttgtcaaagtagactcaggcacatcataaatccctcccaccaaaatttgctaatgcttgttgtattcacttaataaagcaccacaagttgggtggcttaggataagagtaatgtatctcctataattctggaggccagaagtctgaaatcatgtttctgtagggccacatgctaagtaatattctagggaaaattttttccatgcctttctcttagtttctggtgtagctggcaatccttgatgttctttagtttgcagatgaataacaycaacttctgcctccattgttacatgatattctccccctacatattcatatcattttttaataaggacataagtcatactgaattaagggcccattctactccagtaagactttgttttaactatttatgtctgtgagactctattttcaaataagtttgcattctgtggtactgagaga

SEQ ID NO: 303410 - DNA, 565 bp, Homo sapiens
tgcttttcctgacttccttttcttctttttgcctccaaatgctttagccattataatttgtggtctgaatgccaattttactactgccactaatctgcattgcacagaatgttgatttgtcaaagtagactcaggcacatcataaatccctcccaccaaaatttgctaatgcttgttgtattcacttaataaagcaccacaagttgggtggcttaggataagagtaatgtatctcctataattctggaggccagaagtctgaaatcatgtttctgtagggccacatgctaagtaatattctagggaaaattttttccatgcctttctcttagtttctggtgtagctggcaatccttgatgttctttagtttgcagatgaataacaccaacttctgcctccattgttacatgatattctccccctacatattcatatcattttttaataaggacataagtcatactgaattaagggcycattctactccagtaagactttgttttaactatttatgtctgtgagactctattttcaaataagtttgcattctgtggtactgagaga

SEQ ID NO: 303411 - DNA, 565 bp, Homo sapiens
attatatatgacttcagagatgggatcataaaagacactgtggcttggagcttttctctaataagaggagctgtatctgatgccatgagaacactcaaatagtcctatgagctccaagccaggacctgaggcctcctgtcaacatctagcaaggaactaaggccttctgccaagaacgtaagtgagccatggtataagcagattttccagtcccagtcaaaccttctgatggctttagtcccagctgatatcttgactgcaccttgtgagagacactgatgctgaaccacccagctaagccactattcaatccctgactcacagaaactttgtgataataaatgtgctaatttgytaaatttgggggtagtttttaatgcagcagtagacaactaatacacatggttaactttttcagtgtcttgtaatacttttctctaattttacatatgttgggaatcgcttttctcctcccagagtatattttaaaatttcttattggtttaggaaggcttctttctctttgtatccatggttcttcaactttctgtctctgtaatctgag

SEQ ID NO: 303412 - DNA, 566 bp, Homo sapiens
  misc_feature (1)...(566): n = A,T,C or G
ggtgcaaattcacatacttcatancaaataaaaagagagagagaaaaaaacattatcagagaagtaaaggtccctatcatcctttcatatagtcccaggtatttctatcctacttccactctgaaggatttctgaactgtatgcagtagtttatagaaatcatcaaatcttaccttctgccatcccgtcctgatcccatattaaatccaagtgctgagtagacttgggtttctctctatacaaattaagaaaacaaagaaatttcacaatggtcaaggaaagatattgccatttaaaaggagaaaaatatttataatctatttaacaatagttattgcttatttattatgtgccaggaaatgtgctagtaactggggaatcaagaatgagatcaaagagacatgcaaccccttaactaaatttactgtgaggacaaaaatgagtgtattttttaaaaaattctgggttcagttcttagtaaarctcaataacatattgcaactgtattagtagataaaaatggaagagaaacaatgccaaaagaaaagactgtggaaggaaaagat

SEQ ID NO: 303413 - DNA, 457 bp, Homo sapiens
cttagacttataatacaacatctgcttctaagttatttaaaatattagtttaccaaatattttgcctctcaaggacatagaacactatatttccagtatttgataaaagattttttactacccaccaagtggccatgaagccaatctaatattttaacactgagttacataacattgtaccaatttttagactaatcaaattgagctagattatgctgtgacaatagaaccctacaatctcagtgacataaagygcatgtgcacacacacacacacgtgcacgctcatgtacccaaacaaacacaacactatttcttgctcagagcaggtcaataggaaaactcattacagtcacttaaaggctgagagaagtttatcctttcttggttcaccaatgtcactatagcaatgagaagaaaatgtgaatcaaacactgtccctaaaaatttacttccag

SEQ ID NO: 303414 - DNA, 559 bp, Homo sapiens
gctacgttgtgttgctggatgagtcagtcctagtaaaataagctttcgggcttgacagaagagatgcttgacattaggttagggctccctccacatgggaactttgggtctgcatctaatacttcccgtcggccttggaacaaagcagctttctggatccttccattattacatgtgacatagtggatgaaactggtgacttgaagctttagggaaagataacttaggctaattgagagcaaaacttgctacactggaatccaaataactgcactgcattatgacaagattatgttgttttcttgaagattgtcctatacatgaaattgccttgatcctaaagagaaaccctartgagagaaactcactaactcttgcctcctttagtcctcaactttctattatgcatcctacacttagaagatttaaatggtctgctctgagtgagaaaaggagattgattttctgttagagctatttaaatggatgatatatgacccatagtcaggaatgaaattagactatgcaatcctaatttagaggtaattttaattaatga

SEQ ID NO: 303415 - DNA, 545 bp, Homo sapiens
tccctgtcacccagctttagcagttacctatgggtgaccatacttgttttctctgtgcccagatccctttcctttccacactccccctggatcattttgaatcaaatcccagtcatcctataattacttcttaaatatttcagttagttctaaaatataatggctatttaaaaaaaatcgtcatagtaccattattatgccctgaaaaggaatgataagtcttcaacataattgcatacctaactggtgttcacattctccgtctcataatttcactttttaaccgtttaaaatcacttgtatgtccccaatcttaattcatttgtcttcttccctatttctcttccccctactattttttgaggacacayagtcctttttccttaaagtttgccacattctcaattttgctgattacatatctgtagtgttgtcaaatgtgtacttttttcccctctattttttagaaattgaaggttagatacagagacttcatgagatgcaaatttgatacatttttgtgaagaatgtaagtggtattgtgt

SEQ ID NO: 303416 - DNA, 545 bp, Homo sapiens
tccctgtcacccagctttagcagttacctatgggtgaccatacttgttttctctgtgcccagatccctttcctttccacactccccctggatcattttgaatcaaatcccagtcatcctataattacttcttaaatatttcagttagttctaaaatataatggctatttaaaaaaaatcgtcatagtaccattattatgccctgaaaaggaatgataagtcttcaacataattgcatacctaactggtgttcacattctccgtctcataatttcactttttaaccgtttaaaatcacttgtatgtccccaatcttaattcatttgtcttcttccctatttctcttccccctactattttttgaggacacatagtcstttttccttaaagtttgccacattctcaattttgctgattacatatctgtagtgttgtcaaatgtgtacttttttcccctctattttttagaaattgaaggttagatacagagacttcatgagatgcaaatttgatacatttttgtgaagaatgtaagtggtattgtgt

SEQ ID NO: 303417 - DNA, 545 bp, Homo sapiens
tccctgtcacccagctttagcagttacctatgggtgaccatacttgttttctctgtgcccagatccctttcctttccacactccccctggatcattttgaatcaaatcccagtcatcctataattacttcttaaatatttcagttagttctaaaatataatggctatttaaaaaaaatcgtcatagtaccattattatgccctgaaaaggaatgataagtcttcaacataattgcatacctaactggtgttcacattctccgtctcataatttcactttttaaccgtttaaaatcacttgtatgtccccaatcttaattcatttgtcttcttccctatttctcttccccctactattttttgaggacacatagtcctttttccttraagtttgccacattctcaattttgctgattacatatctgtagtgttgtcaaatgtgtacttttttcccctctattttttagaaattgaaggttagatacagagacttcatgagatgcaaatttgatacatttttgtgaagaatgtaagtggtattgtgt

SEQ ID NO: 303418 - DNA, 634 bp, Homo sapiens
cttcaacataattgcatacctaactggtgttcacattctccgtctcataatttcactttttaaccgtttaaaatcacttgtatgtccccaatcttaattcatttgtcttcttccctatttctcttccccctactattttttgaggacacatagtcctttttccttaaagtttgccacattctcaattttgctgattacatatctgtagtgttgtcaaatrtgtacttttttcccctctattttttagaaattgaaggttagatacagagacttcatgagatgcaaatttgatacatttttgtgaagaatgtaagtggtattgtgttctcccatcaggacacaaggcttgtgctaatctctccctttttctcatgttatcaacattatttattcctacattcaatatttattagagggtgcaatcctcagtctatcattacttcttaatttattagcaggaatattcctataatgagtaacttgaaaaacttttaagaattgcaattttggagcttcatttttccttgcacacttagtgaatgtaatggtatttagtgaaattagtgtccactaaataataatttattaattgatttgttcgtgtgttaagtgcttaacataataaccaggtata

SEQ ID NO: 303419 - DNA, 634 bp, Homo sapiens
cttcaacataattgcatacctaactggtgttcacattctccgtctcataatttcactttttaaccgtttaaaatcacttgtatgtccccaatcttaattcatttgtcttcttccctatttctcttccccctactattttttgaggacacatagtcctttttccttaaagtttgccacattctcaattttgctgattacatatctgtagtgttgtcaaatgtgtacttttttcccctctattttttagaaattgaaggttagatacagagacttcatgagatgcaaatttgatacatttttgtgaagaatgtaagtggtattgtgttctcccatcaggacacaaggcttgtgctamtctctccctttttctcatgttatcaacattatttattcctacattcaatatttattagagggtgcaatcctcagtctatcattacttcttaatttattagcaggaatattcctataatgagtaacttgaaaaacttttaagaattgcaattttggagcttcatttttccttgcacacttagtgaatgtaatggtatttagtgaaattagtgtccactaaataataatttattaattgatttgttcgtgtgttaagtgcttaacataataaccaggtata

SEQ ID NO: 303420 - DNA, 565 bp, Homo sapiens
ataaacattactctgtatatgccattaattccaatttgttttgtctcagagttccccatctcctatggtggatgatatttcatccattgagaaattattggggtattattttacctctagtttcactcaaaatcaggagatctagatgctgccccccaaatgagataataacttgcaatgccctgattactgattaccagagatatcttttgtggtctaaacccaaagtgttcttttgatgtctagtgggcctgtcttttcatgttgcatgtgagatagaaaaatttctgcacccagggccaggcgctgtggctcatgcctgtaatcccagcactttggaaggctgaggcgggtggatctctattgaggtcaggagttagagacgagcctggacaacatggtgaaaccccttmtctactaaaaatacaaaaattagccagtgtgatggtgtgaccttgtaatctcagctacttgggaggttgaggcatgagagtcaatttgaacctgggaggtggaagttgcagtgagccgagatggcgtcactacactcctgcccggcaacagt

SEQ ID NO: 303421 - DNA, 572 bp, Homo sapiens
atttcattgagctttttcaaagcataatacttaatgttctttttgtatattatagaatatattatcattaaaggacatcataagaattcctgaataattacatctagtatcttataaaaggagatagtttatagtactttaaagttaagcctatatgtattacacttacatttaggaaaatgccaatggattgttttcaggtgataatactatattagcctaatgacatttttgaaggaaaggttacttagtatcatatattatattcatygacagaatgagtacctactattaaagataaaggtatagtaaagataaatatattacaaaataataagtgctgcttagctggctttgccaatctgttgtgatgtacaggtttgacctttatggcagtggacacaaaataactgaaaattaccccacaagcaattagggatccagaagatatttattagtgttaaacaggtgactgtgtgtgtgtgtgtgtgtgtgtgtgtgtgttttccttttcattccaaaaatatttccaaactaacatttaccaggtcttgttctaaacattgggaata

SEQ ID NO: 303422 - DNA, 572 bp, Homo sapiens
atttcattgagctttttcaaagcataatacttaatgttctttttgtatattatagaatatattatcattaaaggacatcataagaattcctgaataattacatctagtatcttataaaaggagatagtttatagtactttaaagttaagcctatatgtattacacttacatttaggaaaatgccaatggattgttttcaggtgataatactatattagcctaatgacatttttgaaggaaaggttacttagtatcatatattatattcatcgacagaatgrgtacctactattaaagataaaggtatagtaaagataaatatattacaaaataataagtgctgcttagctggctttgccaatctgttgtgatgtacaggtttgacctttatggcagtggacacaaaataactgaaaattaccccacaagcaattagggatccagaagatatttattagtgttaaacaggtgactgtgtgtgtgtgtgtgtgtgtgtgtgtgtgttttccttttcattccaaaaatatttccaaactaacatttaccaggtcttgttctaaacattgggaata

SEQ ID NO: 303423 - DNA, 572 bp, Homo sapiens
atttcattgagctttttcaaagcataatacttaatgttctttttgtatattatagaatatattatcattaaaggacatcataagaattcctgaataattacatctagtatcttataaaaggagatagtttatagtactttaaagttaagcctatatgtattacacttacatttaggaaaatgccaatggattgttttcaggtgataatactatattagcctaatgacatttttgaaggaaaggttacttagtatcatatattatattcatcgacagaatgagtrcctactattaaagataaaggtatagtaaagataaatatattacaaaataataagtgctgcttagctggctttgccaatctgttgtgatgtacaggtttgacctttatggcagtggacacaaaataactgaaaattaccccacaagcaattagggatccagaagatatttattagtgttaaacaggtgactgtgtgtgtgtgtgtgtgtgtgtgtgtgtgttttccttttcattccaaaaatatttccaaactaacatttaccaggtcttgttctaaacattgggaata

SEQ ID NO: 303424 - DNA, 636 bp, Homo sapiens
atatattatattcatcgacagaatgagtacctactattaaagataaaggtatagtaaagataaatatattacaaaataataagtgctgcttagctggctttgccaatctgttgtgatgtacaggtttgacctttatggcagtggacacaaaataactgaaaattaccccacaagcaattagggatccagaagatatttattagtgttaaacaggtgactgtgtgtgtgtgtgtgtgtgtgtgtgtgtgttttccttttcattccaaaaatatttccaaactaacatttaccaggtcttgttctaaacattgggaataragcaatgaacaattgtggaagaaagtcttcgcagaatggagttaacgctgcctgcaggagacaaacaataaagcttggactcaatatagaagttacatttctcaaacaaaacaatataatttaaattttaccatacactgtggtagactctgtgtcagagtgtgactccaaatttcccaattcataggctaggtaaggtaatgtcctatggaatgtcctagtgtgagaggatttcttcaataaagatgattgtgattgtgattaactggatcaactcagtaatttgaacttgagatgcaaagagattcactaataggg

SEQ ID NO: 303425 - DNA, 557 bp, Homo sapiens
gaggtgtacatagcaagtatatttattgtctacatgagatgttttgatacaggcatgcaatgagaaataagcacatcatgaagaatggggtgtctataccctcaagcatttatccatcgagttgcaaacaaytcaattataccctttattttaaaatgtacagttaagttattattgactatagtcaccccattgtacggtcaaatactaggtcttactcattttttttttttgacactttaaccatccccatgtatgccccatcaccccactgcttttcccaacctctggtaaccattcttctactctctatgtccatgagttcatttgttttgatttttagattccacaaataagagagaacatgcagtgttcgtctttctgtgcctggcttatttcactaaacataatgaattctggttccatccatgttgtttgttgaaaatgaatggatctcattcttcttttatggctgaatagtactccattgtatatatgtaccacattttctttatccattcatctgttgatggacacttagattgcttctaaatgag

SEQ ID NO: 303426 - DNA, 557 bp, Homo sapiens
gaggtgtacatagcaagtatatttattgtctacatgagatgttttgatacaggcatgcaatgagaaataagcacatcatgaagaatggggtgtctataccctcaagcatttatccatcgagttgcaaacaactcaattataccctttattttaaaatgtacagttaagttattattgactatagtcaccccattgtacggtcaaatactaggtcttactcattttttttttttgacactttaaccatccccatgtatgccccatcaccccactgcttttcccaacctctggtaaccattcttctactctctatgtccatgagttcatttgttttgatttttagattccacarataagagagaacatgcagtgttcgtctttctgtgcctggcttatttcactaaacataatgaattctggttccatccatgttgtttgttgaaaatgaatggatctcattcttcttttatggctgaatagtactccattgtatatatgtaccacattttctttatccattcatctgttgatggacacttagattgcttctaaatgag

SEQ ID NO: 303427 - DNA, 589 bp, Homo sapiens
tatgccccatcaccccactgcttttcccaacctctggtaaccattcttctactctctatgtccatgagttcatttgttttgatttttagattccacaaataagagagaacatgcagtgttcgtctttctgtgcctggcttatttcactaaacrtaatgaattctggttccatccatgttgtttgttgaaaatgaatggatctcattcttcttttatggctgaatagtactccattgtatatatgtaccacattttctttatccattcatctgttgatggacacttagattgcttctaaatgaggccatgtcaatagaaatatgccatacttttatattaagtaaccagcagttgacactttcagattacctataatattgttcacaaacaaattaaactgaactttaagaacatgtgtatatgtaaatatataaactgaccttttttgtacttaaaacaaataggctaaacctaagaatatttacagactctgagagaaactaccaaatccactacacctgcagaaggaggtggcctggccttagacatatgtgttcatgaactttgtcatatgatccataattatgga

SEQ ID NO: 303428 - DNA, 286 bp, Homo sapiens
aatttaactgctttcttgatgaggaagataatgcaaaggaatagatgagagctttccttgcagcttcattcagtctttctcatgtttatgcttcagttagtttagtaacctatatatcattctcattctctattgttagttcagtcattattaacttaatatgtttattctcttcataaaattctggaaaccctaggcatgagttgytgatcaaattcagtagaaaaataaaaacacccacattacacaaatgacacacaataattgtaaaagtaaatatatgtca

SEQ ID NO: 303429 - DNA, 537 bp, Homo sapiens
gaaggatctagctgctcccaastttttgaaggaactagccgcttccaacagttctctcaattgtgatccctagggcctggtcactctacctttttgtcagttgcatgaattcactaaattagatctcaccttagatctttctcatgtgttgctccctctgcctggaatgttcaatctcacttattttcttcattcaagtatcaccttaaatgtcacttcctcagagcaacctttctcaaccaacctaccccaagctgttaaccattcagtctttctcatgtacttctgtttgcttttcctcaaagtgcttttcacaaattgaaagtatttttatatggttgcttatttgttatctgtttccacaatctctttttcctgagtgtagggatcctgactattttgcccacaactatatctcctgtgctcagagaattgtgtctatcatagtagagagtcaagcaataagtacttttgttgtaaatggaattgaaatattatttatgtgggtgcattgtgggaggtttgacattgttagag

SEQ ID NO: 303430 - DNA, 604 bp, Homo sapiens
cataaagccaaataccacatattcycacttataagtaggagctaaattgtgagaacacatggacacatagtggggaacaacacacactggggcctactggagggcggagggtgggaggagtgtgaggatcaggaaaaataacaaggcttaatacctgagtgatgaaataatctgtacaacaattccccataacacaattttacctgtgtaacaaacctgcacttgtatccctgaacttaaaataaaagttaaaaaaagaacccacgtactgtcaaaggtatatatacggtatcctcctacccatgcttctcagcctggatttctatagatttgtcattagattacatttctgtaacctgtagaatgttcaactgtgcattctaagcatctacagcagtgtggcacacctataatagctgctgaataataaaatccagtacataagggcaaattagaatatttttctaaataaaataaaatcaaatattatctcaggcacaacctagacatctgcaaaagagtacagattaatatattttttaagagaaaagtactcataggtatcatttattttgctcccttgcctttgccattattgtgttga

SEQ ID NO: 303431 - DNA, 476 bp, Homo sapiens
tgcaataaccatctacactcttctagctaatatctgtgatcagtatattgctagttccatattcttgactttgatatatgcttctgtctagctatttcttcagctttttgaattaagttccccaccagcttcctggatttcctcagttctctgatttctgtgtgctctgaatcttagttttttttctatcattcttggtccagtaaaaacctacaccctggctaagtttaaaattcatcaacagtaacaaagagattcagatattgctatttagcccatatwtactgatttagcatcaatccaaactctttgattttatgtgacctaattatagcttgaagctagtttgtgacatctcctggttacttctatggtattcggtttgtatgtgcttatcactctttaaagacatcagctcttgaaaaatttcttctcagtaagtttttatatcaatgttaccttttggaaaactttcc

SEQ ID NO: 303432 - DNA, 610 bp, Homo sapiens
gtgtggtcaatgtgattagaccatttgcatttgctatttgggcttactgaagttagactcctacattcccatagatgtaggggctctatctttctccatgattgcatttcaaagggatggctctcaggtttttgagaaagacattcctgsgttgtagaaaatttgcatctcaaaggggcagagaaagaattagtaatcgcaaattttttgaacaccctaaggaaagaggttggaagcttcagtcaggaagaaacctatctaaatctgtctcaagtttgtcaaattgaggggagctttatgtctatcttggttactttttgaatgtttccatcatatacacatacctttgaaagttccattgttcgtctctatcaaccaagtgcataaggaaagaccatgaaagaggcccaggagaggtttcacagtctagtgctgaaagtcgcacatttcactttcactactcttcccctgactaaaagtcagacaattggctacattcaactgcaaatatggggggcagccatgtgatataagtgatagctgagactataaccctcctctttggattaattattccggcttattattccggctcctgtgttctttctag

SEQ ID NO: 303433 - DNA, 506 bp, Homo sapiens
cttttcacagctttaggcagagactataaatcactgatctagtgaatgaaagagcaacacatacaaagaggtggaatttttttctctattattttagtgacaattgatgaccttgggcaagtcacttaaagtctctttggcattaaaatgaaacattgtttcatacctctaactaccctctcaggcaagatctttacaagaaaattaatccaaagcaaactggagtttgcttttgaaacattaaagttttctagccgctttgcagggactgtagatgcccagaggacagtccttcatkttgtgttccagtaattcccacttgcatgctgagcagtgagaaaaaaattaaaatataaatagaaggctgtagagatttaataaaatcctcaggagtctatgagttttatctttattgtaatcacttcaatcagttattaattcaggctttaaaagcagattttttaaaacaaaacaaaaaatactctgtaatgacatagaatatttat

SEQ ID NO: 303434 - DNA, 302 bp, Homo sapiens
gagttttatctttattgtaatcacttcaatcagttattaattcaggctttaaaagcagattttttaaaacaaaacaaaaaatactctgtaatgacatagaatatttatactttgctaataaaaatgccccagttgtaacttacacatttactacacttsttattacattttgaggtcattaagtttaagtcatgtttgatgggcatttttaaatgaaaaaatatatatatataaagaaagacagttgttcaagtttttttgctattaagtttgaatggtagttgaaattccaacactttgca

SEQ ID NO: 303435 - DNA, 583 bp, Homo sapiens
gactacctagtttttataatgttttattttttcaatgtgtcaaatttttgatgctttattccagtaaactggttaagatcttagactttttgagatttgattctgccatttattagcattatgaacttgggtgatggattttaattctcaaatataaaatggagctcatattacaaagacagctaactcatacagatgttgtaaagaacaaatgagatcagaacttaaagttcttggcatgagttttatctggcatgtagtaatcacttmaacaagaaacgttagttgttgctgaaatatatttggggtagtattgttgttgctatcaggttcaattgatgttaatattagcattagcactcttaagattttttcctacaataatttatgtatcttccaaatcagaatcatatgctatacagttaccattaaactatctgaagattttttcttaagaaacatataaattcacaacaataaaaatcttgcataattttagcatagtattcataatgatgtgaatatattgattatgttagcctgcctattacaaagagattctattattttcaaagttgattca

SEQ ID NO: 303436 - DNA, 558 bp, Homo sapiens
ctttattgtcttcttacttttagaaattgccacagccaccctaaccttcagcaaccaccaccctgctcagtcaacagcccaaccatcaacattaaggtaagatcctccactagcaaaaagattaagacttgctgaagactcaaatgaatattagcattttttagcaacaaagtatttttaattaaaatatgtaccctattttttatgcataatactattgcacagatagtagactacagtattgtgcaaacataactttctatgcactgggaaatttaaaaatccatgtgacttgcttattgtgatatttgcttgattcaggtkgtctggaactgaacttgcaaaatctctaaggtatgctgtgtatttatccatgatccctgaagagaacttagcaatggtcagctcatctctacttatatcattataatgagtttccacaatttaagtgggcaaactaatttgatcctataataagagtgtaattgttcatatggggctctgtttattctcctctaatatttcttcctctttcaatacctgcttctcttctacccc

SEQ ID NO: 303437 - DNA, 641 bp, Homo sapiens
aagcatttcaaacaaacaaaaacataaaacttctatcaatatagatcatgaaaatatgacaaaatataggaataaattattaagatttttatatacagaaatttctaattcatattcagtgaaacatgcttagcatttttctcctttctattgtagatgtatcatttaaaatgtatagatgcttataagtaatttataaacagaaaaatattaacattgtcagatattttctcaaaasatagaaaactgtaaaattatagaacactatttaaaaatcaataggagtttccataatcccagtttatttgatttcatattaaaatgttctcatatggagatagggttgaatacaatttagattatccaaatataaagcacagtgttttacatgtagtgaatactcttagtggtaggaacatttcctttcttgcttagcccctccttacatctgtttctttggaacaagattgtttcccttttatttgccagattttttattacattactttaagcttgtagacctagctgaagttaaaagctaaaagcaggcttacataacttgcttgtaatatgattgtctagatttatatatgaagcctatatttaacatgtaagaatttgaaattaatttataatataac

SEQ ID NO: 303438 - DNA, 607 bp, Homo sapiens
ccatataatttactttcaatgtgtttgtatagtttccaaaatttcttttgttattgatctctagtattattcccttgtagccagatacgatgcttggtattatttcattttcttgaatgttttcagacttgttttgtgacctaatgtatgatctatcttttagaatgattcatgtgctgaggagaagaatgtgtattctgaagctgatgcatgaaattttctgtaaatatctataaggtttatatttggtctgtagtgcagattaattctgattttttttgttgattttctgtctgggagatctgttcaatgctaaaaatggggtcttgaagtctctggctattattttattagagtttctatctctctttagatccaataatatttgctttatatatcttggttcttcaatgttggtcgcatatgtatttataattgttatatcttctgactgaatttacccctttatcattaaataatgaccttctttgtattttcttgtagtttttatattgaaatctaytttgtctgacaaaagtatagctactcttgctcttttttttgtttgtttccaatgatttggaatatctttttccaccttttattt

SEQ ID NO: 303439 - DNA, 579 bp, Homo sapiens
ttagcagccaaacaactgtcagttaccttccttttcctattccctttattacattaaataatcagaaaaatgcaagccaaaggttttttttaaagatacattactcaagtacacaattaagctgagtctgtaagatcaaatactcaggagtgaaaaccttttcctttgatctatcatttggggttgccttggcaataaaattggattgtacaactgatctgattgatcatgaaamaataggttgttaaagtgaacacaaaatttaattagtctggaaaaagtttgattaagtgacctcatattgacagagccagacagtgccatcaggttgtgtggttaagaggttttaaagcaccatcaaatagcaaacctgtgtttaagaaacacatagcctgtttcatgtaattttaattggaaggagttactggcttgctcagttggtatatttttcccttcaattatctatgtgggagagatatgatgtttccttactggctaaaaaacttgtatcaagctaaagggtgtttcagcagagatggaagtggttgttataataaaatggacttaaagtagacagtc

SEQ ID NO: 303440 - DNA, 600 bp, Homo sapiens
gccatgtaccccaactgacaccatcatctacttcaaagacccactgctagcaatgggatcagctgccaagtctgctaagtgaggagtggacactggagtctcagaattgaatcacaataacctttcaacccatgataaatttcaggcccactgtattaaaagttgcagagaccagcatgacaggaggccaagaaaagcaaactcaataccccaattcagaaagctccttgggatttcctgctgtgtgatttgacatgactgagtttctgaaaaggccatctaagcaggagacaaatctagcagyaaatctgcctgggatggataacataatatttatctttcattccctgcttcccttattttatcagtgggggattgattaaagagaggatgtctaggcaccaggcaccagagatctgggaaataaagctatgaaggctcacaggctttaggtacacatatacccaaggtgcatgctgccttcaggtccactctgtcgagcacagcagttagaaagcaagtaccaatctggactattgataacttaccaaagtaagctcttgagcttcttttgcctgcataatacataagagaagggag

SEQ ID NO: 303441 - DNA, 566 bp, Homo sapiens
atcttaataagcacaccttgaaatatatgcatctaaagatgcagcagttttatcttagttatcttgttaaagatgaaatggaaattcagatttattggtattatcaatagtatagtaaatgatatattccttttatttattataatttgttcttttatattctttttatgctgaaaagcatctctgtagtcctacgtcaagaaactcttccactcaatgtacttaaattttgtctaaaaaaatgaagaattktttccataattaggaaatgtttaggatgaactgacaaaaaagataggaatttgtaaatccatcagcatttttatattaaatatcttctacctccaggatatcttcagttattttccataaatcgggaagtcacttctcattctttttgaatgccatcattttgtttttataaatactatatttgaatttagaagaagatccttccctgtgataaggctatcaattagcagacagtatggacactataatgaagacttagaagcagacaactaaaacaaagacaaagtgatacttctattatagattcatatttt

SEQ ID NO: 303442 - DNA, 594 bp, Homo sapiens
attttaacttccatcatctaaatatcttttgaaattttcagcgcattcatctgcctatgcttgataaaatgaatcagaatgcaaagactgggctgccttagtatcctgcaatcttcaatcacagagcctgccacatattattgtttgattcaccagctattctgtacagttgagcagaccctgaaagaggaaaataaagtgttcgatataaaccagaattgtaacaacttcacttaaagatatgaagccaattgcacragcttattagagataaaagtagacatatagctatcccagtaagtatctaaatacagataaagttacaatagagacctgatatagatgagaagttacaaaatagtaaaataagatattatattaaagatcttacatggtaattcacacactgagttttgagtatgtataatgacttctggatgctaacccataagaagcactgctactcattgtgaagaatgtgaattttcacattcacatttcacaatgaaactgtcctcatttaatagcatctctctgcatagaacataaatcattttacaagtatttaaggaccttaatgcattggtcagacaa

SEQ ID NO: 303443 - DNA, 513 bp, Homo sapiens
caattaaaagatataaaacagctgaatgtattaaaaaacaagatgcaagtacaagaaacctatttcatctataaagatacacatagactaaaagagaagggacgaaaaaaaatccatgcaaatgaaaaccaaaagtgtgaaggagtagctatgtttatatcagaaattgacttcaagttaaaaaacataaaaagggccaaagtaggtcaatatagatgacaaaggaatcaattcagtaggaagatacaacaattgtaattgtatacgcacctaacacaagagcacccagttatataaagaaaatactattatagctaaagagagagaccccaatataacaatagctgtgaacttcaacaccctcgttttagcactgggcagatcatatagacagaaaatcaacaaagaaagatcagacttaatctgcactacatactacatggagttaacatttacagaaaatttyacccaatagttgcagaataaatattcctctaccgatacatggaaagt

SEQ ID NO: 303444 - DNA, 504 bp, Homo sapiens
tcacagtgtggaccccctgaatcagaatcctctgaggatgccttacaaaaatggatatttttaatctttttcctagacctatgaaatcagaatcccaggtaatggagtctgataatctgtcttttcacatactccccaggtgatctgtgtgtgccttaaagtttgaaagctgatgcactaagaagccaagaatgttctaccttagaacattcttcctcagatctgtgaagcatattctcctccttttagttttggycttcaagagacttagtatcaaatttgatgctcaactctaacaacgatcatattttatctaatcttactaattcactcattgtaagttgcacataataacgattatatgtatcactaaaaatgctgccaattaaacaatgacatcatcattagacactttctgatttttggaatgttaaaatgtgaaatacgtgcatcttagaattgatggaggatggtctacagactgctatccttgtattgtaactc

SEQ ID NO: 303445 - DNA, 630 bp, Homo sapiens
gtttgtttttgactacttgggaggaattttcccttaccatttcaaagtatctaatgacataattgagaactattcctttgtaagaatgggaagggagtagaaaatcattttaagaaacgctattcagactatgatttttttatgcctaagaaaccagagccaagaatctcaggatctggcagatgataaaatgtatttctttaatgaggcactagcattttcaactaacaccactatttctatgctaccacttaaagaggagaaactttcttgcccttaaattttctctctattatgactaggtctatgaacacaaaacttggattttttttagagaatatgtcgattttatttttagtccagagtcaggtgaatattgccaaagcttatttttttttaatgttaggccktagaaggtcaacacatattccaggtttctgtaaagaaaatacatgttttcattttatgtcctgggattggctcccccacactttgatattagggtctgtacacaagtcttaaagaaattactcccctaatgggactttgccttgtgaccaaagtcttctatcctgttcctttttgagagctcccttaagaccagagtaggactttatttatcttataaaa

SEQ ID NO: 303446 - DNA, 515 bp, Homo sapiens
aacaggctcaaagcctctgggagctgaattgccttttttaaagatgaaaagcttggaaaggagtctgtgctctctgaatctgtcagtgagtgggggaagcacaccagcttcaacgtagtggcttttaggcttgtcagagcctttatgtagcatcatatgcatctgtcatatccatatacaacctccagcccagctggccatagtttggtctttagagcaccagtggcatgtttccctgtgaacctgcctctctgcaagctcacctgaggactgggacggtgggagccgcctcattagcaagcctcacctactttgacttattagtcaaaccctartttacctttgtcccaggtggatgtattagttgttcacttcaagatttttatatgaaaagcagatagctgaaaactcccctaggggaataaaaggattatacatgcccggagtgtaataataacggtgtcttagcaacagacacctgcagaggagaggattgccccccttgaagctcaacc

SEQ ID NO: 303447 - DNA, 515 bp, Homo sapiens
aacaggctcaaagcctctgggagctgaattgccttttttaaagatgaaaagcttggaaaggagtctgtgctctctgaatctgtcagtgagtgggggaagcacaccagcttcaacgtagtggcttttaggcttgtcagagcctttatgtagcatcatatgcatctgtcatatccatatacaacctccagcccagctggccatagtttggtctttagagcaccagtggcatgtttccctgtgaacctgcctctctgcaagctcacctgaggactgggacggtgggagccgcctcattagcaagcctcacctactttgacttattagtcaaaccctagtttacctttgtcccaggtggatgtattagttgttcacttcaagatttttatatgaaaagcagatagctgaaaactcccctaggggaataaaaggattatacatgcccggagtgtaataataacsgtgtcttagcaacagacacctgcagaggagaggattgccccccttgaagctcaacc

SEQ ID NO: 303448 - DNA, 639 bp, Homo sapiens
  misc_feature (1)...(639): n = A,T,C or G
tggactttaaatctttagtaaaacgtggtataaacagatgtgcggctgtcatctaggcttcattgttccatttatagagcataggcagaatagttttagcataattcttaagggccctagggtttttgaaatggtcaatgagcaatggctacaacttaacgtcaccacaactgcgttagccctaacaagagagtcaacctctccttggaaactatgaagccagcattgacttctstctctctagctgtaaaagttctatatggcattttcttctaatagaaggtcattttgtcttgattgaaaacctgttgtttagtgtagctaacttggccaatggtcttagctggatcttctgaacaacttactgcagtttgtacatcagcgcttgctggttcaccttccacttttctgctatagagatggcttctttccttaaacataatgagccaacttctgctagctttaaacttttcttctgcagcttcatcacctctctcagccttctagaattgaagagggttcaggccttgctcttgattaggctttggctcaagggaatgttgtggttgattttatcttccatccataccactcatactntctccatgtcatcaataagaccatttcactttctataat

SEQ ID NO: 303449 - DNA, 586 bp, Homo sapiens
gtgggagactattttaaattagcagtccaggagaaaccatttgagaagaaatttgaattaaatgaaagaagaaccatgcaaagatctaggggaagggcattccacataaagtgacagtacatgcaaagaaatctgtttcatatattttagaaatggtaagaaggcaaaggatgcatatcatgtgagcccttgtcaaccatggtcagggtttgcatattgctttgagagaggtggagaggctccacgagtgtgaacagaggagtaacatgatctaacttcagttctagaagaatcactctgaatgttattaaaaaaagactctaggggaattgggtgtggaagtaggaagaccagtttggaagctgctatagtggttcaggcaaaaggtagtaatggcttagattaagatgttaacagaggtggtgaggggtggtcagactgggaatatattttgaaagttgaaactgtgagatttgttaatgtatggaatgtgagatatgaggaaaagaaggaaggaaayaatgactctaagatgtagttctgggcaactatgttaagggacctgtaggacttagaaagtaaatga

SEQ ID NO: 303450 - DNA, 643 bp, Homo sapiens
acttacttacttgctgttataaacagactattcattcgtctattcattcagcatgtgtttatgaatctctaaccatgtgtctagttcttttctaagtgttagagatatggtgtaaaatataacaatttatggccatttgaaatttactcttagagataaacattaaattaatatttataaaaactattttcaaactactgtgatatgaaggaaattttggaggtgaaggaaatgcattatatcttggttatggtagtggytaaggtcaaaagccatgaaattattagtgattttcttcctatataaattttacctcaataaagtttatttaaaaaaagataaagtaataaaacatttaggaataagttcaggcaaaatatgcacaatacatacattcagaaatctgtaaaatattagagaaataggaaatatatcatatgtattgattaaaaggtacaataatataaagatttcaattctcccaaagtcgatatatagaatcaatgaagcatcccccccgccaatttcttgtgtttgttttgttttgttttgttctgttttgttgtgttgtgttgctgagaagtccaccaactaataaatctgaaatttatttggaaggacaaaaagcccaaattaaaaatgc

SEQ ID NO: 303451 - DNA, 622 bp, Homo sapiens
tggaagcccttctttaatgtaatcttttcattttgccacaaggaaactgagcttcagggaggaaaggtgatggcccaagatcacccaatgagttaatgatgaggccagacttaaacccaggaacgccaactcccttcacctgcacatccatccaactgcactgtctccttccaagagtcacttccccttggggcactgaatggtcctcaagytgagcccctcaagtaaattagctgctatgaaaactaccatgatccttgcctcctccaggatatcttctttaattgtagatctccctcacgctgggaagcactgtcctggagagtctagcaatttcttaaatgcttttgagcattgtttatgaacagtgtctggtcaaacagctttatctcctcaccaagacaaggcaaaatgaggactgacacgttctccgtcttgtgactatcacatgcccttcatttagaacagtatcaggagcatattaagtgctcaatacaagattattaaatgaatggatgaatgaatgaatcagtcagtcaatcaatacctctgtcacagagagaaccagtcacagtactgggtacatagtagaatcctcatcacatccagctgatggggtaac

SEQ ID NO: 303452 - DNA, 622 bp, Homo sapiens
tggaagcccttctttaatgtaatcttttcattttgccacaaggaaactgagcttcagggaggaaaggtgatggcccaagatcacccaatgagttaatgatgaggccagacttaaacccaggaacgccaactcccttcacctgcacatccatccaactgcactgtctccttccaagagtcacttccccttggggcactgaatggtcctcaagctgagcccctcaagtaaattagctgctatgaaaactaccatgatccttgcctcctccaggatatcttctttaattgtagatctccctcacgctgggaagcactgycctggagagtctagcaatttcttaaatgcttttgagcattgtttatgaacagtgtctggtcaaacagctttatctcctcaccaagacaaggcaaaatgaggactgacacgttctccgtcttgtgactatcacatgcccttcatttagaacagtatcaggagcatattaagtgctcaatacaagattattaaatgaatggatgaatgaatgaatcagtcagtcaatcaatacctctgtcacagagagaaccagtcacagtactgggtacatagtagaatcctcatcacatccagctgatggggtaac

SEQ ID NO: 303453 - DNA, 622 bp, Homo sapiens
tggaagcccttctttaatgtaatcttttcattttgccacaaggaaactgagcttcagggaggaaaggtgatggcccaagatcacccaatgagttaatgatgaggccagacttaaacccaggaacgccaactcccttcacctgcacatccatccaactgcactgtctccttccaagagtcacttccccttggggcactgaatggtcctcaagctgagcccctcaagtaaattagctgctatgaaaactaccatgatccttgcctcctccaggatatcttctttaattgtagatctccctcacgctgggaagcactgtcctggagagtctagcaatttcttaaatgcttttgagcattgtttatgaacagtgtctggtcaaacagctttatctcctcaccaagacaakgcaaaatgaggactgacacgttctccgtcttgtgactatcacatgcccttcatttagaacagtatcaggagcatattaagtgctcaatacaagattattaaatgaatggatgaatgaatgaatcagtcagtcaatcaatacctctgtcacagagagaaccagtcacagtactgggtacatagtagaatcctcatcacatccagctgatggggtaac

SEQ ID NO: 303454 - DNA, 634 bp, Homo sapiens
atcccccaagtatatctgagggacagctctcagaggytcaggcatgaatacattgtattgaatcccattaagcctttctttggttaatgatgcagaaagtttctgatatgaaacaaaattgaaacagatcctgagaaagagtccactgaatagggaatggagcaagtctttgcagccactaacatctaccaagatgggggcaacatctgcttatttcactttcacagtcatctagaaaagtatctgggaataccaattattaggtgctaatgcagagaaaaacgaaatgagaaatcaatcattgtcctcttgtgtcatcctttataaacccagacagccctgaggtcatatccttgaccttgccatttcctgagctatacaaccatgggtgattacctatatttcactgaaacttggtttcctccatagaaaaataaagataatatctgtcatattgagatcctgtgaagattaaagttttattaaataaaataaaatgcacacatgctggacataaatttgatgtgaaataattgcaaggtccgttttccactataacaacaattctttctgtttgttgattggtgagtaaaattggtggtgaagctaggtagaaagaacactccaaataacc

SEQ ID NO: 303455 - DNA, 575 bp, Homo sapiens
gaatggagcaagtctttgcagccactaacatctaccaagatgggggcaacatctgcttatttcactttcacagtcatctagaaaagtatctgggaataccaattattaggtgctaatgcagagaaaaacgaaatgagaaatcaatcattgtcctcttgtgtcatcctttataaacccagacagccctgaggtcatatccttgaccttgccatttcctgagctatacaaccatgggtgattacctatatttcactgaaacttggtttcctccatagaaaaataaagataatatctgtcatattgagatcctgtgaagattaaagttttattaaataaaataaaatgcacacatgctggacrtaaatttgatgtgaaataattgcaaggtccgttttccactataacaacaattctttctgtttgttgattggtgagtaaaattggtggtgaagctaggtagaaagaacactccaaataaccattgctttggaggtaggaaattgatttccaaatagtgaaagagattgagagtgtatagctgatctcactcctttgagctgatgatagaaactctt

SEQ ID NO: 303456 - DNA, 570 bp, Homo sapiens
actgagttttccaattgtatttttcctataaaattcatcttactttacgcttttttattttctttccatgttagaagccatttgatctagccttgggataggatttggtgttaactccaaaggaaagaatgaaagcatgtgttctccctccacgcccaactcctgtgtgaaggctggctccatgtctgcaaaaactaggccttttttacccttgaggagggagaaatgtttaatgttgtcgagatttggagctttgtcttttgggccatttatgttcctctgtacttcagcaagaaccacrtgttaaatcaagtttaacctaaaactgcctccttacatattttaggcttggcctaaaggtttctccatgcatagggaactgtaacctaactggatatgtaaacagactataacctactcttgtgccaatcagcaaatgtcaaccaaaggcagccaactgttcaaaccacgttcaaataaggcaaatgctgagcagtaaccgatctggctgtttttgcacctcacttccattttctaaatattgctttcctttttctgtccataaatctt

SEQ ID NO: 303457 - DNA, 559 bp, Homo sapiens
cctgggattttatgattgtgttaaagtagtgaaaatccacgaaaatttacctaaagacagctggacaactgctctactaggaataggacaaacagtmgcttggcaaatacctactgaatacctactgtgtgtaagcactctgggaactgttacacagcctaccacatgacccatttgtttacagcatatgtgtgagttacagcctagcatagctccaacgaacagttccacaaagggttggggcttcaaaagtgggtataaaagagaggaacatctacatgaggcacaaatcgtcctgctggcccaccagttgggccctgtgtctcctaaagcaagtaccttcccgagggctgcctgtgcacccagcatggagtccagtgatgatgtgaaggtcaggaggccagggtggatggtggggttggtaaagtggagagtatgcaagttgagagagaaacaggtttataaaggccatagagacgacttaaaggaaaacaattaggaatgaacaaaaatcttaccgccctgcaattctcagtctcaagctcaggataacagggta

SEQ ID NO: 303458 - DNA, 559 bp, Homo sapiens
cctgggattttatgattgtgttaaagtagtgaaaatccacgaaaatttacctaaagacagctggacaactgctctactaggaataggacaaacagtagcttggcaaatacctactgaatacctactgtgtgtaagcactctgggaactgttacacagcctaccacatgrcccatttgtttacagcatatgtgtgagttacagcctagcatagctccaacgaacagttccacaaagggttggggcttcaaaagtgggtataaaagagaggaacatctacatgaggcacaaatcgtcctgctggcccaccagttgggccctgtgtctcctaaagcaagtaccttcccgagggctgcctgtgcacccagcatggagtccagtgatgatgtgaaggtcaggaggccagggtggatggtggggttggtaaagtggagagtatgcaagttgagagagaaacaggtttataaaggccatagagacgacttaaaggaaaacaattaggaatgaacaaaaatcttaccgccctgcaattctcagtctcaagctcaggataacagggta

SEQ ID NO: 303459 - DNA, 559 bp, Homo sapiens
cctgggattttatgattgtgttaaagtagtgaaaatccacgaaaatttacctaaagacagctggacaactgctctactaggaataggacaaacagtagcttggcaaatacctactgaatacctactgtgtgtaagcactctgggaactgttacacagcctaccacatgacccatttgtttacagcatatgtgtgagttacagcctagcatagctccaacgaacagttccacaaagggttggggcttcaaaagtgggtataaaagagaggaacatctacatgaggcacaaatcgtcctgctggcccaccagttgggccctgtgtctcctaaagcaagtaccttcccgagggctgcctgtgcacccagcatggagtccagtgatgatgtgaaggtcaggaggccagggtggatggtggggttggtaaagtggagagtatgcaagttgagagagaaacaggtttataaaggccatagagacgacttaaaggaaaacaattaggaatgaacaaaaatctyaccgccctgcaattctcagtctcaagctcaggataacagggta

SEQ ID NO: 303460 - DNA, 568 bp, Homo sapiens
acaaggactttaatggagttgggaatatattgtgttgaatcataaatgagattgagactaatgacctaagcaagttaggggaaccatctcagaaacagaatgtttgatttggtactagggattagtaggaaattatctgagcattctggatagagagaagaaacttgcaagttcccagaatcatgagaggtggtatgtgcaaggctgtaarttataatctggaaaagaatgaatggagataggttggtgaaggtgggttgaagaggatctatgagggaacaggtaggtagcttcctgagccacagttcatgctgcacaccaagccatctatggccatccttgcctgtttataatgataaagcttcatgaagcaattatatttcccccagctgcagtctcacatatggatggtaccaatcaatctctggtcacttcaccttccgttctacctgcctcttttatctgcttgtttcacatttaagatacaggaagagatagatgaaaagctaggactcatttcagctcattcagaccccagcctccatctctggagcacaaggcagctttt

SEQ ID NO: 303461 - DNA, 567 bp, Homo sapiens
cttataaacatatacttacattcaactcagcaatcctactcctaagtatttacccatgagaaataaaaatttatggtcaagagaatgtttatagatattttattcataatcacacaaaattttaaaaagtaacctaaatggtcttcagctggtgattgaaaaacaacctctgtcacatcacacaacagaatgctgctcagaaacagaaggaaccaatrtattcaacaatgtgggtgaatctcaaatgcattattctaagcaaaaaaaagtcagactgaaaaggttacctactgtataattccatttactcaccctctaggaaaggcaaaactaaagacaaagagagggcaggtatgtgtttgtcggtgactttggggtagagaagggtggactacaaaagggcaataagggaatatttggggtaatggaactgttctatgtcttgattgtgatttgtgcacaatttacacaccagaatgcacaaatcaaaactcacagaacttatactaaaagggtaaattttactatacataaattatacctccataaaaatgcaaaaaaaaatta

SEQ ID NO: 303462 - DNA, 572 bp, Homo sapiens
cctaaatatctcgaatggatgaataaacagttttgcaaataatgccccattacattttttggtaaggttgcctatataaagggttcatactttgaagcaggcagcccttgcaattcgccatgtgaatgtaaaataccatgatgagttatggacattcctcttcaaattactctgaagatgccaaagaaattacaaacaggagcctcaaaattcattgcattaactcatatccccagacaattcattcccaagagtttgyttcaatgaaaagtctcccttaggaaaggacttctcacccttactctgggaattaaggatggatgtggctgtaatggagctcagagcttttcatcttcccaagatattaaaatgcaaattgggggaggacagagacctgcaggcagatctccctgggcctagcctggctgtagcagaactcacatccatccgtggtccgcacctccatgtgcaccaggtccgcctccttatccaatccggccaccgacctgggaaaggaagggagagacagaagctcagtgacaacaccgatagcagacagcaaagtgggatgc

SEQ ID NO: 303463 - DNA, 507 bp, Homo sapiens
gtgttggtttctttgataaccaacttttaatgatatatatgagatgtaactattctgggatttaattaactttcaagactgtktttgcatcttggtctcagctcacctggattttggtacttcatctaagatcctgatttatatacccatcatggaaggtagacaagcctctatgatgtggctactgtatccccagtaaattactatctttctgaaaaaaacctctgaggcagaaattaatagagtgtaattattcaaagaaaagctatttggagatgttttaaatgatgttaatttggtcttaatgggagagattttgaatgttaaataaatagcaattacatcattagggacacatttacaacacgggagtttaaagcaaaatgaaagagttacagagacagtcttcaaaagaaatccaatgaagacatcttcaggtgaatattcttgaagtgctttcagaatcttaagtaaaagtgttttcaacagccagcccaaatggaggtt

SEQ ID NO: 303464 - DNA, 575 bp, Homo sapiens
accactgctttgcacagcacaatcaaatcatgtatgcaattgctaattcatttctgtgtcttctctatttggatataaactttaaagtgggatcctgtcttatttatttttgaaccattgggacctatgtgtgtagtacrtattaggtgatactgaagtgtttactgaattaataaacaatctgatctacctgtgttaatgccaaaatttcaatgtaaaacacttgaggccagacacgcagaggactgagggtaccacaagggactatatggatactttatttgttctgaagccacccggtttctttctttctttttttttttttcccagaagagaaatgtctcattttgttaacccaatgtatcccaaatatatctgaccactgtaatatttttagaatttttactttaagttctgagatacaggtgcagaatgcgcaggtttgttacataggtatacctgacttcaaaccatactacaaggctacagtaaccaaacaacatgctactggtacctaaacagatatatagaacaatggaacagaagagaggcctcagaaataataccacacatct

SEQ ID NO: 303465 - DNA, 579 bp, Homo sapiens
taacaactcaccaggaaactatctgacattcattgggtgtaagcaatcaggtccctcgtcttaaagtcccaagtctccacttgtagaaactcagtgcaagggaagtacacacaaatacaccaagcaaagaaatacatgatgcaaacattcagagttttcttctttaaggaaaagtggaaatcataagggttaaacttgtggaaatgtttgggaaagtatatataataatggtrataaatgctaatgggtattgagaccattcctgtgtcaggcattgtgtttggtgtttataagcattatcttcattaatcctcaaaatgaacttttaaggaaggtatcatttatctaatttttctcttcagtaaaatgagaatatcacataataacaattcattgatattgagagtacactatgtgttagctatatttaaaatgtaaatgttgattttgtttaatcctctcatcaactctatgagttaggaatgattttttctctacttaaaaaggcacaattagtcataagagcttaaacaacttgcccaaagacatgtagccacgaagcaacaaaactcagactca

SEQ ID NO: 303466 - DNA, 598 bp, Homo sapiens
ctttctccaacatgtaagtccctttaaagcagcatttaggaaatacgaatgcattctgtatacattttcaatattgcagaaaattttggttctagactacatgaactggaagtsactcatattgaaggtaattggtaagaaggaaaagttgagaatagaaaaaggaggttgggccaacagtagaggagtagtgactgaagatttttgcaaagaaaccttaagaaggattaaacatggctgaagaaaagaaaacttggggcttgggcttcacttttttgaggtctgtgatgatagaatgaggtgaggcatgtgtaagagggtccgtgacattgccacaggtattagggaggggaggagaggcatgcctgctcagatatgccaagcaggttaataattgcccctggcacctcttccctctcaagcatccaagttccttcacatttctaggaccaaatttaggccaggatagaccagaaggccatgagcagtattcagtgcagaactagcctcaggacacataaagctccctgtgcttaatgtctgcaaaagagtaaagatgaattttcaagcatcctattaaaactgcctgaaaaaaaaa

SEQ ID NO: 303467 - DNA, 598 bp, Homo sapiens
ctttctccaacatgtaagtccctttaaagcagcatttaggaaatacgaatgcattctgtatacattttcaatattgcagaaaattttggttctagactacatgaactggaagtcactcatattgaaggtaattggtaagaaggaaaagttgagaatagaaaaaggaggttgggccaacagtagaggagtagtgastgaagatttttgcaaagaaaccttaagaaggattaaacatggctgaagaaaagaaaacttggggcttgggcttcacttttttgaggtctgtgatgatagaatgaggtgaggcatgtgtaagagggtccgtgacattgccacaggtattagggaggggaggagaggcatgcctgctcagatatgccaagcaggttaataattgcccctggcacctcttccctctcaagcatccaagttccttcacatttctaggaccaaatttaggccaggatagaccagaaggccatgagcagtattcagtgcagaactagcctcaggacacataaagctccctgtgcttaatgtctgcaaaagagtaaagatgaattttcaagcatcctattaaaactgcctgaaaaaaaaa

SEQ ID NO: 303468 - DNA, 588 bp, Homo sapiens
gtgctggtgggaatgtaaattagttcagtcattgtgaaaagcagtttggcaatttctcaaagaacttaaaacaggattaccattcgacccagcaatgccattattgggtatatgcccaaaggaaaataaattgttctgttgtaaagacacatgcacacatgtgttcatcacagctttgttcacagtagtaaagacatggaatcaacctaaatgcccatcaatggtagactagattaaaaaaaaatggcacatatacacagtggaatactatgcagccataaaaaagaacaagatyatgtcctttgcagcaacatggatggagctggaggccattatcctaagcaaactaacacggaaatagaaaaccatatacctcacgttctcacttgtaagtgggagttaaactttgagtacatatggacacaaagaagggaatggtagaccccgaggcctacttaaaagtggagggtgggaggaggaagaggagcagaaaactatctattaggtactatacttattacctgggtgacaaaataatctgtacaccaaatacccatgacatacaatatgcctatataacaaacctgt

SEQ ID NO: 303469 - DNA, 588 bp, Homo sapiens
gtgctggtgggaatgtaaattagttcagtcattgtgaaaagcagtttggcaatttctcaaagaacttaaaacaggattaccattcgacccagcaatgccattattgggtatatgcccaaaggaaaataaattgttctgttgtaaagacacatgcacacatgtgttcatcacagctttgttcacagtagtaaagacatggaatcaacctaaatgcccatcaatggtagactagattaaaaaaaaatggcacatatacacagtggaatactatgcagccataaaaaagaacaagattatgtcctttgcagcaacatggatggagctggaggccattatcctaagcaaactaacacggaaatagaaaaccatatacctcacgttctcacttgtaagtgggagttaaactttgagtacmtatggacacaaagaagggaatggtagaccccgaggcctacttaaaagtggagggtgggaggaggaagaggagcagaaaactatctattaggtactatacttattacctgggtgacaaaataatctgtacaccaaatacccatgacatacaatatgcctatataacaaacctgt

SEQ ID NO: 303470 - DNA, 508 bp, Homo sapiens
agcacaatgaaataatgaatacaatcatattaagagcactttgatcatttcttcctgatgcaatctagaaacagtygctacctgggcaggcagtaaaactgaaagcgtttattccagagaatcagacagaaggccttgggtacagccgactttctgttctaattgcattccgtggaattacccctgcacattattacaaggtgtacgtctcttccgagaacatttttctcagaagaaacaggaagcaatcttgcctggcctcgagaggttacaaggctagagggagaggtgggaagtggctaatttcatgttcccatcaaacacaagctggattataagaaaacaagagaagagaaggaggaaagcatggagattaaagaatcagacaattttaaagcccaagaaatgcagagagggaaaagctgatctttttaatgtatttttttgtaacagatgtttgcttgcagttccaaatctaatagcagttggtatagtaaagatgaaatag

SEQ ID NO: 303471 - DNA, 508 bp, Homo sapiens
agcacaatgaaataatgaatacaatcatattaagagcactttgatcatttcttcctgatgcaatctagaaacagtcgctacctgggcaggcagtaaaactgaaagcgtttattccagagaatcagacagaaggccttgggtacagccgactttctgttctaattgcattccgtggaattacccctgcacattattacaaggtgtrcgtctcttccgagaacatttttctcagaagaaacaggaagcaatcttgcctggcctcgagaggttacaaggctagagggagaggtgggaagtggctaatttcatgttcccatcaaacacaagctggattataagaaaacaagagaagagaaggaggaaagcatggagattaaagaatcagacaattttaaagcccaagaaatgcagagagggaaaagctgatctttttaatgtatttttttgtaacagatgtttgcttgcagttccaaatctaatagcagttggtatagtaaagatgaaatag

SEQ ID NO: 303472 - DNA, 551 bp, Homo sapiens
aaactggactatctcagctcagtaaaggctgtagttctataagtgaaatagcagaaaaacaaatatttcctttttctgcctcagtctattgaaaaacctccatagttccaaatacaggcaaaataatagttggaataacagctacagatgaaataatagtaggcctgtaaggggcaaacatgctggagatagtccaggtgttgagtcaagagcaatactgccaactcccttttctctcacaactactccgaaccatgtacaaagaayaaaacaacacaaaacaacaaaacaaaaaaaaaaacagttgatttttcatagaatgcttaggcaatcttcatttaaaatctaaacatagttttgtggatgcagacggaatgggttgaagccattgcttccaaagatgttggtatgaatgtgtgtatgtacaaggtatttgttaccaccatcttcaacacacacacagcacatccctaagttgtgtaaggcataaacggctatcacatgagtttttaagggagtgttcataagatatttataagagatacggaatg

SEQ ID NO: 303473 - DNA, 512 bp, Homo sapiens
cacactcacctcttgtgtgcaccaatctctctccaggcttcctggaagggcaacccactgtcacttaaaacaacagcagtgagcattggtggaacaatggattttgattagaaaaacactaatgccatatctatttgctaattgtagactcttaacaatttctgtcaaatgtaggattctttttaaaatttcagagaagtaatcacagccttctgaaatccggtgcgagccctatccattcaggcttttgtttgcataatgtgggaagttttgtgggggtgtgggcctgtgagagggatgtaatagagtcgttctctttccaagggcccttgagaaggcaagtgttgagcttacgcttttaatygtgaaggaccaaagataaccaactgaaaagtttttgatcaagatatttacatcttcattgtaagcactggaattgagagggtaaatcacaaaatacatgcagaagccatgcttttttattctttcacgtggtgtctgagacacttagt

SEQ ID NO: 303474 - DNA, 281 bp, Homo sapiens
ggggtatcatgattgtaaccaattctcaatctattcagaaaamataatccatgtacataggatggggggtgagggaagcaaatgtggtaagactgttaacatttgggaaatctggataaaaggcatatgggaagttttttgtattattcttgtaacttttctataaatctgaaattaagtcaaatttaaaaaggagaaagaaagtaaaaaagatatcaaagccgggatccaaattcagactcactatgactaaggactccttctgtggcaagtgacagaaa

SEQ ID NO: 303475 - DNA, 579 bp, Homo sapiens
gacctcggccttgtgacctctgccttgtgacctaactcccacygtgcatcctgccatgattatatctgcctgtctgtggtttagaagctctcttatgttctcacttcctcactgaaagttcttcctattgcactaccttgcttgagcccactcccagaacagtcgacatatttgtaactacatgtgtattctgtctcttttacttgagcattagctccacaggtaccattatcttgttcatgttctttccctaatgcctatcacattgcctataatataataaggacttaatatatttttataaaatttaattatacttatacttctctttcagacccttccctgtctttttatgcttcagttatagggaactcagttttccccagaatcagtgttccttgtgccttagtggttttttaaaaagttgagtcctggccatgaaactcagactcatgactaagtcctccaatgccagctgcccccaccctcaagacactaattgcacacatatccagactttcttagttttcctgatgcatttttctactatgcaaaaacgtgactccaatcagccaattc

SEQ ID NO: 303476 - DNA, 643 bp, Homo sapiens
gcctttttatagccacagaaccctttgcttaacagacggcttgcctggcactgtgatcaacaggccaggtcaaagtggatccacctgggagggagtggggtgtccatctgcacctgyctccaccgctcccaagggccttggagccacctggggctctacacaacacaatttagccaattcatatctgacccttcaatttacagatgaggaaactgaggccagagaagttgaagcagataaggagttgatagcagaaccaggcctccagatcccctctccaccccacagttcaagtctctgtcagcacagcccctgccattctgcagtgttcacctccacgttcatgaaccatgcacagtgaactggattttctgaagatgacccagccccatccagccaacaacctcgagctccagcaggcctcctgcttgtccaaggccggccttctgctccacctcatcccctatgcaggatccagggtgggtgcatcagctaggagaggggaataaggcacacttgcaagggaagggcaagggcagaggcccaaatgagtgtgcacaatgccccatggagttcctggatgtccccaggaaccaagaagagctggcacctagatcgctgggcctggagaggagggaaggag

SEQ ID NO: 303477 - DNA, 598 bp, Homo sapiens
ctgaaatgagttaaaactttgggtactgttgtgaaggcatgattgggattgaaatgtaagcatatgagatttgggaggggtcaggggtgaaatgatatggtttggctgtgtccccacccaaatctcatctttaaaagtagctcccataatccccatgtgctgtggcagggacccagcaagaagtaatttaatcatggagacaggtttttcctgagctgttctcatgatagtaaatgagtctcatgagatctgatggttttataaacggcasttcccatgcacatgctctcttgcctgccaccatgtaagatgtgcctttgctcctactttgcttcctgccaagattataaggcctccctagccatgtggaactgtgagtacattaaccctcttttgctttataaattacccaatctctggtatgtctttattagcagcgtgagaacagactatacggtgtgccttatagaatgttttttctatagccattgaaataatcatttgaaaaatcaactaatttcatgaacaatattgatagtacatagatttctgctactgatcattattttatttctggaatatatagtaccttatcatc

SEQ ID NO: 303478 - DNA, 565 bp, Homo sapiens
ttcctgcttgcccttggtctccccaacttcatgcctaaatttcctcctgactgccagttctgctgacccatggagacctcaggctcaccaccagaggcaaggcaacagccttccatagatttcttcaccagcacacccagtggcataaggtttaatccctataatctctagatatatatcaagasagtagggtggttctacctctctcatcaaatctgatacaaggagatagacattgatcaaagaatcatacagtgtactatacaattaccaattttgttaagggatttgaagaaagagtataagctggaatgagacaatataggtatagtgcttttaattggaaagagcatgtcagggaagaccactttgaaggagtaatattttagctgagtttgagtagatattagctaagtcatgagttatacaagaggaatggtgtgtgcaggagttctgaggtctgcccctttgggggaagtaaaggagtatcacagtagctagggtaaggagaagaggcagcatgtattaaagaaagcccaggccattgggttcctgtagtttaccg

SEQ ID NO: 303479 - DNA, 594 bp, Homo sapiens
ctttgctagtttaagtggccaaaaactgagtcatataaggaaaaattaacaagggtggtgatgataatgatgatgataataataatgatggaatctggaattgctaagagaaggctggcttaagaacaagttttacaagtggaaaggcttaaagaaaacacaattatgagtttaggttgtttggttttcccaagggaagaaaactgataataaagaagtctgataaggactgaaaaataaagagataagaagcaggaggttattacagtgggacaaatgaataaaaggggtgtggcagtgggaataaaaaggagagaaaatgcaagtctttgaagaagtaaaggtgaaacttgggacaaggtggccatctagacacagccaggaagaatttctcccacwgagagagatcagaatattgagccgaatgacatactccaaatagatcttcagagacaatgtactaagagtggagagagaaatgatgcagacaccagggttgaaggtggaggaagctgggaattctgcatggggttgctgagcaccaggacttgttcctgaccttgaacggctcccaaagaaggggcaagtgaaata

SEQ ID NO: 303480 - DNA, 607 bp, Homo sapiens
cttgccccacattcaaacactcaaggactataaagatcacaaaaatagaaggcaccatccaaaggataacaacttcaaaggataaaggtacatcagccctcacagaggagaaagaactagtgtgagaactccagaaactctaaaagccagagtttccttttccctccaaatgatcacagtagcttcccagcaatggttcttaagcagataaaaaatgtcagacatagaattcagaatctggatggcaagggagcctaatgagatacaagagaggttgaaacccaatccaaggaaaacagtaaatgatccaagagttgaaagacaacatagccatgttaagaaagaaccaaactgaacttctggacatgaaaacttcactataggaattttgtaatacaactggaagcattaacaagagaatataccaagcagacgaaggaatctcagagcttaaagactgctcctttgaagcaacttaggcagacaaaaataaagaaaaatgctttttaaaaatgaacaaaacctccaagaaatatgggattatgtagagaycaaaactatgactcattggcattcctgaaaaagaagaccaagccacttggtaaac

SEQ ID NO: 303481 - DNA, 560 bp, Homo sapiens
tgtgtctttttagtaggacaacgtatattcctttgggtatataccagtagtgggattgctgggtcaaatggtagttctaagttctttgaggaatctccatactgctttccacagtacctgaacaaattgactttcccatgaacagtgtgtaaatgttccttttctccacaagcttgccracatctgttgttttctgactttttaatcatagccattctgactcatctgagatggtatctcatcatggttttgattagcattttttctaatgattagtggtaatattttattcatatgtattagctccatgtacgtcttttgagaagtgactcttcatgtcctttgcccattttaaaaattggattatttgctttttgtttgttgaattgtttaagttccttatagattctggatattagacctttgtcatatgcatagtttgtggctattttctcccattctgtacattgtctgtttactctgttgagagtttcttttgctgtgccaaagttctttagtttaattagggcctctttgtcaattcctgtttttgttacaat

SEQ ID NO: 303482 - DNA, 560 bp, Homo sapiens
tgtgtctttttagtaggacaacgtatattcctttgggtatataccagtagtgggattgctgggtcaaatggtagttctaagttctttgaggaatctccatactgctttccacagtacctgaacaaattgactttcccatgaacagtgtgtaaatgttccttttctccacaagcttgccgacatctgttgttttctgactttttaatcatagccattctgactcatctgagatggtatctcatcatggttttgattagcattttttctaatgattagtggtaatattttattcatatgtattagctccatgtacgtcttttgagaagtgactcttcatgtcctttgcccattttaaaaattggattatttgctttttgtttgttgaattgtttaagttccttatagattctggatattagacctttgtcatatgcatagtttgtggctawtttctcccattctgtacattgtctgtttactctgttgagagtttcttttgctgtgccaaagttctttagtttaattagggcctctttgtcaattcctgtttttgttacaat

SEQ ID NO: 303483 - DNA, 526 bp, Homo sapiens
tcagcctcacaggcaatcaagagcttggcttcaattacaaaatgaactccagaaatcttccaacagttastcaatcccagcctttcacatgaaaatgtatttaatttacataatactgtgaagaaggtattgttatgatcctcactttgcagcctatggaagtagggattagtccttgatgaagagtcagaagatgtatgtactttcaaaagtgatttaatatggaaactggaaaaaaattataaaacatgtaatggaatcctaaataggatactgataaggtttggctctgtgtccccaccaaagtctcaccttgaattgtaataatccccacgtgtcaaaggcaggtccaggtggagataattgaatcataggggtggttttccccatactgttatgatagtgagttctcatgagatctgatggtcttataaggggctttcccccttttgctcagcacttctccttgctgctgctgtgtgaagaaggatgtgttttcttcctcttcctctgtgattgtaagttt

SEQ ID NO: 303484 - DNA, 550 bp, Homo sapiens
  misc_feature (1)...(550): n = A,T,C or G
nnnnnnnnnnnnnnnnnnnnnnnnnnnnnnnnnnnagatctaatggcttatgcttttatttcttttcagyttcctcctaagccatactgggctgccactgttcttcatatatcaggttcaagctgatggatccaagccaaaggactccatattctccaaagcctataagcagaatgctggtgtggtgtggggggggaagaagttccattgtgtccctactgaagggacacagaagtaccaaaagggtcactgaactgccaggtaccaagtggtaccaggtgccacgaggctgccaaaggcagagatgagccaagccatcaacttcagctgaggttgagacatggcatccataaatgccaaacaggaccatactctatgcagagaataaggatcagaaaatcaagtgcaaaacgggaagtctccctagaacccacatgtgctgattcaagacacccttattctcaagccacagtgttacctattcccttgccccgaacacccagataccattttggtgaggaacaggagaaaggaaagggaatacaatgta

SEQ ID NO: 303485 - DNA, 646 bp, Homo sapiens
ctcgctttgttgcccaggctggagtgccrtagtgcaatcatggcttactgcagtcttgaacttctgggatgaaaaaatcctcccacctcagcctcctgaatatttgggattacaggcatgagccaccacgcccagcccaatttgttttttaacaacaaatttagggaatattaaaattgtcttttcacaggcagaactattttcaatatgttcaagcagaactctcagtcctaagttaaaggcagtcacataactgggttccaaactgcagcaaatgattctgttttcagcacaagatgacaccaggtgttgcagttttgaaaagagatttgtcagggcctggcttgaccagctgctgcaggggcctgggaggagttggctctgcaaggaagggccttactggggagagtcagctgggtgggctccattgagcagcagactctgggaaggggtctcctgtggcaggcagaatcctgtgtccagtgggccacattacagattggagggcgttgttgagaacagcaatttacatcagagaggaccagcagagctcatccccacagaagcactgctatgggaaattggaaacaggctgctgggaagctaatggacctggcagcacagggcatactgtcttccagcagct

SEQ ID NO: 303486 - DNA, 646 bp, Homo sapiens
ctcgctttgttgcccaggctggagtgccgtagtgcaatcatggcttactgcagtcttgaacttctgggatgaaraaatcctcccacctcagcctcctgaatatttgggattacaggcatgagccaccacgcccagcccaatttgttttttaacaacaaatttagggaatattaaaattgtcttttcacaggcagaactattttcaatatgttcaagcagaactctcagtcctaagttaaaggcagtcacataactgggttccaaactgcagcaaatgattctgttttcagcacaagatgacaccaggtgttgcagttttgaaaagagatttgtcagggcctggcttgaccagctgctgcaggggcctgggaggagttggctctgcaaggaagggccttactggggagagtcagctgggtgggctccattgagcagcagactctgggaaggggtctcctgtggcaggcagaatcctgtgtccagtgggccacattacagattggagggcgttgttgagaacagcaatttacatcagagaggaccagcagagctcatccccacagaagcactgctatgggaaattggaaacaggctgctgggaagctaatggacctggcagcacagggcatactgtcttccagcagct

SEQ ID NO: 303487 - DNA, 591 bp, Homo sapiens
tgtaatcccagcactttgagaggtcaaggcaggagaatcacttgaatccaggggttcaagaccagcctgggaaacatagggagaccctatctctacaaaaaatattttttaaaaaaattagccaggtgtggtggtgtgcacctgtagtcccaactactcaaaaggctggggtgggagaaatatttcagcccaggacgtcactgtgcacaattgctttacttttttttcccttggtatagacttgttgaagagtaagccttcatgtactgtttcctcactttacattcactctcaactggagacaatatagagtcttcgcagatgcagctttctccagaccaacaatgtggttagacatctggtttttcattgttgttgtttgatttctctgactagcttccctgaccagaggtcgttttgagtttccttctctggaatttgaccactgagcagagacacataggagagaagaygtgaatgctgagtcatcaatcagcatcactgggaagaaaaagcctctcagtttcttctgctgggactcccagagctggagtattttctgctcttcctaaggcctggtaattcagctct

SEQ ID NO: 303488 - DNA, 591 bp, Homo sapiens
tgtaatcccagcactttgagaggtcaaggcaggagaatcacttgaatccaggggttcaagaccagcctgggaaacatagggagaccctatctctacaaaaaatattttttaaaaaaattagccaggtgtggtggtgtgcacctgtagtcccaactactcaaaaggctggggtgggagaaatatttcagcccaggacgtcactgtgcacaattgctttacttttttttcccttggtatagacttgttgaagagtaagccttcatgtactgtttcctcactttacattcactctcaactggagacaatatagagtcttcgcagatgcagctttctccagaccaacaatgtggttagacatctggtttttcattgttgttgtttgatttctctgactagcttccctgaccagaggtcgttttgagtttccttctctggaatttgaccactgagcagagacacataggagagaagacgtgaatgctgagtcatcaatcagcatcactgggaagaaaaagcctctcagtttcttctgctgggactcccrgagctggagtattttctgctcttcctaaggcctggtaattcagctct

SEQ ID NO: 303489 - DNA, 616 bp, Homo sapiens
attagattgattttctgacctagatttcccttctaatgccccattccgcttgacagttctatccttttgggactccgtaacaccaatagtatcacacatactttactccgtggaaaggtcaagctcattttctttatttaaccaggtggattctatgaaacttatttatttctatatgtccagcattaacaaagtacctagcacatgataaatagtcaataagagcaaattgaataaaaataagatggtatagatgcatatgaaaacttaactatttttgaaaactcttcccctagctrtattttcttgagaataattgggctccttttttttgctattgttcttttctctgtatgtcacagacttatgtttaatgggttttagatcctagaacttgagtttgcaggccgaatatgtgctatgtgggcttactaggattcagaattaccttcttgctctctctcaaagaacaatatagcattgagacttggtaagccataaatagaaagcaaagggtgaaatttcattgtaaaacagcaaaaagaatcagaattccctttattcttttagggcaaaagatcacttcttgcattatttgaaggtgtcacatgagaga

SEQ ID NO: 303490 - DNA, 553 bp, Homo sapiens
tagaacaaacccaggcatgaagggctggtagcagttggggagccagggcyggacacagggaggccatcataaaaaacagccagggaatccaccactggggaggatgaggccatacgtagtggccgtagacatggcaacctggatccctctgaggtctgtggggaagaagcacgtgggtcaactgtgatataggcaataagtatgtagattctaggtgagtcaaatgtcaaaaactgatggggacccagcttacatgagcttcacatcaagcaggtgggcatgctttgaattagtggagatgaacaaggacacagagaatttggcctttagccaatcgcatattttcttatttatttaatgagataaattgtatttatgtatctatttattccactattatctgtagaaggtctactgtgcacctttctggtccctgctaaaacactgccttcattccactgagaagtagaccacataggtctcaggaccttctgtggtttcactcactcctccaaaaatgaaatatcctttctattttttgatttccaatttc

SEQ ID NO: 303491 - DNA, 508 bp, Homo sapiens
ttgcacagcaacaagaatgtacttaatgccactgaattgttcacttaaaatggttgagaaagtcaattttatgttatgtatattttataatttaaaaactgggaaaaagaaatgactgcctatgatatattaaagtgaaaaaagagagagaagggggagtaaaagatgcatgctcttattctgatcactcaattaagtgaaatagtataaatcctcaatttaaggtaaaaattactccttggctttgtaaagagtgtcagactctgagacagagagaactagcttcctgtcttgctcttacagttactggctcaatggactttatctttagaacattcagtctcttcatctataaaatgcagcaaaataatacacaggtttttgaaacctttggttagatctcattaaacactctgtgcagcctkgttcatcctgcaaactgcagagaaagaggtttataaacctagatgacagagcaggccgtgggcattgcagaggagttatctgg

SEQ ID NO: 303492 - DNA, 560 bp, Homo sapiens
gacttgtgtctgctattaaatgctgtcctcaactttaacctttttcctagatgagctttgtatgagttttctattgctgcataagaaaattactccaaggcattagtggcttaaaacaatacttattttgcttatgaatctgaaagtcagacaatgtggcttatctgtgccttatgtggcatacgttgggttggagggtctacttccaggctggctcgttcacttggctggcaagtggccactggctgtggaccaggagttcagctggggctgggcactygggatcagttcttccacacgtaggcccctccacaggctgctggggctttctcacagtgtggtggtagggctccaaaagtaactgtccccagagaacctagcagaaatgcatgacaatattatgacccagcctagccttggatgtcacatggtgtcacttcctccatattctattactcaaagcagtcacccaggcctggttccaggggagaggtcataggtgccacttctagatgagggaagtggtaagattgtggaaaggcacgtgggacagaagatac

SEQ ID NO: 303493 - DNA, 548 bp, Homo sapiens
agggatgaggatggaggacaagggagtccaaatacaagggtcaaagtgagaaaaaagcagtgttgaatgtgcagaagagaaaggctcccaggtcggggagcaggcctgagccaggtcacgtggttctcccttgctgtgtcaagacatttgagttcttgaaatgtagggggagcccttgagggatttagagctggaatgacacaccatgttggacctttataaagatcatcttgagacctgtgctagggaaggactggcagggagccagcttagaatcagaaagacagtgagggcgctggtgcggtaacagccttggcaaaagatgagagcctgagccagggaatgacagtgggcaagggagtgggctgggctcaggaaacctcaggccagtgcagccgcaatgctgactgattgctakgggtggagatgagggccagagacacctcaaatgattcccaggtttctggcgtggggaccggctggtggtgatgtcattctttggagcaggggatggaggaggagtgagtttggagggatccataatgagt

SEQ ID NO: 303494 - DNA, 591 bp, Homo sapiens
cttgaacctctgcccaatgtgatctggatggtaaagatgagtgggactttttctttcttctttttggccaaacaaataaataaataaatgaataaaagaagctgcatcccaccgtcgactcacgcccctctgtggaaatcccctccttgcaggtgatcacttgaggctcacctgagctgccatctcctctgggggctctctctgcctttgttccctgaggctcccggctgacaggatggccagtgccatagtcactctctccagatggggtgcccttagggcaggcagacgctccttgcttcatgctccagtgcattgggcggggcctctgtgcaggctcctggtgatttcccccakagttgcccagcctgcagtgcttcccatgggggaggcattccaatgtgggcaggcacagatcccccatgccctcttccctgggacacctgcagcaggccccaggctgtcctcaaggctccaccactgtgtgggtgtgtcagggggacccagaccctagggccatgagcctgcctctccccttgtccctgatgaatatgctcagaagtgcaggacggcggccccgggtagaagctc

SEQ ID NO: 303495 - DNA, 617 bp, Homo sapiens
tatgccagctatttcattattccttagtcattgaattaaaatattttttttctgggctgtgtattctatttcactgatttgtcttttccttggctaattctgttctgttttgattcttgtggtttatcttttgatatctagtgatctggtgccccattgttgactcactcccctgctctagaatttgctgtaaccctggctggtttacacactcaggtgaaatttgggttagcttctcatattttgtagatagtaagtttggatttttattggaatggctcaaaaatgtataggttaattatgggagaatgtatatcttcacaatatcaagtctttcctttagaaacacagcacatctatttatttgggtttccttttttaattgaagtcataattttattcacacaggtgttactggagatgttactgaacgtcttattggttatagtatgttttaaagacaaatcccttggacttcctaggtaatggtattatctgctaatgwtgtcagcgttagatcttttgctccaatatcatatctcttgtaaacatttctggtgttattgccttgacgaacatttcaatatatgttgagtatttaatggtggtgatgggga

SEQ ID NO: 303496 - DNA, 624 bp, Homo sapiens
ccttgcagtaagccccacctcccaacactgatgcattggggattaagtgcccaacacatgcttttgggggacacattcaaaccttagcagacactgtgtgctcattgctccagcactacagagcagatttggagcagtcaggtggggaagctcgctttgggtgccttcacataactgcatttctgacctgccccatgatagttttgctgttaagatgcttgtacacctgacagcaaggtccttttgaggttggtctacagttcatgctagccagactccttggctccctctttattttctgctccagtctgggagcagaaaggagtgggccattgtggctgagtgcattttccaaagattgcaccagcagcatctccttcccacatgttcttctgcaatgagactttgccactctccccacaggatggggaggccaggcccctccattgtgaatcttggcaggctgtagccactcgcttgtaactaatagaatgcagtggaagtgaggctgcgtgattccggttgggtcagaagagactttgtttgttcycttgtgggatacttcctcttgcaactcagctgccatgccatgagtccacacccaagagagtggcagtcaacaga

SEQ ID NO: 303497 - DNA, 577 bp, Homo sapiens
gtgggtgatgagtagtgaccagtgtgaccatgtaatttatccttcaacctggggcagtttgagagcraagtgaaggtggaagagagacagagaaagacagaaaaacagagacagagagaggaacagagagagagaaaaaaaaaaggagatccagatatctatgtttctctatctgtatctcaatgccaataggtatatcaaaataatggcacaaactggaattatcttggatccctggtcaccctagggatgggctgattcatcactgactctttccttttcttccagcactatagaggaaaagcctggccttggctttggaagatctggatttatgtccctgttgagtcattttactagctgaatgacattggatacattacctagataatcttcccaaacctcagttttctagtctgtaaaatagaagtaataactccttttattttgttcagcctttaagtcatagcaatcaatcttttgcccttacaatgactgcttcatgtcaaatcccaaaggctctgttcagttctcacctctctggcctctctggtatccagccctgccaactgccctt

SEQ ID NO: 303498 - DNA, 558 bp, Homo sapiens
tggctctgaatgtatgcagagaaaatatataagacatctatattaagaaaagagagataaattaaaagaaggtattttttctatactttatgcaaactggtaggatgacattaagtacattgtgataagttatgtgtgtatatgtatacatatctatatacatctagtaatacttagagcaaccactaagaaaagctacacaaaatgatacacaaaaaactaaatataatcaaaatataactctaaaactgcttaagtagcccataggtaggcaggaacaaaataaaactaagaaatgcaaaacagaaaacaaaaaaattaaaaaggcagatgtaaagcctaaaatatcaaccacttcatgaaatacaaatgggtctaaatatatcaattaaaagacagatactggcatagtggattacaaagcactactcaactatatgctatttacagaaaacttgccttcaacataacactgtagatgggctgaaaatraaaggacggaaaccatatagcaggcaaacattaaacaaagcaggagaagctatattaagatcagat

SEQ ID NO: 303499 - DNA, 613 bp, Homo sapiens
gttggggttccaagctcttggctctgccagaagaccctcttctttgaagtctaggtggagatatccatgccccctggctccacggggcacagcccacaccaaaccagggctcaccaaagctacacctggggtagccaagaagtgcagttccagagtgttaaaacacatgcgcagtggagcctgctatgtgaggcagtgctgggtaggayactgaagtcctgcggttgccagtggcccttcgtttgcatattttcattgtctttaacaatagctcctgtcttctgttgagacagctgattaatctccttccttagcagtcatttgaccccatccttagtgttctcttctgaccatgctttctcatttttacaatacgattggctgagaattttccacatctttgaattttgcttcccttttgatgaacaattttgtctttaaatcattttcctcttcttgcattttactataaccaatcaagagaaaccaggctgatcctcaaacactttgcttagaaatttcctcagccaaatatccagttctattgttcacaagtttactctccacagaacactaagatatgaacacaattcagcaaaatcctttgccactt

SEQ ID NO: 303500 - DNA, 537 bp, Homo sapiens
ttattcaacagtcttggtgaagaaaactgttatctgctgagtaccaggaaaaaaattcagtgtctcagaaaattagtagttaattaagccctatcttcaataatttctttacttcaaatttgtaataattcaaacatttaatccctttaaatgtgtgagaacttgcaatatgtctaatactgtaggtctaataggtctaatatattcaagtaggaaactggcaagtaacatccaagagtcagttggccacccatgcttgaggaggctaatgatcccccagttgttggtaggaacaaaatgaaacctccaggatagggagtggacaccaagtgatagcactcagacagagatttgtcactggggtgggctgtcaggccccacctgagtcccagaatcttaaatttcttcttcccaatccccagtgctgcttgacccttaaacagagcattaatctatgctcacaaagcatgtgcaagtttaaagcacttagaaaaattcctggtayggggtgagcatgctatggttatctctcagcat

SEQ ID NO: 303501 - DNA, 592 bp, Homo sapiens
ggctggtctcaaactcctgaccacacgtaatctgcctgcctcagcctcccaaaatgctgagattataggtatgagtcaccatgcccagcccataatgcttttataaagtaaaccccaaaaagattccttgacacactacatgagaacacagtgagaaagtgccatctatgaacctggaaacacgctcttactatacactgaatctgccatatccttgatcttggactttacagcctccatagctgtgagaaataaatttctgttgtttataagccacccagcctgtaagattttgttatagtagcctaaacagactaagacttctagaaaagaattatacccagactgacagcagacttccaatcagccacaataggkgtgaggagaaaatggaaagtcatcttcaaaggagctgtgagtctaaattctgcacccagttaactgtcattccagagtatctgaattaagggcattttcagacatacaagaataagagagtttatacttccactgaaagaactattaaaagataaattttagcaagaaggaaactaaattcagaggagtagaataaaagaagaaatgatgatta

SEQ ID NO: 303502 - DNA, 525 bp, Homo sapiens
catgattctctgtggttaactggcttctggagtcactgaacattccaggaccctcaccccctggtcccatggttcagggctctggcaggggtaaagagaggactagaagttgactctctttttgtctgtttcttcactgctcccgtcygagacctgaggttctttccagtggcttcgcttatcttcccagggaagtgattcagcccccaattcaggccctttcattacaataaaaagtcagtgagactaattccttagattctatattcccacaaaagctaactaacctccaaaactctgggcaacatgagcagaatgccagcagaccccacctcacccttggtccagcctgactccttagctgtagggttcctggccacgtatgcacactatttacacttgataagcatcctcccactccttagtcctattattttattgattctcatatcttggaacaaagacctctttcaagacagacagtcccaaggaatctcagacattttggggggcccagaagagaat

SEQ ID NO: 303503 - DNA, 589 bp, Homo sapiens
aaagctgctggaaagagtgaacttggtggagcctactgcagctaggcaaatctgcagtagccaggctgcctctctagattcctcctctctggacagggcatctctgaaagaaaggcagcagccccagtcagaggcttatagataaaactcccatctccctgggacagagcacctgagggaaggggtgcctatgggcacagtttcagcagacttaactattcctgcctgccagctctgaagagagcagtggatctccctagcacagtgcttgagttttgctaagagacagyctgccttctcaagtggatccctgacccccatgtttcctgactgggagacacctcccagcagaggtcaacagacacctcacacaggagcctggaacaccagcaagacagaaccatggctggcatatggcaggtgcctatttgggaagatgcttccagaggaaggaacagacagcaatctttgctgttctgcagcctccactggtgatacccaggcaaatggggtgtggagtggacatccagcaaactccagcagacctgcagcagagaggcctgactgttagaaggaaaactaacaaaga

SEQ ID NO: 303504 - DNA, 660 bp, Homo sapiens
ccagtgttggaggaggggcctggtgggaggtgattggatcatggggcggagttcccccttgctgttcttgtgatagtgagtgagtttgcatgagatctggttgtttaaatgtgtgtagaacctccccattcytcctcttccttctgatccagccatataggacgtgcctgcttggccttcgccttctcccatgattgtaaatttcctgaggtctccccagccatgcatcctgtacagcctgcagaactgtgagccaatcaaaactcttttctttataattacccagtatcaggtcattctttacagtaatgtgagaacagaataatatagttcctaagtccttgctcttttcttcagcagttctgcttcttgcagctgccattttcaagagccaccatttatcaaggtctcctggtaccactgtccctctgttatgtgctccatacatatgcaatctgatttaattcctcctcatctggaactgcaggaactggggtgaaccagggcagctgccagttctggagttatttctgtcttctctggcccctttgctgcactccatgaccttacaatctgggcttttaagtcaaataaccttttcaacttggctactttaggtttcttttgctgggatttggcaacgtagcttccgcctgagct

SEQ ID NO: 303505 - DNA, 529 bp, Homo sapiens
acttacatttacactaaatgcggtaagattcagctacctcaatagaaactacttctttacttacaccattattaaagtaaagtcacatggtttttcacattcgcatgttattttacttaaagcacaatatgtcatatttataagtcctttttatttagactagtgaggttgggagctgatcagcattagtgaaaattctagttaatggcttatttwaaaagaaataaaaaatttttttgaacttactttgacttacgggtataaattacgaattacttagaaacacatttctttgtggattaaaaaacttcagtatttttcttattcaaattatcacatattctgaatttaataagtcagttaataaagttttattatatattcttaaatttctttgtgctgtggctactctgaattttggcaagcacaacaagaaatttaactatcaagagcttgatttaataaatatcatgttacatgaacatgatatcttatagcctgaaaggccaaccaacctagttttaactgg

SEQ ID NO: 303506 - DNA, 600 bp, Homo sapiens
ataaattctttttcaaaaatgagaagtgggagcactgttggtttttctaggagaatagaataaagatttgtattttcccattaaatattatgataattattctggcctgatcataagctagtctgtatgacaggcttttatatattgtgtatgctatatcaactcctagcaataaaaacaaaatcccaataaatagttgctgaattttaaatttagtctgttttctcctacaatgtaaagaaagctagtaccaaagttacatatttatatggagtaattttacggcttgaagtaatcctcacaccaccccctcaatcctgttggcaacactttctatcatattgaatttagtccccttgccttgattttataaaaaaaaaaaaagtgccatacscttcatttttcagctttagtatggaagaatgccttaatattataaatatgacctgtaaatctaattattcgaagccaagtttattgctttagatctatcagaatggtactttttccaccattttggaaaaaatgacttaggcatgtgaaattcaagttgcaatacattatttttaaatcacaatttaccacaaagatagtgattct

SEQ ID NO: 303507 - DNA, 585 bp, Homo sapiens
actgagaaccaatcctttcagcctgaattcaaagttagagacatcatatttgtcaaagtagaagggatgtctctgacagaggcctagtgtcagagaaaggcactcaggccgggtggagcagatggagagaaagaaaccttggcctctggctcatcaatttctcagagagactcaatccaagaggaaagagatacttggctcgactggagagaggcacacatgcaggggaagggacataaaacagcatgctttgccatcaccgtttacctcatccagaaaaagaatttctttaggaatttaaatagctgtgaaataaattttaatygtttgttgctctcaaaatttaataaagctgatctgttcagttagctttctggccatctgtcactgacaatctatacctctgttttgaagaaatctccatgccccagacattctctgctactctgtcctgccctgttccctgagcctggggacatgaggctggtgctgacatttgggttccctgacagcgatgctgccaaaatcagtgatgcagattagggaatctgccaggccctcaagcctattctgctggacagtttg

SEQ ID NO: 303508 - DNA, 614 bp, Homo sapiens
ctttttaaaagcttcaattattgacattcagttatcaacagtgatgtaaagaagtttttaaaatgtatatggcttttcctagtgttcccatgtcacattgtggagatggcttggtatccttcttcattcttggctcttaaaacctgattctggctgggtgtgatggctcatgcctgtaataccagcactttgggaggctaaggtgggcaaatcacctgaggtcaggagtttgagaccaggttgtccaacataatgaaaccccatctctactaaaaatacaaaaattagccggctgtgctcttgtagtgccagctgcttgggaggctgaggcaggagagtcacttgaacctgggaggtggaagttgcagtgagccaagatcatgccattaccctccagcctgggcaacaagagtgaaactttgtctcaaaacaaaacaaaaccacccaaaaaaacttgattctacttracttcagcatgaccctttctgcctctaagaaagtcaaccaatactgttttcttcaagctgcacaaggtccctatcctcatctttactcctgaaactctattggcttaagatttggtcttgcattaggaattcaagaatctggtatct

SEQ ID NO: 303509 - DNA, 569 bp, Homo sapiens
ttttgcatctgtgcaagacgcatagaacctcatccttgactatgtaagaatactggacattgtaaagggcatgccactattacaccatccctcggctgagaaaactcactcgattcttcagatattctcaaagcatccagcttgtatatattttgcttttgattgtttacataaatcattagcgtgaatgttaccagtgtcataatagccttaaaaataattgattttttgtttatatgacatagtataatggtttagatttgatttatttttaaaaactctaaaaaagtcattttgagtttttaaaataacttttccctccaaaaatttatttaataatataaattaaagcccctgtggwggctttgtaatgtgtcacatttgtaatgcgattaggctagattacatttcccagaatttgctctcctttatgtttctgcttctggctgtatctgtagattccagaatgtttttgctgttccccatctttcagccatctttcattcgcaactgccaggtaatattcttgtaaaaataaaattcatatatgtgtttgtgtatgtatatat

SEQ ID NO: 303510 - DNA, 467 bp, Homo sapiens
catctctagggtacaaataataatttaaaaaacccttctgcagctagcttgatgtctgcccaaacagctgcccagttttgtgcttgaaacccagggcccaggtggtgtagagacacaagggaatctcctggtctgcggattgcaaaaaccgtgggaaaagcacagtatctgggttggatagcacagtcgctcgtggcttcccttggctgggaaagggaggccccttgctccttgcacttcccaggtgagttgatgccgtgccctgcttctgcttgccctctgtgggctgcacccattgcctaactagtcccactgagatgaacagggtacctcagttggaaatgcagaaatcacccgccttctgcactggtctcactggttgctgtggaccrgagctgttcctattcggccatcttgccagattcccccaagtagtctggattgactgaagggcaggctgaagacgc

SEQ ID NO: 303511 - DNA, 538 bp, Homo sapiens
ctaactagtcccactgagatgaacagggtacctcagttggaaatgcagaaatcacccgccttctgcactggtctcactggttgctgtggaccggagctgttcctattcggccatcttgccagattcccccaagtagtctggattgactgaagggcaggctgaagacgcagttaggcatctgatgttagaaacgtgaatgcttattttattattattagaataattttgtttatgtagacactttaaactgaacttttctctatttattgtgcaaaataaactttttattcatccttgtcttttctgcaagtaaacaaggtcaaattttcaaaattcatttygcaatattttctgtttccatggtggtctcagtgtaagtatctctggtgctacgtgtgggatttgatgaaatgccttgaaaatccaaagcagatgagagcaaatcacctactgaagagggtggtagagatgtctattgtgaagtaaatctgctgcaagccaaggaacacaagaagttatcacacataaggttttacat

SEQ ID NO: 303512 - DNA, 538 bp, Homo sapiens
ctaactagtcccactgagatgaacagggtacctcagttggaaatgcagaaatcacccgccttctgcactggtctcactggttgctgtggaccggagctgttcctattcggccatcttgccagattcccccaagtagtctggattgactgaagggcaggctgaagacgcagttaggcatctgatgttagaaacgtgaatgcttattttattattattagaataattttgtttatgtagacactttaaactgaacttttctctatttattgtgcaaaataaactttttattcatccttgtcttttctgcaagtaaacaaggtcaaattttcaaaattcatttcgcaatattttctgtttccatggtggtctcagtgtaagtatctctggtgctacgtgtgggatttgatgaaatgccttgaaaatccaaarcagatgagagcaaatcacctactgaagagggtggtagagatgtctattgtgaagtaaatctgctgcaagccaaggaacacaagaagttatcacacataaggttttacat

SEQ ID NO: 303513 - DNA, 538 bp, Homo sapiens
ctaactagtcccactgagatgaacagggtacctcagttggaaatgcagaaatcacccgccttctgcactggtctcactggttgctgtggaccggagctgttcctattcggccatcttgccagattcccccaagtagtctggattgactgaagggcaggctgaagacgcagttaggcatctgatgttagaaacgtgaatgcttattttattattattagaataattttgtttatgtagacactttaaactgaacttttctctatttattgtgcaaaataaactttttattcatccttgtcttttctgcaagtaaacaaggtcaaattttcaaaattcatttcgcaatattttctgtttccatggtggtctcagtgtaagtatctctggtgctacgtgtgggatttgatgaaatgccttgaaaatccaaagcagatgagagcaaatcacctactgaagagggtggtagagatgtctattgtraagtaaatctgctgcaagccaaggaacacaagaagttatcacacataaggttttacat

SEQ ID NO: 303514 - DNA, 542 bp, Homo sapiens
tcttgttccttctgactctattcttcacacagcatccagaagttctttttaaagcataagccttatactctcctctatcacacttagagaacatttcaaacttgaaccccttctagtggcatccaaagtccattgttatttttttttttttgccaactttgtctccatgcattcttcgtgctatgttctctgctctagccatgctggccttttctcattccacagatatttgagctcatttctgttgtacctgtcatgtttctgctatagtaattctatgcaacaccacctcactatcccaattctcagtggcttaaaagaaaaacgtttttcttgctcatggctttgtgtgttggttggggtatctctgatttatttcagagtcagatgggtccatgtgtttctgggarcagcaacctctcagggcatgcccttcttatggcaggtggcaggagcactggaggcaaggctaaaccacacaagaatattcaagtcttctagacatatgtgattttattatattcactcccataccactgggc

SEQ ID NO: 303515 - DNA, 617 bp, Homo sapiens
tgctaaaaaatgctaatgattgtatgagccttcagcaaattgtaatgtttttgctggtagagtgttttagcccaatgttcatggctgctgactgatcagggtggtagttgttgaaggctgggctggctgtggcaatttcttaaaatagcacaacactaaagtttactgcatcaattgatgcaataaattgatgcaaaaaattgatgaatcaattttttaaatgagagattttttttcttagcatgagatgctgtttccaagcattttatctatactagaccttctttcaaaactggagtcagtcttttcaaactctgccactgctttatcaactaagcttaggtaatattctaagtcatttggtgttatttcaacaatgttcacagtgtctttactaggagcaaatttcatatcaagaartctctttctttgttcatccataagaagcaattcctcatccactcgagcatgatcatggcattgcagcaattcactcccatctttaggcttcacttctaattctagttctcttgctatttccaccacatctataattacttcctccactgaagtcttgaacccctccaagtcatccatgagggccgaaatcaacttct

SEQ ID NO: 303516 - DNA, 532 bp, Homo sapiens
tgtgatagtgctactgcactccagccttgacaacagagtgagtacctgtctgaggtgggtggatcacgaggtcaggagatccagaccatcctggctaacacagtgaagctccatctctactaaaaatacaaaaaaaaaaaaaagtagccgggcatggtggcaggcgcctgtagtcccagctactcrggaggctgaggcaggagaatggggtgaacccaggaaggggagcttgcagtgagtcaagatcgcaccagtgcactccagtctgggtgacagagcgagactccgtctcaaaaataaataaataaataaataaattaattaattaaataaaaataaaaattagtaaataaaaaaaaatagtaaaatcatgccaaatatttctgtaatatttggaagaattagattccttactactcaaagacactgacaatgtcccttatccttagaaaatttacatatgcatagtttagagtagcgtttctcaacctttttggtcttaggatccctttatacccctaacacttattaa

SEQ ID NO: 303517 - DNA, 570 bp, Homo sapiens
cttgagctagttagtgtatattcaaactccaaatccatgtgatattagggctatgattctgatttatgagatagactattttccgtatttgttttgtttcctttttcactatggagctgagctgaggtttttacaaattaccttctatgtctccttttaccatcaggcatatttttttcctaacatagcttttcatttaagctctagctacttttcaaaggccctgactttatgcaagttcagttccaatattccaamttattgaagccaagtaagtccttatcttttgtgtctcatgtggccattaaacctagggcatctactgcttcagcaactgctggatactctaattacagctccattccctgctttttggttgccctaaaaatttcccttgattgttttcaagtgtttctgtttatttataaaaactaatagtttatccagcactttaaagatcttttgtaggagtaggtatggtttttcagaataactaagcctctatatttatagaagtgaaagtcccttgtattttcttagttctgttttttctttttctttttttgtttt

SEQ ID NO: 303518 - DNA, 527 bp, Homo sapiens
tttactgagagcttactatgtgccagacactagtctaaacagtttctatgtagtcactcatttgtttttcatagcaatctataaaagaaggtgccatcattattctctactttacatacaaaggaagtgaggcagagaaataatattggagtcaggaaaatcagttagcagactattccatgcatgagatgwtaagggtctgagttaaatagcattggaaatgaagtgggaagtcaggctgtgaaggggtggggggtggagattatcttttccatctttagttatttccttttttctgagcaggacatttcataagtccctattaagagggtgaagacagcttgaatctcttccctggacagaagggcttttgggaacattttctctgaaaagccatgagagacatttattgttggcagagctatcattttgattcatgagggaaagtattttagatgttaataaaggagatagttgaaaataactgcagtgtaaataatacccttaaactgagagaaatgatggaa

SEQ ID NO: 303519 - DNA, 527 bp, Homo sapiens
tttactgagagcttactatgtgccagacactagtctaaacagtttctatgtagtcactcatttgtttttcatagcaatctataaaagaaggtgccatcattattctctactttacatacaaaggaagtgaggcagagaaataatattggagtcaggaaaatcagttagcagactattccatgcatgagatgataagggtctgagttaaatagcattggaaatgaagtgggaagtcaggctgtgaaggggtggggggyggagattatcttttccatctttagttatttccttttttctgagcaggacatttcataagtccctattaagagggtgaagacagcttgaatctcttccctggacagaagggcttttgggaacattttctctgaaaagccatgagagacatttattgttggcagagctatcattttgattcatgagggaaagtattttagatgttaataaaggagatagttgaaaataactgcagtgtaaataatacccttaaactgagagaaatgatggaa

SEQ ID NO: 303520 - DNA, 582 bp, Homo sapiens
gataaagcatcaaaaagtgtgcatcttagaatgaacaaattctaagttagttatgattgttggggctaacacattttcaatatgtattttttttcaatgcatgaagctaaaatgagaartaattataacacttcacacttgtttacaactttacagcctccaaagcatttccctacacattatctgattaaaatttcagcctagaaccaacactagcaacagcatcgttatctctggtggtagatgacatttttaaaaccatgtcaatgatgttattctgcaagtttgtatttacacacttcttcatttcatttactagttgtggcagactgcatgtccaccaaaatccattctcccttttttcctggtacaactgggctgtattttccaggctccctgaagagttatggctgtgtgactgagttctagtcaatggaatgtgaacatacaaggtatatactactttcaggcctggcccatacaattattcagtacatgctctcccctccatttaaacattggagacattttactgggagacaaatgtgaagatggtatagcctccatcactctaggtcttta

SEQ ID NO: 303521 - DNA, 607 bp, Homo sapiens
acagaaatacaaatgaaatttctaaagtaggtcctggtgagccccaattttaygaattattagaagacaatgcacccagaaactaagacactagcttgaagacttttttcatttcttttctttttttttttttttttttttgttgctgatgttgttgttgttgttgtcgttgttttgaaacagtgtctcactcttgcgccttggctggagtgaagtggctcgatctaggctcattgaaggctccatctcccaagcttaagcgatcctccccacctcagcctcagggaatggatgggactgcaggtgcacaccaccatacccggctattaatttacttttgtattttttgtagagacgaggtttcgctatggcttcaagactttaaaaggcaacaatgactcttttgaaattgcctgcattatcaaatgcctgaagtcaaccacaatgaatggtgagtctggtttctccatgacactagcaatcctctgaaataaaggaagttagaattccagaacacgtttgggtctctgactcttcctcggtggcttccaggagtttaggtcagcctgcaggcccgaccggaacccccgacacccctccacgcgga

SEQ ID NO: 303522 - DNA, 607 bp, Homo sapiens
acagaaatacaaatgaaatttctaaagtaggtcctggtgagccccaattttatgaattattagaagacaatgcacccagaaactaagacactagcttgaagacttttttcatttcttttctttytttttttttttttttttgttgctgatgttgttgttgttgttgtcgttgttttgaaacagtgtctcactcttgcgccttggctggagtgaagtggctcgatctaggctcattgaaggctccatctcccaagcttaagcgatcctccccacctcagcctcagggaatggatgggactgcaggtgcacaccaccatacccggctattaatttacttttgtattttttgtagagacgaggtttcgctatggcttcaagactttaaaaggcaacaatgactcttttgaaattgcctgcattatcaaatgcctgaagtcaaccacaatgaatggtgagtctggtttctccatgacactagcaatcctctgaaataaaggaagttagaattccagaacacgtttgggtctctgactcttcctcggtggcttccaggagtttaggtcagcctgcaggcccgaccggaacccccgacacccctccacgcgga

SEQ ID NO: 303523 - DNA, 607 bp, Homo sapiens
acagaaatacaaatgaaatttctaaagtaggtcctggtgagccccaattttatgaattattagaagacaatgcacccagaaactaagacactagcttgaagacttttttcatttcttttctttttttttttttttttttttgttgctgatgttgttgttgttgttgtcgttgttttgaaacagtgtctcactcttgcgccttggctggagtgaagtggctcgatctaggctcattgaaggctccatctcccaagcttaagcgatcctccccacctcagcctcagggaatggatgggactgcaggtgcacaccaccatacccggctattaatttacttttgtattttttgtagagacgaggtttcgctatggcttcaagactttaaaaggcaacaatgactcttttgaaattgcctgcattatcaaatgcctgaagtcaaccacartgaatggtgagtctggtttctccatgacactagcaatcctctgaaataaaggaagttagaattccagaacacgtttgggtctctgactcttcctcggtggcttccaggagtttaggtcagcctgcaggcccgaccggaacccccgacacccctccacgcgga

SEQ ID NO: 303524 - DNA, 630 bp, Homo sapiens
aaaaatcctcaaaaaagttttattttgactgggtttgtcaaaaaggaacaaatgtaaaaaataaagctgcaaaagtaaaatgcatatctacttttgaaaaaataaatgcctctacagattcttcttcctctgccaattttgatcctaatttyatgcaatgaagagctttactgcacttgcctagcattgatatcagacacagaagttagactgcactagcagagtaaaataaaatatttagaaggtaattttaatattttaggaaatctcatgaaaatcgggttgtcagatttatttgaattatataaataattgccttaattaaaaataaataaaactgtcattttagaataatggatgatgatgcaatgtcaaaagttgtttctctataagaaaaatacattaatttaggaaagttttcttaggacaaaataattttttcagatgctcaagaacagatagccatgcataaatatttttattctataatggttgccttgtaacattgagaaagttgcttaaactccttttgtgtaattttctcacctatagaatgttaataaagataactatcatttagagacacagaattattttgaggataaaatgagaaaatgcagaaaaagattt

SEQ ID NO: 303525 - DNA, 630 bp, Homo sapiens
aaaaatcctcaaaaaagttttattttgactgggtttgtcaaaaaggaacaaatgtaaaaaataaagctgcaaaagtaaaatgcatatctacttttgaaaaaataaatgcctctacagattcttcttcctctgccaattttgatcctaatttcatgcaatgaagagctttacygcacttgcctagcattgatatcagacacagaagttagactgcactagcagagtaaaataaaatatttagaaggtaattttaatattttaggaaatctcatgaaaatcgggttgtcagatttatttgaattatataaataattgccttaattaaaaataaataaaactgtcattttagaataatggatgatgatgcaatgtcaaaagttgtttctctataagaaaaatacattaatttaggaaagttttcttaggacaaaataattttttcagatgctcaagaacagatagccatgcataaatatttttattctataatggttgccttgtaacattgagaaagttgcttaaactccttttgtgtaattttctcacctatagaatgttaataaagataactatcatttagagacacagaattattttgaggataaaatgagaaaatgcagaaaaagattt

SEQ ID NO: 303526 - DNA, 630 bp, Homo sapiens
aaaaatcctcaaaaaagttttattttgactgggtttgtcaaaaaggaacaaatgtaaaaaataaagctgcaaaagtaaaatgcatatctacttttgaaaaaataaatgcctctacagattcttcttcctctgccaattttgatcctaatttcatgcaatgaagagctttactgcacttgcctagcattgatatcagacacagaagttagactgcactagcagagtaaaataaaatatttagaaggtaattttaatattttaggaaatctcatgaaaatcrggttgtcagatttatttgaattatataaataattgccttaattaaaaataaataaaactgtcattttagaataatggatgatgatgcaatgtcaaaagttgtttctctataagaaaaatacattaatttaggaaagttttcttaggacaaaataattttttcagatgctcaagaacagatagccatgcataaatatttttattctataatggttgccttgtaacattgagaaagttgcttaaactccttttgtgtaattttctcacctatagaatgttaataaagataactatcatttagagacacagaattattttgaggataaaatgagaaaatgcagaaaaagattt

SEQ ID NO: 303527 - DNA, 632 bp, Homo sapiens
tctccaccctttcttttagagaccaatctaacagctactactgatgcatgtaatacttttctttgacatttgttctggaagcatcatgcctcctttggctacagtttcagctgcagttctttcaacaaatactcggtcaaagagagaaataaactttcaaatgtttgttctgccaagactcctgcatcaaagctcgtactctacattcctactgcagctgcaagaaaagatctgaagtcaggttcttgggacaggtaaaaaggccagccagccctgccctctgaagtgaattcaatttttgaatcatgattttttttctytaaaaactgtttttgacagattaatcatagtttaagatatgaatatcttctgtctaaattccatttagaacaatagaattttatattagggtgggcaaaaattgtgaagattttattgtttaatttctcatttcacagagtggttaagtgatatgtccaaaattatagttaactatgttcagattaaaattcatacttagctcaaacaatgactagttcagtactcttttcagtacactctttaatttaatgtaatttcttctccttgcctttgtgagtttaggtaatacataaagaagtagtaagccaggc

SEQ ID NO: 303528 - DNA, 641 bp, Homo sapiens
ttttgttgatgctgatgctattcctttctgtttgttagttttccttctgacaggtccctcagctgcaggtctgttggagtttgctggaggtccactccagaccctgtttgcctgggtatcaccagcagaggctgcagaacagcaaatattgcagaacagcaaatattgctgcctgatgcttcctctggaagctttgtcccagaagggcagccgcctatatgaggtgtctgtcggcccctactggaaggtgtctcccagtcgggctacatggggatcagggactcacttgaagaggcagtctgtcccttctcagagctcaaatgccgttctgggagaaccaccactgtcttcagagctgtcagacaggaacgtttaagtctgcagaagttgtctgctgccttttgttcagctatgccctgccaacagaggtggattctagaggctgaaggccttgttgagctgtggtgggctccacccagtttgagcatccctttccactttgtttaccttctcaagcctccacaatggcagacacccctcccccagccaggctaccacctcacagttcaatcttagactgctgcactagcagtgagcaaggctccatggktgtgggaccctctgagccaggcccaggagag

SEQ ID NO: 303529 - DNA, 583 bp, Homo sapiens
atctacagttcattcttccctctaaatagcctaaaatgttttcctaaattaagccagaccagcagagatccacaaacctgaccacatcttctgaaatccccacccctcctggattgccttttactgaatttggctttggtgtttgtcatacactatgacacagtgagggatgttgtaagaagcagccctrtgaaaatctgttggacttattggagaatagtgtccacttcatcacatagtgacttctttatgagatttacaagagaaatttctttctggtctcccaaccagaaataattttgctgctcttgagcaaccagcttgtttttatcttctgaacactgtgaatcatttaactgatcatttttccttctcaattttatttggccagaaatcttagaggcaaatttgtggtttgtctctagcagaaccataggaccttacaatttctgttttgtatatcaaccttattcccagcttcattgttgagtcagtaacatatgatagagcagagggcttggccgggtttgaacctcagagctctaccacttaatatttgtatagttttaatcatgtatctgtg

SEQ ID NO: 303530 - DNA, 583 bp, Homo sapiens
atctacagttcattcttccctctaaatagcctaaaatgttttcctaaattaagccagaccagcagagatccacaaacctgaccacatcttctgaaatccccacccctcctggattgccttttactgaatttggctttggtgtttgtcatacactatgacacagtgagggatgttgtaagaagcagccctatgaaaatctgttggacttattggagaatagtgtccacttcatcacatagtgacttctttatgagatttacaagagaaatttctttctggtctcccaaccagaaataattttgctgctcttgagcaaccagcttgtttttatcttctgaacactgtgaatcatttaactgatcatttttccttctcaattttatttggccagaaatcttagaggcaaatttgtggttygtctctagcagaaccataggaccttacaatttctgttttgtatatcaaccttattcccagcttcattgttgagtcagtaacatatgatagagcagagggcttggccgggtttgaacctcagagctctaccacttaatatttgtatagttttaatcatgtatctgtg

SEQ ID NO: 303531 - DNA, 583 bp, Homo sapiens
atctacagttcattcttccctctaaatagcctaaaatgttttcctaaattaagccagaccagcagagatccacaaacctgaccacatcttctgaaatccccacccctcctggattgccttttactgaatttggctttggtgtttgtcatacactatgacacagtgagggatgttgtaagaagcagccctatgaaaatctgttggacttattggagaatagtgtccacttcatcacatagtgacttctttatgagatttacaagagaaatttctttctggtctcccaaccagaaataattttgctgctcttgagcaaccagcttgtttttatcttctgaacactgtgaatcatttaactgatcatttttccttctcaattttatttggccagaaatcttagaggcaaatttgtggtttgtctctagcagaaccataggaccttacaatttctgttttgtatatyaaccttattcccagcttcattgttgagtcagtaacatatgatagagcagagggcttggccgggtttgaacctcagagctctaccacttaatatttgtatagttttaatcatgtatctgtg

SEQ ID NO: 303532 - DNA, 491 bp, Homo sapiens
ggatttaccacccagtataaacaagaaatcctttgttccctgtttcattgacttcttaacatctcagagctatcctatgtttcagacatcacccgacccacccttgctgaggccccagactatcctaagtccaaccctgcaatcataacatcaacctcacatcgtgatgctaagtgtgtggggagsgaggtggtggctgtttgcaagagtggccacagtaccactgtgtaatgagtggggtcattcccctccacatccctgtggtgagtagaaaattctttcccgcattttctttcatttctgtgtcagtttcctcaacagcccacaaatccttttttttttttttggacaaatttccttgagcacaacctttccttcttcatgggacaactcctcaagttctcaacaaccacctaagtagaaacatgacaaacgtttgcatttcatcggaagaaaaacatatttagttgtattaacatgttgaatccctg

SEQ ID NO: 303533 - DNA, 631 bp, Homo sapiens
agttcaagcttaagtgtgataaaactttctaactatccctgacctttgtttgaaattgaatgcttttgggtcttatccagaggtgtaagactataattaacttcatcagatccccaaactctcataacctttcatgtaccatgactttggaggactactatgtttgagtggatatttttctgttttttctaggaaaaaaagcctcagatctgtgcttaggatttattgtcaaaaactatggggaaggagagaagaaaatacaattgtatttgtgttacaatctcctttataactttttcaagactgaccttttctaatcagatcagagtttaaatcattttaatttttaccagatgcactgtaagtctcatatcctggcatttgacccctgaatcccaattgtcctcttttcctccattttaaaacacataggagcaaarcacaacacattttaaaagatataaaaaataaaattttataatttgaagatccaggtccttaactatgacttttttactgagctctagatctatatttccaactgcctgtacgaggtatctatgagcagttccaaaatttttaacagttccataatttttaacatctggtaacatccatcacaccatgaatt

SEQ ID NO: 303534 - DNA, 612 bp, Homo sapiens
catttcatcggtatctgttgttcacttaactgcatggtagttggtagtctgtgtgtttcttttgctatatttgacctctttcaggacaaggactctgctgtagtccaaactcttggaattgagactgcactcacatgaatgcagagctaaagtcccaaataagctgaaataaaattataaatgcaagaaagataacaaggcagttaatgaagaagtctggaagtctagtgggagaaacatccaaaagaatgtttggaaattgcctataatggctgagatgatacacatggcaagctggaatataaactgcaggtgttgcttacttttgcaaacaagcaggacttaaatttctcactagcttgacttatcaccagaaatcctgatcaaaatactgaatagagaaaaggcattyatgttaaaaagaagggtaaagagaataaagtgactacatataattcaaaatatctgtcctcatatttactgagaaaagttatttacaataagcatgtccgtaaaaaataagtttaaaaagcacaattagaaaacttctatttgaaaatgaagctaagtttttttttatcatttttttccattcttaccatgatgaatttc

SEQ ID NO: 303535 - DNA, 611 bp, Homo sapiens
tcttactataaccctaaaaaggaaggtattatttgtcctacttaaggaatgaataactcaaagataagagagtccattaattttcacatcgaagtggggacacaagattcatggttttttcttccactatgctagactgcttttaactgctataaaaatgtaaaatctccatttagccatgggattcagtaaaaatgcatgtccactttctcaagtctttctcacactcacccagttttttgtgtcttgctactttacttgtttgttaactcctaatattacttagtaagagtaaagatatcttagaatttaggaagtctttgccactccttgggaatattactttaatcctcctaacattcaggacctcatgtgtaaaatagggattacattcgtacctatctcatgggattgcaattagaataatatgatattacttaggaaaatgtaggcataaggactraaataaggctgacacccagcaatgaatgttaaattcccttcatctttaatgggaactttctcaaactcagtcttctttcatcttcttttataagaactttgcccgcattatcacattcatactatctgagatggacctgaattcttaa

SEQ ID NO: 303536 - DNA, 618 bp, Homo sapiens
tcagttaattatcaaaggttgagtaaagagagaaaatgaacataaatggaacattgttcctttaagaaacttctccctgccattgcctttcaggttgatgattttgatcttaagaatgcactgtctcagaaggaggcagcacgcagagacaaatgtcacagtaaataatatgtgaatagtccctcggtacagcaggcaccgagctcagacccagggcatttctctttcacgatgctccagaggaactcttcagtctaacatagccatattgcaagatgaattggggaatctttcttttcctgctgattgagctctttmagtccgtgacaagaccaagcagaagatgccctgtgggactgagggttggcacagaataaagatataaccagccaacatgactcaggaacacaatatcaggtatttttgtcctgagaacaactgcccaggagaaacaaacatatctataaacacacccaagtggggagtcccacagccagaaagtagaattaaaagttaagtttgtgagaagaacatggtttgaggatttaggttagcttccctggaagcagacaggggattctgaggctgagaagaggattccaatgcatgtgatttatt

SEQ ID NO: 303537 - DNA, 577 bp, Homo sapiens
gctgatggacggcactgattcstcattgctgcccaacccttcttctaggaggctatcaatttctgcagattccttggctgagttcgctgctatttatttcagttgctggaagaattgcctcagaagtacatgtggccatgtacacagtgggaactcaacgagaatgatgaagacagggtgagagaggtagacatgacatagacttaccaattagatcagcactgcactcactcagaaaaggtcagcctcattactcttttttacaccatagcttctttctctctccatcttttcttggtgtggccttgtgctgtattctcaaggcaaatgcaataacaaggaagaaaaggaaagaaaagatggatgccacccagggggggttggcatgggcacaattatggtcttctaaaaataagggactttctcaaagaggcttatcttgaagaagatgacttaataaccaggagttcacaagtccatacttgatgtaaaatatattcctgctcctcccttccccttttttttcaaaacaaataacttgaaaatctacaatatgtgatatgaatcaagcaaggaa

SEQ ID NO: 303538 - DNA, 602 bp, Homo sapiens
tggtcagcagacaaggaaaaagggagagtggaggatcaggattctgtgggagatatttttagggaccagacatggaataagcagtaacactttaccctcatttcattggtcagatcatgtggcctcagcaactgcaagggagcttgggaaatgtagtttaactgtatgtccagaatgtgatgaaagaattttgcctgcaattgtacagtacaatgtgtgagagaagcatgacataagcaatttcagaaagccaactacttggacttaagaatgctccatgtttccatgtggatgaattctgcaaatcttaattaggaattaaaagggatctggctggacttctgattattaaaaaaaaatctrctaatacattcatatatagaaataataaatatttctttttaaaagttcataattcttactttctttatgaacattggtcttcccccaaatactattaaatttacaagattcgactgcatccatgagcttggctaataaatcaagtttagttttcttatgtagctttagaggcaatattatcaaattcagagttttatttccctccaataatacttcagattgattattttcacagaatc

SEQ ID NO: 303539 - DNA, 602 bp, Homo sapiens
tggtcagcagacaaggaaaaagggagagtggaggatcaggattctgtgggagatatttttagggaccagacatggaataagcagtaacactttaccctcatttcattggtcagatcatgtggcctcagcaactgcaagggagcttgggaaatgtagtttaactgtatgtccagaatgtgatgaaagaattttgcctgcaattgtacagtacaatgtgtgagagaagcatgacataagcaatttcagaaagccaactacttggacttaagaatgctccatgtttccatgtggatgaattctgcaaatcttaattaggaattaaaagggatctggctggacttctgattattaaaaaaaaatctgctaatacattcatatatagaaataataaatatttctttttaaaagttcataattcttactttctttatgaacattggtcttcccccaaatactattaaatttacaagattygactgcatccatgagcttggctaataaatcaagtttagttttcttatgtagctttagaggcaatattatcaaattcagagttttatttccctccaataatacttcagattgattattttcacagaatc

SEQ ID NO: 303540 - DNA, 623 bp, Homo sapiens
tccttttgcacataatgtctctggttgaggaatgtagggaatagattaaataggacagtgtttgccttctaagagttcacgatttaatgcaaaacaaaatggcactgtagaaatctaacatcacaaggtaaagttaaaaacaccagataaaacaaaaaccttacatatattgtagaaaaacaatttctcattccatcttctcagatttcagatttcattatgcagtaaatgctaattcctgagaaggcttttatttgtcagatgaatatctgatagcagaatcagaatgtgcgtgggcaggccacacatttgcatctgttttaatttttgagagttgctctactaaagagaaaaggaacttaattttattctgggtctgaaaattatcatgagtyactcacaataaatgttgcaccattacatattaataataatttttaaagtaggcctgcaggctgggtctttattggattctctttcagtgctattcagttattgagaatgttggcttaaaataaaaggaaattcacgagtgatttcttaggtgccacatagattgtctgtgatttggagcactggggtttaatttgcaatctacactatttctgttatactcctgaccg

SEQ ID NO: 303541 - DNA, 561 bp, Homo sapiens
tttttgtctctttacacttcaggcttcccctctgtaaaacagggttaacaaaagcactatcttaattttttctttttaaatattatgtggaaaaaatatatgtaatgctactattactgtaatgttgctactactgaaatgactactaatactcctacttctactaatattattccacatcactcttactgttattggacatgtttccatcttctctacgaacttgtattcaccctgtagtccaaaattctttaaaggttgtataacaaattatccccagaacttagtggtgtaaagcaaaatttcaacatttgcatggctcatctctgctcagccaggtctggaccctgaattcggagactcaaaggctggcgccaactgtcagctggggcagccacaggccgggggctggaattatccaggctcagtcacttatatgtctgacacctggacaaggaagactcaaacaattgagggctggaacagatggagctctctgggcatctctttccaaatatatggtctccctrcatcatggtcccttcacaaagacagcttcaa

SEQ ID NO: 303542 - DNA, 578 bp, Homo sapiens
caaatcactattttcaatgtgtatcatggtagtgcactgyactgtatgccataaatttgctatttggagtccactggttatatagtgtggaacagtggatggaattgggtttttcacttatttgtgcatagggcaggggactgctactagacagggactgttcaggatccctcacagaatcttgattttggaaggaattaggaagagctcatctatcctcccatgcccctgttgattggcagcttacaatcctagattatgaggagatggctatgctgatatggaatcaactagaagccaaacattggtgtacctggaatccaagcaataaacaactttatttcccaagatacccaaatgagatataaaatgttgcagtttcattagtttctgaggccagcaggcactttggagagatcacaagcttcaccactggcctgcctgcctgacctgagctcagattacagtcccacaactacttggtgacagttctgttgggcaagaagttttacttctaagcctccattcattcatttgtaaaactgagataataatgcctatctttcaggtttgtggta

SEQ ID NO: 303543 - DNA, 624 bp, Homo sapiens
ctagggtttgaggtgaatattttatacccctcaactaagtccattacttttaaacagtgagggaaggatttcaaacattctgacattatttttaaattcatgacacagaaagaaggaaggtgtgttttttaatagtcatgaacgagttttgctttgtagagattattgcttgttctactgcttggtaaatcagggaagtgtttcatattgactattgggtcctgtatgtgcatgtctggtttagctttaaatttactattcttagagtctaatgggacagaatcattcactttttcattattttattcttgagaaccttgccatctgatttgtgatcttaatccctgctccatctcttgctagaagcatagttgacactgactggtgttcagttctgtaacttccttaacttcaataaccttcacctccactaatctttgaccacacatttccatgaaaatatcaacaacctgaagttgatctacctcaaaagtcctaatctttgaccacaaatttaaagcttattctccccggccctttctrcatcagttacttgttctcattattctgctggcccttggtacctcccaactttctgcttgtcctcctaggacatcattgtgc

SEQ ID NO: 303544 - DNA, 568 bp, Homo sapiens
aagtctattctgcatatcataccttcaactaagttttctaaccccaaggcaatactgattgttgctaatgatctaacactttatattaacactcttaacatacatcacaatatttaggtatgaaacttttatgtgactttcagccagcaagattgcaagctccttagatgtgagaggtctggaagaatacacctttgcatgcaccattttgctgacaataacatcttataaatgtcgagctttgactgaatgactgtgaagatgcctttttttctgatttgtagtccctctttaaatattctataacagtgatgtttagactccattgtgcataggaatcagttttcaatgaatggaattgagacaggttagttagatatatgaaaacttaattttgttgttctctatctaaattgggtaacttattaaaatgctagtagtttctgatttcayaggtctatcttagggtctaatattctgaatttttgacagacttctaagcatctaagtgatgccgatatttctcatccatggaccatactttgagtagtaatatcctataagacac

SEQ ID NO: 303545 - DNA, 556 bp, Homo sapiens
tttgtgaccttgtttatgtcctataatgcctttgctcttacctgaagttaaagccaggttgataactgttaatagtaatttaatattgataactactaattatagaaagcagaactatttggcattaaaaaaaaacaaacaagcaaataagaaaatgagcaaaaacaaggaatgcatttgaataataatataccatgtacctcatactttcacatgagctgggaaggaggagagctatcaactactctataaataagatagcagctggttrcattggagattctcatatttcatgactgttgagaggtgtgttttgagcaatgagattcatggagacacaagttaatttaactcctgtcaaaaggcgataggatgagaatgccagtttgtctaggaaaagagatggtgacccctttggaggagacagcaatggattaaaacatcccatattttgttgagagaatcttcacattagatgttaactttctcactggaacttgcatttttatatgattccatgatatttcaaggcatctaggacattttatctgctcca

SEQ ID NO: 303546 - DNA, 534 bp, Homo sapiens
aaagacacctgactttcacctaaaggctttctttcarcctcatatggggcagatcagaaatgttgagatgctgacaccattgagaacagccctcagaaagagaggataggagtgggtgtttaaatacccccactttcacacccctcacgtaggacaacttggtggcatattctatgctctgtcctggagttccccagaaagatagggactcaactgttttcagtggtagcctgttccataacacacttagttgagtgttcttttctttcctttctctctctacctcctccgttgggatttcctgggattttcctgggatctatcccaggaaatcacatcccaaataaaccacttacatttgaaatctacttcaagatggactcccccccaaaaaacaatggggcaccacattttatgtgtccttctctgctttgagaattagctataattttgtctcattaggagaagtttcacccaatgctagatgtattcaactacatttgtattcacatttacatttatatgtaaataaat

SEQ ID NO: 303547 - DNA, 534 bp, Homo sapiens
aaagacacctgactttcacctaaaggctttctttcaacctcatatggggcagatcagaaatgttgagatgytgacaccattgagaacagccctcagaaagagaggataggagtgggtgtttaaatacccccactttcacacccctcacgtaggacaacttggtggcatattctatgctctgtcctggagttccccagaaagatagggactcaactgttttcagtggtagcctgttccataacacacttagttgagtgttcttttctttcctttctctctctacctcctccgttgggatttcctgggattttcctgggatctatcccaggaaatcacatcccaaataaaccacttacatttgaaatctacttcaagatggactcccccccaaaaaacaatggggcaccacattttatgtgtccttctctgctttgagaattagctataattttgtctcattaggagaagtttcacccaatgctagatgtattcaactacatttgtattcacatttacatttatatgtaaataaat

SEQ ID NO: 303548 - DNA, 564 bp, Homo sapiens
gaaatctacattgtaaagtatcagtatcaggaagagggctgcttcagaccacttttattccctaagagatgttttatctacataacaagacaacctttattcaacatacaattccttgcctcaccttcctgtaactcatgtcttcactattctcccagaagccccaagtcccttttcctttaactcagggtatataggcttcttgatctctggggtgtcgggtattcacttttctttcgtatgatgccccagtgcatttgtataccttttctccttttaatctgttttacatcaattttctttgtagcccatctaaagaacctgggaggatggaggaaagccagtttttttttccctacacattgctcacaactaagaaaaccacaatcacaaaagcatcactagggagaggttaccgagggcatattcagtgttctctttttaacacaagatgttgctayaggaaagatgccaccagtgctctcatatcgtcctggccctcatgcacatacatctaagggagcttagaatgaacacctgtgactctttgcctggtctgcagga

SEQ ID NO: 303549 - DNA, 570 bp, Homo sapiens
cccccagataataagtgcttgtttttttcttgtaagtgtaaaaattttcaccacaaattgttgtttatcttctaatttctattaaggtgtttttaatgaacagatggtgggactttaaaataattttaagattttcgtttaaggtttgtccttttctgtcttaagaaatattcccttactccaggataaaaaagatatcctcatattttattctcaacatttaaaaatgtaccttgaattttaaagcctataattcatacatatttaaattttgcctatgaattaaggtaagaatccaatttcactctgttttcgtaccgataaattattaygtcagcaccaaatatcaagtggctaatccactcagctgcaatctgcaatgtcacttctctcatacagaaaattctgtattttatattctattccatttatctacttgaaaatataatgccaatggcatactgtcttaataactctagttttgtaatgtctttatttatggtaggataaattactttgttattttctgggaatatcttggtcacttttgctcagtacttggtcacagag

SEQ ID NO: 303550 - DNA, 556 bp, Homo sapiens
ggttatcctaaaactgtctaaaatttatcaatattttaatgcacctcctcaaaactataaagaatgtggaatattttaatattaattaactcccattctcaattgtatgctgttgttaaaattaaaatactggataatttattgtgtcaytgtattagtcctttctcacactgttataaagaactgcctcagactgggtaatttctgaagaaaagaggtttaattgactcaccacttcatagggctggggaggcctatggaaacttactaggaaggggaagaaaacacatctttcttcacatggtggcaggagagagaagtggcgagcaaaggggtaaagccccctgtaaaaccgtcagatctcacgagaactcactcactatcatgggaacagcatgggagtaaccgcaccaacgattcaattacctcccaccgggtcctttccacaacatgtggggattacgggaactacaattctagatgggatttggatggggacacacccaaaccatattagtcatcatcaattaaggcactgtcattgttttgacacaga

SEQ ID NO: 303551 - DNA, 556 bp, Homo sapiens
ggttatcctaaaactgtctaaaatttatcaatattttaatgcacctcctcaaaactataaagaatgtggaatattttaatattaattaactcccattctcaattgtatgctgttgttaaaattaaaatactggataatttattgtgtcactgtattagtcctttctcacactgttataaagaactgcctcagactgggtaatttctgaagraaagaggtttaattgactcaccacttcatagggctggggaggcctatggaaacttactaggaaggggaagaaaacacatctttcttcacatggtggcaggagagagaagtggcgagcaaaggggtaaagccccctgtaaaaccgtcagatctcacgagaactcactcactatcatgggaacagcatgggagtaaccgcaccaacgattcaattacctcccaccgggtcctttccacaacatgtggggattacgggaactacaattctagatgggatttggatggggacacacccaaaccatattagtcatcatcaattaaggcactgtcattgttttgacacaga

SEQ ID NO: 303552 - DNA, 607 bp, Homo sapiens
tagcttgttggcgaatcgtgggcctgctttttctaatgaattcaatttggtacaatgaaatgttcttttgggaaggaagccaatgctgtagcagctaaagttgggtatgaaataatgaaataatgggagaaattttgaaggatacgtatacaagtttccaagtgatatgtttgctggagaaggccaggcggaaaggcatgcaatggagtggattacactgtactgttctgcggtgagcagatatatggaaacctacccscaaaggctgagggagctaagaggctgaagaaagtggatgacagtttcagtttctcagaagcaaacgtgatgaagctggaggtcattatcttaagtgaaataattcagaagcagaaaataaaatatcacatgttctcacttataagggggagctaaacactaggtacttgtggacatatagaggggaatcacagactctgaggactccagaagggggaagaatgggcagaggatgagggtttaaaaattacctgttgggtacaatgttcactattcaggtgatgggtacactggaagctctaacttcaacattacacaatatatgcatattataagcctgcacatatac

SEQ ID NO: 303553 - DNA, 439 bp, Homo sapiens
catcagactgagtggcattgggggtctacctttgtttttctatgacacacaaggtgggtgtttggcaagagagtagggatgttgggtgctggatagtgcctatattctgtgtctttgggaactttgggggaagtgtcctcctaagggagccaaaaaggctgctaccccagtcccccaaattccaaaacaaaagaggtcagtgaaagctactcgcattttgcatgttatctctttatctttggagcayattgggaaggactgacccagctccagatcagggtctgattggggcaggacagaccctctccaaggcagagaaggggaaaaagaacttgcccttagaagtgggagtccctgggggagtgggacagaccttttcccagagcagccctggcaaaatggctgagcctcccttgagcctcagaaataaatcgtcagg

SEQ ID NO: 303554 - DNA, 583 bp, Homo sapiens
ctttgcagtttgtgtggccaggatatacctggctgcccccaggtggctccagccatgggtcctgcatggtcacatccatgctccccsctagctccccggccattctcacgacttcagcttctggtaattttatgacagagtgaataagggagaggcactatttctattttttaatgtcctgtgttggacattaactagcatcatttctccatctcccctggaaacccactactgtctccctactcatggatatatttgggattgtagcaagatggaaaccaagccagcgtgctgcctccctgccgcggacactgccagtcctctttctctggggaaaactccttgctgctgcttcttccttttctcccccacctgttctgaaaggaacacaaatgtcctgagtcctctagtgatgggaagagaattgcaactaggctggtgcctgttctttgaggaagacagctgccttcctgcctggcttcagcacctgtccccagtacactggtctgtcgagttggcccagaggcagcttcacatttacaagaaccaccaagactgtgccatcaagagaaacagggaagac

SEQ ID NO: 303555 - DNA, 583 bp, Homo sapiens
ctttgcagtttgtgtggccaggatatacctggctgcccccaggtggctccagccatgggtcctgcatggtcacatccatgctccccgctagctccccggccattctcacgacttcagcttctggtaattttatgacagagtgaataagggagaggcactatttctattttttaatgtcctgtgttggacattaactagcatcatttctccatctcccctggaaacccactactgtctccctactcatggatatatttgggattgtagcaagatggaaaccaagccagcgtgctgcctccctgccgcggacactgccagtcctctttctctggggaaaactccttgctgctgctkcttccttttctcccccacctgttctgaaaggaacacaaatgtcctgagtcctctagtgatgggaagagaattgcaactaggctggtgcctgttctttgaggaagacagctgccttcctgcctggcttcagcacctgtccccagtacactggtctgtcgagttggcccagaggcagcttcacatttacaagaaccaccaagactgtgccatcaagagaaacagggaagac

SEQ ID NO: 303556 - DNA, 583 bp, Homo sapiens
ctttgcagtttgtgtggccaggatatacctggctgcccccaggtggctccagccatgggtcctgcatggtcacatccatgctccccgctagctccccggccattctcacgacttcagcttctggtaattttatgacagagtgaataagggagaggcactatttctattttttaatgtcctgtgttggacattaactagcatcatttctccatctcccctggaaacccactactgtctccctactcatggatatatttgggattgtagcaagatggaaaccaagccagcgtgctgcctccctgccgcggacactgccagtcctctttctctggggaaaactccttgctgctgcttcttccttttctccyccacctgttctgaaaggaacacaaatgtcctgagtcctctagtgatgggaagagaattgcaactaggctggtgcctgttctttgaggaagacagctgccttcctgcctggcttcagcacctgtccccagtacactggtctgtcgagttggcccagaggcagcttcacatttacaagaaccaccaagactgtgccatcaagagaaacagggaagac

SEQ ID NO: 303557 - DNA, 480 bp, Homo sapiens
atttattgacatttttccacagctagctcagtcctccttgaaaacttttctttgacttccaggaattcacacctttaaggctttttgtcttattggcagcttcttctcagcctcttgtgctagtccttgtatctctttaatctcttaattgtgcaaagtcccaaagctcaggatggatacctcttctcaatccatctgcgcttactctctggtcctcatttggtctttgttttaaagacatcttcacactagtgattctcaagtctatatctgcagtctgtayttctaccctgaacttcagactcatatatacaattgcttacctaagtctccatctggatggctaataagcatctcaaaccgtacatgtcaagaactgacctccttatgttctcctcccttcctcatcctgatttttctagagactttctatctcagcaatggaacactatccttccagttgatcagtctaacatgtgg

SEQ ID NO: 303558 - DNA, 602 bp, Homo sapiens
tctctccctttacatctattaatgtttatatattggatgctccaaagttgagtacatatacttgctatgtcctcttgttggactgattttttttatcattataaagtaacttttctgtcttttttagtgtttgacttaaagtttcttttatttgacataagtgtggctaatcctgctcacttttagtttctatttgcatggaatatgtttttctatcttttcactttcaatttatgtttttaaccatgagataaatctcataagcagcatacatatgagtcttgtttttgtttctttttaaaaatgcaattagccactctaaatctgttaatttaataatttaatccatttatatttaaggttattattgatagggaaagacttactcctgccattttgttaatcttttttggttgtttcatttattttctggtctttcttcctctctcgttatttacctctgtggcttggtggttttmtatgctgctaagctttattttctttttctttctcacttgtatatctgctataatttatctgtttgtggttaccgtggggttaacataaacagtcttgtagttctagtagactgttttaagctg

SEQ ID NO: 303559 - DNA, 535 bp, Homo sapiens
cgctgcaaaaaagaagcttcatttatgtctttctggaagatgactttttgctattcaaagtgtggtgcagcctcagcatcacctgctagttagaaatgcagattctctgaccaaccaagatattctgaaccagaacttgcattttaataagatccccagatgatttgtatggatttcaaggcttgagaagcactagcatgtgcttctgaaggtactggcatccagctgccagaaagaagcccttttaaaaacacaacttgcatatgtgcayagagtgtgaaatgacagacattggagactcagaaagctggaggtgggaacagatagatgatgagaaattacttaatgaatgcaatgtacatgattctgggtgaaggatacacttaaagcccagatttcatctctatgcactatatccatgtaacaaaattacacttgtaccccacaaatatatacaaaaaactttgcttataaaacaaaacaaaataaatgcaaaccatcaaaaacttttctccctagaagaacatttaggttc

SEQ ID NO: 303560 - DNA, 652 bp, Homo sapiens
atatgggtttgtacacatgtgtatccatctgtaagacaaaaacctatgagtaaaattaccagttctaagaaaaggagaacttaaaattttgatggatttcaccaattgctcttcaaacaacaccatagatgtttagcaccccacgaaccattcraaagacttgtgattttcctatatccctgttgtactaagatatcaaccccagaaatgtgtaatctgacagttggaagttagtatcctatttctatttaaatatacatttcttttattatgagtgaatttgagcatatttgcatgtttaaaagccatctgtatatctatttgtgaactgtttgtttactttcttcagccatcctttttggaggaaaaaaaggtctttttctgactaatttatcaaaactttttttatattaatgacttcataaattaacccttagagggtgacacatttcacaaacatttctctcagtttgtatttcatcatttttctctttgttatattatttttcttttgaacagataatgcttttacctagtttaaatattggaacaatgtatgcatgttatgaattaagaagtctcactcatttttatacctgccgctgtctactccctagcgacctccttgtgggtaaccatgttcattatttct

SEQ ID NO: 303561 - DNA, 577 bp, Homo sapiens
taccctactcagtgttataaagcaatatactttctacctaagatcaagaacatagaaaggatgtccattcttattacagtactacttaacatcatagtgaaagtcatagccaatgtaataaaggaaggaaagaaataaaaggaaaacagcatataatgaaataaataaaattgccactatttggagatgacatcattatttatacagaaaatttccaagaaatctataaaaaaggaagaaaccacttagaagtagtttagaaagatcatagtacattaaatcaacacacaaaaaatcaattactttttaatatactatcatgaacaatagcaaaacaaaattttaaaaagcaatactatttacaatagttatataaattgacatacttagatacaaatataatatgtacagactatgtatgctgaataccataaaatacaaaggaattcaaaggtagttaaataagtggagaaatataacaggtccrtggattgcaagatttaacagtacagatatcagttctcccaaaattcacttacagatttaacacttcaataaatatcctctacacaatatt

SEQ ID NO: 303562 - DNA, 579 bp, Homo sapiens
caacttaacaagtaaatttcctctaaaacaaactggaaagaaataggattgatgctaatggaactaaggaggaaactacatagaccataaaagcctcggctgctatcccaggcacaaaaagattgggaaaaccaatctaaggtaattcagttcatcacaaaaacacactgtccaattggaggtactgtgaataataccttaacgcctgtcacaatagatggggacggtctttcttttattcttttattctgaggcaatctctttgtggaactttatttgtatagctaacaatctgaatgaaggmgctcctgtgaggacttgtgcatctttattgttgccagggaaactgggtcttaatttctagtggctgaatgccaaagaaaacaggctatacagaaagggaagaaacttggtaacactgcatttgttggaaatattcagtgttaaagggtccttttctgggacccacaattttagtaggtctacaaatacccgcctccctttcttcaccccactgctttcaaatgaactaccaaatatcagtttggtttttacttgatgcagcaatatggtaattat

SEQ ID NO: 303563 - DNA, 594 bp, Homo sapiens
tttttacttaatttcctaattttaatgtgtccaactgtcttgagacagtacataggaaagcttaaaacgaaacattcaatagtgtatgctttctcagtgtccagtttgggaatagattactagtatcaaaagccattaaaaataattttcaggaaagatagactcaagctatatgatgttattatcagcagcacactttttaaaatattatttaaatgttttaacaattcatagtgaaatagggctatgtatataaacacacggattagaagaaggaaaataacaagtgcttagggcttcactacattccaaataaatgaaaaatcttattgaaactcacatcttacaggatacctatcagcattattgttttgtctataagaaaatagagaatcagaaagttttgctaacctgtccagaatcacacaggtmcaaatggaatgagaaccacagatgtttgtttcctaaacccttatttttcccaccatgttacagaagagtcgctctgtgggtttcagtatgaaagttgtacaatcgttcctcctcctggacttcttcctgggaattaaaagcaacctatcccaggatgatggt

SEQ ID NO: 303564 - DNA, 397 bp, Homo sapiens
taattatctcctaaaatcatagtcaggtttcaaaaaggaaatctaattaataaaatatgaagaaagaagaaccttaaaaatagagcatatacttagatttacttggctatgtgaaaggtaggagcaatctggacttgattccagcactgagtctattcatctacctggtcagcagkgtcttcctgtttctttccttttctctcagttgtaagtgtgtccttctcaaggctgcactctcaggaatgaaggacacattttctagataggaatctgccttcagtcaagagacactggtgtatatagtcctcatggcacagaatattgcttctggaactcatctggcattcaaaaatgcttctgtaattggccttctgactaaaattaaacaaaatgtgaa

SEQ ID NO: 303565 - DNA, 480 bp, Homo sapiens
gacttttttcagcctatttttgataatagaaaacacaactcccacaacaatggagatgtcatttcaagctcacttattactgtggattctctcaaggagtggctttaaagacaattggtctattcattgaagcatttgcttggtggtagtctgaaggataccatatracttggcactcattaaccctgctcacagtttagagtttgaatcccatctagattcaagaaatctgattctaccttatttcgttaagaagaatgtttgaagttaacatgttaaaatcatgcacttaagtttaggaacaacatctaagataagactttgggaggactaaactacttctctttacaggaacagaagattacacttcaatttttttccactggcaatttcaaaatcaaacaggtgaaaagaaaggaagttttccctcaatcacagacatatcacatttataatgatgcatattataccatctgtaca

SEQ ID NO: 303566 - DNA, 605 bp, Homo sapiens
atcattcaaattaatcttaacaaggctgatttaaataaagggccttaaatactaagcagctctgtcatgttaaaaagaaaatttttgataaaaggccatagaatttgcctcctctaaagtagtctgtgatattaattcctcaacataatttttgtagtcaaggaatgtgatatcatattctgtgctgtattttcatgacgtggcttatagtaaaatttcatatctaaagggtgaaagttccagataactgtattttataggctttggctactacaaaaacataaaacctagaataagtactgaatcattccagctgcaagggtatttttcgaaggttcatttagaagactagtcaaagataatggctttaagtggaaggggaataaaaagacatcctcactgaccaccgagaccaatataattcattagataacaaagagttgtatatggaactctaccatcttgtagggaatctcccaaacgaactgatgttkctgtccctttcagaccacatccttgtgaaagctgctgcatgacattcccaaatgtgtctgacatgtttgagatggcatgacttaaaactacaggccattaggcaaaggtga

SEQ ID NO: 303567 - DNA, 542 bp, Homo sapiens
gtagatgaaatttcgctggaactcagttctgcctgtctacaagatagcccctggcaatttcttccttctctgtacttgccacacctttcatctagaagtagaaacgtaagtcctttcacttgaatctggtatggctttatgactggtttggtgaatagaatgtagtataaacgatgtccagggattttgatgcttatgccttcggggccttggagtgtttgctttcactcttggaagacagccacatgtaaagtacaactatactgttgragagaggcaggccctggaggatgagagactacatcagcctcagtcaagatgccctcccaatactgcatgaagcagagatgagcatttccatcaaaactgtaatgcttaatttgaaaaacctgtactacatactaccctaaagaactttccttgaggagtagatgtagacagtaaacaagcaagtgcatccttcttggaatgtcacaaatatgggattgctgaatagaggatgcttcccatggaatcggacaaggaacctatgaatagggaat

SEQ ID NO: 303568 - DNA, 466 bp, Homo sapiens
atggttctaagtctggacatgatttaaggagaaaatatttctaaagtctcagctaaagttggataagggctgcagttaaattgaatttaactgcagttcattctccctcaatgcagtgctgctccaaggctgaccactggtcttttggactcaacttctctacggttctgacctggggctgaaccagtgctgataatgctctggtgaggtccagccctggtaacacaaaacagataacagagctgcctttgttccccattgtgatggttaatatcaagtgtcaacttgattggattgaaggatgcacagtattgtttctgactgtgtatgtgagggtgttgctagaggagatkaacatttgagtcagtggactgggaaaggcagacccaccctcagtctgcgtgggcaccatccaattggatgcaggtgccgctaggaaaagcaagcaggaggtagaaggagctaa

SEQ ID NO: 303569 - DNA, 600 bp, Homo sapiens
tattaagaaaggtatcacgaaatraaaaaaataagggaaaatacaatgaatactacaaatataagcatagagaaaactatgttttgagtttgaggggaaaaaaagcaaaattaaggtaattcagaagcatccaaaagaaccattgaactcccttactaatcctcttggataacatttagttttgtgattattagttgaaaatatttatgctataccattcacctcaccttacaagcacgccttttaattaaaaaaagtgcctttaccgtcaaaagtatttttgtatgagaatgatgtgcatacagacatatacaattaaacaattacaaggtaacctttgtccctccagcaaaacaaaaccttaatgtcccatctaagccaggctaaatcttaaagacctaaatagttggacttaaacactaacagacatcacaagacaaaagaaaatacaacttctgggttactgtgaaaagcttcttcatgtactctgtagacagtgaggattgaggaagccagggcaatctaccagtggcaactagaaacatctttccccccaaatttccgtaaaatggtaagtttaatttgcaacacaaaggcaga

SEQ ID NO: 303570 - DNA, 561 bp, Homo sapiens
gaaaaccagctgttttctttggaactgattgggttactttctttgtctttttttttttttttttgtggcaagtaagttaaatactatgcattagtaatatatataggtaaagtaataaggtgtttccagaattccttagtaagtttatcctctaagagaaaagcaataaaaccaacacacgaaattagttgtatgtcatgtttccttaaagtaagtatttttaagtagagaaaaaaaattagtaaaggattttgttactgctagatctggatttgaatcctagttgcaagttatgtagcaatgggtragattctgatgtcacttttctataaaaacttcataggattttttgttgttgttcaggattaaataacatatttcatgtccatagcaaagggtctggctcagaaaaaaaatggtagataattgttttcaaagaaattaattacctcattaattgtatttacatatctgaagaaagactaggttaactaatgaaaagattgaaagagaatctcagtgtatattagtaattggctatcattgacttaaggagataat

SEQ ID NO: 303571 - DNA, 433 bp, Homo sapiens
tccaagtttactgctctagtcttacctgtttcttccttcagcatctcttcacagcctcctcatcccaccacccaccattttcttgcccagaagtaccacagtgttttaaaatcctacagtctgacagttctgttcactagcagtgaagccttctcaaattctttaaacttttcaaactttggttactttatctgtaaactgggggaaaaatagctatatcacagrgcttttgggagaattacataaaatagcacaaataaaagtatcttgtttatggcaaaatgaatgttgttttatttacatactttttccttcgccttcttactcctgtctctcatgctcatgtgattacttaccacacaagaaaaacattctgagctttctcatgaagtttccatggtgtttctttacctagaatgctccatgcacctct

SEQ ID NO: 303572 - DNA, 195 bp, Homo sapiens
atgtttgtcatattttaatccaatacattgatctactatgaacttgtaaataatgtrtttgctttctagacacattccaggaagaccagagaaactgacttttatccatatggaataatccactggcaaatttcttttaggacagaccaaagctgatctagaacataatctttacatacttggatccttcccatc

SEQ ID NO: 303573 - DNA, 546 bp, Homo sapiens
ccctttgactcctcttgtaggcaccctcgctgggctcctaagcactcctccacaccctggctctgtcaccagccccatagtgatgtcataaactcccagatgcccagtgtgcacccggccacagagaagtgggtgacttaggagtatcctctccgcttctgacccttggtttcgtctgtgcacaactcactcaaaatgggcaactcattaagcatattttgttcctggttcygccacaggtcctggccatgccattggcaacctgctcgtcttgtccatgaggccttcccagctggccgggctaaccccgcggctcctgcacctgtgcctgcccggggaatcgtgggccgtttcccactcctcttcaaccctcagcgacatcttgggccttcttttccagtcagttgggacggcgcccctatgaggctgtgtcttatccctcggaacatgggcaccccacagagggtcctgtctcctgtggtctggagccccgcctcaaggaagaaacccatgctgtctgctcacaactccaggatgtttggacac

SEQ ID NO: 303574 - DNA, 546 bp, Homo sapiens
ccctttgactcctcttgtaggcaccctcgctgggctcctaagcactcctccacaccctggctctgtcaccagccccatagtgatgtcataaactcccagatgcccagtgtgcacccggccacagagaagtgggtgacttaggagtatcctctccgcttctgacccttggtttcgtctgtgcacaactcactcaaaatgggcaactcattaagcatattttgttcctggttccgccrcaggtcctggccatgccattggcaacctgctcgtcttgtccatgaggccttcccagctggccgggctaaccccgcggctcctgcacctgtgcctgcccggggaatcgtgggccgtttcccactcctcttcaaccctcagcgacatcttgggccttcttttccagtcagttgggacggcgcccctatgaggctgtgtcttatccctcggaacatgggcaccccacagagggtcctgtctcctgtggtctggagccccgcctcaaggaagaaacccatgctgtctgctcacaactccaggatgtttggacac

SEQ ID NO: 303575 - DNA, 546 bp, Homo sapiens
ccctttgactcctcttgtaggcaccctcgctgggctcctaagcactcctccacaccctggctctgtcaccagccccatagtgatgtcataaactcccagatgcccagtgtgcacccggccacagagaagtgggtgacttaggagtatcctctccgcttctgacccttggtttcgtctgtgcacaactcactcaaaatgggcaactcattaagcatattttgttcctggttccgccacaggtcctggccatgccattggcaacctgctcgtcttgtccatgaggccttcccagctggccgggctaaccccrcggctcctgcacctgtgcctgcccggggaatcgtgggccgtttcccactcctcttcaaccctcagcgacatcttgggccttcttttccagtcagttgggacggcgcccctatgaggctgtgtcttatccctcggaacatgggcaccccacagagggtcctgtctcctgtggtctggagccccgcctcaaggaagaaacccatgctgtctgctcacaactccaggatgtttggacac

SEQ ID NO: 303576 - DNA, 279 bp, Homo sapiens
tctgtgctatttcatgtacctactaaagtatgactcttctggggtttctatgaatgccacagrcagtcaatgagaactctcatcaatgtgcagccagaactcaaacctctcgaagttctgtgtgactctgggaatttttaagcatactagttcctagatggcatttttccagcctgtagaatcccagtctatgggtacatggtttattactgaggaagagcctcaagggaatgtatatgcagattcctggagcttttacttaatatagcaccccccccc

SEQ ID NO: 303577 - DNA, 279 bp, Homo sapiens
tctgtgctatttcatgtacctactaaagtatgactcttctggggtttctatgaatgccacagacagtcaatgagaactctcatcaatgtgcagccagaactcaaacctctcgaagttctgtgtgactctgggaatttttaagcatactagttcctagwtggcatttttccagcctgtagaatcccagtctatgggtacatggtttattactgaggaagagcctcaagggaatgtatatgcagattcctggagcttttacttaatatagcaccccccccc

SEQ ID NO: 303578 - DNA, 599 bp, Homo sapiens
tgtactgtgcctgttaggttttatcttattgagccactggaattttcccatgtcttttagggatataaattaatcatttaaagtcaggaaccctcaactggacacaatattaggagtagctggttatagcaatctctgctttaaaattgtattctttatagtccaccaagctcrgtgaggttatatccaaactgaaaaaaatctatgttatataaagttgaggtcttttcactacaaataaaggactgtaaaagcaatattttctaagatatcaatgtggatgcactaagttttttgcagaacagaataatgggaaaatgcatacaccatatttctgttaagctattccaaagacttctcagcagaggatttggcttagtgtgggtgacaactgctcagtatgagctgcgacatttctaaaatgagaatccactcagaattataagcttctatttctgcattaattgtaaaggtttaataaaataaatgttctcttctttaagattaagaagcaagctatggaatcaaagcatactgggtcagaacactgctatgtaaaattacttgctttcagtttacaaaatgccacttgctcatga

SEQ ID NO: 303579 - DNA, 599 bp, Homo sapiens
tgtactgtgcctgttaggttttatcttattgagccactggaattttcccatgtcttttagggatataaattaatcatttaaagtcaggaaccctcaactggacacaatattaggagtagctggttatagcaatctctgctttaaaattgtattctttatagtccaccaagctcagtgaggttatatccaaaytgaaaaaaatctatgttatataaagttgaggtcttttcactacaaataaaggactgtaaaagcaatattttctaagatatcaatgtggatgcactaagttttttgcagaacagaataatgggaaaatgcatacaccatatttctgttaagctattccaaagacttctcagcagaggatttggcttagtgtgggtgacaactgctcagtatgagctgcgacatttctaaaatgagaatccactcagaattataagcttctatttctgcattaattgtaaaggtttaataaaataaatgttctcttctttaagattaagaagcaagctatggaatcaaagcatactgggtcagaacactgctatgtaaaattacttgctttcagtttacaaaatgccacttgctcatga

SEQ ID NO: 303580 - DNA, 599 bp, Homo sapiens
tgtactgtgcctgttaggttttatcttattgagccactggaattttcccatgtcttttagggatataaattaatcatttaaagtcaggaaccctcaactggacacaatattaggagtagctggttatagcaatctctgctttaaaattgtattctttatagtccaccaagctcagtgaggttatatccaaactgaaaaaaatctatgttatataaagttgaggtcttttcactacaaataaaggactgtaaaagcaatattttctaagatatcaatgtggatgcactaagttttttgcagaacagaayaatgggaaaatgcatacaccatatttctgttaagctattccaaagacttctcagcagaggatttggcttagtgtgggtgacaactgctcagtatgagctgcgacatttctaaaatgagaatccactcagaattataagcttctatttctgcattaattgtaaaggtttaataaaataaatgttctcttctttaagattaagaagcaagctatggaatcaaagcatactgggtcagaacactgctatgtaaaattacttgctttcagtttacaaaatgccacttgctcatga

SEQ ID NO: 303581 - DNA, 563 bp, Homo sapiens
ttatttctatattgaagataaggaaattaaaactcaagaatatttaggatctgctcagcacaccaaagactcatcataaatacttcttgattgatggtttgatatagacaattgccctcagctctttttgctattacagaaaatgtaagcacgtgtagtgtacttaacttggcatcagcagcctgtgtctcatactgttactcaakcatttaaaactcaagaatcatattttcaatctttcctgacaacttcctatacgaacatgacttaaggtatggctttgatgtcatcttagttacaaaattaacacaataatacttcctcatttgtcaagcttcccagactctgatttgattgcgatagcatttaccaagtcttaggaatccctgaaaatttagggagtgtatacatgcaaatgttattatagaaagatgtggatgcatctatagaattaacatttcttttcaacatgaaggatctcttctgttatcctctgataggattttcctactatgctgtacatttggataaaatcatagatggctattgtaaaggatggtttt

SEQ ID NO: 303582 - DNA, 322 bp, Homo sapiens
tgggccagagggtatgggaagacgcctgagatgactatctttcctgcaattttgcctgggaaaagctctgcttccggaaaaaaaattactgttatcttctctatcaccaaaaattgggacaatcaaattttttctaacccttttggatataagaggcagttaaaaaaaagtgacggagatttcctagacattcttatgttttctatagacaatgtttggagyatggtgacaagccaaggaaaatgcagaaatggtcactataactatagcacctgcttctatattcccataattaataaataatgctattcctactgtcatg

SEQ ID NO: 303583 - DNA, 589 bp, Homo sapiens
cagccactctggttctgtgtgtactgcacatgtgcgtgtgcaaacatgtggtgtgtgtataaggggtggtgggtactgatggagaagagagagaagaggggactagaaagggggacagcaaaaaacaagggaaagaaattaagtgaaacataagaacaggaatacttagacaggttgccattaactgaggcctcttaatcttgggtccatgaatctaggcagaattgtagtgttgtaagttctttaaacstttcacaaacatggatattttgacgtggtatggccaagacagccacattttcaagtttccttagctccatagtaattctgatgccaggctgtcttgtccataccttcagaattcctgagctgttttgtccataaatgggctttaagggttgataaacttccccaattgtaaaatttgggagtgtatctgtttttatttttttctcggaagaagttagtagcttgtgcagagttgcacagtattttactacctctccagtatgctaaaaaatactgcatcaaaagaagtcagtttctggttgcaatgaaccgaatatttttgttccccacaaaaatttac

SEQ ID NO: 303584 - DNA, 612 bp, Homo sapiens
caattacaacaaaacactttcttcacaacagggaatttttaaaagaaaaaggagctctgtgttcacaaataacagagtattgtgtgatttacaaagcaataaacatttaagctaatgcagttcctgccaataagggttttaaactgcacaacagtgactaagataggtaaccttgcctctggagttattttaagcaaaagatagtgttggtgtctaggtctgatttagacttaatgacttttcaaacttccttccagttttatcattttattacgtttaggggaaaaaaaagcctccaaatttggaagaataaataagaccacgttaagatcacacaggctttatccaaggtagcatctcatcccataaagaaagaactgggtcatgtaggttaggttagagcaatcctttgggtaaagcaggtatagttctcttaaggaaaaaaaaaaataaccatttacatatggctttaagaatacttctaaattacttctgaacatttagtatttaatcaggacatactggctgcaawggtatgactctcattatggaagatattattgataaagatctgtatgtgagtttagttgttttgtaaagttgaatatttta

SEQ ID NO: 303585 - DNA, 554 bp, Homo sapiens
ctaaattgcttactatttcagaacttytcacactatttaccttgcctttatcttttcctgctcgttttcctgttgggctgctattcattcttcaactcttcagctaatcttctgtctcctttaaaaaaaaagtcttctgagagctcctcaacagtcttaattactcgttcctttgcactgccttgtctcttataggcttttttattcttgctgtttcacactgcattttaatttgtttgttatgtagttattttatccgcagcgcttgagctctttggaagaaacagtgtcttgttcatctttgtggcttcatagctggcatacagccagaattgccatggaagggactcaatgaactaccaataaattagcgaatgaatgaattagaacccaggaactcaaatatggatcacaaatgtggttgcctttagttctagcaaattttcatgcagtatctgtaagacacaacctcttaaaacacctatttggaggcagatactatgttaggcgtcagctactctactagtcctttacctgaagtaactcatatacag

SEQ ID NO: 303586 - DNA, 554 bp, Homo sapiens
ctaaattgcttactatttcagaacttctcacactatttaccttgcctttatcttttcctgctcgttttcctgttgggctgctattcattcttcaactcttcagctaatcttctgtctcctttaaaaaaaaagtcttctgagagctcctcaacagtcttaattactcgttcctttgcactgccttgtctcttataggcttttttattcttgctgtttcacactgcattttaatttgtttgttatgtagttattttatccgcagmgcttgagctctttggaagaaacagtgtcttgttcatctttgtggcttcatagctggcatacagccagaattgccatggaagggactcaatgaactaccaataaattagcgaatgaatgaattagaacccaggaactcaaatatggatcacaaatgtggttgcctttagttctagcaaattttcatgcagtatctgtaagacacaacctcttaaaacacctatttggaggcagatactatgttaggcgtcagctactctactagtcctttacctgaagtaactcatatacag

SEQ ID NO: 303587 - DNA, 549 bp, Homo sapiens
tataataaatccattgttccaatactaactgagcgctatcaacttcaaatactgctgctgttggctataatacattgagtgtctactacctaatagctgctttgccttgactgtttctaaaatctcagacaacattcaaaggaagctttattattcctgttttactgataaggaaacagactcagataatttaactgacttttcccaaaacagactaattaacagagccagtattttgaacccaggggtgtctggctccaaaattcacttattttcccactaaaaaatatactctgctactttgatctactgcctattatatcaggcactgagctagatgctatagaggtagaggaattgacctatagtatatatyctacccaggaagttatcaatttggcaggaaagacagtcacatattgacagtatctatagcagagaggacttcatccaactgtgtcttgtcctctaggtagaataccacagcactactgttagcatttcctttgtaaaactgaaggtctaaaactttccaaaaaagctaccact

SEQ ID NO: 303588 - DNA, 579 bp, Homo sapiens
cacaacctcttaaaaaaaattgaagggagcttatagggaaaggatgagatgagctggatacctagtttaaggaaagtctgccaacaggccttgcttagccaatgcttctcttcattcattctattttaataaaaagatgtttttaaaaatcgataccaaagtccaggtgcagtggctcatgcctgtaatcccaatactacgggaggccgwggagagtgcatcacttgaggtcaggaatttgagactagtctgaccaacatggtgaaactccatgtctactgaaaatacaaaaattagctgggtgtggtggcatccacctgtggtcccagctactagggaggctgaggcagaagaatcgcttgaacgcaggaggctgaggttgcagtgagctgagatcttgctactgcactccagcctgggtgacagagccgaactctgtcaaaaacacaaaacacaaaacacaaagcaaaaaaaaactctataccaaaaaccattgaattttacgttttaatgggtgaattgtataatatgtgaattatatatcaataaatctataacatgtcatatttctttgtcact

SEQ ID NO: 303589 - DNA, 579 bp, Homo sapiens
cacaacctcttaaaaaaaattgaagggagcttatagggaaaggatgagatgagctggatacctagtttaaggaaagtctgccaacaggccttgcttagccaatgcttctcttcattcattctattttaataaaaagatgtttttaaaaatcgataccaaagtccaggtgcagtggctcatgcctgtaatcccaatactacgggaggccgtggagagtgcatcacttgaggtcaggaatttgagactagtctgaccaacatgktgaaactccatgtctactgaaaatacaaaaattagctgggtgtggtggcatccacctgtggtcccagctactagggaggctgaggcagaagaatcgcttgaacgcaggaggctgaggttgcagtgagctgagatcttgctactgcactccagcctgggtgacagagccgaactctgtcaaaaacacaaaacacaaaacacaaagcaaaaaaaaactctataccaaaaaccattgaattttacgttttaatgggtgaattgtataatatgtgaattatatatcaataaatctataacatgtcatatttctttgtcact

SEQ ID NO: 303590 - DNA, 579 bp, Homo sapiens
cacaacctcttaaaaaaaattgaagggagcttatagggaaaggatgagatgagctggatacctagtttaaggaaagtctgccaacaggccttgcttagccaatgcttctcttcattcattctattttaataaaaagatgtttttaaaaatcgataccaaagtccaggtgcagtggctcatgcctgtaatcccaatactacgggaggccgtggagagtgcatcacttgaggtcaggaatttgagactagtctgaccaacatggtgaaactccatstctactgaaaatacaaaaattagctgggtgtggtggcatccacctgtggtcccagctactagggaggctgaggcagaagaatcgcttgaacgcaggaggctgaggttgcagtgagctgagatcttgctactgcactccagcctgggtgacagagccgaactctgtcaaaaacacaaaacacaaaacacaaagcaaaaaaaaactctataccaaaaaccattgaattttacgttttaatgggtgaattgtataatatgtgaattatatatcaataaatctataacatgtcatatttctttgtcact

SEQ ID NO: 303591 - DNA, 579 bp, Homo sapiens
cacaacctcttaaaaaaaattgaagggagcttatagggaaaggatgagatgagctggatacctagtttaaggaaagtctgccaacaggccttgcttagccaatgcttctcttcattcattctattttaataaaaagatgtttttaaaaatcgataccaaagtccaggtgcagtggctcatgcctgtaatcccaatactacgggaggccgtggagagtgcatcacttgaggtcaggaatttgagactagtctgaccaacatggtgaaactccatgtctactgaaaatacaaaaattagctgggtgtggtggcatccacctgtggtcccagctactagggaggctgaggcagaagaatcgcttgaacscaggaggctgaggttgcagtgagctgagatcttgctactgcactccagcctgggtgacagagccgaactctgtcaaaaacacaaaacacaaaacacaaagcaaaaaaaaactctataccaaaaaccattgaattttacgttttaatgggtgaattgtataatatgtgaattatatatcaataaatctataacatgtcatatttctttgtcact

SEQ ID NO: 303592 - DNA, 613 bp, Homo sapiens
ctattataaaattctacacctcctcaccatccttcatccagagatttaaatataatttaggcctctctactcacctcgttatttgcttaataagtaatatctgcagatatggaatatgaactctggtcctcttattttatgccagcactcaaagtttcaaaatattcagggtcacataccttttatatttacaagcacaaaatattttcacagtaacagcccttttaaaatatctttgtgaacaattatatatcaacaatatgggtatcctgtgaatcttaattaagaagacacccattaacaattaccaagaggtaatagttaaattgtacattgaaaatagttgccaataataatattgcatatttaccaaaacttagagatagtatagcattttataaaatatcagatattaccctttcggaattgaatgcaataataagggaaactagatttcatggaaaataaaaacaattatwtttaaaaacaaaaagttcagatttttgtgctttaatggaagagttccatatctggagttagttgaacatgtgttgagaacctagttgtgcctttggcaagctgtgtgacctcggacgatgtactttgcctctgg

SEQ ID NO: 303593 - DNA, 613 bp, Homo sapiens
ctattataaaattctacacctcctcaccatccttcatccagagatttaaatataatttaggcctctctactcacctcgttatttgcttaataagtaatatctgcagatatggaatatgaactctggtcctcttattttatgccagcactcaaagtttcaaaatattcagggtcacataccttttatatttacaagcacaaaatattttcacagtaacagcccttttaaaatatctttgtgaacaattatatatcaacaatatgggtatcctgtgaatcttaattaagaagacacccattaacaattaccaagaggtaatagttaaattgtacattgaaaatagttgccaataataatattgcatatttaccaaaacttagagatagtatagcattttataaaatatcagatattaccctttcggaattgaatgcaataataagggaaactagatttcatggaaaataaaaacaattatatttaaaaacaaaaagttcagatttttgtgctttaatggaagagttccatatctggagttarttgaacatgtgttgagaacctagttgtgcctttggcaagctgtgtgacctcggacgatgtactttgcctctgg

SEQ ID NO: 303594 - DNA, 647 bp, Homo sapiens
ttattgcttcccatcctccactttgaattgtcttgccttccttgagttgattcaacttctatcccacaaaatccttcaatgtctgacttattagaattgatgaattgactgggaatgagctttgcgtaygattgtgtttcatctaagttctgttttcatgtttgctcttattcgccacccacgaaaactacattttggcagtgtattttagagggtcattgcatcggtcaatatatgagtaaatgaagatacacagataagggtagagttgagaggaagctgagtgagcaactgctcctttgaatatcttctaaaattacacattttttttttcaattttaggggaatatgatgttgaaatgatttctgtttttaaagaaaagataaaaagaagttatgggaggcattgtgaaactaaagctatgagacaaagagagaagacaataaaataacatttgtttttgatacatatggtctccctctccactgctggcctatttctctttatagttagaccttgactattgatggggtgtccatcctagatcaaaatcttgagtatacagctccagttttcagctttgattactgagtcctgagtttgctaaaggctatgtatttttactaacagagcaaccaaatgttag

SEQ ID NO: 303595 - DNA, 539 bp, Homo sapiens
ctgagtaaaatttaacttagcaggcaaaaacaccagggttttaggagagcatacccaatatgagaaggtgatgataaaaagcaaccagccacacccaaaagactccaagaatgtcttggtgaacacgagttaaccagtctgaaggcactgtgagccgttcgtttttatttcagattttccacrctcttttcagttactctaaaataactaacaatgctctttacctttataaaactactttatcgtttgaaagcttatgctctctgtccccttcctacactttttgtttggtttagagcatagtaaataagcacaataattttttagatctcctctgctgcacttaatacttcttgtttataaaaagatacctgcaattatttttatccaggatagatgtgagctcctggaggttgaactgccacaagtttccttataagtctataaatacaggctctgcaactgatctcatttatttccaaggttttaaatgccatctgcatggtggaaacttccaaatgcacatctccatctctgat

SEQ ID NO: 303596 - DNA, 564 bp, Homo sapiens
tcctttgtcctgcatccttgacatcttctgttgcatgtcacatcaaatataacataactccaaacagaccatgtgatgtttccttctaaccagcttagctgtcattatgcgacatctcagtaaataatatgagcctcaactccgttgccgaagtaaaaaatgcaggtatcactcttgatatttgtcttccctttacaccctgcccatcatcaagcctgtcagctctacctccaaagtaactcttgataacaacccagtctgtccctttccactgttatgccatagtctaagctaccaacatctctcattatttccaargctttctatctgattctctgatttcacttatgcctcccatgggacatgttccaaatagtagccaaagttgtctcttaaaatacacatcatgttttcttatgtctttgcttaacgttattttatggcttttaattgcaataataagaatactgaaatttctaccatggcatatgacctcctacctgatcgggtctggtggagtttttccagcttcttcttctgtcgctcttttacttattcactaga

SEQ ID NO: 303597 - DNA, 577 bp, Homo sapiens
atatttgtctctgggagagttaaactattgcaacagaagtttgtcttggttactactgtatgggctaaatctctcagcaatagtgccttatcagcccacactgctagaagccaagtgcggattacattcccctgccatcaaaactgaactaatgatacatttagtttggggaagagaaagagtttatgaaaagtcgggaagtcaagaacagtcaaccttgataactcacttgttttccctgggataatttattttgacatttaggagtcacgcaccaggaatataaaccctcatgaacatgctgccatagactggtgtgacaaatataagcttctgccttccaattttccatcagctttgcctccaactcaccttgatccctcccactgagcattttgaatgctttgttsggctgccacagagaccacgttggaatcaaaactgttttggtctgtcccagggcaggagcagtcaattaaaatcagcttagaagcagccctgggaaaggctgtattttttttttttctataaaatatttctggtgggactatgggaaaagacagctttcaattttaaa

SEQ ID NO: 303598 - DNA, 583 bp, Homo sapiens
aaagccataattagtttttctaatcagagttgtattatttaatttttaaaaactacgttctattctccacttcacaatgagaaatacctcagttaaagaaagaacatgttctctctctcactgtccttccctctctggatctctttctctccctctgcgtttttctgactcatatggtttcccctctgtctggattgtcctgccatctcattatccttcagtcggtaaaatcagagccaaaacactaaatgtaattgtgcaacctttaaggcttgtgtttctggtttcaaattttccctctgttagcatcttaatgacccacactgatcrttattgtcccctcctccaggtatactttggtactcccatagcactggtgtttacctctgtctttgcaccagtccatggtcctgtaactccttccttacttgcctgattctctactaaattgacggcacttctcagacttcaatacccacctctaagagtagaattatatgctgagactcacatgcattgctaaacattacctcccaaaacaagattcccagataggacctgcttttggtgagcacaaggacat

SEQ ID NO: 303599 - DNA, 536 bp, Homo sapiens
gacaatcgtgcttggtcgctacaaggagtgatcagtcttctcacctggctctgcctctgggtgatggtgagaaccttcttcaataagctgcttctgttctaattttgaaaagactctcctgagtggttagattataagaacaggggtgctacttcctcccccaataggttgactattatggattacctgttaattgctatagttgccagcacattttacagtttcctctgtggcacagagggaaagccaggagttacatttctcagaatccccttctctttatggttgtaggttagatttggccacataatggttcaataaaataccacatgtgaaatgccaagcataatgcctggtacagagtaagtagctaatcaaaytggagtgtctttctttctcaacttttgttaccgatgccacattaagggcatacatatcaaatttaatgaatttataaccttcagaaggccatcagatatattcattaatcaatagtattatttttttcttgagtttgttaactatagtaattgcaa

SEQ ID NO: 303600 - DNA, 559 bp, Homo sapiens
ggggcccttccacctgacccattcctgatgtcttcaaaacctttgtgatatagaagtatggagaagatgtggcttttacatataacctttaatggatctgtcctacatcttggtttcttttctgagggcctctaggktactactagagctggctttaacgtgagaaagcaagcagagtaattgtttatcactgatgaaatgcatgtctggtgtatcagaaaataaacacttgggtttgaaagtgagaagcaaagtggaccaaatggactgccttattggaaccactgctggccattctcagacctcactggaaaagctaaggcagaatatccctataatatagaaatattccagcgatcccagagaatgaggcatggaaaggagggtaggcatctcattacctcttgagagtgatcaagattgcaggacccatctgagacagataaaatctttaacatgaaaatggaaatcctcaagaatagtgtgtggttaacacatgaagggaggcaaagaaagggacgctggtgaggtattttactgggcggtatgatacttgaat

SEQ ID NO: 303601 - DNA, 609 bp, Homo sapiens
ataccacttgtctatttttgctttggtcacctgtgcttgtgatcttagacccagatcactgggtcttgtttatttatccattcaatcactttactgtatttttattggagaatttagtccatttgcattcaatgttattattgataagtatggacttactcctgccattttgttatttgttttctgattattctgtggtattcttttccttcccttctatctttcttttagcaaaggtgattttctctggtggtataatttaatttcttgctttttactttttgtgtatttgttgtatgttttactgatgtgaagttaatatgaggcttgcaaatactatcttatagctcattatttaaaactgaagaaaaccccgaatacacgagcaaagagatatctaataaaaactgtacatgttaacctcatcccctcatttttgaactttktgttgtttctatttatttcttaatatactatgtcttgaacagttgtacttatatttctgattggttcattgtttagtctttctatttaagataagggtagtttacacaccacagttacaatgttataatattctgtgtttttatgggtacatactattaccag

SEQ ID NO: 303602 - DNA, 605 bp, Homo sapiens
acctggctaccacctatgttcgcttaaagcccttgggctctataatcggtaggtggctgagccagccaggctgtgttcttcccttcagaatgtcaagattccccaagccctggrcaggtccaaagatgccatccaggagccagagactggagtcaaaaaccccaggaatctacctggtactctattctattgcagtgaagctggcactcaagccatgagacaaggtccttcccactcttccctccctttttcataggcagaggggccccccaccatggccatcaccaccaccacagacccacagcgggtactgccaggctactgctgatgttcccttaatgcccaagggctctttagtcagcttatggtgaatgctgccaggcctgggactcatccttcagcgtagtgggcattctctgggcccagggaaggtccagaaatgctgtccaatagccaaggcctggaatcagggaccccaagagcccatttggtgccctactgcattgtggctgagctggtacctggagccagcacatctcagagtgccaaccaaggcccatagcatattaccttgtgattggtgatggcttttcagggcccaaggg

SEQ ID NO: 303603 - DNA, 605 bp, Homo sapiens
acctggctaccacctatgttcgcttaaagcccttgggctctataatcggtaggtggctgagccagccaggctgtgttcttcccttcagaatgtcaagattccccaagccctggacaggtccaaagatgccatccaggagccagagactggagtcaaaaaccccaggaatctacctggtactctattctattgcagtgaagctggcactcaagccatgagacaaggtccttcccactcttccctccctttttcataggcagaggggccccccaccatggccatcaccaccaccacagacccacagcgggtactgccaggctactgctgatgttcccttaakgcccaagggctctttagtcagcttatggtgaatgctgccaggcctgggactcatccttcagcgtagtgggcattctctgggcccagggaaggtccagaaatgctgtccaatagccaaggcctggaatcagggaccccaagagcccatttggtgccctactgcattgtggctgagctggtacctggagccagcacatctcagagtgccaaccaaggcccatagcatattaccttgtgattggtgatggcttttcagggcccaaggg

SEQ ID NO: 303604 - DNA, 605 bp, Homo sapiens
acctggctaccacctatgttcgcttaaagcccttgggctctataatcggtaggtggctgagccagccaggctgtgttcttcccttcagaatgtcaagattccccaagccctggacaggtccaaagatgccatccaggagccagagactggagtcaaaaaccccaggaatctacctggtactctattctattgcagtgaagctggcactcaagccatgagacaaggtccttcccactcttccctccctttttcataggcagaggggccccccaccatggccatcaccaccaccacagacccacagcgggtactgccaggctactgctgatgttcccttaatgcccaagggctctttagtcagcttrtggtgaatgctgccaggcctgggactcatccttcagcgtagtgggcattctctgggcccagggaaggtccagaaatgctgtccaatagccaaggcctggaatcagggaccccaagagcccatttggtgccctactgcattgtggctgagctggtacctggagccagcacatctcagagtgccaaccaaggcccatagcatattaccttgtgattggtgatggcttttcagggcccaaggg

SEQ ID NO: 303605 - DNA, 605 bp, Homo sapiens
acctggctaccacctatgttcgcttaaagcccttgggctctataatcggtaggtggctgagccagccaggctgtgttcttcccttcagaatgtcaagattccccaagccctggacaggtccaaagatgccatccaggagccagagactggagtcaaaaaccccaggaatctacctggtactctattctattgcagtgaagctggcactcaagccatgagacaaggtccttcccactcttccctccctttttcataggcagaggggccccccaccatggccatcaccaccaccacagacccacagcgggtactgccaggctactgctgatgttcccttaatgcccaagggctctttagtcagcttatggtgaatgctgccaggcctgggactcatccttcagcgtagtgggcattctctgggcccagggaaggtccagaaatgctgtccaatagccaaggcctggaatcagggmccccaagagcccatttggtgccctactgcattgtggctgagctggtacctggagccagcacatctcagagtgccaaccaaggcccatagcatattaccttgtgattggtgatggcttttcagggcccaaggg

SEQ ID NO: 303606 - DNA, 571 bp, Homo sapiens
acaattgttagcattatctagagtaggtgcatttcagaaaaaaaatcagtgtgatttacagcctatgctgcttttaattatatatggtgtaataatatacctttatgggaaaaatttcattaataagacaataaactttatttacatgttttagggaagcagataatgtcaatggattttaatataaaaactcttttgcactcactaaataatgtatttttaggatatttaaaatgtattaatgcattcatcagaaaygatacctagtatataatgaagttatttgccaaagcattttcttgaagaggtcatgaagtcatctttatggacagtcaaaattaagagtaatttttcttctagatgacatctcttacatgccatatttggatcctgtcttgtaccactaaaggaatgttacctaactagtgaaagggatgaaagggcccttgatattctctctgctactattaagttaagcaatgttaaataaagaatcaagaaattgccccaataattcaacacaaattttcctcccaatccaaatattaaattctggttggctgatttggtt

SEQ ID NO: 303607 - DNA, 607 bp, Homo sapiens
ctaaatacccttacttgatcattattctatgcacataagaaaatttcacatgtaccccataaatatgtacaaatataagtacccgaaaaagcagtggttagtttagtgagccttattgtttgcaagcccatgtgggccgttagtgataaatgcctcctttacttaatgcttaaaagacagtgttatattgatcaggtatgaattttataggctacaagcttagttgtgcaaaaatagggctttttwaaaaactaagcttgactttattcttgaaccttcattctgctccctagtggacagtgtaatcttccaaaatcaaagaaaaccattgcattctgctgtttctcaggcaattcaggccatttgtactcatgttggaacaccaaaatttgtgccttgtaattttaacctctgcatatggcagatcattgcaaattcataggagcagcataaatctgctgtgacggctgtttataaacacaaactgaactggagcaggttgtcttgaagcaattgagtttgcaactgatgtggcctcttgggaaagagagcctggacctttggtttgtatcaggctgaagttgatttccaagacaccagtggcagc

SEQ ID NO: 303608 - DNA, 583 bp, Homo sapiens
attgttagaagttaaaaaaatctatagagcacaataatatctcaacaaattcaagattcggtggttctaacacctgtgggtcttagaatattgctactgagcatacactttaacaaggcaagagacaaaaacttattttttaagttatggaaagttcattcctcttggcatgcctgtctatatctcagagctcagtgataaaaaccaatgaaccagaacatattttcagctggagtcatatgtagggctccctgacaccatgtgaagctmtgtgtctattagcaactaaaactatgtgtccttgtgtgacttagccatgtcctatagaggttgatatcatttcaagacactatggaagcatggcacacagcccagcctgaatgatgtagagaggtaccatcaatgccttcttggctcttccttgtcactagctctcagggcagagcctggtgttccattagagagctaggccaccttgcctgatgtttttgattacagtgtttatttattatttatatcccgtcacttgaaaaaattttgagatggttttgagactctttaggtccttataaagatggttttt

SEQ ID NO: 303609 - DNA, 343 bp, Homo sapiens
caaacaaatccttcaaaccaaacaaaggaaacccaaatccactgcgcctcctggagacaattcctaggattcctgatcacaaactatagaacagggctgcctgaaatcaaatttctgctctactcttactacctatgagaccagaaaaaagtcctttacttcactctgctggtttctttatttatacaatgaagttgatggcagcrcatacttaacaggattgtcgcgtggactaagtggataaatatacacaaaatactccaaagcacggaagtgacacaactcagaagctcagcctaggccttgatacagggaaggggataatttggtgtaagccgaggga

SEQ ID NO: 303610 - DNA, 534 bp, Homo sapiens
cagaggtctgtaatgctgtgagctactctctctcctgaaatagtaggtgagatcagatgagaaaattcatacagatactgtttgtgtttctccacatagaaggtmatttcttaagcgtctgccctataaaccttacttaggttctataatgcattgagacatttttttgaaatatgtaagaaaaaatttcagtgggctgagaaaaacttatgtaaccacactgttattacttttaaacatgaaaaatgtcattttccctttacttttcaaataatgaacagaaagacccaggttttctgaaggttacctagcaagccaagaccaatactgattttaagctcacaaagatagaggcctctttaaagaatgcaaaggccccaataataatagctatcttttatgttgtacctacaacataccaattactttgcttgctgtcttgctttatttttcatggttgcaggacaccctcaatgagatatttataatggataaagaaagtgaatttcagagtggttaagtaactggaccaag

SEQ ID NO: 303611 - DNA, 572 bp, Homo sapiens
cagaggtctgtaatgctgtgagctactctctctcctgaaatagtaggtgagatcagatgagaaaattcatacagatactgtttgtgtttctccacatagaaggtcatttcttaagcgtctgccctataaaccttacttaggttctataatgcattgagacatttttttgaaatatgtaagaaaaaatttcagtgggctgagaaaaacttatgtaaccacactgttattacttttaaacatgaaaaatgtcattttccctttacttttcaaataatgaacagaaagacccaggytttctgaaggttacctagcaagccaagaccaatactgattttaagctcacaaagatagaggcctctttaaagaatgcaaaggccccaataataatagctatcttttatgttgtacctacaacataccaattactttgcttgctgtcttgctttatttttcatggttgcaggacaccctcaatgagatatttataatggataaagaaagtgaatttcagagtggttaagtaactggaccaagacacattactcataagaggctgtgtcagaatatcaaac

SEQ ID NO: 303612 - DNA, 572 bp, Homo sapiens
cagaggtctgtaatgctgtgagctactctctctcctgaaatagtaggtgagatcagatgagaaaattcatacagatactgtttgtgtttctccacatagaaggtcatttcttaagcgtctgccctataaaccttacttaggttctataatgcattgagacatttttttgaaatatgtaagaaaaaatttcagtgggctgagaaaaacttatgtaaccacactgttattacttttaaacatgaaaaatgtcattttccctttacttttcaaataatgaacagaaagacccaggttttctgaaggttacctagcaagccaagaccaatactgattttaagctcacaaagatagaggcctctttaargaatgcaaaggccccaataataatagctatcttttatgttgtacctacaacataccaattactttgcttgctgtcttgctttatttttcatggttgcaggacaccctcaatgagatatttataatggataaagaaagtgaatttcagagtggttaagtaactggaccaagacacattactcataagaggctgtgtcagaatatcaaac

SEQ ID NO: 303613 - DNA, 591 bp, Homo sapiens
aactaacagtgatcataataattcaaacttgtagagtacttttcaagttggagataagttgtttggaagaagacaagacaactggatcagaaaagaagccacaccatatagtgagattagctttctctgggaaatgcttagatcaaagtttctatagagaccgtraggaattctatgtcacaaattgtcaccaggaaagcagtctactgaaaaatgcaataaatacaaaaggagttggaaattgggaattggcttgttataacaatgtgtcaaatgaagagtgctgaagtggaggtagttatacataatcagagtgggaggaatattacctggaaaaatagaggtgtaagggtggatttatgagcagtctactgcattaaagaaagaaggatgtttggtctgtttgacagatttatccccacaggggaggaaagtgatccattagtttgctttatcttcataatgctcccaggataatccagctccttggccctgattttacactgtctaagcaaccttctgatggtaattgggtttcccaaatagatttctttccttggaaggaactgagtagagagactgacatgattt

SEQ ID NO: 303614 - DNA, 565 bp, Homo sapiens
aaacccactaaccagaaacctactttctgactctatagatttacctatttttgacattccacataaatggaatcatacaatgtgtggtcctttgtgtctggcttctttcacttagtataatgttttcaaggttcatccaagttgcagcatatatcagtgttttaattctttttttattgtcaaataatattccattgtatggatctaccacagttggttatscagtcatcagttggtggacatttttgttgtttccactttttgactattgtgaatagtgctgctataaacattcatgtacaagttgtcttgtgaacatgtgttttcatttcttttgggtatataactaggagtggaattgctggattgtataactgtaagtttaaccatttgagaactgccatattgttttccaaagtggctattcatattatattcctaccaacagtatatgagagctccaattttccataggcttaccaatacatgttgttatctgactttctgattatagctatcctagtgggtatgaagtggtgtctcattatgattttgatttatattt

SEQ ID NO: 303615 - DNA, 484 bp, Homo sapiens
tgaactcgttattagaactatgtaatttaatagaatactggggaaaccaaagaagaaatgattacacaaagaaaagggtattgttttatgaaaataaaattaaatgttttggaaagagtttaaattttgcttaaaattagtatggaaaatgaaccgataagcttggggaaaaggcaacaaaagtagagttatttaactaagtctgaattttaaaatgrcctagttgcatttactcataaatgtgtattatcttatcctacaaacatttactgagcatttactatgtgtactaaatagctgagtaggtaggaatataaaaacaagtaaatcacagatgttaagataataaagtctagcggggaaagaagttgtgtgaacatgcatattgcaagaaaatgtcatggctatattaaaggagtgttttttaaagcctggaaatgtttaaataaacgtgttattggctcccaagggacatttaaaaata

SEQ ID NO: 303616 - DNA, 577 bp, Homo sapiens
ggggcactgcaggagccaggccagcctcaccaactatgagggagttgggtaaggcctcttgctacagctatcacccatttccctgagaaactatatagaacaacagaggcaaccaaaagcccctctggaacataaccccattggcctgagaaccaccccctcaatcccctacagtggccacagcaagcctcacccaaggaaagtctaagcttggacccacctataccagccccaacctgatggtatttctctattttccatggttgccaaacacaaaagatagaaactcttgggggctttatggccccatccatcacctgacaaactaaaatccttatcctggccaatgcagggcaagcacagatccccctactactactatagctgatgctcttttgaaaatgccacccacaggctggaggccaatctacttgggccataacagcaacttatgacagaataatcttgctgccaggaagaagaagacaatagctaattccactgcccacaacatsctggctaaccaatggtccttagtctctccatttgacaactttactgctagcataaccagcat

SEQ ID NO: 303617 - DNA, 549 bp, Homo sapiens
cacataaattataaattcatctatacacccactggggaatccaacgcacacacggcacaaaagggagaatatgaaatattttcacaggtaaattaatacaggatttaaagctctggcttacctagacattaaaatgagtagaggatgtaactcttgctgtaaaaacttcttgtttaagtagccctagaatcacttttttttaggcctaataccactttaggaaatttttttcagctgctacatttaggtatctaatgccatcatagagctctcatagcatttttgcaaactatctttgcaatgcttaaaagaaacactgagatcaggggtcagtaaagtttccatcgagtcccataaagtaaatatttgaggctttatgggccwtacagtctgtttagtataagacgctgcagctgtagcagaaaacagccacaagaagatatataaataaatgtgtggccatgttccaatagaactttacttaaggacactgaaatttgaatttcagataattttcacatcatgagatcttctttttttttttctagc

SEQ ID NO: 303618 - DNA, 588 bp, Homo sapiens
ggtttcgctttccacccaggctggagaccagtggtgtaatcatagctcactacctcctgggctcaggagatacccccacctcagcttcccgagtagcagggaccacagttgcatgccactacacctgcctaatttttgtatttttttttaagaaacagagtcttgccatgttgcccaggctartcttcagctcctggctcaagcaatcatcccaccttagcctctcaaagtgctgagattagaggcatgcaccaccgcacccagccaagaccctctttttcatgtccccagtaaaggacactgatggtgcttttaccagatctctttaagcatatcatgtacgcatcctccaacttctttatgccttgctgctaatgcctcacatcctaaaatctacgacctttggagcattgctctggagatgtcctgctccacatatgcctgggcgttttgtattccagcccccgtccatcagggtagcccataaccatgaacagactggtatgggagtacaaaagcttggctcctttgcttcaaagtgaacaaactctgaggtgtaaattatgctacaggtttccccatgggatc

SEQ ID NO: 303619 - DNA, 209 bp, Homo sapiens
agcatcatcttttgtgtttgttagaaatgcagaatctcagctctactcaagcctactgagtcagaatctgcattttaataagawccctaggtaatttatagacacattaaaatttgaaaagtgtagttctaatacattttggtgggtcatctttcctgcaacatggtagccgattaaaaaaaaagtaatggtaatagaaaaaataaaga

SEQ ID NO: 303620 - DNA, 209 bp, Homo sapiens
agcatcatcttttgtgtttgttagaaatgcagaatctcagctctactcaagcctactgagtcagaatctgcattttaataagatccctaggtaatttatagacacattaaaatttgaaaagtgtagttctaatacattttggtgggtcatctttcctgcaacatggtagccrattaaaaaaaaagtaatggtaatagaaaaaataaaga

SEQ ID NO: 303621 - DNA, 537 bp, Homo sapiens
tattccttacagctgtgagccatctgcaaccaattttctcatactcagggtatatcgaagataaatattctccccgtacccacccacccgctcagtacacttagagactcgtataatatgccacccagaggaaccttaacatttccaaagcatacagctgctcaaccttactttggcctttctcttgtrgttcatatcgatttcaaatcattgctacactcactgcctagatccttacattgttgtttaatctgaaaacgctggttagaagagtcaggatcattttaattgccataagtttcacagctatgactgattattcactgtggttgtgagtaatattagaatcatagtatgaataatttcccataagagtgcatagaaagatatgaatatacagcggtatatcctagtggtccatagaaggcttggatctgacagacatgagtttaaggctttctactagctatgtgatcttggcttccatttttttcagctgtaacctaggaatataaatagtatctacctcataggatt

SEQ ID NO: 303622 - DNA, 565 bp, Homo sapiens
actatgtcatatgatcactttgagctgcaaaaaaccaaacaaataaaaaagcaaaaactgcatccatctrtaggttcagggatcttttagttgagaaaaaatatcagaaaccttgtacctcttggaccacccaggatccgttcacatcttcctttacataaatattctttatgtggaatgcatttataccctcttcaagagaagcaacccccaattcccaggtactgctttctacttgaattccaggatttctggctgatatgtagatctccccatgagacctgagtgtggctccattctcctgggagattcattacccacgtgggctgatttggatgtgacttgggggtgaatatgtgaggcatcagcaaacaacatctagcgtttgtatccttcatgtcctctataacttgtgcactgttgtttgctgctttggtaataaaactgaaatgaaaggaacctggaactgagtccaagtcagaattcttgcaagcttagtttctacaaactttgtggtctggcctaattcattgggctagttgtgccatgtctacaaatcatcaaa

SEQ ID NO: 303623 - DNA, 562 bp, Homo sapiens
ggggtaggaaggatcacactgggtcagtggagccccggggagaggaggaaaagtatcagggaaggctaggatgggaagttaagccagataggatggaactagattatggagagccttgaaactggggaaaaggaatttaatgtgatggcaatgggaatggattggtaattaaggaaaattagaacatgtttgatgtggctaaggatgtgagaacctgatattaggaagactgactttctgaattgatgcattaatttgaacctcaagagatacaacggtgggaccagcaatggagaagagacagaaggaatagaaatgagagctgttcaagggaaaaacttacacattttgtggatatggaaagtgaagaagatgagctacatgtgggtggtttcatcctttgaacattacaggcaggcatgtaaatacttagtaaattgaatcaaagttaaaacccaaaaaggagtggggaattggagacaaagaaccaaatttcycatcactatatcagctgaggatttcctttctatgcctgtatttctacaacaatgataatatttga

SEQ ID NO: 303624 - DNA, 571 bp, Homo sapiens
ttgaaagaaaacctggatatggaggacgaagtggaccaggaggagcaggaccagagagagctgagtcccccgctggaggtatctctaaggtttgcttacctatctccctggaattgccctttgcagcctctctgagatggtcgctaggagggcagaatcaattctacaatgttggcagaggtccagattaccctgcaaggcaaagaaagcctgcatgtatggaaccttggaccatttgccctcgcatttacagatacagttctgagagatggggtggtagtgggggcgggggctgaaagcctacagcaaattctaatttggcagtgattaatctatttcccacaccccaaaactgatgggttgacaagaaaattctgattattttttcctctcggggtgtgttaatcacagcaaaaaagcagctgtttgtctttgaggctcctacttaactgatactaaagaacagatagtgatctcaaactcaatcttttagacatcaaaaagtctctaattacctcaaaggatatcaaaattattaataccaatattktaaatattacatattttaccc

SEQ ID NO: 303625 - DNA, 617 bp, Homo sapiens
catgggtgaagctggaagccatcatcctcagcaaatacagaaacagaaaaccaaacaccgcatgttctcactcataagtggcagctgaacaatgagaacacatggacacagggaggggaacaacacacaccagggccagttggggggcagggggcgaagggagggagagcattaggacaaatggctaatgcayacagggcttaaaacctagatgacaggttgataggtgcagcaaaccaccatggcacatgtatacctatgtaacaaacctacacgtctgcacttgtatcccagaacttaaagtaaaatttacaaaaaaaaaacaaaacaaacaaaaaaaaaaccctgttttacctactagcaagaacagagaaaaggagcacttggcccaaccctgagaattaagaggattcctgaaggagctgtcccatgctgaatcattaaggctgagtaagagtgagtcaggggaagtagggaggggacttgaaacatcatgaaaaacaaaggtaagacacaacatagtgtggggttggtagggggagtcaagaggactagtatgtgatgtatgagactgagaatgacaggagatgaggctagagaggtaagcagtcaccaag

SEQ ID NO: 303626 - DNA, 467 bp, Homo sapiens
gaggtaccagagaagatggggcactgaaacccagagtctgagatccttgcttcaggcactgtcctctactccaaactgcyaggagaaaataaaccctggtttgtttcacatctgcctcacttagccaggcttccagaggccatggacagaaggctgtaattaaacaaataaagcaaagagaagaaaacctttaaaacaacaattaagcaaagcaaacagaagacaacctttaaaacaagatgtccacgggaaagcacatttattgtctttcctgctactggcataggccttaagctggaagcacctgtcctcccattttatggatggagaagtcaaggcctcaggttacaaagagccagacacagccatgatgggtcttaggcctcctgacctcgagtccaggactcctgtctctacagagaggcagcgtaacatcacagaacggttaagaccttgggctcttgtgt

SEQ ID NO: 303627 - DNA, 441 bp, Homo sapiens
tatggcaccaactgctgggtctggggcctccatggggaagcaggtaactaagggagacttggaaccttcactgcctggggtaagcctggtgccctggatgggatgggaggagtgaatgtaacatgggcagtgagccggggagtgggcgggggtcagggtccagctctgaccacttttatatcttgggtctggtgttaggctggggatgtgtgtaattagttggctaaaattaagaggtctattgtgcccctaactccttagaggccaggcaggggtttccagcagtagccgcacctcctccccacagggaccgatggcatggtcggtggctatgccggcacttctgcggctcacttcattctgtcaggataagagtcctgagtgggagacaggccggcctggttatgcyctttacaggtaaagggggtagatatagagcac

SEQ ID NO: 303628 - DNA, 636 bp, Homo sapiens
ccttcaccttccggaggaggcagttgtccctgagcccaatccaggatccgtggaatgggagaaacgattggtagggggcatggatactggataggtaaccaaggccaacagggtgagattgacwccagtctggactctttctctgcatcatttagaaagaaaaggcaatctttctaatagtaagaaagaaagagatgagagttgtggcagatcaggggctaaactggacatttgcactcagagttcttcccatctgtactttctgctgttcacagcacttttctgcccaaagtctggttcaataatcataatgaccctgtgagtaaggcagggaaatgattatcatctccccttgacaggtgagaaaaaggaaacacaaggagctaaagtgacttcccagaccccttccaggcatcctttagtcatgccacctagatatattggcatgtcatgtggcttatttttagatcttttaggaaaaagtttcattctcaccaatctcaccagaggtctgcctgaggagtcaagtatccagggattcaaggagcttccagaatatccatgacattttttctcttccaactcatggaaggagatacaaagacctccttcctgacgcagagcacaggccttttc

SEQ ID NO: 303629 - DNA, 537 bp, Homo sapiens
tccaaatcgtatcaggtaggcaaggtaggaatgtatttgcgagttccagacacatgctcttgggctctcctggtgtcttagcacatgtcyacagcactagttcaggggctcgtaagctatggcccacagtcaaatgtggcctgccacctgtttttgtaaataaagttttattggaactcagccatgtgtgtttacttattgtctgtggctgcttttgctctaccacagcagagctgggcagtggtgacagagaccgtatggcttaaaaaggctaaatatttactaactggtcctttacagaaagaaattgccaactcctgttcttgtttattctctttggggcagatttttgttctgagcacaagcctgtgttactcataattccctttatccctattgatccctatctacccccaaccccctagcttaggatccatgcaatcctgaaagacacaatcccaaatgtttaaatcctgaaagctgaattctgggaaagggattagtgcagtttgggttatagcagcatagttgcatcat

SEQ ID NO: 303630 - DNA, 614 bp, Homo sapiens
aaccagggtaagcagagaatgcccctatgctggtgaggcagtgagttccccaccccctggggagttcaagcctaggaatagccttctggagcttgcactgacaacatgcaggctccctcacatttttgaaaggctgagattctaagattctgtgtgagggacaaacagacagggactgtacagccctattcccctttccccaaaggtgggtgtgccacaggcccccctggactccctgagccctttgtrtgaggtgacattgtgggagaacaccaggctctaggcccagcccctgaagcttactctccaggccctctggtaaaggccccgctaagcagcccccacccaggtagctggtctacacagccttccccagccctgcccagtcacaagcctgagaatgagtccaggtgcagaagaaggctcagcctgggtatgcctctgccccatgccaaaactctcaaactgcaggtggcacatttttcttcctttggaaccagaaggaactggcagcttctctaccattctggcactgttcggatgaggattcatgccagaaagggctggggtagaaggaagaagatgagaagggcaggaaactaggaaggaattaa

SEQ ID NO: 303631 - DNA, 608 bp, Homo sapiens
agattagatacagcacatgttaaccactgcatgacatgggtactcaataagcagttcatgatgcagtgtctcttgtggctccaagccctctattctctcactttctcacatgggttttggagacatgttgctatagagctggacttaggagttggggaagcaaggaagcaattaagggcttgagaaagcctgggtcctgtgggaggcagtatatttatcagtctgcctgataattgagcaccagctgtgtatcctcgggatctgagaaggagatggaagacccagaagatacaacccctaccttgtgggaattctcagcatggtaggggaggcaagattgacaaataaaaacaacataggagagaggccyggctgtgtgctcacagtataagtgctatagggacccaaagtgggcatggactatcaggaagcttcctggaaaagggcaaatttgagctgggcctccacatgttctgaatatgtgaagagcaggcagctgataagaggctcataagcaggccactgggttccccgtttttaattttgaaataagtgtagacttcaagaagttgcacaaatagtacaaagagtcctcaagtacccatcac

SEQ ID NO: 303632 - DNA, 534 bp, Homo sapiens
gggggcatatgggtggtgcagcacggcacccatgayaatgctgccagtggggaggtggccggggatggtgttctccaggcttggtgaggctaactccaggatgcacagataattccaggaaaaataccgtgaatgaggattcccaaggggcaagggccttacagtttatgggaaaaggggaaggaagcttggctgagaagttctggaaggcaaactgaggtttgaatatgctccctctgctccctgccccaatagtgccaggcagaaaagatgtccaaggtgggattctggaaggtgaatcaaataaggacagagccaccccttggctaacaagtcccccagaaagaccctgagttcctaaccctgtgtggagctacattgggtgggaagaaaaaagggagaaaatggaagagagaagtgaaggacaagttggtctttcctccaggccttcacattctggctgggggtgcggcttcatatgtgggagcaggcagagaaaagcacatgatgtgctcccggctgtcttggatggtg

SEQ ID NO: 303633 - DNA, 534 bp, Homo sapiens
gggggcatatgggtggtgcagcacggcacccatgataatgctgccagtggggaggtggccggggatggtgttctccaggcttggtgaggctaactccaggatgcacagataattccaggaaaaataccgtgaatgaggattcccaaggggcaagggccttacagtttatgggaaaaggggaaggaagcttggctgagaagttctggaaggcaaactgaggtttgaatatgctccctctgctccctgccccaatagtgccaggcagaaaagatgtccaaggtgggattctggaaggtgaatcaaataaggacagagccaccccttggctaacamgtcccccagaaagaccctgagttcctaaccctgtgtggagctacattgggtgggaagaaaaaagggagaaaatggaagagagaagtgaaggacaagttggtctttcctccaggccttcacattctggctgggggtgcggcttcatatgtgggagcaggcagagaaaagcacatgatgtgctcccggctgtcttggatggtg

SEQ ID NO: 303634 - DNA, 575 bp, Homo sapiens
ggccgcttctgccataggccttaggggcatgattgttcaccagggaggccctgagtggcatgtccgtcccctggggagcttcaaaggtggccccgccaagccagcctcctgtttcctgctgggagatgggggtctcagtcctgccggccacctgggagtttttgacgttttcrcctctgagcctctggttgacaccacttcaaagaacattccttcctccctaaagcttcctctcgcccctgggctcccattgactgagaacttgttaccagctgtgcccaactggcccagagccagggcttctctgctctgccgaggtcccagccaggttgagtctggctcagtgtgcgggtgccttgtactgtctctcctgaagagttggttctatctctcaagcagctgctaaggacattgaggccctgggatctcagatgaagaactctctgaggaagaactgtgctgtgtagaagtgtttttttcccccttcttttatttacaggcaagagctgtgtttcagagcaagccctgactggggcatcagggggcctggcttcctaccctagccctggtgattt

SEQ ID NO: 303635 - DNA, 575 bp, Homo sapiens
ggccgcttctgccataggccttaggggcatgattgttcaccagggaggccctgagtggcatgtccgtcccctggggagcttcaaaggtggccccgccaagccagcctcctgtttcctgctgggagatgggggtctcagtcctgccggccacctgggagtttttgacgttttcacctctgagcctctggttgacaccacttcaaagaayattccttcctccctaaagcttcctctcgcccctgggctcccattgactgagaacttgttaccagctgtgcccaactggcccagagccagggcttctctgctctgccgaggtcccagccaggttgagtctggctcagtgtgcgggtgccttgtactgtctctcctgaagagttggttctatctctcaagcagctgctaaggacattgaggccctgggatctcagatgaagaactctctgaggaagaactgtgctgtgtagaagtgtttttttcccccttcttttatttacaggcaagagctgtgtttcagagcaagccctgactggggcatcagggggcctggcttcctaccctagccctggtgattt

SEQ ID NO: 303636 - DNA, 575 bp, Homo sapiens
ggccgcttctgccataggccttaggggcatgattgttcaccagggaggccctgagtggcatgtccgtcccctggggagcttcaaaggtggccccgccaagccagcctcctgtttcctgctgggagatgggggtctcagtcctgccggccacctgggagtttttgacgttttcacctctgagcctctggttgacaccacttcaaagaacattccttcctccctaaagcttcctctcgcccctgggctcccattgactgagaacttgttaccagctgtgcccaactggcccagagccagggcttctctgctctgccgaggtcccagccaggttgagtctggctcagtgtgcgggtgccttgtactgtctctmctgaagagttggttctatctctcaagcagctgctaaggacattgaggccctgggatctcagatgaagaactctctgaggaagaactgtgctgtgtagaagtgtttttttcccccttcttttatttacaggcaagagctgtgtttcagagcaagccctgactggggcatcagggggcctggcttcctaccctagccctggtgattt

SEQ ID NO: 303637 - DNA, 511 bp, Homo sapiens
tctctattttaaaaagtcggctgatgggcaacctaaattcagtctgcaatctcattttctctgtgccacatcatttaacytattcacaggattcagggattagaatatggacatttggccggggaatggggggtattattctacctctcacaccgagtaaaagggactgtagtgctcccacatctacacacggggctcaggctcccatttgggagctggagcttggtgttctcattttcgtttgccgccttgggcaggtccttttcctcctggaccccagcatccccttctgtatttaaacaagtgggctagatgactgctgtattcattagtgtaaagttgagctctgaaccatagagacccagcaagaactcagttgctttaaaaaagacagtctgatacatcaatccaagatgaacattctgggtgtacaaaggctgtgctccatgtggtcattcagggatggaggtgattttcatctcatccctctgttgtaactcagggacttgct

SEQ ID NO: 303638 - DNA, 511 bp, Homo sapiens
tctctattttaaaaagtcggctgatgggcaacctaaattcagtctgcaatctcattttctctgtgccacatcatttaacctattcacaggattcagggattagaatatggacatttggccggggaatggggggtattattctacctctcacaccgagtaaaagggactgtagtgctcccacatctacacacggggctcaggctcccatttgggagctggagcttggtgttctcattttcgtttgccgccttgggcaggtccttttcctcctggaccccagcatccccttctgtatttaaacaagtgggctagatgactgctgtattcattagtgtraagttgagctctgaaccatagagacccagcaagaactcagttgctttaaaaaagacagtctgatacatcaatccaagatgaacattctgggtgtacaaaggctgtgctccatgtggtcattcagggatggaggtgattttcatctcatccctctgttgtaactcagggacttgct

SEQ ID NO: 303639 - DNA, 620 bp, Homo sapiens
cctgacggtgtcacaagaggcctatacttttactctgaggtagcctgagtcttctcaatgcctctggctcacattggctgagcttcctgcagaattttgtcctgagctgggtttagggatgggccatgacttctgcagaggaacagtggcgactgtgtctatgttttccatggggctgytgaggaagatgctgcccattgtgtagcttagggtatctcaaataatgacccccatgataaatgctgcttagaatttaatgtcaggaaaacatttatgtctcctgaagaactggccttttgttctggcagggagaagaacactacatccttttggttctactttggtctgagctgccagaaacctgagagctaagtttaatgattaattgcaacaaccttaatattttcagtgcaggatgtagtttaacttcctttcccattgaccagggctcctcagagagagggctgtagatgcctgcaacagaatcaacttgctccagtgcagctgactggtctgatctcagagctactgaggtcagaatcctgtggtggggctggggggtgtcttatgcatccctagtcaattcttatgcaagccgaagtctgagatcccctgcagtg

SEQ ID NO: 303640 - DNA, 620 bp, Homo sapiens
cctgacggtgtcacaagaggcctatacttttactctgaggtagcctgagtcttctcaatgcctctggctcacattggctgagcttcctgcagaattttgtcctgagctgggtttagggatgggccatgacttctgcagaggaacagtggcgactgtgtctatgttttccatggggctgttgaggaagatgctgcccattgtgtagcttagggtatctcaaataatgacccccatgataaatgctgcttagaatttaatgtcaggaaaacatttatgtctcctgaagaactggccttttgttctggcagggagaagaacactacatccttttggttctactttggtctgagctgccagaaacctgagagctaagtttaatgattaattgcaacaaccttaatattttcagtgcaggatgtagtttaacttcctttcccattgaccagggctcctcagagagagggctgtagatgcctgcaacagaatcaacttgctccagtgcagctgactggtctgatctcagagctactgaggwcagaatcctgtggtggggctggggggtgtcttatgcatccctagtcaattcttatgcaagccgaagtctgagatcccctgcagtg

SEQ ID NO: 303641 - DNA, 551 bp, Homo sapiens
ggaagctttgctgtgttccttaaggccttagagctaggactgaggacctgtagtcccagaaccagcatcctgtacccccggaccccccaccacaccccccaccctgccccacctcacctcccctgacaagctgccacctccttccctctctcccagctccccaaggcagctggttacataactggggattctgcattatttatgaccactgattattttttaattctgtgattacgttattatcttcttggggggctgtggagttggaggggcagcgagctgatcgtgattcatggctctcatcctgcaatttggcctaattggccagggagctttggtaaatctgtccggaggaggagaaggcaaagggaaaagggaggaaaggaaggcgtgaacaaaaataataagaaaaaaatccrcgcaattcttgctgagctgcaggtgatggagctgacccactttggcgcagctccgtggtccccagcctctcctgctccagctgcttcctggctgggccccatttatctcacacttgcatggcctatggcttt

SEQ ID NO: 303642 - DNA, 527 bp, Homo sapiens
catcagcaaacctgaggaagccttggccattcttcccctggggaaggggaccagaagtgggagccctaagtggctcagtccctctaaaagtttcctgctgctagaggccttggcttcaggcataaatctcctctccccactgcatcattgggttaggggttttctcccatattttcagtaaaaaaagaaagcctttggaggacaagaaaaactttttatgagggttttaatgccaagtttctctgaatactcatagccacagaacctccaataaagcccagggaaggtcrttgactttgcttaagcttccctccctccctccctccctcccttccttccttcccttcttccctccttccctccttccttccttctttcttcttcttcttcttctttttttttttttttgatggagtctcactctgtcgcccaggctggagtgcagtggcgcaatctcagctcactgcaacctccacctccctggttcaagtgattctcctgcctcagtctcttaagtagctgggatt

SEQ ID NO: 303643 - DNA, 444 bp, Homo sapiens
aaatgccagggactgctaatggagagaaataacatggctaattacatctctgaaggctatccattccaaaataaatgtttaatgaaaaaataatgcatyttccctgcaacttaaatctgggagtgaagagaatgagcagagtctcccagtgggcactagagtagctgtgcatgtgcagggttgcctctgaccgtctcaccttgatgagttgcttccccagcgtcctcatcctgagggtgaccacacagcagtcttcccagggaagccacaggagtgagccatgggaacctcacacaccaagcaactaggctccaggacaccaggggcagaccaaggtctgtaaatccaactccctcccccaccaaagcttgcgatgtttctctccaacagctccaggaggccttctctggttattttcctccgcccacctctcctttccattct

SEQ ID NO: 303644 - DNA, 588 bp, Homo sapiens
taaattttaaaaggtagctataaatagtatttctgtgtgcacaagcccccacacactcagcaaaaaagcctcatcgacaggatgcttccttccaccactcccaggcaactctcactgtcagaaagatgtctttctctccacctgaaatccatgggtagtatagactgtagaagatacaagcatttggagacagattggagaggaactttactcctctgtgccaccctctcccttctctgagcatctactctccacacaacagctcctgctcacactctgtcctgctctagcctgtcgctcttctctgggtggttctgtacccaggaagagagctggagggaaggtccctcccctgacagccctgcyccaggatgggctcagagcaggtgctgaacctgtgcagggaccactggggcagctggccggggaacatgaggcggggaggagaggccaggtcctggccatgtttctcaaagcctaggctgcaaagaggccagcaaagaggggacagtgaggcctcaagcacattggggaccacctctctggactcaataatgaaaacatctgtataaagaacttgatggtttc

SEQ ID NO: 303645 - DNA, 610 bp, Homo sapiens
gtgtattttaacctgtctggtaaaatgcccaactcaaagcaatggaaaataccaacctggaagacaagaaccccagaatctaggcttgactctgccactaacccttgcaagtcattctgcacaatgaaggaattggattatatgaaatctaaggtcctttttgttatagctctaggcttatgcacctgagaactattcatcaatgacgtgaactgtcaaacaccactgtggagcctttccatcacaggtacagctaccgccccrctcttcctccgccctgcccagcacacactgctcagctttgagagactccagctcagctcagaaaccataactggccttatttttattgcctctattcaaggctataggacttcatcactactatgtgttttggctatgttttctcactcgtgagagatgaaaaaacaattgccagccaggtgcagtggcagtctcctgtaatcccagctgtcaggaggctggggtgggatgattgcttgggttcaggaattcgagtccagtttgggcagaaaaaaagaaaaatggtcattttctaaatttacattcagaaactctagcaatggtgtatagttctagagaaaagggt

SEQ ID NO: 303646 - DNA, 603 bp, Homo sapiens
aaaatgctatgcaatgatattccaagttaccatttggaagaattctgtagaattatctttagctaaagtggttttttttatgattggtccagaataatccatagatttgtaacattcttcaaaatgataattcaaatcagttggatctaaagacaractcaaaataaaggcaggaggcagcagtgtagaactcaaagtgaaaaaggcaaagtcttaaaaataaaaagagaaaagttgaaagaacaaaaggaagcaaggaagagaaagaaagaaagtcacaaagaaagagaaagaaaggaagagaaaggaagaaagaaaaaaggagaaagaaagggttacatacaataagatatagtttgtgagcactctgggtccttaattttactttgatggttctgttagctcagaaaacacttcgatttgcaatcttggtttaaaatattaattaagctcttctgactccataattctgggcctctaatacacaggcattattcagttttccctgttatgcattagaaggtacagacactatgattttatttagctaatttcaagattaaagatttccttaattgtagtcttccgctagttctttgtagt

SEQ ID NO: 303647 - DNA, 603 bp, Homo sapiens
aaaatgctatgcaatgatattccaagttaccatttggaagaattctgtagaattatctttagctaaagtggttttttttatgattggtccagaataatccatagatttgtaacattcttcaaaatgataattcaaatcagttggatctaaagacaaactcaaaataaaggcaggaggcagcagtgtagaactcaaagtgaaaaaggcaaagtcttaaaaataaaaagagaaaagttgaaagaacaaaaggaagcaaggaagagaaagaaagaaagtcacaaagaaagagaaagaaaggaagagaaaggaagaaagaaaaaaggagaaagaaagggttacatacaataagatatagtttgtgagcactctgggtccttaattttactttgayggttctgttagctcagaaaacacttcgatttgcaatcttggtttaaaatattaattaagctcttctgactccataattctgggcctctaatacacaggcattattcagttttccctgttatgcattagaaggtacagacactatgattttatttagctaatttcaagattaaagatttccttaattgtagtcttccgctagttctttgtagt

SEQ ID NO: 303648 - DNA, 589 bp, Homo sapiens
gaaaaagcatttaataaaatttaataccgtttcatgataaaggctcttggacaaataagaataaaggggaacttcctcagcttgatagagaatctatagaaagcctacagctaacwttatagttaatggtgaaaggctcaatgctcttgccctaagattagaaacaaggtaaggatatatactcatcactcttattcaatatagtactggaatttctaaccagtgaaataaagcaagaaaaggaaatgaaagcatatggatcagcaaaactgtccctatttgtagatgatatgattgtcactgtagaaaatccaagcaatctacgaactatgtagaactaataaatgagttaagcaagattgcaggataaagataaacacacaaaaaaatcattgtatttctctatactagtcatcaacacatagacaccaaaatttaaaatacaataccatttacagttacacaaaaatgtgaaatacttggaggttgaatctaaaaaaaatgtacaggtcttcatgttgaaaattacaatatgctgatgaaaaaattaatggtttaaataaattgcaagacatactgtattaatggt

SEQ ID NO: 303649 - DNA, 598 bp, Homo sapiens
gagttcttaaacttgacactgaaagcatgacacagaaaatgaaaaattgataaattggacttcattaaaattcaaaactttgtgcagccataaaaaataatgagatcatgtcctttgcagggacatagaagaagctggaagccatcatcctcagcaaactaacacgggaacaaaaagccagacactgcatgttctcactcataagtgggagttgaacaatgagaacacatggacacagggagggggatatcacacaccagggcctgcgggkgggtaggggggtaaggggagggagagcattaggacaaatacccaatgcatgcggggcttaaaacctagatgacgagttgataggtgcagcaaaccaccacggcacatgtgtacttatgtaacaaaactgcactttctgtacatgtatcccggaacttaaagttaaaaaaaaaaaattcaaaattttgctctgcaaaaaaattctgttaagagagtgaaaagacaaactagagactgggagaaaatatttgcaaactagaaaaccaacaaaagattactatctaaaacataaaatgaactctcaaatccaataaaaaaatagtcaaaa

SEQ ID NO: 303650 - DNA, 598 bp, Homo sapiens
gagttcttaaacttgacactgaaagcatgacacagaaaatgaaaaattgataaattggacttcattaaaattcaaaactttgtgcagccataaaaaataatgagatcatgtcctttgcagggacatagaagaagctggaagccatcatcctcagcaaactaacacgggaacaaaaagccagacactgcatgttctcactcataagtgggagttgaacaatgagaacacatggacacagggagggggatatcacacaccagggcctgcgggtgggtaggggggkaaggggagggagagcattaggacaaatacccaatgcatgcggggcttaaaacctagatgacgagttgataggtgcagcaaaccaccacggcacatgtgtacttatgtaacaaaactgcactttctgtacatgtatcccggaacttaaagttaaaaaaaaaaaattcaaaattttgctctgcaaaaaaattctgttaagagagtgaaaagacaaactagagactgggagaaaatatttgcaaactagaaaaccaacaaaagattactatctaaaacataaaatgaactctcaaatccaataaaaaaatagtcaaaa

SEQ ID NO: 303651 - DNA, 629 bp, Homo sapiens
cactggcttgtccctgtggtcaagtagatggaatacttggagtggctgccttaccagaatgacatgtgcatagtggttgttgggatgatggggaaagaagagtagtttggcaaaacaagagtgagggcaggtgctgttaccagcaaaggaggaaagggttctgggcagccctaaacaggagttataccgagaaacaagattggaacttagctctgatcttgctgtgaattatagaatcatggaagtttgaaatataagggtgtgtagtagttatctagttccaccctttacatgtggaaactgaggtacagaaagttctaatgatcctcttgagattacaaaccacagatatcccatagatataagtcaaggactgtttgcagtgatcctttacagcttgaatttaacttccagctcaatttttcakcagaaactcatactgcgtagatttcagtttctgtccatttccagtgtggcacaagggtaaaggagacaatatgacaattagcatctaccggacatttgtccacttacctcatctgcagaaagattgctattgtctggcagtggaaatgaattagctaataaaactctcaggaccttgaattcgaaaacagaatagaaagatg

SEQ ID NO: 303652 - DNA, 583 bp, Homo sapiens
tacaggtgtaaatgcagatttacatactcaacttatttcaaatatacttagaagcyttctaataactaaatgaggtattagtttgtaaatttaaattttaaattgtaattttaaacttttaagttaattaaaattaaataaaattacaaattcagtttctcagtcttcctcaccacattttaagttccactagccacatgcatagctatattggacagactagctctaacctgtaggactaagaaattgtccaaatccacccatctttcctctctgagattcctatggtcatctgattgaaatcaaactaaaaatgtgtagaatggctttgccagacaaaggtagccccacagaggtacctccagcaaaaaatgtgggttgaccagcaaggtcaaggccatctgacgacaagactctcatctgatttatacactcagccacctacttcttaaacctctcaactgcctgttatagctctggtccaacaatacacaaagctggggagaatgcctcaaggctccgtacctttgggttgactttgtgtgtctggaatgtctgttttaaatgagatttccaagggatg

SEQ ID NO: 303653 - DNA, 583 bp, Homo sapiens
tacaggtgtaaatgcagatttacatactcaacttatttcaaatatacttagaagccttctaataactaaatgaggtattagtttgtaaatttaaattttaaattgtaattttaaacttttaagttaattaaaattaaataaaattacaaattcagtttctcagtcttcctcaccacattttaagttccactagccacatgcatagctatattggacagactagctctaacctgtaggactaagaaattgtccaaatccacccatctttcctctctgagattcctatggtcatctgattgaaatcaaactaaaaatgtgtagaatggctttgccagacaaaggtagccccacagaggtacctccagcaaaaaatgtgggttgaccagcaaggtcaaggccatctgacgacaagactctcatctgatttatacactcagccacctacttcttaaacctctcaactgcctgttatagctctggtccaacaatacacaaagctggggagaatgcctcaaggctccrtacctttgggttgactttgtgtgtctggaatgtctgttttaaatgagatttccaagggatg

SEQ ID NO: 303654 - DNA, 551 bp, Homo sapiens
cactgggcttggatgaggggcaggagggcggcccatctgaggaatggttggttgtcagacagggtgggagtgcagagggccaggcmctgactgacaccatattttaaaccaataacagagggaaatggaaaacaaatgaggactctttaggaagctatgatctacttagtgagctacagatgtgtaaggaacaaacccttcattcatatttttggtgggctcttcatattcctcttccttgctattatatgggcatgcactggcttctcaacagctgttcaaaactctctattctcttcaaggtttgggattcaagacccagattacccacacctgcttacatgagacaatctcctacctcactgaagaaatcgaggtcatccggtgagaattcctccaactttcctccaacataatcatccttgtcaaacctcattcttactgaggttgctctgttgtgaaagggacaatcctttcgcaaggtgaaacccctgtgtccttaatcacattcccttgccctctcctccaacaccataaatcatccccttaca

SEQ ID NO: 303655 - DNA, 417 bp, Homo sapiens
cttctctgtatactctttctagatggtcccaccctcttcactggctttaaccatcatcctgataccagtgacttcaagtcctattgctgaaacttaactccctaagctttaccagttgctcattggacaatttcgcctggtattccataggccagcattccaaaatataagttataaggagagatgggatatttgcaaggtgtcaaaatatcaccccacaaacaacttgataattgcaaagaggaaaatgtatcttcaaaatgaaaatatgtgatggccactaccttaaccaagtgaycaaatatactatcactaattgtggacaatctgccatttgatacctgctgaggggataaatagaaagtatgtggcaatacctgtaagttattcttgccaatgatgtttaacctgaatgta

SEQ ID NO: 303656 - DNA, 571 bp, Homo sapiens
gaataaaaaagtcaaaaataatgcagcaatattaagtgtgaaaattatccaccacctctaaggttagaaaaacacagggaagatgttggtgttatcataacctagaaacttgaagggataagcacatggagctgggactcatacctctgagaaggagaaccaccgggctggtgctgacatctctgatgggagtggtgggagactatcttagtctgttttgtgttgctataacagaataccacagactgggtacatttataaagaaaatatatttatttcttatagttatgaaggctgggaagtccaaggtttaggatctcacatctggcaaaggccatcttgctatgtcgtcccatggcaggaggtgaaagggcaagagagcacatytgccagagaggaagggggccaaagtcatcctttatcaggaactcattcccacaataactaatccatcctggcaataatgacattaattgatttatgagagcagagccctcatggcctaatccccccttaagggtcccacctctcaacacggctgcactgagaatcaaatttccagcccctgtga

SEQ ID NO: 303657 - DNA, 529 bp, Homo sapiens
acatacagtattcttacaatgaagtaagccagagacaagaaaatgctattaagaaaaatcataaagaagcgaagatacatttactatttattaagtggaagtgatcatcataaaattctttatccttgtcatcttcacatttagtagcgtgaggaggaggaggaagaggagggtttggcttgctgtctcaggggtggcagaggtggaatatgtggagaaggtggaaggggaggcaggggaggcaggtacatttggtatagctttacaaaaatactttataatttctatatgacatttttgctgttccgtttcttgaaaaatgtttctggtggtaccaatccttcttctaccatttgctytagtttcagtgcttgtatcaaatgatccatgttataaaataagtcaaaagcaatcttgaataattggaaccctcctgccagcttgtttaatgtcaacttgttttctgacactgcttcttctacatcttcctcacagtgtggcagtggttcaggagcactcatctccatca

SEQ ID NO: 303658 - DNA, 529 bp, Homo sapiens
acatacagtattcttacaatgaagtaagccagagacaagaaaatgctattaagaaaaatcataaagaagcgaagatacatttactatttattaagtggaagtgatcatcataaaattctttatccttgtcatcttcacatttagtagcgtgaggaggaggaggaagaggagggtttggcttgctgtctcaggggtggcagaggtggaatatgtggagaaggtggaaggggaggcaggggaggcaggtacatttggtatagctttacaaaaatactttataatttctatatgacatttttgctgttccgtttcttgaaaaatgtttctggtggtaccaatccttcttctaccatttgctttagtttcagtgcttgtatcaaatgatccatgttataaaataagtcaaaagcaatcttgaataattggaaccctcctgccagcttgtttaatgtcaacttgttttctgacactgcttcttctacatcttcctcacagtstggcagtggttcaggagcactcatctccatca

SEQ ID NO: 303659 - DNA, 607 bp, Homo sapiens
agttgaaggactgagaatgagttttgttttgttttgttttgttttkttttttgagatggagtcttgctctgttgcccaggctggagtgcagtggcacgatctcagctcactgcaacctccgcctcctgggttcaagtgattctcatgcatcagcttcccaggtagctggaattacaggcacccgggaccacatctggctaatttttgtattttcagtagggacagggtttcaccatatttgccaggttggtctccaactcctcacttcaggtgatctgcctccctcggcctcccaaagtgctgggattacaggcgtgacctaccctaatttttttttttttgactattgagaatataaaaagatcagtggttaccagagtataatggagtggtgacaaataaagcacggaggatttctagagcagtgaaaatactctgtatgttactatattggtggacacatgttgttaaacatctgtgaaaactcacagaatgtacaccaccaagaaaaaaccctaatgtaaactctggactttgggtgtttatgatgtgtcaatgttaatttatcaattgtcataaatataccactcttgtgggggatattgat

SEQ ID NO: 303660 - DNA, 630 bp, Homo sapiens
ctcagagcagagtcaagctctccattcctagggctcaatgcacagccctacgcagaccatatgagctgaaagtggaacactgaagagtggatacacacattaaagccaggctgttgctggaaggagaggaaatagaagctgggaagacaaactaatattcactttatcttaaatcccacctctcgctaaatctcattttgtgctttctctccacacacatgtcacctgtcttgtctctctctatctatcttgttcatctactactgataccttcaggagatggtggggtacactattcctgttccttaactgcttcttaaaaataatttttagcttcccattgcccgcagagtgcatctcaatctgtagtacgtagtctcaaagattgtgacagtatgctggaggactaatacatagaaaaaatggaaatgtcttccttagccatcaattttacttgaagatttagaaaaatatattgtctattatatcaartatattatggagtaggattgcaaaattcacaataataaaccacaagacttaaattggatggctcctgttgcatatttagtgccatgttccatgttcccctggtgtacaagttcacttacatgcaagatagaaccccaa

SEQ ID NO: 303661 - DNA, 613 bp, Homo sapiens
gagatgaggaagctgcacacagagtagatcaacttagccatggctatggaaatgaactcatatccgaaacctcctaacctgccaccctaagaaaatagtggttaggaatggaagttctgcagtcaggctgctttacgtaaaatgctggcctttatgtactaaaaaggacaagctagtcattgtacctttttgatcctcagtctcctcctccacaaaatgagagtatactagaaccatctcatcagactgttgtaagggttaaaggagataaggatgtgaacctcttagcacagtcagtttaatacatagtgaagagaatatccaataactttattattgttgttgttactctgagtactactactactgctactactgatgaggaaactgaaggtcagayatttgagggacttccataaggaaagccacacagaaacagaccacagcaaggccatttttctcctagcttttgaactcattccctcgtaagaactcttatttcttttccaaacacaagtatgaattccctctgaacatcgttgttattcaatttagtctgttttctaagaatatacatattttaaagcaggattagctggcagaagcagtcaaa

SEQ ID NO: 303662 - DNA, 594 bp, Homo sapiens
tgggcatggtgaaaattgaacgacagaaaaccactgtagcacacatgtgctgggaatggcaatcaaagtttccaggagggtctgacgatctggtttgatgggttcaggggatgaaaaatcaattgcttaacaggggtgaagtgggtttcataaggagggaagagggcagttgtaaggcaaaaatacctggggaggggtagagaccgaagcaaatctccaagtgaatgttttgtccagaggggacagccactactcaattctaactgatgttaggtgtgattcaagcccagtgtggccagattttttttttctttctagagaagacaacaaccttttttttctgtgaaatctctgaaactgtaaatatttgcaacatatttattatttttaagccatttgtagaccaaagaaaacatatctctgggccttcagatttccctgcaataaacattcactctacaattatttgctgagtacctacgatgtgcctggcactgttttgggagccagcagatataaaaatgcaaaagacatggatcrtgttttcaaatccttcgttaagcaaaggagagagacagaagcagaagcagatgt

SEQ ID NO: 303663 - DNA, 536 bp, Homo sapiens
ggtcaaccttctgtttctgggtttccacacagaattctatagcattaagagtctttctcacccaaataaggacatttttaaggttggtttagtctgggtggaacacagagagaaaaaaattgagttaaaaaataaaataaaataacctccataaaatttttcttatgaatctggattttcaaaattataccacagcattttctcctttcagcattctcttctcgcagttggtataaaataagcaacaatatcctcctttgtagcctctcttctctgtgtgtagcccttggtttgtgcagaggaagttttaaccctctatgaggtgaatgccaggaatcgttttaggatgatttaccagaagtcagccaggaagctgacatgggcctgtttgtaaaggaagaagtacagagccagggtattttgtgtcactgtgagaatgtacattgacctttgttagagaaacagttaatattattattccattatcacacyttcaaatgagaaatttaacctcacatttgtccactcttacatcc

SEQ ID NO: 303664 - DNA, 586 bp, Homo sapiens
tcttccgtatcccacacttcttttctcccatcccagttgcaatctcactcacaaacatcacagtaccaccccaggggcggcagtagacaccaacccagaaatttagacagggatctcttatctttggaaaataggggttaggcatgagggtggttatgattaagaagataattttgttgttaaatagcattaaactggaattgacagagtgagttgagcayctctgtctaacctgctctttctctctggtgctcctcatctcacccctaccttggaatttaataagcttcaggcatttccaattgcagactaaaaccacttctaccatctcctctagtattttccatgtatcaggacagagatgtcttatgtagggaaggggcaggtatgaagtgaggtagattatctatacctctcactcattcaggattctcgctcccatgctgctgtcccttcattctcacactcacaggaatgctatgtgatggccagctgcttcccttcttggttatccactgcagctgctagttagaaaggtttgcagggatgacttttagtaaatcatggggattttattgatttatta

SEQ ID NO: 303665 - DNA, 586 bp, Homo sapiens
tcttccgtatcccacacttcttttctcccatcccagttgcaatctcactcacaaacatcacagtaccaccccaggggcggcagtagacaccaacccagaaatttagacagggatctcttatctttggaaaataggggttaggcatgagggtggttatgattaagaagataattttgttgttaaatagcattaaactggaattgacagagtgagttgagcatctctgtctaacctgctctttctctctggtgctcctcatctcacccctaccttggaatttaataagcttcaggcatttccaattgcagactaaaaccacttctaccatctcctctagtattttccatgtatcaggacagagatgtcttatgtagggaaggggcaggtatgaagtgaggtagattatctatacctctcactcattcaggattctcgctcccatgctgctgtcccttcaktctcacactcacaggaatgctatgtgatggccagctgcttcccttcttggttatccactgcagctgctagttagaaaggtttgcagggatgacttttagtaaatcatggggattttattgatttatta

SEQ ID NO: 303666 - DNA, 554 bp, Homo sapiens
caacaaagacaaactcggttgtatttttcaaagacccacacctaaaacacttttgttaaattttgaaataccagtgataatcagaagctcataaatgcttccagaaaaacaaattatataaaaatatataatttgtttgaaggactttcactaaatgtcttatcacaaataccaaggaccataagacaaaatggcttggaagctagggttctacactccaagtgcaagggccaaggaggtcattttcacggcaaatatcaagatatcagtaagcttattttcaaaataccctttctgaagaagttgcatgagtggattttctaatataatagtactaagtccaaaaaaagagaaagatatgagatatttcaaataygtcagccatgtgtagattaaaaatagctccatatgacagctctgcaacaggactagaaaattatcagtttaaattaaaacaggaaatcagtgagctccacaaatccatcttctcaaaaagtagacactttctaagtaacaggtgaaattattaaaggcatacattattttaataaaat

SEQ ID NO: 303667 - DNA, 541 bp, Homo sapiens
tggtaaaagtcaatgtgttatttaggattagggtcaaaattactttaaagattaaaaattgaaataattagtgtttcccagttctagtaagtagaactggagtggagaaaactattgttttcattccaagcactttcacgctattatattttcatcatgtgcatgaaataagacatcatgtgcataatgaaaatataaactttaaacaaattaaaggagatgattttgattaccatactatgtttgtataaaataattatttgctatttagaaaacacattgaagtatttaggcataaaaatgcatatgtctgcaatgtactcttaaagtcaccagaaaatatakagtgtgaatatgaagaaagaaaagagagagaaaccatgaatgataacattttaagaatatggattgaagcctcattatccagaaattcttcgtattacttttgtaacttttctgtaagcctgaaattatatcaaaataaaaaataagagcaaaaaataaataattgtttaaatatgttaggaaggcatagtgatgt

SEQ ID NO: 303668 - DNA, 561 bp, Homo sapiens
ctttgattccattttgctggtccttccattcaaaggaccacattggggtaagatccaagatgcatgctgagtttggtaatgaaccagagcagctggcctcatggcctgctttaggctgaggcccagttacctaataacaagtgctctacacagttcagatggtcagaattctctgcatttggcttttacgccaaatctcagctaataataatgtgctgttcacttctgttttccctaactccctgaaagcatgtctccctggggaacccatgaggagcagtggatgtgatccaggcacaatgcaggtattcttggaatcacaggtcattacaacatcaatgtattcaaaactccattcrttttgttttcaaatgtaagcgatacctagatatctgacttttaatgttctgccactttccagaaatataaatttgagacattaactaatatataaagatcataagaaaaacgaggttatggggttgttttaaaagtcaaatgagttagcagaagtgaatttagtttataaattgtaaagaaatgtgcaaatatgtcatgttg

SEQ ID NO: 303669 - DNA, 495 bp, Homo sapiens
agcactgacatggataagcaggtagaccggtaccgcccccccacctctctctggacttgcacaagtaataaaaaagacaattgctgctcaagaaatgaaatgacagctcatcycagaactttctcagctgatcagttgctcactcctatatgtactaagtgctcagcacagtgctagaagggtaaaaagcctgtgttcaaggagatgactatcgagcttatattttgcttgaagagtattcaccaggcagcgttttatcttggcatgcttttaatttttacccatgaacttaaccatctaaattcaaattgctaggcaatgtttcaccttacttctctacttctttccatggattctaaagaacaaaaacaaactatgcataagttgtgtatattgtcttacaaatcaggagatttcatccctgttctttcaccatctgattatgtaacatagagcaaattacatcctttctccaggcctgtgtccttatatgaa

SEQ ID NO: 303670 - DNA, 495 bp, Homo sapiens
agcactgacatggataagcaggtagaccggtaccgcccccccacctctctctggacttgcacaagtaataaaaaagacaattgctgctcaagaaatgaaatgacagctcatctcagaactttctcagctgatcagttgctcactcctatatgtactaagtgctcagcacagtgctagaagggtaaaaagcctgtgttcaaggagatgactatcgagcttatattttgcttgaagagtattcaccaggcagcgttttatcttggcatgcttttaatttttacccatgaacttaaccatctaaattcaaattgctaggcaatgtttcaccttacttctctacttctttccatggattctaaagaacaaaaacaaactatgcataagttgtgtatattgtcttacaaatcaggagatttcatccctgttctttcaccatctgattatgtaacmtagagcaaattacatcctttctccaggcctgtgtccttatatgaa

SEQ ID NO: 303671 - DNA, 582 bp, Homo sapiens
gcccaaaaacacattaaaaagaaaaacagaaacattagaaatttctgattctgtttttcctgcttatttcaggggacagcaaactttttagagtagagacaatatgattataccacatacatccaacacaactctgagccatatgaggcctcaacaaatgtctaataaattgacattggagaaaatgcattattttgaaaactaaagatgaggaacagcagcagagtacaccagtcacattttaacgtaaaaacaatttggaaaaatcatcacttttttgttctttctaaatttctaattgactaaataatatttatataaatgtrtggagtacgatgttatattttaatgtatgcatacattatagaatgataaaatcgggctaattaacatatcttccacctcccatatgtatctgcgtttgtatgtggcataagcattttaaattcactcccttaggaattttgaaataaacattatgttattattaactatagtttccatgctatgcaatagatctaaaaaatgtattcctcctaattgaaactttgtatcccttgaccaaattctccccattcccac

SEQ ID NO: 303672 - DNA, 609 bp, Homo sapiens
ttgcacttgagctcttaaccccaaacgagtcttctaaagtcaatagtaaaaaccctacacacactgatgtgtgtgtgttaaacttgggtctcctgaacacatggtagcatcctcatatcccacagaggagcctgattctctaggtcttttctttctgaaggcttggaagtaccagtttcatagaatgcagacaacagtccacagcaaaatttgggaccctaaattcacgtgcaaattaagtttcacttttgcaggaataacactacactacatgaatacgttgttaaatagaaccagatttgggaaaatacttagtttgctttatccctagtttaaatatgacttgggggaaaaaaggctcaaaaacatagcaagtcttgattaagaccagaattctacatgttamaagcataatactagaattctgttttcttttaccaacagaaccattgaaaaatggttagaaaaaaactagtgttgtcacttttttcctagagggtgggttattttgtactccatgtttgtttttccctactaaaggctcctggcatttctattctggtctcctacaccatttgcttctgccaaatcaatttatgaatttggtct

SEQ ID NO: 303673 - DNA, 609 bp, Homo sapiens
ttgcacttgagctcttaaccccaaacgagtcttctaaagtcaatagtaaaaaccctacacacactgatgtgtgtgtgttaaacttgggtctcctgaacacatggtagcatcctcatatcccacagaggagcctgattctctaggtcttttctttctgaaggcttggaagtaccagtttcatagaatgcagacaacagtccacagcaaaatttgggaccctaaattcacgtgcaaattaagtttcacttttgcaggaataacactacactacatgaatacgttgttaaatagaaccagatttgggaaaatacttagtttgctttatccctagtttaaatatgacttgggggaaaaaaggctcaaaaacatagcaagtcttgattaagaccagaattctacatgttaaaagcataatactagaattctgttttcttttaccaacagaaccattgaaaaatggttagaaaaaaactagtgttgtcacttttttcctagagggtgggttattttgtactccatgtttgtttttccctactaaagsctcctggcatttctattctggtctcctacaccatttgcttctgccaaatcaatttatgaatttggtct

SEQ ID NO: 303674 - DNA, 629 bp, Homo sapiens
aattccatccaaccaaccaaccaaacaacaaacaaaaaagagcatgataccagaggaaagaagacctccctcccaccaaaatgggtgctgaaactatgtcctagctgagtatcccaaagaaagatcagtgagcttcactgggagaagccaggaagcagaaatgatgggaagtgggcagaatttgaccactgtcacctgactgagtgtagggtctatgcctgatttgcttctctrttcttttcagtgcctcacacataaaagaccctagtaattgaattgtttaaaggattcattccacccagaacatccttcaggccaaacgacttctatatagtgcatcctattcccattataactgatctctgtatagatcattatggagatctattaactcattgagttagtatctctgagtcaatttttagcgctagatatgtcgtcaatataaaagttgctttaagggaaaggccatttttttctggctatttctttgtcctcttctaaacagtaagttccatgagggcagggactatatatgtcttgttcactagcatttccccagcacaagaactagcgtatggtaggtactccataaatgtttgttaaattagtgagtgaactaatgaata

SEQ ID NO: 303675 - DNA, 629 bp, Homo sapiens
aattccatccaaccaaccaaccaaacaacaaacaaaaaagagcatgataccagaggaaagaagacctccctcccaccaaaatgggtgctgaaactatgtcctagctgagtatcccaaagaaagatcagtgagcttcactgggagaagccaggaagcagaaatgatgggaagtgggcagaatttgaccactgtcacctgactgagtgtagggtctatgcctgatttgcttctctattcttttcagtgcctcacacataaaagaccctagtaattgaattgtttaaaggattcattccacccagaacatccttcaggccaaacgacttctatatagtgcatcctattcccattataactgatctctgtatagatcattatggagatctattaactcattgagttagtatctctgagtcaatttttagcgctagatatgtmgtcaatataaaagttgctttaagggaaaggccatttttttctggctatttctttgtcctcttctaaacagtaagttccatgagggcagggactatatatgtcttgttcactagcatttccccagcacaagaactagcgtatggtaggtactccataaatgtttgttaaattagtgagtgaactaatgaata

SEQ ID NO: 303676 - DNA, 556 bp, Homo sapiens
tttgtattgtgggagagatgttagtgtagggccccaaattcacaaacaatggaagatgaggattagagccaacttatttctcactttggtaaggaaaacagctgctgctacacaggaagattctgtcaaagcaaaggaaataagaacctaagaaaataagaagatagtttgttaaaagatctgggtacccctggaacctttatcagctggctgtgtgaccataggcaagtcacttcctctctctgggcttcttgctggtccccaagatggcttccarttcctcataacaatatacgagttccaaattattcccagtatatgtcctggccaaatatgaatcctgaccctgtgtaggagaattctagggcctgaacaagtcattgactcattgttaatgcttagtatcagtggtttgcagagatttggtaagaagcagatataatatgtgtgaagccccagccacagtgcttggcactttactggcaatgatagatgctcatactatcacttattaccagccacctcagagtcagcacaatatgtgcctcagagtcag

SEQ ID NO: 303677 - DNA, 387 bp, Homo sapiens
gagttcatggaaaatgcatgttatatatwaaaaaaactgcatggatgtcaacattttttggactgcaataaattatactaacatgttatgtctaaataggatctagtttaaggcactaagaaggttaaagtatcagtttgaaaagagtccctattagagcaaaatgatttctgctaaaattgaagcaagaacaaacatcagatttatggtgaagagggctggaaagaatggtgaaattactgatgctttacaaaaagttaaagggaaccatcccttccccccaccaaaatcagcagtttccaaatggataactcattttcagaagggatgagatgatgttgaagatgtacactatccacatcaatttgagatgaattaatcttatta

SEQ ID NO: 303678 - DNA, 387 bp, Homo sapiens
gagttcatggaaaatgcatgttatatataaaaaaaactgcatggatgtcaacatttttyggactgcaataaattatactaacatgttatgtctaaataggatctagtttaaggcactaagaaggttaaagtatcagtttgaaaagagtccctattagagcaaaatgatttctgctaaaattgaagcaagaacaaacatcagatttatggtgaagagggctggaaagaatggtgaaattactgatgctttacaaaaagttaaagggaaccatcccttccccccaccaaaatcagcagtttccaaatggataactcattttcagaagggatgagatgatgttgaagatgtacactatccacatcaatttgagatgaattaatcttatta

SEQ ID NO: 303679 - DNA, 492 bp, Homo sapiens
taaactcctggactcaagcgatcatcctgtcttggcctcccaaagtgttgggattacaggcatgagtcactgcacccagtgtaatttgtgtgttttaaatactgtagtcactttcttacatattaacagagactcaacaataattactggccaggagtggtggctcatgcttctaatccaacttggtaggctgaagtgggaggattgcttgggctcaggagttcaagatcagcctgkgcaacataaagaggcctcatgtctaccaaaaaaaaaaaagagagagaaaaaattatttgggcatggtggtgcatgcctttagtcctagctactctggaggagggaaagcaggaagatcgcttgagctcaggaggtggaggctgcagtgagctgtgattgcaccattgtactgcagcctggatgatagagcaagactctgcctaaaaaataataataatgaaaattgttgttataattactaattcaatgattagt

SEQ ID NO: 303680 - DNA, 492 bp, Homo sapiens
taaactcctggactcaagcgatcatcctgtcttggcctcccaaagtgttgggattacaggcatgagtcactgcacccagtgtaatttgtgtgttttaaatactgtagtcactttcttacatattaacagagactcaacaataattactggccaggagtggtggctcatgcttctaatccaacttggtaggctgaagtgggaggattgcttgggctcaggagttcaagatcagcctgtgcaacataaagaggcctcatgtctaccaaaaaaaaaaaagagagagaaaaaattatttgggcatggtggtgcatgcctttagtcctagctactctggaggagggaaagcaggaagatcgcttgagctcaggmggtggaggctgcagtgagctgtgattgcaccattgtactgcagcctggatgatagagcaagactctgcctaaaaaataataataatgaaaattgttgttataattactaattcaatgattagt

SEQ ID NO: 303681 - DNA, 564 bp, Homo sapiens
agaatgactgactgcttcacagtggtcagatcccaactccttgataggtatcagcccttctggaaatactatatcatagtctgtagaattgcacagtaaatcgaatgcatcgtaaatcccacacatagtctctgttttactaaaaattaataatatatttgtacttatttgttaataagtaacatttgttcttaaaatctacccatttcaagtcaggaaaakttcaaaaagacatggaacctaagctattgtgtctctcttgctacacttgtaatttcatacaaatgatttaagaatccagataatataatctataaaaggagaaaatgttgaatacacattaagcaactattgacaaaagtattattttagtatacgtgtcaatctgaaaattaaatataccaataaggtcagttttctgaaaggaaattaggttgagcaagagctacatataagaggaaaaaggtcctactgtgaaatggccacagtgaggaaggaatcctaggatcacaggctaacaaggctatgggtcaccatgacaaggtaccaatatatgcagcagat

SEQ ID NO: 303682 - DNA, 585 bp, Homo sapiens
tcttcatgttaaaaatcctcaacaaactaggcattgaagcaactttcctcaaaataatgaaagccgcctttgacaaatgttttaattttgmtgaagtccaatttatatgcagtttatttttgctgtagggatagaaaatcatgcagctttggagtaaaactgggtagaatataaaaatattaaaaattgacttctttccccattttaaatacattttacctattcaaattaaattgttccataaaaattactggctttgttggaaatatcagtttcattaatatttaagaaacaactttggcacagtacatcttctaaataaaatttttcttttcccacatacctctttcctgagaataatttctgtgtatagcccctctgcacactatcacttcctttattaatctcacaagttggtcaatatcaccaaacatccctctgcctcaaaatttactgttttctttggtgtccacacctgtattttatacaggaggaagaatatctcatctatgttgtttctatccagaacattttatacgtttggtatatttaccaagtggcatcaacttctctgagggttatgtg

SEQ ID NO: 303683 - DNA, 494 bp, Homo sapiens
attagtttgttttcacactgctataaagaaataccaagactgtgtaatttataaagaaaagaggtttaattgactcatggttttcaatggctggggaggcctcaggaaacttacaatcctgtggaaagggaagcaggcatgttttacatgacaacagatgggagagtgtgtcmtggaagcaaagcaggaagagccccttataaaaccatcagatctggtgagaactcactcactatcatgagaagagcatgggggaaactacccccataatccaatgacctcccaaggggtccctccctcaacacatggggataatggggattacaattcgagatgagatatgcgtgtgaattcagccaaaccatatcagtcaaaacataataaatgctggtgatgttgcagaaaaaaaggaacacttatatactgctggtgggaatgaaattagtccacatactgtggaaagctgtgtagcagtttctcaaagatcttaaaac

SEQ ID NO: 303684 - DNA, 578 bp, Homo sapiens
cctatggggtaccatgcttattacctatgtgataaaataatctgtacaccaaacccccatgacacacaatttacttatgtaagaaacttgcacatgtaaataaaataacataaacctgaacctaaaacaaaagttttagaaaaagattaattacattgtacaacagagtaaaagttgacactgcataaaaatgmatcattttattcctaaagcctcaaccacccctggaatcttctttctctcccagctcaataaacaaagcctgaacatattctctcaactgtcagcagaatcttaaatattgttctgaaattcacaaaacagaacataaatgttttaattaaaaacagggatagggaaactttcttttttataccctcctcttaaacaggaagcagatgaatgttctttttctaaaattcactgaatatgtagaaaaaaattagcagatgagtttgaaacagaagcaaaattctgggaaacttgtactatcacaatagcaaataaattacctgctgagttcttatgtgcaaaaatatataaataaataaatgattttgaaattcaaaacacattat

SEQ ID NO: 303685 - DNA, 578 bp, Homo sapiens
cctatggggtaccatgcttattacctatgtgataaaataatctgtacaccaaacccccatgacacacaatttacttatgtaagaaacttgcacatgtaaataaaataacataaacctgaacctaaaacaaaagttttagaaaaagattaattacattgtacaacagagtaaaagttgacactgcataaaaatgaatcattttattcctaaagcctcaaccacccctggaatcttctttctctcccagctcaataaacaaagcctgaacatattctctcaactgtcagcagaatcttaaatattgttctgaaattcacaaaacagaacataaatgttttaattaaaaacagggatagggaaactttcttttttataccctcctcttaaacaggaagcagatgmatgttctttttctaaaattcactgaatatgtagaaaaaaattagcagatgagtttgaaacagaagcaaaattctgggaaacttgtactatcacaatagcaaataaattacctgctgagttcttatgtgcaaaaatatataaataaataaatgattttgaaattcaaaacacattat

SEQ ID NO: 303686 - DNA, 462 bp, Homo sapiens
tatttagtgagaaaaggtacttaaaaacatatttttaaaaacttacgaattagacttgatgtttttaatacatgccatgtactactttttaacagagagtttctgctaacagtaccattaatccccactcttctgataaaggaaagtgtgctactctgaactttgggaagacacaactccttccaagccaccagctcaagaggagaggagaaaaatcatagacaaatacagtagcagatactcccaaaacmagttcttggtgatacaaaggtgatattataaacagagggccacttcatccctcctctcagaaaagaaatgggagatcagaaaaaaatgtgccaggagcaagtgctaccatcttggtggctaaaaacagagccactatcatctaatgtgctggtccctccattgtgacagggtcagaaagagtgacgtgcccctttgtacaattaatgccat

SEQ ID NO: 303687 - DNA, 558 bp, Homo sapiens
ctgaggtactgctcaacgaagatgaagaagttaaaagtgagaaagagatctggaatcctacttgagacacccactatagacctggaagagtgagcccttccctactagaacaaagtttaagtcttagtttccagtttgcttcaattgctctggaaaagctcacagaaacaagtgcttcaaccttcattgtatttcaatatgttttgggcctaaatgagatatctgagtggcaacctctgtactcyaagggtcctctcctgtacagtactaggtggaaccattgacagcagagccttcttcaagcgcaggggagtcaaaagaacaacttctccaatttctcacagacagtaagaaacactaccaggaccctgtttcacctggattacatatgtctgtttctcccaaaatagcatctctgatgtgtaattgtgtacacacctgcaggtgactgcccaggcttttacccccattttgtgtgcattccatcccccttttctttagccctacaaatgggtccattagatcacaacctatcagagctggggggcctattgcatt

SEQ ID NO: 303688 - DNA, 472 bp, Homo sapiens
taaagtataaactttgggtgataatgatgtatcacaggtttatcagttgcaagamatgtaccactatggtgcaggatgttgacagtggaggaagctgtgcttgtgtggggaaaaggggtatatgagaattgtctctcctttctgctaaattttgttgagaacctacaattgctctaaaataataaagtctattaaatgttttaacttaatcttaattttaatttaaaaataaaataaatgatgttattcaccattactgccccagacgttcatcctaactgcaaagtatgaaggcaatgttgaatcacagattttcttggcttgttattttacatcgctaacttggttttgacattaacagttagcatccaaaacaatcttaaccatcaggaatatgacttagccctacaattcagggaccataaggaaaacattttcaagttgtgttaatgtaggtctcactacaatgaat

SEQ ID NO: 303689 - DNA, 478 bp, Homo sapiens
tgtgcttgtgtggggaaaaggggtatatgagaattgtctctcctttctgctaaattttgttgagaacctacaattgctctaaaataataaagtctattaaatrttttaacttaatcttaattttaatttaaaaataaaataaatgatgttattcaccattactgccccagacgttcatcctaactgcaaagtatgaaggcaatgttgaatcacagattttcttggcttgttattttacatcgctaacttggttttgacattaacagttagcatccaaaacaatcttaaccatcaggaatatgacttagccctacaattcagggaccataaggaaaacattttcaagttgtgttaatgtaggtctcactacaatgaatctcttaaaccaatatctcactaaaatcagagaatatttctagaactctcaaataaatagcaataagactatgcataattgcatagaagtcagtctaaaatg

SEQ ID NO: 303690 - DNA, 478 bp, Homo sapiens
tgtgcttgtgtggggaaaaggggtatatgagaattgtctctcctttctgctaaattttgttgagaacctacaattgctctaaaataataaagtctattaaatgttttaacttaatyttaattttaatttaaaaataaaataaatgatgttattcaccattactgccccagacgttcatcctaactgcaaagtatgaaggcaatgttgaatcacagattttcttggcttgttattttacatcgctaacttggttttgacattaacagttagcatccaaaacaatcttaaccatcaggaatatgacttagccctacaattcagggaccataaggaaaacattttcaagttgtgttaatgtaggtctcactacaatgaatctcttaaaccaatatctcactaaaatcagagaatatttctagaactctcaaataaatagcaataagactatgcataattgcatagaagtcagtctaaaatg

SEQ ID NO: 303691 - DNA, 621 bp, Homo sapiens
ggtcttgggcagctcctcctctgtggctttgcagggtacagcctccctcctgtctgccttcatgaactggtgagtgtctgcggcttttccaggtgcacagggcaagctgtaggtggatctaccattctggggtttggaggatggtggccctcttcttacaaccccactaggcagtgccccagtagggactctgtgtggaggctctgtccccacatttcycttccacactgccctagcaaagggtctccatgagggccccgaccctgcagcaatcttcttcctgggcatccaggcatttctatacatcttctgaaatctaagtgaagatcccaaaaccccaattcttgacttctgtgcacccacaggctcaacaccatgtgggaacagctaaggcttggggcttgcaccctctgaatccacagcccaagctctatattggccactttcagccacagctggagtggctgggacgcagcacatcaagtccctacactgcacacagcacagggatcctgggtcctgctcatgaaactattttttcctcctagacctccaggtctgtgatggaagagacttccacaaaggtctctgatgtgccctggagacattttccccactgtc

SEQ ID NO: 303692 - DNA, 621 bp, Homo sapiens
ggtcttgggcagctcctcctctgtggctttgcagggtacagcctccctcctgtctgccttcatgaactggtgagtgtctgcggcttttccaggtgcacagggcaagctgtaggtggatctaccattctggggtttggaggatggtggccctcttcttacaaccccactaggcagtgccccagtagggactctgtgtggaggctctgtccccacatttctcttccacactgccctagcaaagggtctccatgagggccccgaccctgcagcaatcttcttcctgggcatccaggcatttctatacatcttctgaaatctaagtgaagatcccaaaaccccaattcttgacttctgtgcacccacaggctcaacaccatgtgggaacagctaaggcttggggcttgcaccctctgaatccacagcccaagctctatattggccactttcagccacagctggagtggctgggacgcagcacatcaagtccctacactgcacacagcacagggatcctgggycctgctcatgaaactattttttcctcctagacctccaggtctgtgatggaagagacttccacaaaggtctctgatgtgccctggagacattttccccactgtc

SEQ ID NO: 303693 - DNA, 406 bp, Homo sapiens
ttttaagtctcctgaggcctccttagccatgtggaaatgttagtcaaataaacctcttcataaattactcattcacaggtagttctttatagcgtgaaaatgaactaaaacaccacataacactgaatagatttaaaaataaaacagatacaaatccatttttcacatggcctcccttttgttagaacacaaaacagaagtrtttaccaatatctttttttttgctaacaacaaaggtatttcttagcttttttaatacacttagcaattgggaaatcttttggtttcctacagttatcaattctgttgagtcctgaagagttatcatctgctgactgccttatttggcaagctgagactctgccttgttcttctcacgggatatagattatgattaataatggat

SEQ ID NO: 303694 - DNA, 586 bp, Homo sapiens
atgattaataatggatcagtttttttgcataatgcatcatttatagttactaaagaagagcttttcagaagaaatacaatcagaagcaagttattcagcaggtatgaaacaagtattttcagtcccagtggtaatatattgtaacctgtcttgaaacactagacctagtggaaagtcaaatggtagggcctcctaatcgtayttttattgaggtgtattaggttaaaattaaaatccagtctaacttttacaaagaaaagagcaagattgcaaaacatcagcctgtactcttagaggaaagtggaaagatgggttccaaaccaggccaatctcgactgttggcttaccaagtcataagacctctgttaatacctgtgtcaggctggaccctggaatggtcccccaaacataggtcctgattcaacttactcccctcaaaaactaggcagctcaacagtgtgggaaaagcaagtgttcccaaccttagaacagaacatcagaacttagtcaagcttgtgaggggattacgattcttcatatacatatcttgaatactttaatgaataaacatcatttccatggctaa

SEQ ID NO: 303695 - DNA, 586 bp, Homo sapiens
atgattaataatggatcagtttttttgcataatgcatcatttatagttactaaagaagagcttttcagaagaaatacaatcagaagcaagttattcagcaggtatgaaacaagtattttcagtcccagtggtaatatattgtaacctgtcttgaaacactagacctagtggaaagtcaaatggtagggcctcctaatcgtatttttattgaggtgtattaggttaaaattaaaatccagtctaacytttacaaagaaaagagcaagattgcaaaacatcagcctgtactcttagaggaaagtggaaagatgggttccaaaccaggccaatctcgactgttggcttaccaagtcataagacctctgttaatacctgtgtcaggctggaccctggaatggtcccccaaacataggtcctgattcaacttactcccctcaaaaactaggcagctcaacagtgtgggaaaagcaagtgttcccaaccttagaacagaacatcagaacttagtcaagcttgtgaggggattacgattcttcatatacatatcttgaatactttaatgaataaacatcatttccatggctaa

SEQ ID NO: 303696 - DNA, 600 bp, Homo sapiens
cagggtgccagcatggtcaggttctggtaagggccctctgctgggttgcagactgttgacttctcattgtatcctacaggtgggaaaaaaaattcaagagagctctctggggcctctttaatcagggcactaattgcattcatgagggctcaactctctctcatgacctaatcaactcccaaaggctcctcctaataccatcagcttaggggtgaggatttcaaggtataaacttcaggggatacaaacatgcagtcataatgccttatttacagaaaatgtgtttgtacctttccattttaatataggcagcctaaatatgtaaaagaaatgaatttagacctaaaaatactcatactttatggtttagagatatccctctatattcatttatttagttttcaaaacaattctgtaagtagcttttatgaagtwgccagtgataacacaacacttgaagacttgtctaagatttaatagctattaaatggcatcaccagaaccagtctctgacttcctaacccaccctgtttctcttctagccctgggtggaatcatagtgttaagaatcagatatggaaactttcttacccatgtatt

SEQ ID NO: 303697 - DNA, 509 bp, Homo sapiens
aaatctataatctatgctgattgactacttccatgtaaagaatttgatatttttcatagttactactggctgttactgtgctattcctaattgtcttgaatgttgcgtatgtagcatgaaatyccaatttttattgaagtaggatatatatatatataactcttctatggttgtcttcaagccggagcctatttgttagcactgcagggcatcgtgtgtgtgtgtgtgtgtgtgtgtgtgtgtggtagaagctactatatgagaaatgtggagatacgcctttagttcaattctttagctgctaactaatttagagttcttactgttgttttagtcaggaaataatgaaatatatcatcaataaaaagttaaaggaacaaggtgaatcagtccaatgggagaatctaaatcttcccagggatctgtccaaatccataaaaagagtaccatttgataggtaacagcaggggattaaagactgaagcagtttgctgcaggctatgaatgac

SEQ ID NO: 303698 - DNA, 509 bp, Homo sapiens
aaatctataatctatgctgattgactacttccatgtaaagaatttgatatttttcatagttactactggctgttactgtgctattcctaattgtcttgaatgttgcgtatgtagcatgaaatcccaatttttattgaagtaggatatatatatatataactcttctatggttgtcttcaagcyggagcctatttgttagcactgcagggcatcgtgtgtgtgtgtgtgtgtgtgtgtgtgtgtggtagaagctactatatgagaaatgtggagatacgcctttagttcaattctttagctgctaactaatttagagttcttactgttgttttagtcaggaaataatgaaatatatcatcaataaaaagttaaaggaacaaggtgaatcagtccaatgggagaatctaaatcttcccagggatctgtccaaatccataaaaagagtaccatttgataggtaacagcaggggattaaagactgaagcagtttgctgcaggctatgaatgac

SEQ ID NO: 303699 - DNA, 562 bp, Homo sapiens
gatatatatatatataactcttctatggttgtcttcaagccggagcctatttgttagcactgcagggcatcgtgtgtgtgtgtgtgtgtgtgtgtgtgtgtggtagaagctactatatgagaaatgtggagatacgcctttagttcaattctttagctgctaactaatttagagttcttactgttgttttagtcaggaaataatgaaatatatcatcaataaaaagttaaaggaacaaggtgaatcagtccaatgggagaatctaaatcttcccagggatctgtccaaatccataaaaagagtaccatttgataggtaacagcaggggattaaagactgaagcaktttgctgcaggctatgaatgacctgatcccttaatccatctgtctttttatatgagaatgttatgctaattagctgagtaaattgtttcctgatgatattaattttgtgcctttctgttattctaggctttgactttcactgtgataaaaatatacgaaggggcattttcaatttagatggttcctatcctgataaattccaacacagcaatgttgt

SEQ ID NO: 303700 - DNA, 562 bp, Homo sapiens
gatatatatatatataactcttctatggttgtcttcaagccggagcctatttgttagcactgcagggcatcgtgtgtgtgtgtgtgtgtgtgtgtgtgtgtggtagaagctactatatgagaaatgtggagatacgcctttagttcaattctttagctgctaactaatttagagttcttactgttgttttagtcaggaaataatgaaatatatcatcaataaaaagttaaaggaacaaggtgaatcagtccaatgggagaatctaaatcttcccagggatctgtccaaatccataaaaagagtaccatttgataggtaacagcaggggattaaagactgaagcagtttgctgcaggctatgaatgacctgatcccttaatccatctgtctttttatatgagaatgttatgctaattagctgagtaaattgtttcctgatgatattaattttgtgcctttctgttattctaggctttgaytttcactgtgataaaaatatacgaaggggcattttcaatttagatggttcctatcctgataaattccaacacagcaatgttgt

SEQ ID NO: 303701 - DNA, 477 bp, Homo sapiens
tttggaaaatacaatattatgttattattgttacattagggagaaaataattgagaatcgatacatttgtttttcagtataaaaacaaaaagatggcacttatttaacaattcttaagtgatgtcttctgagctccactttattgggtatgtattgttcttaagctaaaatctaatttcaaaatattacrtattacaggtgtagtgttgtcttggtctgtgttgtgttgctgtaacaacacctgagactgggtaatttataaagaaaaaaaggtttatttagcttatggttctggtggctggaaagtccaagactatggcattggcatctgttgagcttctgatgagagccacatgctatgtcacagcaaggcagagaaacaaaatggaaatcaggcaaatcattgctttataaaagaggcaactttctttagaatgaccggctcttatgagaactaatccattatcatgaaaaata

SEQ ID NO: 303702 - DNA, 477 bp, Homo sapiens
tttggaaaatacaatattatgttattattgttacattagggagaaaataattgagaatcgatacatttgtttttcagtataaaaacaaaaagatggcacttatttaacaattcttaagtgatgtcttctgagctccactttattgggtatgtattgttcttaagctaaaatctaatttcaaaatattacgtattacaggtgtagtgttgtcttggtctgtgttgtgttgctgtaacaacacctgagactgggtaatttatwaagaaaaaaaggtttatttagcttatggttctggtggctggaaagtccaagactatggcattggcatctgttgagcttctgatgagagccacatgctatgtcacagcaaggcagagaaacaaaatggaaatcaggcaaatcattgctttataaaagaggcaactttctttagaatgaccggctcttatgagaactaatccattatcatgaaaaata

SEQ ID NO: 303703 - DNA, 537 bp, Homo sapiens
atacatttgtttttcagtataaaaacaaaaagatggcacttatttaacaattcttaagtgatgtcttctgagctccactttattgggtatgtattgttcttaagctaaaatctaatttcaaaatattacgtattacaggtgtagtgttgtcttggtctgtgttgtgttgctgtaacaacacctgagactgggtaatttataaagaaaaaaaggtttatttagcttatggttctggtggctggaaagtccaagactatggcattggcatctgttgagcttctgatgagagccacatgctatgtcacagcaaggcagagaaacaaaatggaaatcaggcaaatcattgctttataaaagaggcaactttctttagaatgaccggctcttatgagaactaatccattatcatgaaaaataacccagtttcaccagaaakttattaatttgtcttaatgacctaatcacctcttcaaagcacgatctcctaacaccttacatgggaaattaaatttcgacatgaattttggagagaataac

SEQ ID NO: 303704 - DNA, 582 bp, Homo sapiens
ttgaggaaaaaaactactggtaatatttaaatggtaaaatgggtatggtaaaataatattacgagcattttttcaagtaatacattttgaactttaagttttcttctgttaattttatctgtttataggagtaatcctgttttgttcacttcagtatattcactattcctttcccttacagtcaagcattggacatggccttgatattgctggtgattacccatagggctcaatgttcatcttttgtttctaaattccaaaagcaaagttgattctaaaggatgataataatcattaataattcatagaataccyatctccaaaacagaatcaggaatgctatagacaataataagcacacattaaaccaactgggcactgtgcccagaagatcagccaagtacacacaataggcaagaaaagagcttgtatgtgtgtaaggagaaataagaaagggaaagcaacgcgtaaaaggcttccaaacagaacaaccagggagtcaacagattttcaaactttcacagaaaccagaaatattttgaagtcatttctgctgggtctactaactgtcttacaatgtaa

SEQ ID NO: 303705 - DNA, 582 bp, Homo sapiens
ttgaggaaaaaaactactggtaatatttaaatggtaaaatgggtatggtaaaataatattacgagcattttttcaagtaatacattttgaactttaagttttcttctgttaattttatctgtttataggagtaatcctgttttgttcacttcagtatattcactattcctttcccttacagtcaagcattggacatggccttgatattgctggtgattacccatagggctcaatgttcatcttttgtttctaaattccaaaagcaaagttgattctaaaggatgataataatcattaataattcatagaatacctayctccaaaacagaatcaggaatgctatagacaataataagcacacattaaaccaactgggcactgtgcccagaagatcagccaagtacacacaataggcaagaaaagagcttgtatgtgtgtaaggagaaataagaaagggaaagcaacgcgtaaaaggcttccaaacagaacaaccagggagtcaacagattttcaaactttcacagaaaccagaaatattttgaagtcatttctgctgggtctactaactgtcttacaatgtaa

SEQ ID NO: 303706 - DNA, 582 bp, Homo sapiens
ttgaggaaaaaaactactggtaatatttaaatggtaaaatgggtatggtaaaataatattacgagcattttttcaagtaatacattttgaactttaagttttcttctgttaattttatctgtttataggagtaatcctgttttgttcacttcagtatattcactattcctttcccttacagtcaagcattggacatggccttgatattgctggtgattacccatagggctcaatgttcatcttttgtttctaaattccaaaagcaaagttgattctaaaggatgataataatcattaataattcatagaatacctatctccaaaacagaatcaggaatgctatagacaataataagcacacattaaaccaactgggcactgtgcccagaaratcagccaagtacacacaataggcaagaaaagagcttgtatgtgtgtaaggagaaataagaaagggaaagcaacgcgtaaaaggcttccaaacagaacaaccagggagtcaacagattttcaaactttcacagaaaccagaaatattttgaagtcatttctgctgggtctactaactgtcttacaatgtaa

SEQ ID NO: 303707 - DNA, 582 bp, Homo sapiens
ttgaggaaaaaaactactggtaatatttaaatggtaaaatgggtatggtaaaataatattacgagcattttttcaagtaatacattttgaactttaagttttcttctgttaattttatctgtttataggagtaatcctgttttgttcacttcagtatattcactattcctttcccttacagtcaagcattggacatggccttgatattgctggtgattacccatagggctcaatgttcatcttttgtttctaaattccaaaagcaaagttgattctaaaggatgataataatcattaataattcatagaatacctatctccaaaacagaatcaggaatgctatagacaataataagcacacattaaaccaactgggcactgtgcccagaagatcagccaagtacacacaataggcaagaaaagagcttgtatgtgtgtaaggagaaataagaaagggaaagcaacgcrtaaaaggcttccaaacagaacaaccagggagtcaacagattttcaaactttcacagaaaccagaaatattttgaagtcatttctgctgggtctactaactgtcttacaatgtaa

SEQ ID NO: 303708 - DNA, 343 bp, Homo sapiens
tattaagttttaggttttacaagcttmcaagtggtgaattacaagaccacaatataggtgtaggtttatgggcttttttatttgtgatgatgacttaaaccaaccttcttttttctatatgatttgttgaaattaaagcactgtacatgtgattatgacaaggaacaaggagtctcatgtatatgttttcttatattataaaacagcacgtgaactttttcatgtcagatctctgctggcaaattaaaggaggaaaatacccccatgaactgaagaaacctatggaagttagcttattgaaatgctgccggagtcttcatttagaggggtttttataggtagt

SEQ ID NO: 303709 - DNA, 612 bp, Homo sapiens
ctaatttacttaccatgtatttattataaaacactacttaggcaggtgtgaccragctataattggcaagaaaccagggatgtacatttgcttttgttattatagctaaactagaagaagactaaatcctttaataggaataaaaagttaacacaatgatttaatttagttctacttagtatagataacatttggtagagcttcaggaacttactatatattttagcccttaatttgtaatgaaggcattgacagtataaatcttgggataaactaggtaaataaattactttttttgaatatgaatgttcttttttatttatcctggagtcatattcagtgaagtgagaaatgcattttgttaaactgacacctagatttcagggagaatatactcaaatgataaaatatttatatcaagaaaataacttttactccatgacattatattatttatcagatataagtgtcattaaaattcattttcaaactgtgtaaaagagaatgattcctatgccaatgttttcttacagtgtgaaatcttatattgataaaagtacaatatttatatatgaaattttggaaagctttgagcataaagttctcagtcac

SEQ ID NO: 303710 - DNA, 594 bp, Homo sapiens
taacacaatgatttaatttagttctacttagtatagataacatttggtagagcttcaggaacttactatatattttagcccttaatttgtaatgaaggcattgacagtataaatcttgggataaactaggtaaataaattactttttttgaatatgaatgttcttttttatttatcctggagtcatattcagtgaagtgagaaatgcattttgttaaactgacacctagatttcagggagaatatactcaaatgataaaatatttatatcaagaaaataacttttactccatgacattatattatttatcagatatragtgtcattaaaattcattttcaaactgtgtaaaagagaatgattcctatgccaatgttttcttacagtgtgaaatcttatattgataaaagtacaatatttatatatgaaattttggaaagctttgagcataaagttctcagtcacatcataacattttctctgacagtgtgtgtgtcttagggtagggaaagagagtggttgaatgtccatatcttactaactaagatggtatgcccactgtcttaacaatttacttcctgtattgactcgacta

SEQ ID NO: 303711 - DNA, 500 bp, Homo sapiens
taaaattcattttcaaactgtgtaaaagagaatgattcctatgccaatgttttcttacagtgtgaaatcttatattgataaaagtacaatatttatatatgaaattttgraaagctttgagcataaagttctcagtcacatcataacattttctctgacagtgtgtgtgtcttagggtagggaaagagagtggttgaatgtccatatcttactaactaagatggtatgcccactgtcttaacaatttacttcctgtattgactcgactaattaggctgccataactttatttcttaattgttaatatgttggggaaattatcaataagtatagaaaatgacaaagttattgtttctgaaaaactatgaaaaagaggatagccttacttatgcagagcctattaaaaagagagtactttttcttcttaaaatgcatagcttgaccagctccatttaacactgttttttaaaagacgtgttaatatcctaatggtataaatg

SEQ ID NO: 303712 - DNA, 500 bp, Homo sapiens
taaaattcattttcaaactgtgtaaaagagaatgattcctatgccaatgttttcttacagtgtgaaatcttatattgataaaagtacaatatttatatatgaaattttggaaagctttgagcataaagttctcagtcacatcataacattttctctgacagtgtgtgtgtcttagggtagggaaagagagtggttgaatgtccatatcttactaactaagatggtatgcccactgtcttaacaatttacttcctgtattgactcgactaattaggytgccataactttatttcttaattgttaatatgttggggaaattatcaataagtatagaaaatgacaaagttattgtttctgaaaaactatgaaaaagaggatagccttacttatgcagagcctattaaaaagagagtactttttcttcttaaaatgcatagcttgaccagctccatttaacactgttttttaaaagacgtgttaatatcctaatggtataaatg

SEQ ID NO: 303713 - DNA, 455 bp, Homo sapiens
tgctagatattcacaaaacaaatagttaagttcctaagattattgttgcaaactgtgggaactaaaagtctttaattacattactttgaaagcaaaaagtgatttccatgcaaaatattttaaaggatttctacccaatgtcaaattttctcatctattcatttaataagmattgattaaatatctgttgtgtcttaaaaatcaatgacgaataacatcctaaacttcagcaagcatatggttgaacactaaataaagaacaaaaaccaaggtaattacagtagagtgtttcagtgatatattaccaccaagaacagagagctataaaaatcactggaagaacaactaactgaatctttggggagtgaagaaaagctttctttggaaaataacctctaatctcatatctaaaggaccagtaggagttatccataaaaaggagaaagaaaattcca

SEQ ID NO: 303714 - DNA, 455 bp, Homo sapiens
tgctagatattcacaaaacaaatagttaagttcctaagattattgttgcaaactgtgggaactaaaagtctttaattacattactttgaaagcaaaaagtgatttccatgcaaaatattttaaaggatttctacccaatgtcaaattttctcatctattcatttaataagaattgattaaatatcygttgtgtcttaaaaatcaatgacgaataacatcctaaacttcagcaagcatatggttgaacactaaataaagaacaaaaaccaaggtaattacagtagagtgtttcagtgatatattaccaccaagaacagagagctataaaaatcactggaagaacaactaactgaatctttggggagtgaagaaaagctttctttggaaaataacctctaatctcatatctaaaggaccagtaggagttatccataaaaaggagaaagaaaattcca

SEQ ID NO: 303715 - DNA, 585 bp, Homo sapiens
catatggttgaacactaaataaagaacaaaaaccaaggtaattacagtagagtgtttcagtgatatattaccaccaagaacagagagctataaaaatcactggaagaacawctaactgaatctttggggagtgaagaaaagctttctttggaaaataacctctaatctcatatctaaaggaccagtaggagttatccataaaaaggagaaagaaaattccaggtagttgaaatggcttgctgaattgcaagggcacagattactaaaatgtttagtaatactcatggtaattttgtttatatttttgaaacagatatcatgtagtcaacacaataggtcaaatcaggacctttggtacacataaccctttttctgtaaggtgttgataggtatcatttgaataaaattggtgatatttagtgtttattggtgtttgggaaaaacatgtgcttcctaaaattttagcatattttcctatatgatttctcattaataaattaatgcacaaagcaaatatccaggaggtgttaatagtaagcagtaatttccaaaattgcatgaccaagaaactttttactcatagaa

SEQ ID NO: 303716 - DNA, 514 bp, Homo sapiens
ctaactgaatctttggggagtgaagaaaagctttctttggaaaataacctctaatctsatatctaaaggaccagtaggagttatccataaaaaggagaaagaaaattccaggtagttgaaatggcttgctgaattgcaagggcacagattactaaaatgtttagtaatactcatggtaattttgtttatatttttgaaacagatatcatgtagtcaacacaataggtcaaatcaggacctttggtacacataaccctttttctgtaaggtgttgataggtatcatttgaataaaattggtgatatttagtgtttattggtgtttgggaaaaacatgtgcttcctaaaattttagcatattttcctatatgatttctcattaataaattaatgcacaaagcaaatatccaggaggtgttaatagtaagcagtaatttccaaaattgcatgaccaagaaactttttactcatagaataactgaaatacttttctcaggaatatactttgagaaata

SEQ ID NO: 303717 - DNA, 514 bp, Homo sapiens
ctaactgaatctttggggagtgaagaaaagctttctttggaaaataacctctaatctcatatctaaaggaccagtaggagttatccataaaaaggagraagaaaattccaggtagttgaaatggcttgctgaattgcaagggcacagattactaaaatgtttagtaatactcatggtaattttgtttatatttttgaaacagatatcatgtagtcaacacaataggtcaaatcaggacctttggtacacataaccctttttctgtaaggtgttgataggtatcatttgaataaaattggtgatatttagtgtttattggtgtttgggaaaaacatgtgcttcctaaaattttagcatattttcctatatgatttctcattaataaattaatgcacaaagcaaatatccaggaggtgttaatagtaagcagtaatttccaaaattgcatgaccaagaaactttttactcatagaataactgaaatacttttctcaggaatatactttgagaaata

SEQ ID NO: 303718 - DNA, 585 bp, Homo sapiens
catatggttgaacactaaataaagaacaaaaaccaaggtaattacagtagagtgtttcagtgatatattaccaccaagaacagagagctataaaaatcactggaagaacaactaactgaatctttggggagtgaagaaaagctttctttggaaaataacctctaatctcatatctaaaggaccagtaggagttatccataaaaaggagaaagaaaattccaggtagttgaaayggcttgctgaattgcaagggcacagattactaaaatgtttagtaatactcatggtaattttgtttatatttttgaaacagatatcatgtagtcaacacaataggtcaaatcaggacctttggtacacataaccctttttctgtaaggtgttgataggtatcatttgaataaaattggtgatatttagtgtttattggtgtttgggaaaaacatgtgcttcctaaaattttagcatattttcctatatgatttctcattaataaattaatgcacaaagcaaatatccaggaggtgttaatagtaagcagtaatttccaaaattgcatgaccaagaaactttttactcatagaa

SEQ ID NO: 303719 - DNA, 585 bp, Homo sapiens
catatggttgaacactaaataaagaacaaaaaccaaggtaattacagtagagtgtttcagtgatatattaccaccaagaacagagagctataaaaatcactggaagaacaactaactgaatctttggggagtgaagaaaagctttctttggaaaataacctctaatctcatatctaaaggaccagtaggagttatccataaaaaggagaaagaaaattccaggtagttgaaatggcttgctgaattgcaagggcacagattactaaaatgtttagtaatactcatggtaattttgtttatatttttgaaacagatatcatgtagtyaacacaataggtcaaatcaggacctttggtacacataaccctttttctgtaaggtgttgataggtatcatttgaataaaattggtgatatttagtgtttattggtgtttgggaaaaacatgtgcttcctaaaattttagcatattttcctatatgatttctcattaataaattaatgcacaaagcaaatatccaggaggtgttaatagtaagcagtaatttccaaaattgcatgaccaagaaactttttactcatagaa

SEQ ID NO: 303720 - DNA, 585 bp, Homo sapiens
catatggttgaacactaaataaagaacaaaaaccaaggtaattacagtagagtgtttcagtgatatattaccaccaagaacagagagctataaaaatcactggaagaacaactaactgaatctttggggagtgaagaaaagctttctttggaaaataacctctaatctcatatctaaaggaccagtaggagttatccataaaaaggagaaagaaaattccaggtagttgaaatggcttgctgaattgcaagggcacagattactaaaatgtttagtaatactcatggtaattttgtttatatttttgaaacagatatcatgtagtcaacacaataggtcaaatcaggacctttggtacacataaccctttttctgtaaggtgttgataggtatcatttgaataaaattggygatatttagtgtttattggtgtttgggaaaaacatgtgcttcctaaaattttagcatattttcctatatgatttctcattaataaattaatgcacaaagcaaatatccaggaggtgttaatagtaagcagtaatttccaaaattgcatgaccaagaaactttttactcatagaa

SEQ ID NO: 303721 - DNA, 514 bp, Homo sapiens
ctaactgaatctttggggagtgaagaaaagctttctttggaaaataacctctaatctcatatctaaaggaccagtaggagttatccataaaaaggagaaagaaaattccaggtagttgaaatggcttgctgaattgcaagggcacagattactaaaatgtttagtaatactcatggtaattttgtttatatttttgaaacagatatcatgtagtcaacacaataggtcaaatcaggacctttggtacacataaccctttttctgtaaggtgttgataggtatcatttgaataaaattggtgatatttagtgtttattggtgtttgggaaaaacatgtgcttcctaaaattttagcatattttcctatatratttctcattaataaattaatgcacaaagcaaatatccaggaggtgttaatagtaagcagtaatttccaaaattgcatgaccaagaaactttttactcatagaataactgaaatacttttctcaggaatatactttgagaaata

SEQ ID NO: 303722 - DNA, 618 bp, Homo sapiens
gccacccagctgagttcagcccagattgaagaatcatgagcaggtccatctgtgctacttagctgttttaagctgctatgtttagactggtttattatgcagcaatagaaagctgtaaccatctaatatgattatcaagtatgtgtttttaaaacaaagacaaaaaagatgaacagatataagattaggttgtgtgctgtagcaaaggtggatttgacctttttttaagttaagaattttgataatctaccrtacatttttaaattctttcttgcattaactttatctctggataaaaaattcaggccacccgtaagtaaatagaaacagtaggcataaatacacaaaaggaaagttatattaaaattctgcagaaatgtaacaagaataaaaaagctgaactggatttttaggatgttctacactcagcttttatgagaaacagacaaatgacaatctcatgccaaggatttgttttaaaaggctgtataacaggtagaccattgactaacacatgttttaccacctttatcttcagagtactgcagacaaatgatattcataatgactctacacgatactgaaatggtatctgaatattaacaactaaattctgac

SEQ ID NO: 303723 - DNA, 618 bp, Homo sapiens
gccacccagctgagttcagcccagattgaagaatcatgagcaggtccatctgtgctacttagctgttttaagctgctatgtttagactggtttattatgcagcaatagaaagctgtaaccatctaatatgattatcaagtatgtgtttttaaaacaaagacaaaaaagatgaacagatataagattaggttgtgtgctgtagcaaaggtggatttgacctttttttaagttaagaattttgataatctaccatacatttttaaattctttcttgcattaactttatctctggataaaaaattcaggccacccgtaagtaaatagaaacagtaggcrtaaatacacaaaaggaaagttatattaaaattctgcagaaatgtaacaagaataaaaaagctgaactggatttttaggatgttctacactcagcttttatgagaaacagacaaatgacaatctcatgccaaggatttgttttaaaaggctgtataacaggtagaccattgactaacacatgttttaccacctttatcttcagagtactgcagacaaatgatattcataatgactctacacgatactgaaatggtatctgaatattaacaactaaattctgac

SEQ ID NO: 303724 - DNA, 658 bp, Homo sapiens
tgaaacaatggaaagctttacaaagaaatagaagatgccaagagacaaatagaaattttggcaccgaaaaatataattgaaactttaaaaaatacttgatggctcaatagggtaatggaggaaatagagaaaagaataagtgaacttgaaaataggacattaaaaatttactaatccaaagaccagagggagtatagactgaaawtgaaaaaaaaaaaaagaacagagcctcaaggacctataagactatagcaaaaaatctactattcatgtcatcagagtcctagaaggaaaggcaaaagtgggttgggctaaaaatatatttgaaaaaataatgtccaaaacgttttcgagtttggcaaaagacatacaactacagattcaagaaatgagaaaatctaaaacgggacagatacaaaaaaatcaacaaagaaacaggtcaatttcagaaaacagcagaagaaaaaatcttggaaacagtgaggtaaaacaatgcttcatctctccagaagaaaaacaatttgaatgacaatgatttcctgtcagaaataatggtggccaaaaggaagtgatatatttttcaagtactgcaaaacaagaactgtcaaaccagaattctgtattaggcaaaaatgtcctttagaaatgaaggagaatt

SEQ ID NO: 303725 - DNA, 658 bp, Homo sapiens
tgaaacaatggaaagctttacaaagaaatagaagatgccaagagacaaatagaaattttggcaccgaaaaatataattgaaactttaaaaaatacttgatggctcaatagggtaatggaggaaatagagaaaagaataagtgaacttgaaaataggacattaaaaatttactaatccaaagaccagagggagtatagactgaaattgaaaaaaaaaaaaagaacagagcctcaaggacctataagactatagcaaaaaatctactattcatgtcatcagagtcctagaaggaaaggcaaaagtgggttgggctaaaaatatatttgaaaaaataatgtccaaaacgttttcgagtttggcaaaagacatacaactacagattcaagaaatgagaaaatctaaaacgggacagatacaaaaaaatcaacaaagaaacaggtcaatttcagaaaacagcagaagaaaaaatcttggaaacagtgaggtaaaacaatgcttcatctctccagaagaaaaacaatttgaatgacaatgatttcctgtcagaaataatggtggccaaaaggaagtgatatatttytcaagtactgcaaaacaagaactgtcaaaccagaattctgtattaggcaaaaatgtcctttagaaatgaaggagaatt

SEQ ID NO: 303726 - DNA, 573 bp, Homo sapiens
ttacaaaataattttgagagctaagagacatacgtatgtattttagaactccaatagcagtaactttctcagtagcatatagttttccaatctgttggaaaaagcttggcttcaactaggagagataagtaatagagctagagtttcaattctgttcaatatgaataataatatttcaccagtagaaattaaatatgtataatcatgtgacagtaatactgatatgatctgagaaatgcattattaggcaattttgtcattatgcaaacatcatagatgtttacaaaaccttgacaacatagtctgctacatatctaggctatatgagatatagcctattgctcctaggctacacacctgtacagcgtgtgactatactgaacatgtaggcaattgtaacataacggcaagtatttgtgtatttaaacgtatctaaacatagartaggtatagtaaaagtacagcgtaaaagatggaaaatgttacgtctatattgggaacttaccataaatggagcttgaagactaaaagttactctggataagtcagtgagtgaatggcgagtgaatgtga

SEQ ID NO: 303727 - DNA, 573 bp, Homo sapiens
ttacaaaataattttgagagctaagagacatacgtatgtattttagaactccaatagcagtaactttctcagtagcatatagttttccaatctgttggaaaaagcttggcttcaactaggagagataagtaatagagctagagtttcaattctgttcaatatgaataataatatttcaccagtagaaattaaatatgtataatcatgtgacagtaatactgatatgatctgagaaatgcattattaggcaattttgtcattatgcaaacatcatagatgtttacaaaaccttgacaacatagtctgctacatatctaggctatatgagatatagcctattgctcctaggctacacacctgtacagcgtgtgactatactgaacatgtaggcaattgtaacataacggcaagtatttgtgtatttaaacgtatctaaacatagagtaggtatagtaaaagtacagcgtaaaagatggaaaatgttacgtctatattgggaacttaccataaatggarcttgaagactaaaagttactctggataagtcagtgagtgaatggcgagtgaatgtga

SEQ ID NO: 303728 - DNA, 558 bp, Homo sapiens
tggatactaacaagtaaatctttatttaccacttattagaagcttgacttaaccaattatcaaattttatataagctttaatgttattgggaaatatccttttcctgtaaaaataaatgagattacctacctgaagtaccttaggcctttctaatattttcaattttcattaaatgtttatttttatgtatctatagatatcttgaatatgtattgtaaatattatatgtatgtagaatatatgtattctagtatttcttccagatagcacttaaaaaccagtgtttgcatttttgcatgtgagyaagcaattcctacttacaatgatggaagaaatagataccctggaagaaggaaaattaaattcatgctttcaaagcatccttcccaacaaatccaattcatcttttgcacagaaggaataattagatgaagatatattttaagtcagattgttagtattttggccacatggctacatcataagtgtagtttaaaattctgttcatttttatttttttaaatcaaaacactcattgaactgtacttaatttttaa

SEQ ID NO: 303729 - DNA, 601 bp, Homo sapiens
tcactttaaaaaactggcaatagaaacttctctttaaaaattgtaaaagtaagtaaagtttagaaaccaaccaagtacgagcaatgcaatgttagcatctcattggttcacaccagtgaaaagtatttaagaacaaagaaatggtatactgtaccacacagaaacttgcatgcaaatgtttattgcatgtgcagctatatwcttacttactaaaacttagaagcacccagcttatcctttaataggtaatcattccttaattagataaacaaactctgctatatccatacaatgacataattatcaggggtaaaaaaataagccatccagtcatgattagacatggaggaaatttgaatgcatatttctatgtgaaagaagccagtctgaaaagtctacatattgtatgagtccaagtatataatcttctagaaaaggcgaaactatagagctagtgcaaagtttagtcattaccaggagttgggcatgtgggggataagtaggtggagcacagggaatttttagggcagtgaaattattatctatgattctgtaatggtggatacatgacatcatgcatttagcaaaacccatggaactg

SEQ ID NO: 303730 - DNA, 601 bp, Homo sapiens
tcactttaaaaaactggcaatagaaacttctctttaaaaattgtaaaagtaagtaaagtttagaaaccaaccaagtacgagcaatgcaatgttagcatctcattggttcacaccagtgaaaagtatttaagaacaaagaaatggtatactgtaccacacagaaacttgcatgcaaatgtttattgcatgtgcagctatattcttacttactaaaacttagaagcacccagcttatcctttaataggtaatcattccttaattagataaacaaactctgctatatccatacaatgacataattatcaggggtaaaaaaataagccatccagtcatgattagacatggaggaaatttgaatgcatatttctatgtgaaagaagccagtctgaaaagtctrcatattgtatgagtccaagtatataatcttctagaaaaggcgaaactatagagctagtgcaaagtttagtcattaccaggagttgggcatgtgggggataagtaggtggagcacagggaatttttagggcagtgaaattattatctatgattctgtaatggtggatacatgacatcatgcatttagcaaaacccatggaactg

SEQ ID NO: 303731 - DNA, 601 bp, Homo sapiens
tcactttaaaaaactggcaatagaaacttctctttaaaaattgtaaaagtaagtaaagtttagaaaccaaccaagtacgagcaatgcaatgttagcatctcattggttcacaccagtgaaaagtatttaagaacaaagaaatggtatactgtaccacacagaaacttgcatgcaaatgtttattgcatgtgcagctatattcttacttactaaaacttagaagcacccagcttatcctttaataggtaatcattccttaattagataaacaaactctgctatatccatacaatgacataattatcaggggtaaaaaaataagccatccagtcatgattagacatggaggaaatttgaatgcatatttctatgtgaaagaagccagtctgaaaagtctacatattgtatgagtccaagtatataatcttctagaaaaggygaaactatagagctagtgcaaagtttagtcattaccaggagttgggcatgtgggggataagtaggtggagcacagggaatttttagggcagtgaaattattatctatgattctgtaatggtggatacatgacatcatgcatttagcaaaacccatggaactg

SEQ ID NO: 303732 - DNA, 590 bp, Homo sapiens
caggaccttgtaactcctggtgaattggaaagcacagaaattcttcagagcctcaagagttgtgtttaatgcattatttaaatagtgtccaaccactagttagatagcttaacactcaaatagcttttgaaatctctgtagactcacctcaattgaagagtcctgataatttacagaagtgtgtagtgcactaagagatccctgctgtacgatgcctgcctgtggagtgttttatgtgttgatccactggagtgtgtgtgtgtgtctgtgtgtacgtgggtgagtatgggtgggcayggattgtgtgtgtgtgtatgtgtttacattgtggtatgtgtctgttggggtgccgccattagggatttggaagagtgaggaccataaacttgtcaacattcctacatgcctgcttcataacaagtgtactgaacatggccaaaataactaaaccaagtaaacaaattagacattaattaaatttaatgctgggcaggaaagaagtagtcaaggccaggtaaaatgaagaaatataaccaagtgaatgaaatttttacattgattcgtagaatgagacatgaatattttttaaa

SEQ ID NO: 303733 - DNA, 451 bp, Homo sapiens
tggagtgtgtgtgtgtgtctgtgtgtacgtgggtgagtatgggtgggcacggattgtgtgtgtgtgtatgtgtttacattgtggtatgtgtctgttggggtgccgccattagggatttggaagagtgaggaccataaacttgtcaacattcctacatgcctgcttcataacaagtgtactgaacatggccaaaataactaaaccaagtaaacaaattagacattaattaaatttaatgctgggcaggaaagaagtagtcaaggccaggtaaaatgaagaaatataaccaagtgaatgaaatttttacattgattcgtagaatgagacatgaatattttttaaaatttgtaatttctaatgactatcagtatataaaactaagaattatatggctgtcaactgactaaaaactgtacataagattagagmtagtgaaacaaccatatatgaa

SEQ ID NO: 303734 - DNA, 458 bp, Homo sapiens
taaaattctaattcggctgcttttctttttatttgttatataaagagatacagacaggacattgaaggaatcttactaataaccacaatttcccatatgattatattcaccctttgcattagtagcggtggaaatatgagggacttgaggtgctttgtatccatttggaataacttatgtgggaaatggaaaaggtgactgataaagatcatgtttaactagttcatatagaccagatgaggtttagagtgtcataatctacacaaatacgtggtttcctctaatgtcattctgatrtcaagatacagaaagagaaaaaaaattggtacagtgatccagtacttgtgatcatcatggaaggtagaacataaatgaagagatttaaacactaagaatgtgggcatgaaatttctgttttaaatggtccatcatttgtttagatgaaagaaaaactatgg

SEQ ID NO: 303735 - DNA, 600 bp, Homo sapiens
ggctcttggtaagtaatctggacatatcgtgaaattataattctgtgtagacaattcgacttaccaggttagagtgatgcaatccaaatagatggctttcttctgatctggcttaacagaaatcttgaaaaatctggaggagtaaatgtttaatataccctcagttctcaaccattcttcttcccctgaaagacaacatcacaggcaggacatcctcccaagtgtacacgcaatattatgtacagttcccacgtgagaaagcacatcataatcttagtgagaatgatgttctcataaggtcagttatactcagtgtgcatagttgtccaagtgtgagtatgaaaccaagtcattcgcaagtaccactagtctgattattagtaataataatccacttgtgacatagwttttctttgctgaaataaaatattgttttgacaccatggttgaaatgttggtcttaggtcaatgctctctattatctgttgttgttgccaagcctctgagaggtgttttatgtggggcaaaaggtcccttcctgtgtctttggtcaaagcaaaggaggagtacagacgactgagagagtgatcacgctgctgt

SEQ ID NO: 303736 - DNA, 535 bp, Homo sapiens
ttggtcttaggtcaatgctctctattatctgttgttgttgcmaagcctctgagaggtgttttatgtggggcaaaaggtcccttcctgtgtctttggtcaaagcaaaggaggagtacagacgactgagagagtgatcacgctgctgtgcccacctatgcggtagaccttgttcctgggttgggagatgttttatgatcagggtgcagtagaaggagcacactagtagcagtaaagagaggtgaccctggctgcagttctgcctctaacttcctgagtgacctcaggctagtcacacagtgactgctccccacatttctttttgtaagctgcaaggattgaatcagacaatagcctctaagtttcttctgaactctcatactcagggatgccaacgatgttggtaataaaatagtatgaacatgccaaaaaaataaaaataaggaagagaaataggtatgtaactttactctgggactcctgtggtatctcacaacaccatgcttcatgaaccccaaagaaagcaaaaaatccagct

SEQ ID NO: 303737 - DNA, 535 bp, Homo sapiens
ttggtcttaggtcaatgctctctattatctgttgttgttgccaagcctctgagaggtgttttatgtggggcaaaaggtcccttcctgtgtctttggtcaaagcaaakgaggagtacagacgactgagagagtgatcacgctgctgtgcccacctatgcggtagaccttgttcctgggttgggagatgttttatgatcagggtgcagtagaaggagcacactagtagcagtaaagagaggtgaccctggctgcagttctgcctctaacttcctgagtgacctcaggctagtcacacagtgactgctccccacatttctttttgtaagctgcaaggattgaatcagacaatagcctctaagtttcttctgaactctcatactcagggatgccaacgatgttggtaataaaatagtatgaacatgccaaaaaaataaaaataaggaagagaaataggtatgtaactttactctgggactcctgtggtatctcacaacaccatgcttcatgaaccccaaagaaagcaaaaaatccagct

SEQ ID NO: 303738 - DNA, 548 bp, Homo sapiens
acatcacaggcaggacatcctcccaagtgtacacgcaatattatgtacagttcccacgtgagaaagcacatcataatcttagtgagaatgatgttctcataaggtcagttatactcagtgtgcatagttgtccaagtgtgagtatgaaaccaagtcattcgcaagtaccactagtctgattattagtaataataatccacttgtgacatagtttttctttgctgaaataaaatattgttttgacaccatggttgaaatgttggtcttaggtcaatgctctctattatctgttgttgttgccaagcctctgagaggtgttttatgtggggcaaaaggtcccttcctgtgtctttggtcaaagcaaaggaggagtacagaygactgagagagtgatcacgctgctgtgcccacctatgcggtagaccttgttcctgggttgggagatgttttatgatcagggtgcagtagaaggagcacactagtagcagtaaagagaggtgaccctggctgcagttctgcctctaacttcctgagtgacctcaggctag

SEQ ID NO: 303739 - DNA, 535 bp, Homo sapiens
ttggtcttaggtcaatgctctctattatctgttgttgttgccaagcctctgagaggtgttttatgtggggcaaaaggtcccttcctgtgtctttggtcaaagcaaaggaggagtacagacgactgagagagtgatcacgctgctgtgcccacctatgcggtagaccttgttcctgggttgggagatgttttatgatcagggtgcagtagaargagcacactagtagcagtaaagagaggtgaccctggctgcagttctgcctctaacttcctgagtgacctcaggctagtcacacagtgactgctccccacatttctttttgtaagctgcaaggattgaatcagacaatagcctctaagtttcttctgaactctcatactcagggatgccaacgatgttggtaataaaatagtatgaacatgccaaaaaaataaaaataaggaagagaaataggtatgtaactttactctgggactcctgtggtatctcacaacaccatgcttcatgaaccccaaagaaagcaaaaaatccagct

SEQ ID NO: 303740 - DNA, 500 bp, Homo sapiens
gagcacaaattgtctagtggttttttttagatggtcttcctccttggctcatttctctccaagaacgaaagtatcaaggtgttcatttaacagcagctcctgaaagacaatccagcttgatttaaatctttaacggttttcattataatagaaaatataatagcaacagtagcatcctctkttacattgaaattaaattgcaattctttcactgttggggtggcaagtataattcctatcacttctttggaaagcaatacaacttactaaagatcaccaaaatgtttatactttttggaaccaaaaacctcactgaaaaaaatttattccaagagtatgattcaacagaaaaaaaaaagtaatatacatgtgcatgtttctccctgtgaaaacaacagcacagaatttactagacaagttttgaaacagttggctatgtggtaacatggaacaacattctcctataatgttgaaggataaaagcttagagaatagaatat

SEQ ID NO: 303741 - DNA, 500 bp, Homo sapiens
gagcacaaattgtctagtggttttttttagatggtcttcctccttggctcatttctctccaagaacgaaagtatcaaggtgttcatttaacagcagctcctgaaagacaatccagcttgatttaaatctttaacggttttcattataatagaaaatataatagcaacagtagcatcctcttttacattgaaattaaattgcaattctttcactgttggggtggcaagtataattcctatcacttctttggaaagcaatacaayttactaaagatcaccaaaatgtttatactttttggaaccaaaaacctcactgaaaaaaatttattccaagagtatgattcaacagaaaaaaaaaagtaatatacatgtgcatgtttctccctgtgaaaacaacagcacagaatttactagacaagttttgaaacagttggctatgtggtaacatggaacaacattctcctataatgttgaaggataaaagcttagagaatagaatat

SEQ ID NO: 303742 - DNA, 571 bp, Homo sapiens
aagtaaacatgccatgtagcttacaaaagaccagccacattgtgtgtattttaatattgtttaacagtaacacctaataaagagagcatcatgattgtgtgaactacattttcggtcataatgaatgctacaaaattaacctcccaagtttagacaggctacaacgtcttgggaaatatgcaagaagaattatttgataaaggtgacagtttttcacacctgaaaatgatyttctcccagcctatcttgatcaacagccagcagcaacacattgcagatataatctcaagaccttgtggcatgtacttctcactacatgcataaccttaatatggacagaggatcatggagattttgaatataatttcccacatgacaggagattaaatagaccacagtggaagaagctaggtctctggagaaccaaaaagtaaacttcagccagttctggaagcagataaacagcaggaaatgtactttcagatgggctactttctcaatagttctttcttgcaagagctctagggaaagtatgagttactgggtaagaatgtaatagaaaaggggccag

SEQ ID NO: 303743 - DNA, 537 bp, Homo sapiens
ttctaatacctataatgagatgttatgtcaatgccttatctctcagtgtgtgtatatacatattaagctttctgtctatgttgtgctttctcatgcaggaatatcagacattaatgaaccagtaaagaagatactgaggtgcagaagagctttcccagtgtcccgggagccattctacacagcatcctacagaatgactgtggatctgctgtgcttagtttctttacttgtgaaaacagagtaatagyagcacctacctcacagggttgttctgaagattagaggggttctttcatgggaagctctagagcagtgcttgagacatggtaagtgctcaacatgtgttcattattattatcattatcaatatttgatgtaaaagcctttctgaaagaaatcacacaagaacatgatcagttaaaagatatatatgaatgaaagtatgtttggcgctgtcacaacacagagtggcataatggttaggaacataggctttggaagtcaaccatctgtgctcaaagcctagtgtcaccacac

SEQ ID NO: 303744 - DNA, 537 bp, Homo sapiens
ttctaatacctataatgagatgttatgtcaatgccttatctctcagtgtgtgtatatacatattaagctttctgtctatgttgtgctttctcatgcaggaatatcagacattaatgaaccagtaaagaagatactgaggtgcagaagagctttcccagtgtcccgggagccattctacacagcatcctacagaatgactgtggatctgctgtgcttagtttctttacttgtgaaaacagagtaatagcagcacctacctcacagggttgttctgaagattagaggggttctttcatgggaagctctagagcagtgcttgagacatggtaagtgctcaacatgtgttcattattattatcattatcaatatttgatgtaaaagcctttctgaaagawatcacacaagaacatgatcagttaaaagatatatatgaatgaaagtatgtttggcgctgtcacaacacagagtggcataatggttaggaacataggctttggaagtcaaccatctgtgctcaaagcctagtgtcaccacac

SEQ ID NO: 303745 - DNA, 523 bp, Homo sapiens
tccttgtgttctggggccattgcagaatttgtgtggaattaaatttctttagtaaagaccaaatattatcagctggtcttttaaaaaggctatcagtgtgagagtcaacttctttcaggaataacggcaaggacaatctctgcaaaccacatggtttaaagagtttttccactctgctgcattctcacttggaaaggttatggagtatattgtataattaaatatttgtagaaatgacccctgtcaagccttcctttaaagctatgatgtagttgatcttcagcaaaaatctggaattgaagaggtttgatcctgaaaataatagctgacttcaacatggtcatagtttyttccagtctttcacctagatacattttctcaacaggctgtattttcagactacacctgtcccacctgcggggatgagcagcgggacaagcgctgctcgcgcctctcaccgcaccgcatccgcctcccgccagccaggaagccactgcggcctgcggcttcccgccaccacggc

SEQ ID NO: 303746 - DNA, 523 bp, Homo sapiens
tccttgtgttctggggccattgcagaatttgtgtggaattaaatttctttagtaaagaccaaatattatcagctggtcttttaaaaaggctatcagtgtgagagtcaacttctttcaggaataacggcaaggacaatctctgcaaaccacatggtttaaagagtttttccactctgctgcattctcacttggaaaggttatggagtatattgtataattaaatatttgtagaaatgacccctgtcaagccttcctttaaagctatgatgtagttgatcttcagcaaaaatctggaattgaagaggtttgatcctgaaaataatagctgacttcaacatggtcatagtttcttcmagtctttcacctagatacattttctcaacaggctgtattttcagactacacctgtcccacctgcggggatgagcagcgggacaagcgctgctcgcgcctctcaccgcaccgcatccgcctcccgccagccaggaagccactgcggcctgcggcttcccgccaccacggc

SEQ ID NO: 303747 - DNA, 523 bp, Homo sapiens
tccttgtgttctggggccattgcagaatttgtgtggaattaaatttctttagtaaagaccaaatattatcagctggtcttttaaaaaggctatcagtgtgagagtcaacttctttcaggaataacggcaaggacaatctctgcaaaccacatggtttaaagagtttttccactctgctgcattctcacttggaaaggttatggagtatattgtataattaaatatttgtagaaatgacccctgtcaagccttcctttaaagctatgatgtagttgatcttcagcaaaaatctggaattgaagaggtttgatcctgaaaataatagctgacttcaacatggtcatagtttcttccagtctttcacctagatacattttctcaacaggctgtattttcagactacacctgtcccacctgcggggatgmgcagcgggacaagcgctgctcgcgcctctcaccgcaccgcatccgcctcccgccagccaggaagccactgcggcctgcggcttcccgccaccacggc

SEQ ID NO: 303748 - DNA, 523 bp, Homo sapiens
tccttgtgttctggggccattgcagaatttgtgtggaattaaatttctttagtaaagaccaaatattatcagctggtcttttaaaaaggctatcagtgtgagagtcaacttctttcaggaataacggcaaggacaatctctgcaaaccacatggtttaaagagtttttccactctgctgcattctcacttggaaaggttatggagtatattgtataattaaatatttgtagaaatgacccctgtcaagccttcctttaaagctatgatgtagttgatcttcagcaaaaatctggaattgaagaggtttgatcctgaaaataatagctgacttcaacatggtcatagtttcttccagtctttcacctagatacattttctcaacaggctgtattttcagactacacctgtcccacctgcggggatgagcagcgggacaagcrctgctcgcgcctctcaccgcaccgcatccgcctcccgccagccaggaagccactgcggcctgcggcttcccgccaccacggc

SEQ ID NO: 303749 - DNA, 626 bp, Homo sapiens
gctgcacacccatagttctgaaatgatcataggctttatgttacttccccagcttggaagcagcagaggagaccctgtggctcaacgtcttttcttgtcacttggggctcccattgcagaaagatgcagaactgcaatcaattagcatgatcagcctgrcatggggcagctgcactgtgagcccacgctggggggatcctgtctggtgactagcagagaatgtgggtaggacccgtgggagacagactggcctcctctcattagagcaactacaacttgcgggataaagcactcggagtctttgctccttccctagttcaagggtaaacagggaagttaaactggagaggcagtggcagagggacttttggttgcccctgggagctccatctctgagaaatgtggagctgctgctactgggagtgttcagccagagggtgaagcagctgcactgcttgcctgagctagaggctctgcttgttggggaacagggggtcaagggcccatagcagcaagaaatggggcttttctctaaatggtggctgtggtgtgctgtacgcatggggagaaagcaaccaacttagaaaacatatttcaggatatcatctatgaaaacttcgtcaacc

SEQ ID NO: 303750 - DNA, 478 bp, Homo sapiens
actaaagacaaaaaccacatgattatctcaatagatgcataaaaagcaaaaaccacatgattatcacaatagatgcattcaacactgctacatgttaaataaccttcaataaatttaggcattcaaatgaccacactgcccaaagcaatttacagattcaatgctattgctatagaactaccaacaacattcttcacagaactagaaaaaawctatttttaaaattcacctagccctcaaaaaagaccctggatagccaagggaatcttaagcaaaaagaacaaaactgaagccatcacattatatgacttcaaactcttctacagggccacagtaacccaagtagcataacactagtacaaaaacagacacgtagaacaatggaacagaatagagagcccagaaataatgccacacatctacagccatctaattttcaacaaaaccaacaaaaacaagcaataaagaaagaagttcc

SEQ ID NO: 303751 - DNA, 559 bp, Homo sapiens
tcacaagaagggttcagtgtattgttgctgcctttgaagacagaaaggggccacatgcaagaaccaaagggtgtcttctagcagcttgtgcaatcccaagtggacatccagaggaaatgtgagcctcagtgctacaatcacaagaaactgaattcttccaacaacctgaatgagcttagaggtgacttttcccctagtttccagataaaaacttaaagttagccatatcttcagtatcaccctgtgagttcctaagtaaaaaaacyggtggagtctgcctggacttttgatgtacaaaactgttagaaaataattgagtttaatgttaagtaaaaaatatgagaaatcaaacctacgtaataattttgttaatttctacaagtctttcaaatcaaataggtaggatttttaaattatatattttgttgtaaggttgtgtattattctctatataaataaattcaaattttaaactttattccaagggttggtaaaaacatatattattatattgtgaaaaatgattataatttcagttatagttctcagttgtggtttt

SEQ ID NO: 303752 - DNA, 559 bp, Homo sapiens
tcacaagaagggttcagtgtattgttgctgcctttgaagacagaaaggggccacatgcaagaaccaaagggtgtcttctagcagcttgtgcaatcccaagtggacatccagaggaaatgtgagcctcagtgctacaatcacaagaaactgaattcttccaacaacctgaatgagcttagaggtgacttttcccctagtttccagataaaaacttaaagttagccatatcttcagtatcaccctgtgagttcctaagtaaaaaaaccggtggagtctgcctggacttttgatgtacaaaactgttagaaaataattgagyttaatgttaagtaaaaaatatgagaaatcaaacctacgtaataattttgttaatttctacaagtctttcaaatcaaataggtaggatttttaaattatatattttgttgtaaggttgtgtattattctctatataaataaattcaaattttaaactttattccaagggttggtaaaaacatatattattatattgtgaaaaatgattataatttcagttatagttctcagttgtggtttt

SEQ ID NO: 303753 - DNA, 559 bp, Homo sapiens
tcacaagaagggttcagtgtattgttgctgcctttgaagacagaaaggggccacatgcaagaaccaaagggtgtcttctagcagcttgtgcaatcccaagtggacatccagaggaaatgtgagcctcagtgctacaatcacaagaaactgaattcttccaacaacctgaatgagcttagaggtgacttttcccctagtttccagataaaaacttaaagttagccatatcttcagtatcaccctgtgagttcctaagtaaaaaaaccggtggagtctgcctggacttttgatgtacaaaactgttagaaaataattgagtttaatgttaagtaaaaaatatgagaaatcaaacctaygtaataattttgttaatttctacaagtctttcaaatcaaataggtaggatttttaaattatatattttgttgtaaggttgtgtattattctctatataaataaattcaaattttaaactttattccaagggttggtaaaaacatatattattatattgtgaaaaatgattataatttcagttatagttctcagttgtggtttt

SEQ ID NO: 303754 - DNA, 577 bp, Homo sapiens
aacatatattattatattgtgaaaaatgattataatttcagttatagttctcagttgtggttttatattttctttcgtatttttcttgcgtgttttctrtgtggttttcaagtgtttttaaagttttcctccatcctggattttctttctctcaatccatgtatcctccaactttttcaaatatccccatcaaattgcctccctctccacttactaatatactcctttcaacttttcagttgtttcacacttttgtttttagttcatattttagtgttttagtttatttatattttatcttcctaaataaaaaagttcttcctggagcatttattgacattctcaaaggatgaaccacttctatagagcttaaccaacacatttacttacagttatattcccatattatcaaaactttatactactctaaacttctttttctgtaagcaaaagccaattggtaactataatttgaattttcatgtaaaatgacttgtacaattgttttgtgcaaatgttattttcctttttcgtgttgaacaatgggaccaaaacataaaaacaaccaaatggcaaa

SEQ ID NO: 303755 - DNA, 467 bp, Homo sapiens
taatttaaatagaggtttcagcagcatgctgatgctcctcagtaagaactagatggcatacataaagtcaaaagaggtttgactttgacttcaaaaacaattcaactagatagaaaggaaataataggtaatttaaaaattactatagccatcccacctaaattgaaatgcagaaatatgtagaattagaaagtaaagtatttatcaaaatataacggttgatccaaattattgcttttcttgtcagaaatattcaggaactaggaaataatagtcattactttcccaagtcagttattctttatgttcataagtaattgcttatttgctatagccaatactcatggaagcctttgtcttctgtgacatwgcaggtttacagttctgcttcaaatttttgaagttttcactgttacattcactggctcattttatttcatgattttgagtctgggagacattccctt

SEQ ID NO: 303756 - DNA, 573 bp, Homo sapiens
tttgaaaaatgttaagtttacctatttaaatgtggcttttgcccttaatatttctaatattctaatgaaattgcagccaatagttaattctggttaactctaactctgttttttggagggttatctaaggtgtgttacagwtcatattcatataatcagtgattaagctggtttgagaccaaactgcaattattgtgaattataatctatttatttccattaatattcctaaacctttgaagtgtcaaatgaagcctggggtgtataaatcggcctttctcattgataagtcttgagccatatattttattctcttaaaactataagactatgaatatttctgcttaggtttttcgtctatcaatagccacatacatgtgagaaaatctttcatgggtcaagggatagtccatattgttctcaattctctgaagtgctgttttcttcggtattttagccctgtaatctttaatgccttggaatatttttgatacctccatgcatattttatacaattttcataagaagagagttgagtagagagtcagtttatagtttagagaaaagagaaaa

SEQ ID NO: 303757 - DNA, 573 bp, Homo sapiens
tttgaaaaatgttaagtttacctatttaaatgtggcttttgcccttaatatttctaatattctaatgaaattgcagccaatagttaattctggttaactctaactctgttttttggagggttatctaaggtgtgttacagttcatattcatataatcagtgattaagctggtttgagaccaaactgcaattattgtgaattataatctatttatttccattaatattcctaaacctttgaagtgtcaaatgaagcctggggtgtataaatcggcctttctcattgataagtcttgagccatatattttattctcttaaaactataagactatgaatatttctgcttaggtttttsgtctatcaatagccacatacatgtgagaaaatctttcatgggtcaagggatagtccatattgttctcaattctctgaagtgctgttttcttcggtattttagccctgtaatctttaatgccttggaatatttttgatacctccatgcatattttatacaattttcataagaagagagttgagtagagagtcagtttatagtttagagaaaagagaaaa

SEQ ID NO: 303758 - DNA, 573 bp, Homo sapiens
tttgaaaaatgttaagtttacctatttaaatgtggcttttgcccttaatatttctaatattctaatgaaattgcagccaatagttaattctggttaactctaactctgttttttggagggttatctaaggtgtgttacagttcatattcatataatcagtgattaagctggtttgagaccaaactgcaattattgtgaattataatctatttatttccattaatattcctaaacctttgaagtgtcaaatgaagcctggggtgtataaatcggcctttctcattgataagtcttgagccatatattttattctcttaaaactataagactatgaatatttctgcttaggtttttcgtctatcaatagccacatacatgtgagaaaatctttcatgggtcaagggatagtccatattgttctcaattctctgaagtgctgttttcttcrgtattttagccctgtaatctttaatgccttggaatatttttgatacctccatgcatattttatacaattttcataagaagagagttgagtagagagtcagtttatagtttagagaaaagagaaaa

SEQ ID NO: 303759 - DNA, 594 bp, Homo sapiens
ctttaagaatttattaaagtttagctgatttcttatatgattatatggtgacttcctcttcattttttgattggtcaaagatgaaactcattttgtgtcctttccatccttgagggcttgtccctctctggaatcagtttacttggttgccatgcaacttcatctctgatgggctgaaaacaacttatgactttgtagataattcaaatatttctcaccttaagggtgggagcatcattcttttcacctttctacatcctaatcagaagctgaaaatcacactgaggttttagaaattactcttccaagmtgcaaaatattaagaatttccattttaaatcttagcagaaaaaaattactctagttggagtttcaccaaataatcttgtaaaatttgaagttttcttgagagacacctgccttcatctggtgtgaattatgaaaaccttagttacacttggaagagtaaatccttacaaatcaatatatttaacattggtaaacagacaagcaataaaaataaattataaagaaacaacaaaaataaatcatttagatatctaacatgatatatatgaggatttatcaaatttt

SEQ ID NO: 303760 - DNA, 540 bp, Homo sapiens
gctcacatgtgatctcaccttttgccatcttgctcccccactgatacctagagaccactacaccacctcttacccagcaggggtctgaggccaaatacaaggagactcagggtcatatcctgagtaattttgagcgctctgtgagcatccctgtttccaaggcagagtgaaattaagagcaaagaaaaaacatcatgacaggtcaagaaagaaaccayaggaaaaaaaattctattatattttcttttgtttgtaaaagggatcctgcaaattaagtagctgacctggggtttcactttctggatttcagggcccacgaatgcattaccttttaacccagatcggaaatgatccacatgagcaatgaaagatggcagatggcttgaagccaagtgtgctttaagaacacttgggtgggattccattgcatggaatgaacttctagaacaggggtgttcaatcgtttagcttctctgggccacactgcaagaagacgaattgtcttgggccacatataaaatgcactaacactaacgatag

SEQ ID NO: 303761 - DNA, 591 bp, Homo sapiens
gatcctgcaaattaagtagctgacctggggtttcactttctggatttcagggcccacgaatgcattaccttttaacccagatcggaaatgatccacatgagcaatgaaagatggcagatggcttgaagccaagtgtgctttaagaacacttgggtgggattccattgcatggaatgaacttctagaacaggggtgttcaatcgtttagcttctctgggccacactgcaagaagacgaattgtcttgggccacatataaaatgcactaacactaacgatagctgacaagctaaagaaaaawaaaatcaccaaaaaaaatcccataatgttttttaaaagtttaccaatttctattgggcctcattcaaagctgtcctggactgtgtgtggcctttgggctgtgggttggacaagcttattctagaaagtgaaaagtttcatgggaattgacagttgtagattaaatgatcacttactatcagttaagaaagaaatttctctcttcattaccactcctatttccagacttcagtcctagagtggtcagtagaagcagttatccaataggagagggggtaagtaaggtgaaaac

SEQ ID NO: 303762 - DNA, 551 bp, Homo sapiens
ctgtgtgtggcctttgggctgtgggttggacaagcttattctagaaagtgaaaagtttcatgggaattgacagttgtagattaaatgatcacttactatcagttaagaaagaaatttctctcttcattaccactcctatttccagacttcagtcctagagtggtcagtagaagcagttatccaataggagagggggtaagtaaggtgaaaactgctgaaaaggaaaagaaaccaagaatgaccccttcccacagcctacagatgaaagaggtaggggagaaaacatatctgaattatattttaattaaaatatagaaattcatattataatttctgaaataaaattgtrgtttacaacataatataactatctgttaaataccaataaccaaaagaagtcatgaaagctgctagatttttttacagatctggaaacttttcctgaatacatatttaaagaactacagaagacaaaaatgaaattgcattgaatgacaattagagacaagtttgttctttcgaaaaaattggatatttgctttgtaattttc

SEQ ID NO: 303763 - DNA, 449 bp, Homo sapiens
ctactcaatgtttgactactgaaattcttatataaatgttttctgcaaaaaaattttatggacatagaataataattgtatgtgctcagttgcttgattaaaatactttattgtgattattttgtaaagaaaagaattgcactataatttygatgttgtgcaaattataataattaaatatttaggctaaaaaagataatgcaagaaggctaagttgtattgtcatattgttaagattactttttatttaatgttcctaatcagaagtgaaccattatctatgtaaaaataatttaattcagaaaattttggtctcaaatttacataatgccatcattaccctttttatgttctggaaaatttattctaaattacctagaaaaaaaggttgattctatagtgttattttttattctctatatctcaggtaagaataaagggaaacgagt

SEQ ID NO: 303764 - DNA, 464 bp, Homo sapiens
gtctgtaatacacaggacacgtcccaatgaccaagaattatctggtctgaaatatcaatagtggtgaggttgasaaaacttcctctgaagcacccggcattgggataaggtctcaaaggaaacgttaaaagacaatgcaaaatgaagaagaatatggggtaccaaaattatagttatcaatcaaccacagaacttagttttccccaaatatctgaaaggttgtttgacttgtcaaaatggaaacaatgtattcagtactgcttcagaaggcaaacctaaaccaaagtttgaaatctgtgatgatgaacatattaaaattatagaatcatttgaaggttattattatccagcagtaacacagtagatgcctttacagaactgaatgtaatgagagactagtattgtgtccctttgtgaagtctttaaattataacagtttcaaaatatatgaagattttgaccaa

SEQ ID NO: 303765 - DNA, 449 bp, Homo sapiens
ctactcaatgtttgactactgaaattcttatataaatgttttctgcaaaaaaattttatggacatagaataataattgtatgtgctcagttgcttgattaaaatactttattgtgattattttgtaaagaaaagaattgcactataatttcgatgttgtgcaaattataataattaaatatttagrctaaaaaagataatgcaagaaggctaagttgtattgtcatattgttaagattactttttatttaatgttcctaatcagaagtgaaccattatctatgtaaaaataatttaattcagaaaattttggtctcaaatttacataatgccatcattaccctttttatgttctggaaaatttattctaaattacctagaaaaaaaggttgattctatagtgttattttttattctctatatctcaggtaagaataaagggaaacgagt

SEQ ID NO: 303766 - DNA, 449 bp, Homo sapiens
ctactcaatgtttgactactgaaattcttatataaatgttttctgcaaaaaaattttatggacatagaataataattgtatgtgctcagttgcttgattaaaatactttattgtgattattttgtaaagaaaagaattgcactataatttcgatgttgtgcaaattataataattaaatatttaggctaaaaaagataatgcaagaaggctaagttgtattgtcatattgttaagattactttttatttawtgttcctaatcagaagtgaaccattatctatgtaaaaataatttaattcagaaaattttggtctcaaatttacataatgccatcattaccctttttatgttctggaaaatttattctaaattacctagaaaaaaaggttgattctatagtgttattttttattctctatatctcaggtaagaataaagggaaacgagt

SEQ ID NO: 303767 - DNA, 589 bp, Homo sapiens
ttgttttaagtcatcagaaagaacagaattaaaaattaatttaaaaactaggaatatttatatcgtctttcctcatagttttcctcttctggtcttttgccttaatagttatttactatttctcattcatatttggtagaaagtgtcattatacaatgtataacaaaggtcttgagaatacaaatgtataactctttcatataattataatccaaagaaatctttaatatattcatgttaaacatcrgtttatatgatatttgcaatccatgtgaaaaaaccattttacaaaaacattaaaataaagcccaagtttttgtatttgagtgattcagcttaagaagacttatataatttacgaaataaatacatatcatttgagcataatgcaacacacctttaaaaaccacttgtttgaaaagaagcaaggcatatccactgattatatacaactactgctttcaaaattttcacttttaaccagtagacttttcatcagtgttttatattgtcagggtgttttttgtttttgtttttatgatttaatgtatttaacttgtttctctattagaacagaaaaaacacatac

SEQ ID NO: 303768 - DNA, 608 bp, Homo sapiens
gaattaaaaattaatttaaaaactaggaatatttatatcgtctttcctcatagttttcctcttctggtcttttgccttaatagttatttactatttctcattcatatttggtagaaagtgtcattatacaatgtataacaaaggtcttgagaatacaaatgtataactctttcatataattataatccaaagaaatctttaatatattcatgttaaacatcagtttatatgatatttgcaatccatgtgaaaaaaccattttacaaaaacattaaaataaagcccaagtttttgtatttgagtgattcagcttaagaagacttatataatttaygaaataaatacatatcatttgagcataatgcaacacacctttaaaaaccacttgtttgaaaagaagcaaggcatatccactgattatatacaactactgctttcaaaattttcacttttaaccagtagacttttcatcagtgttttatattgtcagggtgttttttgtttttgtttttatgatttaatgtatttaacttgtttctctattagaacagaaaaaacacatacttctttatttcttctgcattcctttccatttgttggccatgaca

SEQ ID NO: 303769 - DNA, 589 bp, Homo sapiens
tatacaatctaatttaaggcataagagataagtgtgttcaaggggagtagcgaaaaaagtgctcttaatttttctttttgattttttgctgtggttagtgttaacacatgtatattgaatggatatcttatttttaaacaacaaaaccttatttcaacaacaccaatctacatatacctgatattttatataatgcactaatgaaagcattgtgatgttaaaattagcattgtagaaaggaaattgataaatgtaactagcaaayattaattttgggggatgaatattttctaatctatttctgaaaaactattacttggttatactaatttatttgagggtaccttcccctgtatcatttttacctccacttttgaaagaagcaaacaatactccttctgaaaaataaattttaattctacagctttctatgacaacttttttgttattcataccaaagatgaagctatgcccataccttattgattatatatgcaaagagttctctatcaggaaagtttcaacatgaaagatttcttcccactgaggagtctctccattacagaaggtcaactggtaaatgttattc

SEQ ID NO: 303770 - DNA, 595 bp, Homo sapiens
caacttttttgttattcataccaaagatgaagctatgcccataccttattgattatatatgcaaagagttctctatcaggaaagtttcaacatgaaagatttcttcccactgaggagtctctccattacagaaggtcaactggtaaatgttattctgtttccactaataaccatttgatcctcttttagattttcattcactctagtgttaaatgaatctttgctgaaaattattaaatcaaaactataataccttaatagagaaaaatgaatgttatgaggcagtatctcaccatcaaagttgcagrgacatgtcttttcaaagtgaaatatatagcttatctagttaacaaaagggcagcaaattcctttgcaggtctaaaattgagccagcaaagtggtggtttacaaacagatgccagtttcaattttcatgttagatgatcaaatatatattgagtctgcataggaaatgctgttatcacaggattcaacacacaatgtcgaattcctacatagagaaatttcattttttcattacattctgtacatgcaaacttcctagctagtgtggagaaaacctaggaaaaaaaaa

SEQ ID NO: 303771 - DNA, 595 bp, Homo sapiens
caacttttttgttattcataccaaagatgaagctatgcccataccttattgattatatatgcaaagagttctctatcaggaaagtttcaacatgaaagatttcttcccactgaggagtctctccattacagaaggtcaactggtaaatgttattctgtttccactaataaccatttgatcctcttttagattttcattcactctagtgttaaatgaatctttgctgaaaattattaaatcaaaactataataccttaatagagaaaaatgaatgttatgaggcagtatctcaccatcaaagttgcagagacatgtcttttcaaagtgaaatatatagcttatctagttaacaaaagggcagcaaattcctttgcaggtctaaaattgagccagcaaagtggtggtttacaaacagatgccagtttcaattttcatgttagatgatcaaatatatattgagtctgcataggaaatgctgttatcacaggattcaacacacaatgtcgaattcctrcatagagaaatttcattttttcattacattctgtacatgcaaacttcctagctagtgtggagaaaacctaggaaaaaaaaa

SEQ ID NO: 303772 - DNA, 548 bp, Homo sapiens
ataatgcatacctaatagcactgctgaattatatacttgcttgagttgcatamtgttgcagccctacaggtacatatttttatttacacaacttggatgattttcattcagtgaaacaatttattaatttattccttccatgtcaatgaacgtagagctttattattattttccatggttttcagggtattccataacacagacacatcaccatttattctttctgtagtagacatttaggggatttaaaatgtttacattataaatactgacaatttagtaattagtgtcttagataatttattccaagttaaaaacaaaaatagagatttaatgtaagtccaactgagaaatctataaagtaggcaaaattttaaagttatcatacacataaaaattcaaatgtattcttatctactcatagttttagtaactcctctgataaaaaagagatcatagtagaaataatcagatatgaaaaaaattaaagatttaaaaatttggtatgtattactctccactgaagacatgatcttattggtaattat

SEQ ID NO: 303773 - DNA, 548 bp, Homo sapiens
ataatgcatacctaatagcactgctgaattatatacttgcttgagttgcatactgttgcagccctacaggtacatatttttatttacacaacttggatgattttcattcagtgaaacaatttattaatttattccttccatgtcaatgwacgtagagctttattattattttccatggttttcagggtattccataacacagacacatcaccatttattctttctgtagtagacatttaggggatttaaaatgtttacattataaatactgacaatttagtaattagtgtcttagataatttattccaagttaaaaacaaaaatagagatttaatgtaagtccaactgagaaatctataaagtaggcaaaattttaaagttatcatacacataaaaattcaaatgtattcttatctactcatagttttagtaactcctctgataaaaaagagatcatagtagaaataatcagatatgaaaaaaattaaagatttaaaaatttggtatgtattactctccactgaagacatgatcttattggtaattat

SEQ ID NO: 303774 - DNA, 548 bp, Homo sapiens
ataatgcatacctaatagcactgctgaattatatacttgcttgagttgcatactgttgcagccctacaggtacatatttttatttacacaacttggatgattttcattcagtgaaacaatttattaatttattccttccatgtcaatgaacgtagagctttattattattttccatggttttcagggtattccataacacagacacatcaccatttattctttctgtagtagacatttaggggatttaaaatgtttacattataaatactgacaatttagtaattagtgtcttagataatttattccaagttaaaaacaaaaatagagatttaatgtaagtccaactgagaaatctataaagtaggcaaaattttaaagttatcatacacataaaaattcaaatgtattcttatctactcrtagttttagtaactcctctgataaaaaagagatcatagtagaaataatcagatatgaaaaaaattaaagatttaaaaatttggtatgtattactctccactgaagacatgatcttattggtaattat

SEQ ID NO: 303775 - DNA, 533 bp, Homo sapiens
  misc_feature (1)...(533): n = A,T,C or G
nnnnnnnnnnnnnnnnnnnnnnnnnnnnnnnnnnncataccactgcactatatggagactctgtctcaaaaaaaaaaaaaaaaggtttgtgcttttcttacataagagtacatcctctgactataaaaatcctggaagaaaacctaggaaatactcttctggacttcatacttctcaattaatttatggcaaagtcctcaaaagcaattgcaagaataacaaaaattgacaagtatgatctaattaagctaaagagcktctgcacagcatgagaaactatcacaggattaaacagacagcgtagagaatggaagaaaatattcacaaactatggatacagcaaacgcctattatccagaatccataagagatctaaacaaatcaacaagcaaaaaataaataacaccattaaaaatgggcaaaggacgtgaacagacacttctcaaaataacacatgtaagtggccaacaaacatattaacaaatgcttaccattgttaatcatcagaaaagtgccaaacaaaacatcagtga

SEQ ID NO: 303776 - DNA, 533 bp, Homo sapiens
  misc_feature (1)...(533): n = A,T,C or G
nnnnnnnnnnnnnnnnnnnnnnnnnnnnnnnnnnncataccactgcactatatggagactctgtctcaaaaaaaaaaaaaaaaggtttgtgcttttcttacataagagtacatcctctgactataaaaatcctggaagaaaacctaggaaatactcttctggacttcatacttctcaattaatttatggcaaagtcctcaaaagcaattgcaagaataacaaaaattgacaagtatgatctaattaagctaaagagcgtctgcacagcatgagaaactatcacaggattaaacagacagcgtagagaatggaagaaaatattcacaaactatggatacagcaaacrcctattatccagaatccataagagatctaaacaaatcaacaagcaaaaaataaataacaccattaaaaatgggcaaaggacgtgaacagacacttctcaaaataacacatgtaagtggccaacaaacatattaacaaatgcttaccattgttaatcatcagaaaagtgccaaacaaaacatcagtga

SEQ ID NO: 303777 - DNA, 533 bp, Homo sapiens
  misc_feature (1)...(533): n = A,T,C or G
nnnnnnnnnnnnnnnnnnnnnnnnnnnnnnnnnnncataccactgcactatatggagactctgtctcaaaaaaaaaaaaaaaaggtttgtgcttttcttacataagagtacatcctctgactataaaaatcctggaagaaaacctaggaaatactcttctggacttcatacttctcaattaatttatggcaaagtcctcaaaagcaattgcaagaataacaaaaattgacaagtatgatctaattaagctaaagagcgtctgcacagcatgagaaactatcacaggattaaacagacagcgtagagaatggaagaaaatattcacaaactatggatacagcaaacgcctattatccagaatccataagagatctaarcaaatcaacaagcaaaaaataaataacaccattaaaaatgggcaaaggacgtgaacagacacttctcaaaataacacatgtaagtggccaacaaacatattaacaaatgcttaccattgttaatcatcagaaaagtgccaaacaaaacatcagtga

SEQ ID NO: 303778 - DNA, 549 bp, Homo sapiens
acttattttagatggagctggactgtgtagaacaaataactagagaaacaaagagaagtatgttgccaaaatttattaattacatttaggtttattttagaaattaagtgtaaataacaaatggcattccttttcattgtttggttagtagatactatgtcaagtattttttttcttacacacatctaatgcaagatgtgaaaacaaaaactttcacagagaagactgtacttatgcaccataaattcatcatgttccatagcttaaaaaattcccaagaagtctrtgcatctgttttttactggctctacactttcttaagttttgccatcatcatggaactgtcagccagcacactgaaacgattctcagaaaacaaaggcatcaccaagttctcagggttttggtacagattgaaggccaacagacctcagactcattttgaaattcttagctgggcaataacccttcataagcagtcacttgacaggtgacattttaaatctcctatcatatactgtgtcattggcttacatctgttctcaggaa

SEQ ID NO: 303779 - DNA, 549 bp, Homo sapiens
acttattttagatggagctggactgtgtagaacaaataactagagaaacaaagagaagtatgttgccaaaatttattaattacatttaggtttattttagaaattaagtgtaaataacaaatggcattccttttcattgtttggttagtagatactatgtcaagtattttttttcttacacacatctaatgcaagatgtgaaaacaaaaactttcacagagaagactgtacttatgcaccataaattcatcatgttccatagcttaaaaaattcccaagaagtctgtgcatctgttttttactggctctacactttcttaagttttgccatcatcatggaactgtcagccagcacactgaaaygattctcagaaaacaaaggcatcaccaagttctcagggttttggtacagattgaaggccaacagacctcagactcattttgaaattcttagctgggcaataacccttcataagcagtcacttgacaggtgacattttaaatctcctatcatatactgtgtcattggcttacatctgttctcaggaa

SEQ ID NO: 303780 - DNA, 549 bp, Homo sapiens
acttattttagatggagctggactgtgtagaacaaataactagagaaacaaagagaagtatgttgccaaaatttattaattacatttaggtttattttagaaattaagtgtaaataacaaatggcattccttttcattgtttggttagtagatactatgtcaagtattttttttcttacacacatctaatgcaagatgtgaaaacaaaaactttcacagagaagactgtacttatgcaccataaattcatcatgttccatagcttaaaaaattcccaagaagtctgtgcatctgttttttactggctctacactttcttaagttttgccatcatcatggaactgtcagccagcacactgaaacgattctcagaaaacaaaggcatcaccaagttctcagggttttggtacagattgaaggccaacagacctcagactcattttgaaatycttagctgggcaataacccttcataagcagtcacttgacaggtgacattttaaatctcctatcatatactgtgtcattggcttacatctgttctcaggaa

SEQ ID NO: 303781 - DNA, 553 bp, Homo sapiens
  misc_feature (1)...(553): n = A,T,C or G
tacacaacattttaattgtttctcataaaatatataacattacaatctttactgaagtaggatgtttttgtatcacatgtgtgatgataatttatagggtaatttaaatgatgttttttagcctccttaagttttaagtggatcttgcaaatgaacaccagtattattgagtttgacgtactcaaattgcccaaatgccagctgtttaaacagccaaagaacsaagtcatcattgatactttagtaaaggtcatcgaaggcttctttgcattttacagcttttactacnttagggagttaaaggagtacctgcccaggcttgtgcatgctaatgtgacaattttctttttgtagttgaaccgtattttgtgggaagatactttgaggctctgtaaatatccagttactcccagaacccactagatttagcatttcatggatgacttgtgtttgaacaattattactatgatggttgccagatgattattttcttctcttctttgctgtacctggagaagtaaaaccaataaataactgagaagggaaagctca

SEQ ID NO: 303782 - DNA, 593 bp, Homo sapiens
  misc_feature (1)...(593): n = A,T,C or G
aaacagccaaagaacgaagtcatcattgatactttagtaaaggtcatcgaaggcttctttgcattttacagcttttactacnttagggagttaaaggagtacctgcccaggcttgtgcatgctaatgtgacaattttctttttgtagttgaaccgtattttgtgggaagatactttgaggctctgtaaatatccagttactcccagaacccactagatttagcatttcatggatgacttgtgtttgaacaattattactatgatggttgccagatgattattttctkctcttctttgctgtacctggagaagtaaaaccaataaataactgagaagggaaagctcatgattctggtgctccaattccccaagattaggccagtggtagacatttcaagctgacttcttgtcttttttatttgtcttcgttactctgtcagcacttttttagtttcaggaacaagatgttctaagctaatgttgtattttctctgctccagccatggaatgagtgatttttcttagaagcagaggtggagccactgaggaagcacaggcgagccctccccagcacgtgctcactggtccccaac

SEQ ID NO: 303783 - DNA, 643 bp, Homo sapiens
acatggtcagtggggacttggtcagtgggaactggtaaatggaggagtggtcattagaggcctcatcagtgggaaactggtcctgggcggctggtcagtaggaacctggccagctggccactgtgtgacctcaggcaggggktttgtctgtggagtctccttgcctccatctgcagggaaggtgagtcagggcaccttggagggtggctggaaagagaaggtgagaagatgtgttgaatccagcaccacttggcagacctacaactttacacatgacctgtgtgccacctagagggggtcccagccctctctgctgtgcctggtgcccctcctctctctgcatccccaggaccaccatgggtggggaaggcagagattggggagcacctgtagaagctctaatgctggccatgagccctcggtgatgacctgggtgcacctgtgagtggagaagctaggcctggccagagaagcaagagaaacacacacacacatatgtgcacacacacacacaggcacacacgcatgcacaaacacactgcatccacacatgtcagttcaggggatagaggacactgactctgggcgctgttgacccatgcaggctcccattgtggtgggttgtgtcaccccacaatgtcac

SEQ ID NO: 303784 - DNA, 643 bp, Homo sapiens
acatggtcagtggggacttggtcagtgggaactggtaaatggaggagtggtcattagaggcctcatcagtgggaaactggtcctgggcggctggtcagtaggaacctggccagctggccactgtgtgacctcaggcagggggtttgtctgtggagtctccttgcctccatctgcagggaaggtgagtcagggcaccttggagggtggctggaaagagaaggtgagaagatgtgttgaatccagcaccacttggcagacctacaactttacacatgacctgtgtgccacctagagggggtsccagccctctctgctgtgcctggtgcccctcctctctctgcatccccaggaccaccatgggtggggaaggcagagattggggagcacctgtagaagctctaatgctggccatgagccctcggtgatgacctgggtgcacctgtgagtggagaagctaggcctggccagagaagcaagagaaacacacacacacatatgtgcacacacacacacaggcacacacgcatgcacaaacacactgcatccacacatgtcagttcaggggatagaggacactgactctgggcgctgttgacccatgcaggctcccattgtggtgggttgtgtcaccccacaatgtcac

SEQ ID NO: 303785 - DNA, 563 bp, Homo sapiens
aaagatgatgatagcaaataatatatttttgtgactcatggtagctttaactttgttcttaaaattctgagtaatttaagggttcacatttgaagaatccactgcattacrgataacattttattgcaagtaaatgcatttcaaaatttgctattggttttgtattagattattctcagcctacttcattatcaagctatattattttattcatgcagtttgatgatcttacggcagagaaggaagctttatcttcaaaatgtgtcaatttggctaaagacaatcaagttcttcaacaggagtttttatctatgaaaaaagtacaacagcaatgtgagaaacttgaggaggataaaaagatgttgaaagaagaaatattaaatcttaagacacatatggaaaacaatagggtagaacttagtaaactacaagaatataaattggagctagatgaaaaggcagtgcaggcagtagaaaaattagaagaaatccatttacaggttagttttttaaatcaggtaagtttatctgtaatgtgctttcatttatttcaccgcaaatta

SEQ ID NO: 303786 - DNA, 563 bp, Homo sapiens
aaagatgatgatagcaaataatatatttttgtgactcatggtagctttaactttgttcttaaaattctgagtaatttaagggttcacatttgaagaatccactgcattacggataacattttattgcaagtaaatgcatttcaaaatttgctattggttttgtattagattattctcagcctacttcattatcaagctatattattttattcatgcagtttgatgatcttacggcagagaaggaagctttatcttcaaaatgtgtcaatttggctaaagacaatcaagttcttcaacaggagtttttatctatgaaaaaagtacaacagcaatgtgaraaacttgaggaggataaaaagatgttgaaagaagaaatattaaatcttaagacacatatggaaaacaatagggtagaacttagtaaactacaagaatataaattggagctagatgaaaaggcagtgcaggcagtagaaaaattagaagaaatccatttacaggttagttttttaaatcaggtaagtttatctgtaatgtgctttcatttatttcaccgcaaatta

SEQ ID NO: 303787 - DNA, 563 bp, Homo sapiens
aaagatgatgatagcaaataatatatttttgtgactcatggtagctttaactttgttcttaaaattctgagtaatttaagggttcacatttgaagaatccactgcattacggataacattttattgcaagtaaatgcatttcaaaatttgctattggttttgtattagattattctcagcctacttcattatcaagctatattattttattcatgcagtttgatgatcttacggcagagaaggaagctttatcttcaaaatgtgtcaatttggctaaagacaatcaagttcttcaacaggagtttttatctatgaaaaaagtacaacagcaatgtgagaaacttgaggaggataaaaagatgttgaaagaagaaatattaaatcttaagacacatatggaaaacaatagggtagaacttagtaaactacaagaatataaattggagctagatgaaaaggcartgcaggcagtagaaaaattagaagaaatccatttacaggttagttttttaaatcaggtaagtttatctgtaatgtgctttcatttatttcaccgcaaatta

SEQ ID NO: 303788 - DNA, 549 bp, Homo sapiens
gtgtgtggaaggcagaaggaaaaagccccacctccagtgccttggtcacagtgctgggsgctaattgccttcagacatgctttagttctttttgatcaccaaccagccaatctagttctcccccaggagttgttgttctgaattattcctcagtgccaaatgcttaattgttcctagataatgggtgaaatgcacaagggtgaaacctaaaatttgtttgctaaacacaagtattcctaaatttttttgttgttgttcattttagttttcttaacctacattaaggagtacaacatgatgttttgatacaattatttctagtgaagtggttcttataatcaagcaaatcaacatattcttttctcacattgttaccctttaaatatgagtatttctaatggaatcttcagaatctcacaagtagagcccttttagaaggcagcaagtgttacctgtcaagccatatatcactgatagccatttctcttccctgtctactttgtttgtactgcttgttcagtataaatcaccttagaaacacaggtgctt

SEQ ID NO: 303789 - DNA, 549 bp, Homo sapiens
gtgtgtggaaggcagaaggaaaaagccccacctccagtgccttggtcacagtgctgggcgctaattkccttcagacatgctttagttctttttgatcaccaaccagccaatctagttctcccccaggagttgttgttctgaattattcctcagtgccaaatgcttaattgttcctagataatgggtgaaatgcacaagggtgaaacctaaaatttgtttgctaaacacaagtattcctaaatttttttgttgttgttcattttagttttcttaacctacattaaggagtacaacatgatgttttgatacaattatttctagtgaagtggttcttataatcaagcaaatcaacatattcttttctcacattgttaccctttaaatatgagtatttctaatggaatcttcagaatctcacaagtagagcccttttagaaggcagcaagtgttacctgtcaagccatatatcactgatagccatttctcttccctgtctactttgtttgtactgcttgttcagtataaatcaccttagaaacacaggtgctt

SEQ ID NO: 303790 - DNA, 549 bp, Homo sapiens
gtgtgtggaaggcagaaggaaaaagccccacctccagtgccttggtcacagtgctgggcgctaattgccttcagacatgctttagttctttttgatcaccaaccagccaatctagttctcccccaggagttgttgttctgaattattcctcagtgccaaatgcttaattgttcctagataatgggtgaaatgcacaagggygaaacctaaaatttgtttgctaaacacaagtattcctaaatttttttgttgttgttcattttagttttcttaacctacattaaggagtacaacatgatgttttgatacaattatttctagtgaagtggttcttataatcaagcaaatcaacatattcttttctcacattgttaccctttaaatatgagtatttctaatggaatcttcagaatctcacaagtagagcccttttagaaggcagcaagtgttacctgtcaagccatatatcactgatagccatttctcttccctgtctactttgtttgtactgcttgttcagtataaatcaccttagaaacacaggtgctt

SEQ ID NO: 303791 - DNA, 562 bp, Homo sapiens
cccacctccagtgccttggtcacagtgctgggcgctaattgccttcagacatgctttagttctttttgatcaccaaccagccaatctagttctcccccaggagttgttgttctgaattattcctcagtgccaaatgcttaattgttcctagataatgggtgaaatgcacaagggtgaaacctaaaatttgtttgcyaaacacaagtattcctaaatttttttgttgttgttcattttagttttcttaacctacattaaggagtacaacatgatgttttgatacaattatttctagtgaagtggttcttataatcaagcaaatcaacatattcttttctcacattgttaccctttaaatatgagtatttctaatggaatcttcagaatctcacaagtagagcccttttagaaggcagcaagtgttacctgtcaagccatatatcactgatagccatttctcttccctgtctactttgtttgtactgcttgttcagtataaatcaccttagaaacacaggtgcttctttagaatgattttaaaattatacttgcttacaacagg

SEQ ID NO: 303792 - DNA, 508 bp, Homo sapiens
aggtaatctggggactgtgtctaaaatggccttatattcatgtgtttgccatgrgtttctgaagctttcattctgaacatggtctcaagttggctcttgagggctaatttcattacacatgatcataggcataaatttaaatttgtggaggattgttttgtacatcccacatgaaggggtgacctgcccctccacacctgtgggtttttctcattgggtgggatgagagactgagaaaagaaagagacacagagacaaagtatagagaaagaaacatgggcccagggtaccggcactcagcatatggaggatccacgctggcaccagtctctgagttccctcagtatttattgatcattatctctaccatctcagagagggggatgtggcagggcaatagggtaatagtggggagagggtcagcaggaaaacatgtgaacaaatgtctgtgtgccataaacaaggttagaaaaggtgctgtgctttgaggtgcacatacataaacatc

SEQ ID NO: 303793 - DNA, 508 bp, Homo sapiens
aggtaatctggggactgtgtctaaaatggccttatattcatgtgtttgccatgggtttctgaagctttcattctgaacatggtctcaagttggctcttgagggctaatttcattacacatgatcataggcataaatttaaatttgtggaggattgttttgtacatcccacatgaaggggtgacctgcccctccacacctgtgggtttttctyattgggtgggatgagagactgagaaaagaaagagacacagagacaaagtatagagaaagaaacatgggcccagggtaccggcactcagcatatggaggatccacgctggcaccagtctctgagttccctcagtatttattgatcattatctctaccatctcagagagggggatgtggcagggcaatagggtaatagtggggagagggtcagcaggaaaacatgtgaacaaatgtctgtgtgccataaacaaggttagaaaaggtgctgtgctttgaggtgcacatacataaacatc

SEQ ID NO: 303794 - DNA, 436 bp, Homo sapiens
gtagcatttatcaaaaagaagataaagagaaataagagttcttgttgtctagggaatatatcatcttctttaggtaatgcttattaatgctcctcaaaatagctagagcattcaagctttgtamcgagttcacaatgagagaagtagcttctactagaaattaaatatgttacttctttcattgagtaactattgctacaagaatacgtttgctgaataaattagcacatttattgatataattgatttgcatactgtggcagcacttcatggaccaaaccctaagtcccatgaaaaattgaatagaattatttgacagttaagtatcattggaaaagcctggctctagttctcaggaagcaatctggttgattatgtgttttcggtgtgtagtcataatacaactgtatatcactagtgtacattagacactttg

SEQ ID NO: 303795 - DNA, 436 bp, Homo sapiens
gtagcatttatcaaaaagaagataaagagaaataagagttcttgttgtctagggaatatatcatcttctttaggtaatgcttattaatgctcctcaaaatagctagagcattcaagctttgtaccgagttcacaatgagagaagtagcttctactagaaattaaatatgttacttctttcattgagtaactattgctacaagaatacgtttgctgaataaattagcacatttattgatataattsatttgcatactgtggcagcacttcatggaccaaaccctaagtcccatgaaaaattgaatagaattatttgacagttaagtatcattggaaaagcctggctctagttctcaggaagcaatctggttgattatgtgttttcggtgtgtagtcataatacaactgtatatcactagtgtacattagacactttg

SEQ ID NO: 303796 - DNA, 436 bp, Homo sapiens
gtagcatttatcaaaaagaagataaagagaaataagagttcttgttgtctagggaatatatcatcttctttaggtaatgcttattaatgctcctcaaaatagctagagcattcaagctttgtaccgagttcacaatgagagaagtagcttctactagaaattaaatatgttacttctttcattgagtaactattgctacaagaatacgtttgctgaataaattagcacatttattgatataattgatttgcatactgtggcagcacttcatggaccaaaccctaagtcccatgaaaaattgaatagaattatttgacagttaagtatcattggaaaagcctggctctagttctcaggaagcaatctggttgattatgtgttttcrgtgtgtagtcataatacaactgtatatcactagtgtacattagacactttg

SEQ ID NO: 303797 - DNA, 508 bp, Homo sapiens
tcattacatttgattttgacaatctgtttttataccacagttgcaaaaaattaatcacattctttacttcatgagacattatcattattgtttcctacaagtttctctggttttacttgtttcatttttttattccttatcccttgtcacagacaggcatgctaatgtgtttgayataggttctttactcttaaagaattcttacaagataagaaggttgttttctgagtgtgtgtatgtgtatatacgtgagtgtatacattttgcttaaagagtattgtgctataaatctaattttatttctaattttttcacagagcataacatccttcatacattcccacattgctgtaggttatttttggttgtttattcccctgtagctgctgcatagttttcaataaaatgaatcaaccacttttccctatccagtcttgcagtagaattcacactgatatcctgctactgaaatattcacttccttatggtatccatatgaaaacacttt

SEQ ID NO: 303798 - DNA, 508 bp, Homo sapiens
tcattacatttgattttgacaatctgtttttataccacagttgcaaaaaattaatcacattctttacttcatgagacattatcattattgtttcctacaagtttctctggttttacttgtttcatttttttattccttatcccttgtcacagacaggcatgctaatgtgtttgatataggttctttactcttaaagaattcttacaagataagaaggttgttttctgagtgtgtgtatgtgtatatacrtgagtgtatacattttgcttaaagagtattgtgctataaatctaattttatttctaattttttcacagagcataacatccttcatacattcccacattgctgtaggttatttttggttgtttattcccctgtagctgctgcatagttttcaataaaatgaatcaaccacttttccctatccagtcttgcagtagaattcacactgatatcctgctactgaaatattcacttccttatggtatccatatgaaaacacttt

SEQ ID NO: 303799 - DNA, 634 bp, Homo sapiens
tgttttatagtctactttgtttctgtggtcaggaggacaagacctgaatggccttgaccaactcagctttctgtacctcctagttctcagaataactttagaatgttccaagaagacaatatcctgagatgagtagaaaccgtctgggacagtctgggctctgtccttgttgttcctagaacaggatattactgcagcccttaaactcagagagccaaggtgcacgtggggtgtgaaacctatggcggagcactcaggggttcctcagcgcagtacacagtggggcatgtgcagaggagactccaccaaccctgggcaacttttctgacctcaagggtcaggcttgccatagaacttaacggttttgctgattcttcctgctcctctgtgagtaataaatttggtttgtctgacttactgtgcgagcattsttctgttcctggcagcttggtttatataaaaaacctcctactagacctatgaatctatgcaatgtggaagtgtcatagaggtaaataagaagcaacttaactgagttgaaaactaacatacataacatggggccactgcaccaaggggcaaaatgatcctgccaaaaagtcccatgtgaccattccagacatactgtggaaga

SEQ ID NO: 303800 - DNA, 560 bp, Homo sapiens
ggtaggttataatttttctatgttaagtttatatagagaagaacaaatgccacttgtaactggtgatgaagcatagaacaatgacttttctacatatctaattcaataaaagagtttacatgtggaaattcaacaaagtaactatactctggcaatgcacatcaacttaactggtgggaatatttcctgaggtggaaatacttcagttttatggtataatctaccaaggatgagtatagtataatccaccaactaagataaattgtctccagttttattaatcaaatgaatattatrttggaagtgagcatttaatatttatatagttgtctacttcaagagtttctgattatatacatcagaaaaataaaatttttgataataaaatatattcaaaggatcctcccaaacatcccacagtaacacagcacatgatctaacaaccctaatagtcacaacagtccacataatgtctcattgtatatgcttccggttttaatttgaaaacagcctgtactttctcatccctagtaggcagaaaagaatagctgttcaccatt

SEQ ID NO: 303801 - DNA, 560 bp, Homo sapiens
ggtaggttataatttttctatgttaagtttatatagagaagaacaaatgccacttgtaactggtgatgaagcatagaacaatgacttttctacatatctaattcaataaaagagtttacatgtggaaattcaacaaagtaactatactctggcaatgcacatcaacttaactggtgggaatatttcctgaggtggaaatacttcagttttatggtataatctaccaaggatgagtatagtataatccaccaactaagataaattgtctccagttttattaatcaaatgaatattatattggaagtgagcatttaatatttatatagttgtctacttcaagagyttctgattatatacatcagaaaaataaaatttttgataataaaatatattcaaaggatcctcccaaacatcccacagtaacacagcacatgatctaacaaccctaatagtcacaacagtccacataatgtctcattgtatatgcttccggttttaatttgaaaacagcctgtactttctcatccctagtaggcagaaaagaatagctgttcaccatt

SEQ ID NO: 303802 - DNA, 629 bp, Homo sapiens
tgccacttgtaactggtgatgaagcatagaacaatgacttttctacatatctaattcaataaaagagtttacatgtggaaattcaacaaagtaactatactctggcaatgcacatcaacttaactggtgggaatatttcctgaggtggaaatacttcagttttatggtataatctaccaaggatgagtatagtataatccaccaactaagataaattgtctccagttttattaatcaaatgaatattatattggaagtgagcatttaatatttatatagttgtctacttcaagagtttctgattatatacatcagaaaaataaaatttttgataataaaatatattcaaaggaycctcccaaacatcccacagtaacacagcacatgatctaacaaccctaatagtcacaacagtccacataatgtctcattgtatatgcttccggttttaatttgaaaacagcctgtactttctcatccctagtaggcagaaaagaatagctgttcaccatttcaagcctctttatttgtttgaaaaatgcattcagtgccagtgagatttacatacatttttagtaataaaaaagtaaaagttttttccttaacggcacaaatcaacctcagttact

SEQ ID NO: 303803 - DNA, 596 bp, Homo sapiens
tattatattggaagtgagcatttaatatttatatagttgtctacttcaagagtttctgattatatacatcagaaaaataaaatttttgataataaaatatattcaaaggatcctcccaaacatcccacagtaacacagcacatgatctaacaaccctaatagtcacaacagtccacataatgtctcattgtatatgcttccggttttaatttgaaaacagcctgtactttctcatccctagtaggcagaaaagaatagctkttcaccatttcaagcctctttatttgtttgaaaaatgcattcagtgccagtgagatttacatacatttttagtaataaaaaagtaaaagttttttccttaacggcacaaatcaacctcagttactgtaaactactttatgaaatacttttataaagtattagtacttgcttttaaaagttatgctgttcaaagagattttgaaaataccttaatgaaacacacaaagtgattacctgtaggttaaaagaaccatcctagatggaagaaacaatgtaatgtatgtatttattgttaaggatttctatcttgcccatatctctatcttaaccaccct

SEQ ID NO: 303804 - DNA, 596 bp, Homo sapiens
tattatattggaagtgagcatttaatatttatatagttgtctacttcaagagtttctgattatatacatcagaaaaataaaatttttgataataaaatatattcaaaggatcctcccaaacatcccacagtaacacagcacatgatctaacaaccctaatagtcacaacagtccacataatgtctcattgtatatgcttccggttttaatttgaaaacagcctgtactttctcatccctagtaggcagaaaagaatagctgttcaccatttcaagcctctttatttgtttgaaaaatgcattcagtgccagtgagatttacatacatttttagtaataaaaaagtaaaagttttttccttaacggcacaaatcaacmtcagttactgtaaactactttatgaaatacttttataaagtattagtacttgcttttaaaagttatgctgttcaaagagattttgaaaataccttaatgaaacacacaaagtgattacctgtaggttaaaagaaccatcctagatggaagaaacaatgtaatgtatgtatttattgttaaggatttctatcttgcccatatctctatcttaaccaccct

SEQ ID NO: 303805 - DNA, 596 bp, Homo sapiens
tattatattggaagtgagcatttaatatttatatagttgtctacttcaagagtttctgattatatacatcagaaaaataaaatttttgataataaaatatattcaaaggatcctcccaaacatcccacagtaacacagcacatgatctaacaaccctaatagtcacaacagtccacataatgtctcattgtatatgcttccggttttaatttgaaaacagcctgtactttctcatccctagtaggcagaaaagaatagctgttcaccatttcaagcctctttatttgtttgaaaaatgcattcagtgccagtgagatttacatacatttttagtaataaaaaagtaaaagttttttccttaacggcacaaatcaacctcagttactgtaaactactttatgaaatactttwataaagtattagtacttgcttttaaaagttatgctgttcaaagagattttgaaaataccttaatgaaacacacaaagtgattacctgtaggttaaaagaaccatcctagatggaagaaacaatgtaatgtatgtatttattgttaaggatttctatcttgcccatatctctatcttaaccaccct

SEQ ID NO: 303806 - DNA, 571 bp, Homo sapiens
ttcccatggtcttgaacagctctgcacctctgtctttgcaggacacagcctccctcccagccrctttcatgggctggcattgagtgtctgcagctttttcaggtgcacagtgcaagctgtcggtacagctaccattctggggtctgaaggatgatggcattcttttcacatctccactaggcagtgccccagtggggactctgtgtgggggtgcccaccccacatttccatttcacaatatcctagcaggggttctccatgagcaccctgcccctgcagcaaacttctgcttgaacatccaggtgcttccatacgttctctgaaatctaggcagaggttgccaaatcaattcgtgacttctgtgtaccctcaggctcaacatgtaaaacctgccaaggcttggggctagcacccttggaagccacggcctgagctgtaccttggccccttttagtcatggctagagcagctgggatgcagggcaccaggtccctagactgcacatagagggaacctgagcctgcctcatgaaaccattttttcctctaaaacctcccagcctgtgaggaga

SEQ ID NO: 303807 - DNA, 566 bp, Homo sapiens
ttaatgatcttacagttccatgtggctggggaggcctcacwatcattgcagaaggtgagaggcatgtctcacatggcagcagacaagagaagagagcttgtgcagggaaacttccctttataaaattatcagatcacatgaaacttactatcatgagaacagcatgggaaagacctgctcccatgatttaattacctcccaccaggtccctctgacaacacatgggaattcatggtgagatttgggtggggacacatcactagataacagcaaagctgtacaattcttaaacattgtcatggaaaactaattccacaactctactttgaactatatgtgatgttgtttacattcatcataccctctttatgctaaactaaaatatttagctgtaatttatgataactatttatagttcctctttctttccctctctgaacttcctgcaataccctgcaaagttggtatattatctacctttttcctttacttttactatttttgtgaacaaaaatgtcagaagatgaagtattttaagtcaatttttttttaaatggtgaaaaatt

SEQ ID NO: 303808 - DNA, 566 bp, Homo sapiens
ttaatgatcttacagttccatgtggctggggaggcctcacaatcattgcagaaggtgagaggcatgtctcacatggcagcagrcaagagaagagagcttgtgcagggaaacttccctttataaaattatcagatcacatgaaacttactatcatgagaacagcatgggaaagacctgctcccatgatttaattacctcccaccaggtccctctgacaacacatgggaattcatggtgagatttgggtggggacacatcactagataacagcaaagctgtacaattcttaaacattgtcatggaaaactaattccacaactctactttgaactatatgtgatgttgtttacattcatcataccctctttatgctaaactaaaatatttagctgtaatttatgataactatttatagttcctctttctttccctctctgaacttcctgcaataccctgcaaagttggtatattatctacctttttcctttacttttactatttttgtgaacaaaaatgtcagaagatgaagtattttaagtcaatttttttttaaatggtgaaaaatt

SEQ ID NO: 303809 - DNA, 566 bp, Homo sapiens
ttaatgatcttacagttccatgtggctggggaggcctcacaatcattgcagaaggtgagaggcatgtctcacatggcagcagacaagagaagagagcttgtgcagggaaacttccctttataaaattatcagatcacatgaaacttactatcatgagaacagcatgggaaagacctgctcccatgatttaattacctcccaccaggtccctctgacaacacatgggaattcatggtgagatttgggtggggacacatcactagataacagcaaagctgtacaattcttaaacattgtcatggaaaastaattccacaactctactttgaactatatgtgatgttgtttacattcatcataccctctttatgctaaactaaaatatttagctgtaatttatgataactatttatagttcctctttctttccctctctgaacttcctgcaataccctgcaaagttggtatattatctacctttttcctttacttttactatttttgtgaacaaaaatgtcagaagatgaagtattttaagtcaatttttttttaaatggtgaaaaatt

SEQ ID NO: 303810 - DNA, 566 bp, Homo sapiens
ttaatgatcttacagttccatgtggctggggaggcctcacaatcattgcagaaggtgagaggcatgtctcacatggcagcagacaagagaagagagcttgtgcagggaaacttccctttataaaattatcagatcacatgaaacttactatcatgagaacagcatgggaaagacctgctcccatgatttaattacctcccaccaggtccctctgacaacacatgggaattcatggtgagatttgggtggggacacatcactagataacagcaaagctgtacaattcttaaacattgtcatggaaaactaattccacaactctactttgaactatatgtgatgttgtttacattcatcataccctctttatgctaaactaaaatatttagctgtaatttatrataactatttatagttcctctttctttccctctctgaacttcctgcaataccctgcaaagttggtatattatctacctttttcctttacttttactatttttgtgaacaaaaatgtcagaagatgaagtattttaagtcaatttttttttaaatggtgaaaaatt

SEQ ID NO: 303811 - DNA, 255 bp, Homo sapiens
ttcctttacttttactatttttgtgaacaaaaatgtcagaagatgaagtattttaagtcaatttttttttaaatggtgaaaaattttaaacactgtgaggggccaataaaagagattattttcattgtgagggacattttagcatgagtcaaatcacatgacagtcaattttgttctttgattaatgtacaggtacaatgaatttmagttatgggagaacttctctttttcctttgacttattctctcaattttt

SEQ ID NO: 303812 - DNA, 255 bp, Homo sapiens
ttcctttacttttactatttttgtgaacaaaaatgtcagaagatgaagtattttaagtcaatttttttttaaatggtgaaaaattttaaacactgtgaggggccaataaaagagattattttcattgtgagggacattttagcatgagtcaaatcacatgacagtcaattttgttctttgattaatgtacaggtacaatgaatttaagttatgggagaacttctctttytcctttgacttattctctcaattttt

SEQ ID NO: 303813 - DNA, 571 bp, Homo sapiens
ttaaacactgtgaggggccaataaaagagattattttcattgtgagggacattttagcatgagtcaaatcacatgacagtcaattttgttctttgattaatgtacaggtacaatgaatttaagttatgggagaacttctctttttcctttgacttattctctcaatttttgcactctcatttttgtttttttgtttttttgtttttttttttttgtaaagagtttctagtaaggactatgtgttaatcagttttaagaacacagattttatcaaagaaaattatctctktaaaatatttgcactaatggaaaaatatgtgaaccacccagtcttattttattggaccccaagttagtttgtgtttgtgtgtatgtgtgggtatttatctgatatcaaccattatcttttaacatcagcatgaaacaacatgctggtctgaaacataaaaatatatatcactcttaccaaagccagtctgtattttaattgctttttcctgaaagtggaatcatgtaaaacttaaaaacagattgaaatgaaagggaaaaatttgattctgtaattaactta

SEQ ID NO: 303814 - DNA, 571 bp, Homo sapiens
ttaaacactgtgaggggccaataaaagagattattttcattgtgagggacattttagcatgagtcaaatcacatgacagtcaattttgttctttgattaatgtacaggtacaatgaatttaagttatgggagaacttctctttttcctttgacttattctctcaatttttgcactctcatttttgtttttttgtttttttgtttttttttttttgtaaagagtttctagtaaggactatgtgttaatcagttttaagaacacagattttatcaaagaaaattatctctgtaaaatatttgcactaatggaaaaatatgtgaacmacccagtcttattttattggaccccaagttagtttgtgtttgtgtgtatgtgtgggtatttatctgatatcaaccattatcttttaacatcagcatgaaacaacatgctggtctgaaacataaaaatatatatcactcttaccaaagccagtctgtattttaattgctttttcctgaaagtggaatcatgtaaaacttaaaaacagattgaaatgaaagggaaaaatttgattctgtaattaactta

SEQ ID NO: 303815 - DNA, 571 bp, Homo sapiens
ttaaacactgtgaggggccaataaaagagattattttcattgtgagggacattttagcatgagtcaaatcacatgacagtcaattttgttctttgattaatgtacaggtacaatgaatttaagttatgggagaacttctctttttcctttgacttattctctcaatttttgcactctcatttttgtttttttgtttttttgtttttttttttttgtaaagagtttctagtaaggactatgtgttaatcagttttaagaacacagattttatcaaagaaaattatctctgtaaaatatttgcactaatggaaaaatatgtgaaccacccagtcttattttattggaccccaagttagtttgtgtttgtgtgtatgtgtgggtatttatctgatatcaaccattatcttttaacatcagcatgaaacaacatgctggtctgaaacataaaaatatatatcactcttaccaaagycagtctgtattttaattgctttttcctgaaagtggaatcatgtaaaacttaaaaacagattgaaatgaaagggaaaaatttgattctgtaattaactta

SEQ ID NO: 303816 - DNA, 538 bp, Homo sapiens
atcagcatgaaacaacatgctggtctgaaacataaaaatatatatcactcttaccaaagccagtctgtattttaattgctttttcctgaaagtggaatcatgtaaaacttaaaaacagattgaaatgaaagggaaaaatttgattctgtaattaacttaccatgtgaccttcaccacactgatggtccttacagatctaaatttctatatctgtaaaataaagaaggttgattttacatgatttcaaaaaatatatcatttttttgacagtcatagaagttttatataattctctattctagtctactgcaaaggaatagcagcaggtgaaaactataatgtttgaccctgaagattattatgtgatatgtgtaagggtcttaatgtgtacaattccatttttaggggctcaagagataaaatttcttttccaaaatggataaatacaaaatcatttttgcaataaaaatgtattgtgarggaatcttttgaatcaatgtgattacttattgtggaagatacaggccatatcgcatag

SEQ ID NO: 303817 - DNA, 538 bp, Homo sapiens
atcagcatgaaacaacatgctggtctgaaacataaaaatatatatcactcttaccaaagccagtctgtattttaattgctttttcctgaaagtggaatcatgtaaaacttaaaaacagattgaaatgaaagggaaaaatttgattctgtaattaacttaccatgtgaccttcaccacactgatggtccttacagatctaaatttctatatctgtaaaataaagaaggttgattttacatgatttcaaaaaatatatcatttttttgacagtcatagaagttttatataattctctattctagtctactgcaaaggaatagcagcaggtgaaaactataatgtttgaccctgaagattattatgtgatatgtgtaagggtcttaatgtgtacaattccatttttaggggctcaagagataaaatttcttttccaaaatggataaatacaaaatcatttttgcaataaaaatgtattgtgagrgaatcttttgaatcaatgtgattacttattgtggaagatacaggccatatcgcatag

SEQ ID NO: 303818 - DNA, 621 bp, Homo sapiens
aatgtcttaagtgatggatagacagagaggtaagaagggtccaatcaaatgctgaaatgttaataaaacccagatcacaggcggtgatgatcaaatgaattgaacaggcttaggagaaatccgtgaaagaaagaaatctgtatccctgggatctttccatttttgagaatatattacatttgaatctcttagggatgtgtgattccccttccctttaaaatagttacagtataactttcattaaaatcttggattttgtcagtcatagcagacaatagcattttatgtcctgtgaagaattgtatgcataattttggaaacaagacaaaggaaagaggctctctaagctgttagaaacaaaggatttttaaaatctttcttctctcatacctccattaaggttgtcttttctcctttaaagctataagaaatatwctgaatactaatgtgacagaaccagatgcaatccccaaatatcatatttacttaatataaattcatagtccttacctttaaggagatttgacaattcactttgtcttttagccttggggtagtcaggaaagttaggcacaatgttttaatgctcattccttctcttttgctcttagctgtcattaa

SEQ ID NO: 303819 - DNA, 640 bp, Homo sapiens
ggaagctttactgaaatgaaaaggagttgtgtgtaagggtgggaataactattctaagagctttttcatggttctcgttgccagggaaaccactgctttgtctgtacatgtttggaatggctgcctcattagaactcaggctcctagacagtcacttgtaatactggtaaagtgaaaggaatgaacctattttagttgattaacttcaaattaataaaaatagcatatttaaaagatagakgtttaaaagctaaacatatagaattatgggggaacaatgaagttaatattgattaggcctattcagccacttgtgtgagaggaagaataattttattttttactttctctttgcctttttacatatttatggggagtaagcaaatggactattatatgttaatgccaccaaataaacttgggatatgatagatcctgattttttcacaaatatacagatttttttcttatgaattcatttttttttccttgccatgactggcctgtgtcatggctaaaatattatcaaaacagactggatttactggctctcaggggcacaaaaggtagtgaaaacctagattgcaaatccatctctgggtagtttcatttttcttgaaagaacaaaagaagcagcaca

SEQ ID NO: 303820 - DNA, 371 bp, Homo sapiens
aaaatctcaatgtctaggtaccccagatcaattacatcaacatttctgaaagtcagactcagaattttatttttattttatgagacagagtctctttcttcctctgttgcccaggctggagtgcwgtggcacaatcttggcccactgcaacctctgcctcctggattcaagtgattctcctgcctcagccttcctagtggctgggattacaggcgtgcaccaccatgccaggcttaattttgtatttttagtagagatggggtttcaccacgctggccaggctggtctcaaactcttgacctcaggtgatcctgtcgtctcggcctcccaaaggtactgctgggattacaggcctgaaccactgcacccag

SEQ ID NO: 303821 - DNA, 371 bp, Homo sapiens
aaaatctcaatgtctaggtaccccagatcaattacatcaacatttctgaaagtcagactcagaattttatttttattttatgagacagagtctctttcttcctctgttgcccaggctggagtgctgtggcacaatcttggcccactgcaacctctgcctcctggattcaagtgattctcctgcctcagccttcctagtggctgggattacaggcgtgcaccaccatgccaggcttaattttgtatttttagtagagatggggtttyaccacgctggccaggctggtctcaaactcttgacctcaggtgatcctgtcgtctcggcctcccaaaggtactgctgggattacaggcctgaaccactgcacccag

SEQ ID NO: 303822 - DNA, 371 bp, Homo sapiens
aaaatctcaatgtctaggtaccccagatcaattacatcaacatttctgaaagtcagactcagaattttatttttattttatgagacagagtctctttcttcctctgttgcccaggctggagtgctgtggcacaatcttggcccactgcaacctctgcctcctggattcaagtgattctcctgcctcagccttcctagtggctgggattacaggcgtgcaccaccatgccaggcttaattttgtatttttagtagagatggggtttcrccacgctggccaggctggtctcaaactcttgacctcaggtgatcctgtcgtctcggcctcccaaaggtactgctgggattacaggcctgaaccactgcacccag

SEQ ID NO: 303823 - DNA, 371 bp, Homo sapiens
aaaatctcaatgtctaggtaccccagatcaattacatcaacatttctgaaagtcagactcagaattttatttttattttatgagacagagtctctttcttcctctgttgcccaggctggagtgctgtggcacaatcttggcccactgcaacctctgcctcctggattcaagtgattctcctgcctcagccttcctagtggctgggattacaggcgtgcaccaccatgccaggcttaattttgtatttttagtagagatggggtttcaccacgctggccaggctggtctcaaactcttgacctcaggtgatcctgtmgtctcggcctcccaaaggtactgctgggattacaggcctgaaccactgcacccag

SEQ ID NO: 303824 - DNA, 602 bp, Homo sapiens
gataataacctgagagacttctcagtctccaaaattgcactatttctaaaatataagtaaatattcccttcatcctaaatctttcaaagtttaagaatgtcattgatagtcttcgctttagaggaaaatacagagatcaagaaaaaaggtctggaaaaatgaaaaaaataattttaaaagcttcctcagagagaaagagtttcagacrgatatagtttaactatattaactcagccatgaatttcttacttctcttctagtaccggttactcttttgctgaatgaatctaccttatgaacacaagttaaaaaaaatgtacccatgataagtaaaacattattaaatacagctatttttataaaagtttcaagtcaaaaatggatccatttctgttcttcttcttacagggagttgcttatttcccatccttcattaaaagggccaaaaagtatactcatctgtagtagagaatatgcataatgtttattaactcatgcttattataatgttaacacattatctgccactccaagaatgtgggcatatttagaaaatgttcaatatggtatctataaattattctatggcagactttgattta

SEQ ID NO: 303825 - DNA, 562 bp, Homo sapiens
taaatgttgggacaaattatgaaggatttagaatattagatgtgagaatttgaactttattcataaataatcaaaaaaagaaaatgattktaaattgctcaaaaaagggctatccatcaaaaggagagtcagggaataacatgtattttgtgcattcaaaaaaaaaaatcaaaagactgtcttccactttcaccttttaagtgtaagggtcacagaaggtaaagaaagtagaaataaatttgagaaatcattgaaaaaaagaatttaagtatatgagtaggcataggcaaaccaaggtaatgacaatgtctgtgaccacaaatttttgatcagtttgacaatagtacctttgacataaataggagaaacttgagtcaggaactttgtcctttactcatagcacctggcataagagctggagccagttttatgtttttgctagtttttgtttgttttctttatacataaaacaaagtaaaaaatgaaaatggccagaaaaaagttggaaatttgagactggatctcaggataggtattatgatgtatttttagtatactcatt

SEQ ID NO: 303826 - DNA, 529 bp, Homo sapiens
aattcaagaatgggtgatttcaaatgtaggaaaatgtgagctaggatgatttataggtacataaaggagctctttatagatggtcactgatggtttcaataaagtagaaatgagttcatttgtcaagaataaagaaattgggaccattgggagcttaaggtgrttaggcaaagcttggcatagatgctgacagaagtgtatcagaaacgtaacaggtccaatcttactgatctacctttattgattcatttgtttacttgttcattcactttttatttaacaaagaatttagtcataacattttatattatatttatgtatatatttaaattatatttatatttatttagctccccaccccaaacaggccccagtgtgtgatgttcccctgcctgtgtccatgtgttctcgtttttcaactcccacttatgagtgagaacatgcgatatttgtttttctgttcctgtgtatttttgctgagaatgatggtttcccacttcatctgtgtccccaggaaggacatgaacta

SEQ ID NO: 303827 - DNA, 529 bp, Homo sapiens
aattcaagaatgggtgatttcaaatgtaggaaaatgtgagctaggatgatttataggtacataaaggagctctttatagatggtcactgatggtttcaataaagtagaaatgagttcatttgtcaagaataaagaaattgggaccattgggagcttaaggtgattaggcaaagcttggcatagatgctgacagaagtgtatcagaaacgtaacaggtccaatcttactgatctacctttattgattcatttgtttacttgttcattcacttttyatttaacaaagaatttagtcataacattttatattatatttatgtatatatttaaattatatttatatttatttagctccccaccccaaacaggccccagtgtgtgatgttcccctgcctgtgtccatgtgttctcgtttttcaactcccacttatgagtgagaacatgcgatatttgtttttctgttcctgtgtatttttgctgagaatgatggtttcccacttcatctgtgtccccaggaaggacatgaacta

SEQ ID NO: 303828 - DNA, 529 bp, Homo sapiens
aattcaagaatgggtgatttcaaatgtaggaaaatgtgagctaggatgatttataggtacataaaggagctctttatagatggtcactgatggtttcaataaagtagaaatgagttcatttgtcaagaataaagaaattgggaccattgggagcttaaggtgattaggcaaagcttggcatagatgctgacagaagtgtatcagaaacgtaacaggtccaatcttactgatctacctttattgattcatttgtttacttgttcattcactttttatttaacaaagaatttagtcataacattttatattatatttatgtatatatttaaattatatttatatttatttagctccccaccccaaacaggccccagtgtgtgatgttcccctgcctgtgtycatgtgttctcgtttttcaactcccacttatgagtgagaacatgcgatatttgtttttctgttcctgtgtatttttgctgagaatgatggtttcccacttcatctgtgtccccaggaaggacatgaacta

SEQ ID NO: 303829 - DNA, 579 bp, Homo sapiens
tgtgaaaacatcttcagaaataactcagtccatgctgtccagatgcagttctgttctgtagagatgaagaataagaatcatcaaagtggaaaaacctctgtcctgctccaaattctggtccacacaggagtagtactactggagagaaaagccatacatgtcccaaatgaaggaaagcctttacgttatcagtcatttcttatgagacatatgaaacttcacactggagagaaaccttatgaatgtaacaaaagtgagaaaggctttagatattccctacaccttaataaayatttaagaaagaacattctggagaagccctatggatgtaaggaatgtgggaaagccttcagcaaggctcaaaacatgcacatataaggagtcacactggaagaaaccctataaatgtgataaatgtgaaaaagactttgcaaagtcaccagaattaaaagccatcttaagattcacaatagtgagaagccctgtgagtggcagggaaatcatcattaatttttcaccgtactgaacatgtgaggaggacatactggaagggagctcaatgagttaacatgcatgaga

SEQ ID NO: 303830 - DNA, 482 bp, Homo sapiens
tctggagaagccctatggatgtaaggaatgtgggaaagccttcagcaaggctcaaaacatgcacatataaggagtcacactggaagaaaccctataaatgtgataaatgtgaaaaagactttgcaaagtcaccagaattaaaagccatcttaagattcacaatagtgagaagccctgtgagtggcagggaaatcatcattaatttttcaccrtactgaacatgtgaggaggacatactggaagggagctcaatgagttaacatgcatgagaacatctttcctgaactctcctatcttacagaagtgtgaaaagaaaccctctgaaggtaaagtctatggaaagcctttcatcttcattcatcgtgagtagatatttgttctcacactggagagaagctatgaaagtaaggaatatgaaaaaagcctcagtgttgtctcagactcatagttcatacaagaactcacacagcagagactgctta

SEQ ID NO: 303831 - DNA, 482 bp, Homo sapiens
tctggagaagccctatggatgtaaggaatgtgggaaagccttcagcaaggctcaaaacatgcacatataaggagtcacactggaagaaaccctataaatgtgataaatgtgaaaaagactttgcaaagtcaccagaattaaaagccatcttaagattcacaatagtgagaagccctgtgagtggcagggaaatcatcattaatttttcaccgtactgaacatgtgaggaggacatactggaagggagctcaatgagttaacaygcatgagaacatctttcctgaactctcctatcttacagaagtgtgaaaagaaaccctctgaaggtaaagtctatggaaagcctttcatcttcattcatcgtgagtagatatttgttctcacactggagagaagctatgaaagtaaggaatatgaaaaaagcctcagtgttgtctcagactcatagttcatacaagaactcacacagcagagactgctta

SEQ ID NO: 303832 - DNA, 482 bp, Homo sapiens
tctggagaagccctatggatgtaaggaatgtgggaaagccttcagcaaggctcaaaacatgcacatataaggagtcacactggaagaaaccctataaatgtgataaatgtgaaaaagactttgcaaagtcaccagaattaaaagccatcttaagattcacaatagtgagaagccctgtgagtggcagggaaatcatcattaatttttcaccgtactgaacatgtgaggaggacatactggaagggagctcaatgagttaacatgcwtgagaacatctttcctgaactctcctatcttacagaagtgtgaaaagaaaccctctgaaggtaaagtctatggaaagcctttcatcttcattcatcgtgagtagatatttgttctcacactggagagaagctatgaaagtaaggaatatgaaaaaagcctcagtgttgtctcagactcatagttcatacaagaactcacacagcagagactgctta

SEQ ID NO: 303833 - DNA, 482 bp, Homo sapiens
tctggagaagccctatggatgtaaggaatgtgggaaagccttcagcaaggctcaaaacatgcacatataaggagtcacactggaagaaaccctataaatgtgataaatgtgaaaaagactttgcaaagtcaccagaattaaaagccatcttaagattcacaatagtgagaagccctgtgagtggcagggaaatcatcattaatttttcaccgtactgaacatgtgaggaggacatactggaagggagctcaatgagttaacatgcatgagaacatctttcctgaactctcctatcttacagaagtgtgaaaagaaaccctctgaaggtaaagtctatggaaagcctttcatcttcattcatcgtgagtagatatttgttctcacactggagagaagctatgaaagtaaggaatatgaaaaaagcctcagtgttgtctcagactcatrgttcatacaagaactcacacagcagagactgctta

SEQ ID NO: 303834 - DNA, 634 bp, Homo sapiens
tcttcttttgtgcccaagaggacacaattcccaggaggctgcatgtggtctcctaggacaagcctgtgggcacccactggctgcagttccacctttccttccctggactctcaggaagacatgagttctggattcagctgaactgagctcaagttcargttctgtgactcactggctctgtaattctgggtaagtctcttgctctccttgagtctcatatcctccttggtaaaatggagaggtagagctattgttagattttgaaggcaaggcaagggttaaagaaagacagagaaagacagttgacggcttcaacagcaacacctttattactagcaaaaccctgcagaggaggaaaccagcttactgccagcaccaactgcctctcacaggctggggtgatcatgggactgggaaggaggggtgtgggcggtagagcttgctgcccggcaggatatggcaaggatgttcctgcagtcaggctgttgggcctttgcccgggagggtgcgataaggatgtttctacagtcaggtgatcaggaaggatgcttctcacggccagagttcccaaggaatgtttcattctgaccagggtgtgcaaaacggctgcaggtttacaaaatggtacaggtta

SEQ ID NO: 303835 - DNA, 631 bp, Homo sapiens
ccatgtaatgacagaggcagacagtggggtgatgcatgcacaagtcaaggaacaccaaaaattgctggcaaccaccagaaactagaagacacaygtggaacggactttaagtcagaacttttcagaaggaaccaatcttgccaacaccttgatttcaggcttctagcttacagagctgtgagacaacaaatgtttgttttttttttttaagccacctatattgtgatactttgttatggcagccctagaaagctaatacaatagtcaaagggaaataaattatctccctgtagcctaaaactttaaaataatttttttttcccagaggccttttctttcatttgttggttttggtttctatacaatagatcaaacatcttcactaatagttttcttagacattatttttggaaacatttttaaaggactcatggaaatctataatctatgctgattgactacttccatgtaaagaatttgatatttttcatagttactactggctgttactgtgctattcctaattgtcttgaatgttgcgtatgtagcatgaaatcccaatttttattgaagtaggatatatatatatataactcttctatggttgtcttcaagccggagcctatttgtt

SEQ ID NO: 303836 - DNA, 631 bp, Homo sapiens
ccatgtaatgacagaggcagacagtggggtgatgcatgcacaagtcaaggaacaccaaaaattgctggcaaccaccagaaactagaagacacatgtggaacggactttaagtcagaacttttcagaaggaaccaatcttgccaacaccttgatttcaggcttctagcttacagagctgtgagacaayaaatgtttgttttttttttttaagccacctatattgtgatactttgttatggcagccctagaaagctaatacaatagtcaaagggaaataaattatctccctgtagcctaaaactttaaaataatttttttttcccagaggccttttctttcatttgttggttttggtttctatacaatagatcaaacatcttcactaatagttttcttagacattatttttggaaacatttttaaaggactcatggaaatctataatctatgctgattgactacttccatgtaaagaatttgatatttttcatagttactactggctgttactgtgctattcctaattgtcttgaatgttgcgtatgtagcatgaaatcccaatttttattgaagtaggatatatatatatataactcttctatggttgtcttcaagccggagcctatttgtt

SEQ ID NO: 303837 - DNA, 631 bp, Homo sapiens
ccatgtaatgacagaggcagacagtggggtgatgcatgcacaagtcaaggaacaccaaaaattgctggcaaccaccagaaactagaagacacatgtggaacggactttaagtcagaacttttcagaaggaaccaatcttgccaacaccttgatttcaggcttctagcttacagagctgtgagacaacaaatgtttgttttttttttttaagccacctatattgtgatactttgttatggcagccctagaaagctaatacaatagtcaaarggaaataaattatctccctgtagcctaaaactttaaaataatttttttttcccagaggccttttctttcatttgttggttttggtttctatacaatagatcaaacatcttcactaatagttttcttagacattatttttggaaacatttttaaaggactcatggaaatctataatctatgctgattgactacttccatgtaaagaatttgatatttttcatagttactactggctgttactgtgctattcctaattgtcttgaatgttgcgtatgtagcatgaaatcccaatttttattgaagtaggatatatatatatataactcttctatggttgtcttcaagccggagcctatttgtt

SEQ ID NO: 303838 - DNA, 631 bp, Homo sapiens
ccatgtaatgacagaggcagacagtggggtgatgcatgcacaagtcaaggaacaccaaaaattgctggcaaccaccagaaactagaagacacatgtggaacggactttaagtcagaacttttcagaaggaaccaatcttgccaacaccttgatttcaggcttctagcttacagagctgtgagacaacaaatgtttgttttttttttttaagccacctatattgtgatactttgttatggcagccctagaaagctaatacaatagtcaaagggaaataaattatctccctgtagcctaaaactttaaaakaatttttttttcccagaggccttttctttcatttgttggttttggtttctatacaatagatcaaacatcttcactaatagttttcttagacattatttttggaaacatttttaaaggactcatggaaatctataatctatgctgattgactacttccatgtaaagaatttgatatttttcatagttactactggctgttactgtgctattcctaattgtcttgaatgttgcgtatgtagcatgaaatcccaatttttattgaagtaggatatatatatatataactcttctatggttgtcttcaagccggagcctatttgtt

SEQ ID NO: 303839 - DNA, 579 bp, Homo sapiens
tataactagactccttaaaggagagcttgtcttggggtgagaacagactgttggaggacctgagaaaaagtagaatctgaaaggtaagttaggatactattgcctgatgtcggygtgtctggagtatttctttcatccattacactgtgttaattaatttagagttgagatagtgtaaattggtacgctaatacctctgaaaaaattgcttctactgaaaggacgaagatctgagagctggttctttgttatcttaactcttaagtcactgaccttctctacttccccgccttgatttcatcaggttctattttcagggctacccatggggcctattgaacaaataagctattggacttcagagcataatctccaatattttaaagtcagtgaatattcttttcatccagtaccaatttccagatttttctttaaacaggcaatctctgtttagctgtataaaaatgaacttctgcctctcatgtttgcaagggtaggagaggttttctttctaagactgcagaatataaataaatatagtttagtcaagggataagctagaagcagcatgttcttgtt

SEQ ID NO: 303840 - DNA, 582 bp, Homo sapiens
ctcaccaacgctggttactttccatattttttattatggtcatcttaatgtgcattcagtggtatctcattgttgttttaatttgcatttctctaatgaccagtgatggtgaacatcttttcatatacttgttgaccatgtgtgcatcttctttggaaaaagtctactcaagactttcgtaatttttaattgggttgtgtgtctttttgttgttgaatgtrtattctggatactagaccgttatcagacgtatgatttgcaaatattttcttccattttgtgagttgtctttttactttcttgatagtttcctttgataaacaaaagtttttaattttgataaagtccaagttatctgttttcttttgtcacttgtgcttctgctatcatattttaaaaacaaattgtgaaatataatgtcatgaagatttttgcctatgttttcttctaagagatatatagttttcactcttaggtctatgattcattttgtcttaatttttgtaaatggtgtgaggtaaggtccaaattcattcttttgcaagttgtcttgaaccatttgttgaagactattctttccct

SEQ ID NO: 303841 - DNA, 538 bp, Homo sapiens
tgaacgatccgtaggaagggtgatgagtcaaagagcaaaaggagacaccaggagacttctgggatgtgcataatattctctttcaagtttagctgttgcgggaagtcaggaacctggaagggagggaccggctgaagccatggcagaagaacataaattgtgaagatttcacagacatttattagttccccaaattaatacttttataatttcttacgcctgtctttactgcaatctctgaacataaattgtgaagatttcatggacacttatcacttcgccaatcaatatccttgtgatttcctatgcctgtctttactttaatctcttaatcccattatctttgtaaactgaggaggrtgtatgttgcctcaggaccatgtgatgattgtgttaactgcacaaattgtttgtagagcatgtgtgtttgaacaatatgaaatctgggcaccttgaaaaaagaacacgataacagcaatgttcagggagcaagagagataaccttaaactctgactgccagtgagccaggtggaacag

SEQ ID NO: 303842 - DNA, 626 bp, Homo sapiens
tgatttattttcacaaatctacgctgcctcacaccaattaaattgcacttttccaaatgtaatgctgagcagagccttaagtatcagctcaaattatctttccattggaaataatagaactaccttggttcacagtcattcattattttaaaaataatgggatgttatttgcagttttataatcatttatatctcttgattcaaaagacaactaacaatgggtctaataggtcttactaagtaaagcgatgaattctctaatcacgtgcatcaccccaacatgcaatccatcgatacttggtgttttgtctaattatatttttcccaaagcattgtaatgcatctgaagsattggctgtcacatttttttctaagttcagcaaatcagcctcttcctgtaagggatgatgagtgcgacaaaaagtgatcacatacaatccttctatttagtacctttgttctagcacatcccctccaaattatctgctcctcgccccattcaaagccagactagcattttggccatgtgttagaaccagctatgcatattgctcatctttgaagcagggaaaagttggggcagcaataaacataaaaagagtacagttaacaggataacaaggctc

SEQ ID NO: 303843 - DNA, 557 bp, Homo sapiens
aatttatatatacagaggttcagagcagttaatggttacctagttaatgaaattcagcatgagctcccatgtctgaaaggtctggggcaatcccagtatggggatgctagggaaacaattttcttctttatactttacaacaaaagagacaaaactgtccaactcttccctgatagaagactgagctgtagtgaatgaaatgtacttgctgggcttctattctttaaattactaaggctctagccargtcacttttatgctttaaaaaaaaatgtattgcctctttaaagtgaggttatttttatagctttagaactcctggaacagtaaacaggaggcaaatgtatcaggctttaaaggtgaaaggggttatttaagagtgttatcgaactagccagctgcagcatcagaaaaccataaacatttctcttcatagcagggctcagtgattcattaggccacccttctggagagggagggtctttataaacttagtgtcacaaaaccctggaggtatccagtcctctctgccatcctgctgtttaaggagtgaaaat

SEQ ID NO: 303844 - DNA, 557 bp, Homo sapiens
aatttatatatacagaggttcagagcagttaatggttacctagttaatgaaattcagcatgagctcccatgtctgaaaggtctggggcaatcccagtatggggatgctagggaaacaattttcttctttatactttacaacaaaagagacaaaactgtccaactcttccctgatagaagactgagctgtagtgaatgaaatgtacttgctgggcttctattctttaaattactaaggctctagccaagtcacttttatgctttaaaaaaaaatgtattgcctctttaaagtgaggttrtttttatagctttagaactcctggaacagtaaacaggaggcaaatgtatcaggctttaaaggtgaaaggggttatttaagagtgttatcgaactagccagctgcagcatcagaaaaccataaacatttctcttcatagcagggctcagtgattcattaggccacccttctggagagggagggtctttataaacttagtgtcacaaaaccctggaggtatccagtcctctctgccatcctgctgtttaaggagtgaaaat

SEQ ID NO: 303845 - DNA, 557 bp, Homo sapiens
aatttatatatacagaggttcagagcagttaatggttacctagttaatgaaattcagcatgagctcccatgtctgaaaggtctggggcaatcccagtatggggatgctagggaaacaattttcttctttatactttacaacaaaagagacaaaactgtccaactcttccctgatagaagactgagctgtagtgaatgaaatgtacttgctgggcttctattctttaaattactaaggctctagccaagtcacttttatgctttaaaaaaaaatgtattgcctctttaaagtgaggttatttttatagctttagaactcctggaacagtaaacaggaggcaaatgtatcaggctttaaaggtgaaaggggttatttaagagtgttatcgaactagccagctgcagcatcagaaaaccataaacatttctcttcatagcagggctcagtkattcattaggccacccttctggagagggagggtctttataaacttagtgtcacaaaaccctggaggtatccagtcctctctgccatcctgctgtttaaggagtgaaaat

SEQ ID NO: 303846 - DNA, 648 bp, Homo sapiens
  misc_feature (1)...(648): n = A,T,C or G
ctagcatattaaagacttcttaggcctgcaatagagatatttatgtttcttgtataacttagatttcccaaattcatttgacttcagaaccccatttcatgtcacatgagacaatattctattgccagaatattggcaataatgcataatggacaataatgcgtaacggatgaagagagtcagaaaaacccatgtagttaaaaatgggacctttgtatgtaaatctgtattttgccagtttactgaatttgtttaccatttctaagagtttttggtggcatctttaagtttttctatatatgagatgatgtatttgcaagagggayaatttgacttctttttttttccaatttggatgccttttatttttttctcttgcctgattgctatggctggcatttccagtactgcgttgaacaggagtggtgagagtgggcatccttgtcttgttctagttctagaggaagtgctttcaattttttctcattcaagtatgatgttagctgtgtaattgtcacataggacctttattaagttgaggtatattccttctatgcttaaattattaagagcttttattatgaagcggtgttgaattttatcaaactgataaatgaatttagtaaacttgcaagatacannnnnnnn

SEQ ID NO: 303847 - DNA, 590 bp, Homo sapiens
acaaatgcacgcaactagttttcccaaccaaaagtcaataaatctatgttataaatagtaacaaaatttaataaatattataatttttaaaaaataaaataactgtatgctttgggaccattcctacaggtctgtgactatatctctccctcaaatctgctggtctctgatcttcaggtttaatttcttccagaatcctatgcaacaagctcagccattcctcaaagcccagaagcctgtgtgtccttatctcagattacttttctttccatttgaaatkaccaaatagttctactgatgttttttttcaaatggcaagtggttctcttccatagaaggcctgatattgcttcagaaatctggcatgtgaactgtgactctctaattagggcttgtcagagaaacaacacatcatcattctttaccacagcaacatctgacaccatcagatttacagggtcatatggcatgagtggaagggcagcctgcattgcattctgagcctgttgcagaggcttctctttatcagagcccacttgacccttgcggttttccaagttggagcagtattctcatatgtggcatatgtt

SEQ ID NO: 303848 - DNA, 505 bp, Homo sapiens
ctactctaatgaacctatttctagacaatgataaagaatattgatcctctgtaatccattgctctaggatgctttgattctccaggacaggcatttccattgcaggtggatagataggcagagtaggcttgtgttcctaggagaaaccagagggagaagaagcttggaaaaatccattaggtayagtttatgacttgaatgaaacttaactgcttctacaccatgtcacattgcagatccataaggattacatgtgtggttttccatatttgaagatgatacagacccggaagcagagaagcccctgacttgtatttttatgacagtggaaattccctatgttcagtttctttgccttcttccccttgcaaaaaatatgctttttccaacaaataatcattgtgctcctaataagtgcaaccatgacagtcactggagacacagagctatgctagacccagatatgtttgttaaggccctcacagtctagtgaggaaaggaagca

SEQ ID NO: 303849 - DNA, 558 bp, Homo sapiens
atctatggaactagatagcctaaacttaacctccggtcatcactctagtagcaaatgcaggcattctgatcatgtgttcatggcaccagggacagagacgaatgggcctttgtctggtgtcattataaattattctaaaataagtaaagccaagctaggsaaagacagactttttccctctttgcttgtttgaatttcactttctctaagaacttcaacattaagaagaactttattattaaatttcttaaataataaatgctgaggaggcatgttacccaaaggatggatttagtttcaggaggtagcaaatatttcagaggcaaacagtcaaagaattctattccttgaactgaaggaaataatatagcatttattgagcttcagttttatatttgttatctcatttgacttatttctttcaacactttcccatggatttattaatattcctatcttatagtagagaaaactgagatttgcttctgaggcttttttctaagatcacacagttcaccagactaagaacagagattttaaaagtcagattttctgatg

SEQ ID NO: 303850 - DNA, 558 bp, Homo sapiens
atctatggaactagatagcctaaacttaacctccggtcatcactctagtagcaaatgcaggcattctgatcatgtgttcatggcaccagggacagagacgaatgggcctttgtctggtgtcattataaattattctaaaataagtaaagccaagctagggaaagacagactttttccctctttgcttgtttgaatttcactttctctaasaacttcaacattaagaagaactttattattaaatttcttaaataataaatgctgaggaggcatgttacccaaaggatggatttagtttcaggaggtagcaaatatttcagaggcaaacagtcaaagaattctattccttgaactgaaggaaataatatagcatttattgagcttcagttttatatttgttatctcatttgacttatttctttcaacactttcccatggatttattaatattcctatcttatagtagagaaaactgagatttgcttctgaggcttttttctaagatcacacagttcaccagactaagaacagagattttaaaagtcagattttctgatg

SEQ ID NO: 303851 - DNA, 612 bp, Homo sapiens
caataaatgacaactattactattatcatttatgctgatgacattattggcatgtttacactatccattgacatctatggccattayataaaaaggcaaaaattcatcagcataatataccgttctgttacacaaatgagtcatcatgaatgctttattttcaacaattatattttttatctattatcttttttaaaacttggtcttgtattccattccctctctgttatctggaattactttcagttttttcacgaagaccaaaatgttgttcttcatatcgaataaatgtattcttagccttagatttcaaattcaatgttattctccctaagatatttaacatgcttttttgttgttatgtttattttatttattattatactttaagttctggaatacatgtgcagaacatgcatgtttgttacataggtatacacgtgccatggtggtttgctgcactcatcaacccgtcatctatattaggtatttctcctaatgctatcccctcccccaaccccccaatctcctgacaggcctcagtgtgtgatgttcccctccctgtgtccatgtgttctctttgttcaactcccttatgagtgagaaaacgtg

SEQ ID NO: 303852 - DNA, 559 bp, Homo sapiens
catcatagttctgcatgttgatgaagtctcttgaaatttagatcaggaggcaatcaaacagcaatgagaaaggaactctatacactgttctaattgaccttcaggaaaagaatttagtcccttactgaattttgaaacaccacagcttgatgaaaaagatccttggctccagtttctaatttagctttaatatttgctagcagacattttttttttaacctctccttgttttagttattcaatctgcaaaacaaaaggacaatgcttacatttaagagttattttaagaattcatacagtgtgcctaggatagtgtctggtatatggtagatgttttataaatgttaatttcagtttttctctattcstcttcagatctaggtccatattaattctctttatccactggagttttttttttttttaaactatgagtggcttaaaacccatgccacgctaaagatgatgaaagggaagggtaagcttttttgtgtggagaggagggttgagaggccggcagtgactctgaaccagcagtgaggcattgagccatctatac

SEQ ID NO: 303853 - DNA, 565 bp, Homo sapiens
cttacagcttctcagaaccacctgggctgtttttcccctcttagtaggctgagcttctggcaagagagcgtcccctggtgtcgggttgtgagatgaaggttgtggccatagtgcatgtgggatcttcacttayatacactggggagcgttcttacctgaataacccaatggacctccattagaggagtgtgcttttaaagtgcagattcccaggtttcactttccaaatggctggttctggagggctaatgtaggcccaagaaatctgtattctaaagaagaccccaaggggattctgatgcggatgatccctgaaaaatatctgagagcttctgaatgaccttatagcaatattggaaaggttatgagttggaaatgttgactgccctagtctaaccagttctagctttaactacctaatatggcctttccagtgtatctgatcacacacccccatcccccgcaacacacacacgtctacacacaatctttatttttgacaaaaagaaaagacaagttgatatgggtaagttaggaaaagataacttagaagtaaaataaatca

SEQ ID NO: 303854 - DNA, 565 bp, Homo sapiens
cttacagcttctcagaaccacctgggctgtttttcccctcttagtaggctgagcttctggcaagagagcgtcccctggtgtcgggttgtgagatgaaggttgtggccatagtgcatgtgggatcttcacttacatacactggggagcgttcttacctgaataacccaatggacctccattagaggagtgtgcttttaaagtgcagattcccaggtttcactttccaaatggctggttctggagggctaatgtaggcccaagaaatctgtattctaaagaagmccccaaggggattctgatgcggatgatccctgaaaaatatctgagagcttctgaatgaccttatagcaatattggaaaggttatgagttggaaatgttgactgccctagtctaaccagttctagctttaactacctaatatggcctttccagtgtatctgatcacacacccccatcccccgcaacacacacacgtctacacacaatctttatttttgacaaaaagaaaagacaagttgatatgggtaagttaggaaaagataacttagaagtaaaataaatca

SEQ ID NO: 303855 - DNA, 565 bp, Homo sapiens
cttacagcttctcagaaccacctgggctgtttttcccctcttagtaggctgagcttctggcaagagagcgtcccctggtgtcgggttgtgagatgaaggttgtggccatagtgcatgtgggatcttcacttacatacactggggagcgttcttacctgaataacccaatggacctccattagaggagtgtgcttttaaagtgcagattcccaggtttcactttccaaatggctggttctggagggctaatgtaggcccaagaaatctgtattctaaagaagaccccaaggggattctgatgcggatgatccctgaaaaatatctgagagcttctgaatgaccttatagcaatattggaaaggttatgagtkggaaatgttgactgccctagtctaaccagttctagctttaactacctaatatggcctttccagtgtatctgatcacacacccccatcccccgcaacacacacacgtctacacacaatctttatttttgacaaaaagaaaagacaagttgatatgggtaagttaggaaaagataacttagaagtaaaataaatca

SEQ ID NO: 303856 - DNA, 565 bp, Homo sapiens
cttacagcttctcagaaccacctgggctgtttttcccctcttagtaggctgagcttctggcaagagagcgtcccctggtgtcgggttgtgagatgaaggttgtggccatagtgcatgtgggatcttcacttacatacactggggagcgttcttacctgaataacccaatggacctccattagaggagtgtgcttttaaagtgcagattcccaggtttcactttccaaatggctggttctggagggctaatgtaggcccaagaaatctgtattctaaagaagaccccaaggggattctgatgcggatgatccctgaaaaatatctgagagcttctgaatgaccttatagcaatattggaaaggttatgagttggaaatgttgactgccctagtctaaccagttctagctttaactacctaatatggcctttccagtgtatctgatcacacmcccccatcccccgcaacacacacacgtctacacacaatctttatttttgacaaaaagaaaagacaagttgatatgggtaagttaggaaaagataacttagaagtaaaataaatca

SEQ ID NO: 303857 - DNA, 600 bp, Homo sapiens
atgtcactggcattcaaggctattctcatgtaatgtcacagcaaataccctttttcatattgtgaaacaatttggctcttccactagccgtaaactacaccgcttcatccatcatcccttttaatattcatgtaaaattgggcatagtctccatggggataaggacataagtatgcatgctggaagtataaacaggcctgcgacattaatacctggcttttagacatgcttatgagggtaccctttgaacatttttagctcccttcagcctcttatttttttctctctaaactcctaggtcaagaaagtatcatgcatttggaatcctcacgtattatgtttgatcattggtaatttctggtatgtgtatttgcttcttagaagtcaagttctctggaggcaaagatcctagcttktaacaatcccccttatgtctttttcctgacaatattttctggcatttatatgccctgtactgtgctgaatgctatgtgtagaagacactgtgtttgtgacacataccttgtcttcaaattgctgatagagaagacaaaaacatacagaatattattgaagcaaggtgctgaatggtgcaggaat

SEQ ID NO: 303858 - DNA, 552 bp, Homo sapiens
aagacaacttgcaaaagaatgaatttggaccttacctcacaccatttacaaaaattaagacaaaatgaatcatagacctaagagtgaaaactatatatctcttagaagaaaacataggcgaaaatcttcatgacattatatttcacaatttgtttttaaaatatgatagcagaagcacacgtgacaaaagaaaacagataacttggactttatcaaaattaaaaacttttgtttatcaaaggaractatcaagagagtaaaaagacaactcacaaaatggaagaaaatatttgcaaatcatacgtctgataacggtctagtatccagaatatacattcaacaacaaaaagacaaacaacccaattaaaaattacgaaagtcttgagtagactttttccaaagaagatgcacacatggtcaacaagtatatgaaaagatgttcaccatcactggtcattagagaaatgcaaattaaaacaacaatgagataccactgaatgcacattaagatgaccataataaaaaatatggaaagtacaccagcgttggtga

SEQ ID NO: 303859 - DNA, 552 bp, Homo sapiens
aagacaacttgcaaaagaatgaatttggaccttacctcacaccatttacaaaaattaagacaaaatgaatcatagacctaagagtgaaaactatatatctcttagaagaaaacataggcgaaaatcttcatgacattatatttcacaatttgtttttaaaatatgatagcagaagcacacgtgacaaaagaaaacagataacttggactttatcaaaattaaaaacttttgtttatcaaaggagactatcaagaragtaaaaagacaactcacaaaatggaagaaaatatttgcaaatcatacgtctgataacggtctagtatccagaatatacattcaacaacaaaaagacaaacaacccaattaaaaattacgaaagtcttgagtagactttttccaaagaagatgcacacatggtcaacaagtatatgaaaagatgttcaccatcactggtcattagagaaatgcaaattaaaacaacaatgagataccactgaatgcacattaagatgaccataataaaaaatatggaaagtacaccagcgttggtga

SEQ ID NO: 303860 - DNA, 459 bp, Homo sapiens
aatgatgttctagaattagatagtggcggataattgcaaagcattgtgagcgcartaaaagctactgaattgtacacagtactttacaatgattaaagtggagaactttataatatgtgaattttactttgatgaaacaaaaaaaaaacatgcagggtctcatgtttactgcttctatatcagtgtacttttccccaatccatgttcagtgatattctgaaactggacagcccttagatatatacctcatgactatccatatggcaaaagtaatttgcttatttcttaggtagctggatgaaagtaacattagtctttcagtgctaagcacagtgctgtatacaagcaatggaactgctagttttatattttttctagttatgttgagaaagtcccaaagtggacacaatggactgtgtcatcacatcacagaaagttcctaattagaaggccacccgg

SEQ ID NO: 303861 - DNA, 605 bp, Homo sapiens
tcaccataataataattgtttcagacgaaaaagaatcatcagtggatgctaaaactggtaggtgcataattttaaaaatagaacatttatatagtctcagggtagcatctcacaaaatagctattagttacaaggaaaaatagaaactatacagaggggaagcttggcagacactactttaaacaagcggtcaaagtaaacatcatctgtaatgggacaaatcaaccacatgtgctcatgtctaagtgtatgaagcactaataaagacamaaacaccgtccctgtggtattcttgcccaaagtggataagctaaatttaatcaaaagagaatatcaggaagacccacaatgagagacattcttcaaaataactgactaaaatcttttaaaaaacataaaggtcatgaaaggccaagcaaagatcaaggaactgttctagattaaagaaaactcaatagatttgaaaacgaaatgaatcttattattttgactggatcctgtagccaaggtatttgtcccctattgctataaagggcactgctggaacaactaaacattttcagtaagatttgtacattgtttttacattattaattgccattgtt

SEQ ID NO: 303862 - DNA, 548 bp, Homo sapiens
tgtatgaagcactaataaagacacaaacaccgtccctgtggtattcttgcccaaagtggataagctaaatttaatcaaaagagaatatcaggaagacccacaatgagagacattcttcaaaataactgactaaaatcttttaaaaaacataaaggtcatgaaaggccaagcaaagatcaaggaactgttctagattaaagaaaactcaatagatttgaaaacraaatgaatcttattattttgactggatcctgtagccaaggtatttgtcccctattgctataaagggcactgctggaacaactaaacattttcagtaagatttgtacattgtttttacattattaattgccattgttttaattatactgcactggtaggcaggaatatatatttttaggaaatgcacactgagatattaaggaataaagttgaattatatctgcaacttaaatgatttggaaaaaaatgactgggtatatatagtctgtgtataataaaatattaacatttgacaaatctcaatgaagatatacaaaatttttttg

SEQ ID NO: 303863 - DNA, 606 bp, Homo sapiens
acaggcctaggagactctattggagggagcttagataaatgttaacaggtcataaacactaaaaactgtagagttttgttgcatttatttatttatccaatgaatatcaattgggtttctacaaactaaatgtactgaactctgtagatacatcagagaataaaacacacaaaatccctgcccatgtgaatggcttcacaagtccatttcctagtgcaaactaaatctggatgtgcaggttagattcatctggaaaatgggtggaatgggcccattttatctatattttaacacagtgaaaccagaggctacagcaagtaaagagaaacctggaattctatccccttgataactccagacacaaaattttaaamgatgtgaacaaaaaaaagaaaagaaaaagaaaaaccctcagtagtcaagacaaataatgtcttaatgtagtattttaaaaaacaaaacttaatgcaaaacaattcatgatgagcataatatcagaattctaaataaaggcaaggtttttttatttagccccaggcttcagtatggctccacaaggctctgagtaaaaaggcagctgaaaagatgctggaggcgaaaaggtag

SEQ ID NO: 303864 - DNA, 590 bp, Homo sapiens
ggcaagccacaggtaggggaatgaaactggattgtcatctctcaccttatacaaaaatcaactcaagatggatcaaggacttaaatctaagacctgaaactataaaagttctagaagataacattggaaaagcccytctaggcattggcttaggcaaaggctttatgaccaagaactccccaaaaaagcaaatgcaacaaaaacaaagataaataggtgggacttaattaaaaagcttctgcacagcaaaaggaacagagtaaacagagagcacacagaatgggagaatatcttcacaatctatacatccaacaaaggactaatatccagaatctacaaggaactcaaaaaattagcaagaaaaaaattaacaatcccatcaaaaaagtgggctaaggatatgaatagacatttctcacaagaagatatacaaattgccaacaaacatatgaaaaaatgcttagcatcactaatgatcagggaaatgcaaataaaaactgccatgtgataccactttactcctgcaagagtggctgtaattaaaaaaaaatagatgtcggtgtggatgcagtgaaaagagaatactttta

SEQ ID NO: 303865 - DNA, 311 bp, Homo sapiens
tagtaagttagtaagaagttagcaagtgaaagagatgtggtatttattcctcaacctccctccttgcgaagccattgtttggcagtggctacgtgacctaaggctgcagttcctggtgggtagtccttctacagcccccagctttcataggtgagggcaattcttcgccagttccaccctcttcctcactaaggstgatactaacttcccacttctgcttttcccaaggtgcttcaccttttctttattgcttccctgatcttgctttgtaaagagttccttcattgaagtttcctcaattacccctttgc

SEQ ID NO: 303866 - DNA, 645 bp, Homo sapiens
ttttatccacatgcagtcccgtggcccttgtgtagaaaagataagttggatcatagttaatgtaccatttattatggattagcaataatgttccttaatatttttttataayagcctcaggcagatgggaaaagaaaaggagcaaatcggtttaatatagtaaaactttatcattattgaccttccagaaggatttcatgcctatgatcttatttgttttcttagtttttacatcaacagattttataatgtctgaaacccacctcaatttgatccttgttcctggcattttccctctcatgcatcaaacatctgggagcattttacaaggctttcctgtaatctgccaaactacacacacatgtgcctttcaggagtccaattttcccctcccagtaattggccaatgcagagaaacaaagtatcattttattttacataatggcactatgtaaaatgattcactaattcagtactgaaaaataataatcacaagttggaagatttaaaaacacatgtgagaagatagcacccagggaaatcgaagctctcagtgcttacacaagctcgctcttgccccctgcagtttgctaagagacaaaagaatattttataattagccttgtgttttgcttgcaaacttta

SEQ ID NO: 303867 - DNA, 297 bp, Homo sapiens
ataaacatcagttactattatcagtagtgccattaactcctatttttctgatggggataccaaattccctggtgtctatttcttcacacactaacatgtgagagrttaaaaactagctaagactggaatgcaaatcacttctaggtcctcagcacttcactgataggagatggagtcaattcaaactctccaggccttctttaaaaaaactagatcaatcctttaaaaagcaaacattcaatagccaatatcatgtagacctaaaaaatcattgcatgtcctttgctgagagtgggg

SEQ ID NO: 303868 - DNA, 620 bp, Homo sapiens
atagtatgtgaactatacctcaataaagctaaaaaaaatcttcagtatatgattcttgaaggtcaaggtctagccatcaaattcagttacaagtctttaattcaagcagacatgtaattaaggttgaaaggagaaatcattckgcgttgccttatttccctgcctgggggacaatgtttgcagtacctccttctggataacttcataaaaaggaccaaacatacaaacaaaaaaaaacggggtcttgatttggttaacctaccagtattaaatgctcattaaatagccttaccccaaaggttatgttaaaatccaacccctatctctttttcatacacccacccttacccttcttgccttaacatccagacctttcaccatttgtgaattattttttaaaaaagaaaaaaaaaaagtcctggcttcagtgttgcctgcatgaaacctatactattcttgctgctggaacatccatgactctctctacagcagggccctcaaagctgagtgaagtcttgctgatccaatgtgctcatcctttgaagatccttgtgagaagcatcaggctgtggtaaatgcagatgcatgacctttaagcaacttgctttttctgttgttgc

SEQ ID NO: 303869 - DNA, 591 bp, Homo sapiens
tgatacatgcctgggtggtctcagcaacacttgtattttatctgtttggtcaactgccatctttcttctagttaaaggggagctgccaaagaaatgctgagctgcctgtaggggctgagtgtggaaaaatactgtcattcatccttgctgctctattctctccaagtgtamgcatcgctgggcttgtcctagaaccttctgatggtagggaagaaatttcaaaattattactgaaaaaaagtaatcttgtagtctcatttttcatagataactttttttggcatagggcttttgactgttgtttgtgagttgcagtagaaagattgtgcaccttccattgaagaagctttctgtttaagttctggagaaatagcatggttgggacatgacctagggaaacacaaaaactggggcatagttaattcaaacatgttggaggaaaagaggaagcaagagataaaaagaagatgagaataaaataatatacctgtctaagaatagaacatgcatttgcgacgggtgtggtggctcacgtctgtaatcccagcactttgggaggctgaggtgggtggatcacctgaggtcgggagt

SEQ ID NO: 303870 - DNA, 613 bp, Homo sapiens
ccatctttcttctagttaaaggggagctgccaaagaaatgctgagctgcctgtaggggctgagtgtggaaaaatactgtcattcatccttgctgctctattctctccaagtgtacgcatcgctgggcttgtcctagaaccttctgatggtagggaagaaatttcaaaattattactgaaaaaaagtaatcttgtagtctcatttttcatagataactttttttggcatagggcttttgactgttgtttgtsagttgcagtagaaagattgtgcaccttccattgaagaagctttctgtttaagttctggagaaatagcatggttgggacatgacctagggaaacacaaaaactggggcatagttaattcaaacatgttggaggaaaagaggaagcaagagataaaaagaagatgagaataaaataatatacctgtctaagaatagaacatgcatttgcgacgggtgtggtggctcacgtctgtaatcccagcactttgggaggctgaggtgggtggatcacctgaggtcgggagtttgagcctggctaacatggtgaaaccccgtctgtactaaaaatacaaaattagcttggcatggtagtacacgcctgta

SEQ ID NO: 303871 - DNA, 585 bp, Homo sapiens
atgcctgggtggtctcagcaacacttgtattttatctgtttggtcaactgccatctttcttctagttaaaggggagctgccaaagaaatgctgagctgcctgtaggggctgagtgtggaaaaatactgtcattcatccttgctgctctattctctccaagtgtacgcatcgctgggcttgtcctagaaccttctgatggtagggaagaaatttcaaaattattactgaaaaaaagtaatcttgtagtctcatttttcatagataactttttttggcatagggcttttgactgttgtttgtgagttgcagtagaaagattgtgcaccttccattgaagaagctttctgtttaagttctggagaaatagcatggttgggacatgacctagggaaacacaaaaactggggcatagttaattcaaacatgttggaggraaagaggaagcaagagataaaaagaagatgagaataaaataatatacctgtctaagaatagaacatgcatttgcgacgggtgtggtggctcacgtctgtaatcccagcactttgggaggctgaggtgggtggatcacctgaggtcgggagt

SEQ ID NO: 303872 - DNA, 591 bp, Homo sapiens
tgatacatgcctgggtggtctcagcaacacttgtattttatctgtttggtcaactgccatctttcttctagttaaaggggagctgccaaagaaatgctgagctgcctgtaggggctgagtgtggaaaaatactgtcattcatccttgctgctctattctctccaagtgtacgcatcgctgggcttgtcctagaaccttctgatggtagggaagaaatttcaaaattattactgaaaaaaagtaatcttgtagtctcatttttcatagataactttttttggcatagggcttttgactgttgtttgtgagttgcagtagaaagattgtgcaccttccattgaagaagctttctgtttaagttctggagaaatagcatggttgggacatgacctagggaaacacaaaaactggggcatagttaattcaaacatgttggaggaaaagaggaagcaagagataaaaagaagatgagaataarataatatacctgtctaagaatagaacatgcatttgcgacgggtgtggtggctcacgtctgtaatcccagcactttgggaggctgaggtgggtggatcacctgaggtcgggagt

SEQ ID NO: 303873 - DNA, 503 bp, Homo sapiens
tgctacaatacagcctgtactggtgtgaacaaaccattaagggtgactctggtgagggctcagaaggagtggaagtgagctgtaaagaaagttccatacttctttgagaatacctatatgatcatgaacagaatgttggtagaaatatggatggtgcagcccattctgatgattcatatgcatgtccgttttattggctcatgtaaccagagtagcttcaagtatgactagatctagatgttcaatacctaataagctgaaacatagaatctatcactcttaatctcatagctctacttccgtcactgctgacatttttcttgggctggctttcgtatgtggtggcaatgaaattcccaaactacagattcaccttccwtcattttggccacctcagtggatcaagggtttctcccttcttatagtccatggaaaaaaaaagtttgtggttggcttgagtcacttgcccagcaattatgttaactgacagtataaggtatttg

SEQ ID NO: 303874 - DNA, 512 bp, Homo sapiens
ctaacctttttaaagatacaataactaaatctttataggaaagataaggacaaaatgacattttccttaatatacttccaaaaaatagttttaacattaatgttgctatacatttatgttgatgaaagtgactttaaactctagtcaggcagtctggctgaatgacataggtggagacaccaaggaagagctgctcaaagagaatgggccgaagttctgtttcgttggtcacatttgctacattattaagggagagccaaaaaacaacctcgttggtcaagtaaccacatgtagaagacagaacccatagtaacgcacaacttggtatcatacatttattaataayagcaaatatgactaataattgagtgcttattggatgccagcaactgtgctaactattcttctgcattacttcatattaatctttgtaattctgtagaacaggtgtaaccggttattgatgaggtctttgaggcttagagaggttaaataacttaccaaagtcacac

SEQ ID NO: 303875 - DNA, 539 bp, Homo sapiens
gatttaattaccttgtgcaagtacatgggtatgtgtatgaaatctagttggctttttgaaatattgataatagctgttcttgaggatctcatttttaaaaatagttctttaaatatattttagtgctaatttaatattccaatgcatagcttctcataggcttactgtaggtgtggtaatgtacagtcctcactgacgttgttcrtgaagtctgctggtcacaaaaatcaaggtggtccttgcagttgtgcattgcacatgcctcacagttgtatgaagcaggccttcctactcatgaatgattatcaaagaagagaatgtaaattttaagtttgagtaatgtccataaatggactaatataacaagagattaaaaaatatctccctaataaaagtaccttcattaaatatagaaaatcatgagctgcaatcgtttttgacaacatgtgaacacctggctttgtgggagccaggcatacatacattcatggatataataatttgactccatgctacagaaggttatttcctcctttctc

SEQ ID NO: 303876 - DNA, 539 bp, Homo sapiens
gatttaattaccttgtgcaagtacatgggtatgtgtatgaaatctagttggctttttgaaatattgataatagctgttcttgaggatctcatttttaaaaatagttctttaaatatattttagtgctaatttaatattccaatgcatagcttctcataggcttactgtaggtgtggtaatgtacagtcctcactgacgttgttcgtgaagtctgctggtcacaaaaatcaaggtggtccttgcagttgtgcattgcacaygcctcacagttgtatgaagcaggccttcctactcatgaatgattatcaaagaagagaatgtaaattttaagtttgagtaatgtccataaatggactaatataacaagagattaaaaaatatctccctaataaaagtaccttcattaaatatagaaaatcatgagctgcaatcgtttttgacaacatgtgaacacctggctttgtgggagccaggcatacatacattcatggatataataatttgactccatgctacagaaggttatttcctcctttctc

SEQ ID NO: 303877 - DNA, 564 bp, Homo sapiens
tattctactcttggatagttttgacaggtagaatttttttatgttgagctgaaattacatttcctgtttcctgtcaaccctacctttggttcctgttctataccacgaggtacacaaaggagtttgaatcacacttttccagaataacccagaaaccctgattcctgcccagtcgtctcaaagtctgtttgctttctacagactcaacaccctcacatccttccarcatgactcacgtggcatgtttccagtttacagcactgtttccgttgctcccctcaacttgtttacattagctatgtgcactggcatttcagctacatgtctttttgctgctagtcatcagactgttgggttctgttctcctgtgacatcactgcatgactagcttgcccaagtaaaacaaggtttaattaaatcttaatgttgcacccagctctttacagaactaactgttattttcacatccttgtgctattagcagaatacataatgagagtgtatggagcacagaatcagccccacttataaagagtagcattttgtcactcactcacggtctat

SEQ ID NO: 303878 - DNA, 536 bp, Homo sapiens
atctgtagcattgggctgcagtgcatctggagggttaagtttagtaatccataaatcgtgtatttccatcacttattttactaagagcaaatcatgttcacccttatcctttaaagagaagtgcagcacaggaagtcatttccattgattatctcatttagtcaccacaagcattttttgaggtagttactgttatgctcattttacagttaactgaggcttattgagattgagtaacaagtcttaggtctctcaactaaaaagtatcatatgtggcattcaaaacaagatctgtctgtttttataccagctttttataccarcctgcttctttgcttagcagttggcccacaacaccaagtaaacaaacaaacaagcaagaggagatcattgttttatagtcttagcatgtgctacgtttttgaaaatatgccattgtaaagtcaaacatacttcaaagagttaaactgtttttacaagtcttattaaatttcttagtccagaagtaaccttagatatttgaacataaaagtata

SEQ ID NO: 303879 - DNA, 536 bp, Homo sapiens
atctgtagcattgggctgcagtgcatctggagggttaagtttagtaatccataaatcgtgtatttccatcacttattttactaagagcaaatcatgttcacccttatcctttaaagagaagtgcagcacaggaagtcatttccattgattatctcatttagtcaccacaagcattttttgaggtagttactgttatgctcattttacagttaactgaggcttattgagattgagtaacaagtcttaggtctctcaactaaaaagtatcatatgtggcattcaaaacaagatctgtctgtttttataccagctttttataccaacctgcttctttgcttagcagttggcccacaacaccaagtaaacaaacaaacaagcaagaggagatcattgttttatagtcttagcatgtgytacgtttttgaaaatatgccattgtaaagtcaaacatacttcaaagagttaaactgtttttacaagtcttattaaatttcttagtccagaagtaaccttagatatttgaacataaaagtata

SEQ ID NO: 303880 - DNA, 568 bp, Homo sapiens
atttgatatatgcgtaaaatatgtaatgagcaaataagagtaactgggaatctattacctcaaatatttttcattctcacaattgaagyggaggtgctactcttttttcatttttcaagacagggtcttactctgtcacccagaccagtgtaagtgcaagatcctagctcactgcagcctcaaactcctgggctcaggtgatcctcctgcttcagaatcccaagttgctgggactacggggtcataccaccatgcctgtggtcttcctatgttacccgggatgatctcaaacttttggcctcaaacgatacttcctccttggcctcctaaagcactgggattacaggcatgagccactgcacctaccctgatgctactgttacccagtggagggagaccatggatgctaccaaacattctacaacacacaaggcagcattacaaaaataaattagcccaaaaagtcaacagtgctgaggttgaaaaatctagcctatagagtgagaaatatgtaatgcactgttataagtactatcttaggaacatgaatgaataaagtgctgggaaa

SEQ ID NO: 303881 - DNA, 568 bp, Homo sapiens
atttgatatatgcgtaaaatatgtaatgagcaaataagagtaactgggaatctattacctcaaatatttttcattctcacaattgaagtggagrtgctactcttttttcatttttcaagacagggtcttactctgtcacccagaccagtgtaagtgcaagatcctagctcactgcagcctcaaactcctgggctcaggtgatcctcctgcttcagaatcccaagttgctgggactacggggtcataccaccatgcctgtggtcttcctatgttacccgggatgatctcaaacttttggcctcaaacgatacttcctccttggcctcctaaagcactgggattacaggcatgagccactgcacctaccctgatgctactgttacccagtggagggagaccatggatgctaccaaacattctacaacacacaaggcagcattacaaaaataaattagcccaaaaagtcaacagtgctgaggttgaaaaatctagcctatagagtgagaaatatgtaatgcactgttataagtactatcttaggaacatgaatgaataaagtgctgggaaa

SEQ ID NO: 303882 - DNA, 616 bp, Homo sapiens
agttaaaaaaaaaaaaagagagaaaaggaaggagttacaggctctgagtgggtaagattgaaagcaagcaagattagtttagatagaggaaayattcagtctcttcagtgattgaaaggcaaccataaactccacctgggggaaacagcctcactttatctcccactgagcagttggtattatttctctttgttggtgtgtttgaacgtgcttagatttctgataagtcatggcaaaaatagtaaacaaattattttttcttcctatgagcatcaatactagaagaaatatgaacatatatctgacacatatactttttatttctaatgcttattttttagattaaagttaaatcagtagtgaattgtattataaaggaactacctacttttataatctaagaaagatgaaaaaaatatgcttttacctataacctcatgggtatagaatgatttgagggctcaaaccagaattattaaaaaaaacagaagatatatttcagttttcttttagttaatatcttcttctctggtacaaatattggagacgatggagaccacatgcttctgttcatatttctgccgctaatagaagatgagatgaatttcatcacagt

SEQ ID NO: 303883 - DNA, 616 bp, Homo sapiens
agttaaaaaaaaaaaaagagagaaaaggaaggagttacaggctctgagtgggtaagattgaaagcaagcaagattagtttagatagaggaaatattcagtctcttcagtgattgaaaggcaaccataaactccacctgggggaaacagcctcactttatctcccactgagcagttggtattattkctctttgttggtgtgtttgaacgtgcttagatttctgataagtcatggcaaaaatagtaaacaaattattttttcttcctatgagcatcaatactagaagaaatatgaacatatatctgacacatatactttttatttctaatgcttattttttagattaaagttaaatcagtagtgaattgtattataaaggaactacctacttttataatctaagaaagatgaaaaaaatatgcttttacctataacctcatgggtatagaatgatttgagggctcaaaccagaattattaaaaaaaacagaagatatatttcagttttcttttagttaatatcttcttctctggtacaaatattggagacgatggagaccacatgcttctgttcatatttctgccgctaatagaagatgagatgaatttcatcacagt

SEQ ID NO: 303884 - DNA, 608 bp, Homo sapiens
ggaaacctagcacaaaatgagtaaatggagggttctcaataaacatcagttgaataaatgaatgagtcacgaattctaacttttgtcactaactagttgtgagacatactcatatcacttcttcttttgtagcctcagttttctcatcaataatatgagatgtatgaatttgaagaatagttttctacctacctttcaaattctaggaaggtacttggtgagttccacaaaatataaagtatattcttagccagtgatagacatttaaagcgccttagcttatgttgggcccaagatrttctttcaaagaagagctccactgctaaaattgcttgaaaattgttggtatacattaattatagtgtagaaatttacctttttaaaccaatttgaacacataaaacttaaaagggtatcttgctgtcattacattaccatacaggaaatggaccagaggtcctgttattccagaagccacattcaaatgaatttgacattaattttctagaaatattggagacaacattaattaattgcaaaggcacatacagttatttggttgcagaaagcaagaaatgtatgtttatttgtcatgcataccatgagga

SEQ ID NO: 303885 - DNA, 547 bp, Homo sapiens
tgaaatcagttctgctggggagttaggaagacattgtaaaggaagaagactttgagtaaggatttagaacatggttatttgcacatagagacagcaaatactgagaccaagtctttgtcatgttgtaggtttgtaaacagagagcaaaagcagagacataggttagagtaatttaagtagtaccatgttgaaatttaaatgtcgttctttggaattcagcttawaccctaggtcttgtatgggactgttaccgataatggataacattttaaggcagtgtttttctgcatttatcaactgttgatttatttttctactgggcctagttctctggactgtgcaggagggaaaatcaccttttatataaacatacctccttagcaaataaaatacagcctttcagcaggtatatgaataagataggggagaagaaaaatgattctgaaacctctttaaaatctatttctatattaactcttttatacattagatgttccttctttgcaactcttaaactcatgtgataaaaattttcttatctctaact

SEQ ID NO: 303886 - DNA, 547 bp, Homo sapiens
tgaaatcagttctgctggggagttaggaagacattgtaaaggaagaagactttgagtaaggatttagaacatggttatttgcacatagagacagcaaatactgagaccaagtctttgtcatgttgtaggtttgtaaacagagagcaaaagcagagacataggttagagtaatttaagtagtaccatgttgaaatttaaatgtcgttctttggaattcagcttataccctaggtcttgtatgggactgttacmgataatggataacattttaaggcagtgtttttctgcatttatcaactgttgatttatttttctactgggcctagttctctggactgtgcaggagggaaaatcaccttttatataaacatacctccttagcaaataaaatacagcctttcagcaggtatatgaataagataggggagaagaaaaatgattctgaaacctctttaaaatctatttctatattaactcttttatacattagatgttccttctttgcaactcttaaactcatgtgataaaaattttcttatctctaact

SEQ ID NO: 303887 - DNA, 621 bp, Homo sapiens
ttaccgataatggataacattttaaggcagtgtttttctgcatttatcaactgttgatttatttttctactgggcctagttctctggactgtgcaggagggaaaatcaccttttatataaacatacctccttagcaaataaaatacagcctttcagcaggtatatgaataagataggggagaagaaaaatgattctgaaacctctttaaaatctatttcyatattaactcttttatacattagatgttccttctttgcaactcttaaactcatgtgataaaaattttcttatctctaacttaggtgaatttacaattttctttcaaataagtgttttccatgaaagttacactggagtattggctggtcataaagaagaaatgttttatatctttcctttgatatgctgtgcttagccattttttaaaaaatgattctgctaggctcctctgaattctgattgtcctggatggtgctgttgcctaaacagaacggggctgtggtattatctggtattaccaaagtcaaagcaacctgaggatcaaatgtagacagaaatgaggatagccaaagaacattagccattatccaattgaaaagcaggtttggggccaaagtcag

SEQ ID NO: 303888 - DNA, 621 bp, Homo sapiens
ttaccgataatggataacattttaaggcagtgtttttctgcatttatcaactgttgatttatttttctactgggcctagttctctggactgtgcaggagggaaaatcaccttttatataaacatacctccttagcaaataaaatacagcctttcagcaggtatatgaataagataggggagaagaaaaatgattctgaaacctctttaaaatctatttctatattaactcttttatacattagatgttccttctttgcaactcttaaactcatgtgataaaaattttcttatctctaacttaggtgaatttacaattttctttcaaataagtgttttccatgaaagttacaytggagtattggctggtcataaagaagaaatgttttatatctttcctttgatatgctgtgcttagccattttttaaaaaatgattctgctaggctcctctgaattctgattgtcctggatggtgctgttgcctaaacagaacggggctgtggtattatctggtattaccaaagtcaaagcaacctgaggatcaaatgtagacagaaatgaggatagccaaagaacattagccattatccaattgaaaagcaggtttggggccaaagtcag

SEQ ID NO: 303889 - DNA, 444 bp, Homo sapiens
gttattgggagaattaaatgagataatttaaagtgatttagtacctggcacaaaatatgcatttaataaattttaaataggcagatataattaaaatatagttttcattgcatattgactagtttattataaatgtatatgttgataatttaatgtacttatatgtgtatacaaatatacatatatggatatctatacactatattagctattgattattataataaaaatagttgtgcrgtgatattcaaaatgacatatcatcttacagccaattttgataaaatttgttagagtttgcattttactttatttctgtcctggggagttactgtaaatctgaacgtgaatgctagtcgtgaagttcgtttgttttttgttttcttatttaagagacaaactgtcactctgttgttgccaagtttggtcttgaacttttgggct

SEQ ID NO: 303890 - DNA, 444 bp, Homo sapiens
gttattgggagaattaaatgagataatttaaagtgatttagtacctggcacaaaatatgcatttaataaattttaaataggcagatataattaaaatatagttttcattgcatattgactagtttattataaatgtatatgttgataatttaatgtacttatatgtgtatacaaatatacatatatggatatctatacactatattagctattgattattataataaaaatagttgtgcggtgatattcaaaatgacatatcatcttacagccarttttgataaaatttgttagagtttgcattttactttatttctgtcctggggagttactgtaaatctgaacgtgaatgctagtcgtgaagttcgtttgttttttgttttcttatttaagagacaaactgtcactctgttgttgccaagtttggtcttgaacttttgggct

SEQ ID NO: 303891 - DNA, 444 bp, Homo sapiens
gttattgggagaattaaatgagataatttaaagtgatttagtacctggcacaaaatatgcatttaataaattttaaataggcagatataattaaaatatagttttcattgcatattgactagtttattataaatgtatatgttgataatttaatgtacttatatgtgtatacaaatatacatatatggatatctatacactatattagctattgattattataataaaaatagttgtgcggtgatattcaaaatgacatatcatcttacagccaattttgakaaaatttgttagagtttgcattttactttatttctgtcctggggagttactgtaaatctgaacgtgaatgctagtcgtgaagttcgtttgttttttgttttcttatttaagagacaaactgtcactctgttgttgccaagtttggtcttgaacttttgggct

SEQ ID NO: 303892 - DNA, 444 bp, Homo sapiens
gttattgggagaattaaatgagataatttaaagtgatttagtacctggcacaaaatatgcatttaataaattttaaataggcagatataattaaaatatagttttcattgcatattgactagtttattataaatgtatatgttgataatttaatgtacttatatgtgtatacaaatatacatatatggatatctatacactatattagctattgattattataataaaaatagttgtgcggtgatattcaaaatgacatatcatcttacagccaattttgataaaatttgttagagtttgcattttactttatttctgtcctggggagttactgtaaatctgaacgtgaatgctartcgtgaagttcgtttgttttttgttttcttatttaagagacaaactgtcactctgttgttgccaagtttggtcttgaacttttgggct

SEQ ID NO: 303893 - DNA, 515 bp, Homo sapiens
cttcttctccctcttgggtaaacatgtgcatggtacacaccccttataccccaaattagtgggataagaaggcaattttcaagttgctaggcagcagcagttgaagagaaagctcagaaaattaagtcagtgacttggatatcaaaagctatcactttgttgtccctttttctgaaagtagaaaatgtttcttctctttaacacgaaataataaatttmaattctattgatctgtgaacttcaaaaacaacctcatacatatctccacattgagcatttgctgaatgtctctgtcctttcttctcttccatcactgatatttagtacttccaaggggagtctgagctatgaatctcagagtccttttcaaatctctgactgccaaggatgtggatgagaaattagtactgcagtttatgttcacggagaagtatgttattcactgagattcatcattggaaagaaatgactgatatcacaaacatcacgataataaaagatatcataaattagct

SEQ ID NO: 303894 - DNA, 445 bp, Homo sapiens
ttccctgtggagtcatcctaatccactttgagcactcattttgtcacctaaaatttctatcacagcagttttaacatagaaggtgatggataaatacttattgaatgtacaggaattatttctttgaaatccactgctttattcaagtaaaaactgagttcagaagcaatccaaaatgcccagaggtagagaaaatagrtaaatgtgttatagcacatcaatacatggactatgctgcagtaattaaaattaagtttataaagaagatttaatgccttgggaacatgattatgctagacagtaaactcttaacatccacaaggaattatttctgttcccttcagaagtctatgaatttttaataatagcatagtaatagtagctaactcttactgggtatttttaatgtgccagggcattatgagttgtcctctatcttatttaa

SEQ ID NO: 303895 - DNA, 580 bp, Homo sapiens
tgcctttgctactgattcacaaaaaatacagattaatctcattaccagcgttgaacaaagaaggccatgtttctcagctcacagatcttttccctctcagtattcttgaatgctctgcaaatttccctctctgttctttggcctttgggcttgccaaagagtgtccattctttgagctctctctccttaggctttttgccttcttagcggttcttaattctcttctttgtttctttcttgagccagtcctgagcttggtcctctcccagactgcctttgtgtttgcactctatgtggaaatttccatgggccctctcatatttatgcagtcaagaccaagggcatgtcttttatttctttcttggacccagcaggggtttcctgcctgtttttgtacgtcagtttctgagttaattgggctaatcaatctaacaaattttccttaagttgtccaacaccaagggctatctggacaacagttattgcagctaatcagtggaacccctaaggrtagaatttagttttactgggcatgatttaaaagcctgtttcaccctctgaaaataatttctgccattct

SEQ ID NO: 303896 - DNA, 531 bp, Homo sapiens
tctgatatttgctatgatcattagctgcctggtgttgatgaaaaatgaaaaaaataagtgttagtagctatctttcgaacatgactttttaatataatcctagcaaatatggtttcttttttttttttcttttgatacagggccttgctctgttgcccagggtgcagaacagtggcatcatcaaagcttactgcagcctctatcttctgggctctaatgaccctcactgctcagcctcccaaataacttggactataggcatgtgccaccaaacttggctattttcctttttttagagatggggcctcgctatattgccgaggctgatcttgaactcctggctcaagctaacctcctgctttggcctaccaaagtgctgaggttacaagcatgagctatcatgactggccyggattcttaatttagataagtgacccttcctttcctggagtgagtcaaagcaaaagtagctgaaacttatataataatactgaagtagtttctaataagttgaacacattttaacattaa

SEQ ID NO: 303897 - DNA, 408 bp, Homo sapiens
tgttctgtccagaataggtgctctagaaatatttgatgaaaaaatccataagaggaaaaaaggaataagctctaatcctaaagcaaccccagacatgagaataatctgtggcaaactgtccttcagaggtatgttcacttgctagctgcattttataactttagtggatagggccaacrttattccctggtgatgtcaatatggccccttcatcagtctgaaaatcggctggcaatgaaaatacatgaagtctggaagctgtttatgaaactatgaaggtgagtcaatagactctgttccaagttggcaagaagagacatcgtcctaaacatccaaagcgccataattcacattgagcttctcattaatttaaatgttaatgtaaatttaaaacatgttgtattgatt

SEQ ID NO: 303898 - DNA, 539 bp, Homo sapiens
caaagaacattcacgagcatgaagaccatccaggaaaacatgacctcactgaatgaaataaataaggtgccagtgacctaacctggtatgacagagaattcagaacagctgtttagaggaagcacaataaaattggagataacagagagaagtaattcgaaatcctatcaaataaatttaataaagagattgaaataattttcttgagacagagtctcgctgtatcgcccaggctggtgtgcattggcatgatctcaggtcactgcaacccccacctcccaaattcaagtgtttctcatgactcagcctcccaaatacctagaattacaggcacgtgacactaggcctggttaatttttgtgtttttagagatggggttttgccatgttggccaggatggtctcaaacttttggcctcaagtgaaccgctacctcagcctctcaaagtgctagaattacaggcatgagccacygcacctggcctgaaataatttttaaaaatcaaacggaaattctggacctgaaaaattatatagtaa

SEQ ID NO: 303899 - DNA, 604 bp, Homo sapiens
ttagacaaaacagacttcaatacaaagctataaaaagagataaacaaggtcattatatagtgacagaggtcaaatcagcaagaggatataatgattgtaaatacataggcactcaacacttgatcaaccagatatataaagcaaaatatattttgttaagagtagtcaagtttagtagtgagaaaggggggaagagtataacaaggaattcaatatgtaactgactgtgatcaattgagataactgactaccctaggactagtctaaagcaaatattagagctaaagagagagacagacctcrgtacaacaatagctggaggtttcagcatcccactttcagctattggacagatcgtccagacagaaaaccaacaaagaaacattagacttaatctgcactatagacctaaaggacctaataaatatttatgaatatttcatccagtagctgcagaatgcacattcttctcctcagcacacagattattctcaaggatagaacacatgtttggccacaaaacaagtctttaaaatttcaaaaaaaaaaaatcatatcaagtatcttatttggcagcaatgaaataaaactagaaatcatcata

SEQ ID NO: 303900 - DNA, 600 bp, Homo sapiens
tggggactgaggctaagggatacatttggaatataatattaatatgtataagtataaaatacaataaatgtgataaaagtaataataacctttatcaatggctgtgtgcaggtactctgacaagtgcagtgcaacattctttcatttaattcttacaattctacaatataggaattttatagctgttttacaaaaatcaagaaattgaagatcagaaaacttattcaattatacatgtatcattatgtaatataatgatattactgaatagcagagctgaggttaaatatcaggtctgtttattctggttcctgatcactaaagacaaagggatatgtctcttctaaatgcagaggagcaaataaaaaaatgaattttaaatgacagaagccaaaaattaagctcatgtagtcacttatctaccatgggtgaaggtttgaaggtcagcattctaccagtaatctcgacctcacaatccatatatttctgttacatgtcatgttttggtcgtgagtscagcacaaaataaactaagtaaatcttggacttgccaaggctctattgaaagttttctgctggaatcataacatcaaaggctgt

SEQ ID NO: 303901 - DNA, 576 bp, Homo sapiens
cttccaaattctaattgtgaatttgcttgagatttttttaaagaaaggaattaatcattatgtaaaaataatatcgtgatctttatacatgttaacaaatatgtaccacagacagtgagagagtttgtagacagwcattactaaaagtgaaatatttttatatatattttaaaagaatttggtttgcatagtaagaactaaaatgagaacatttatacccaaacttgatattctactcttccatggcctgtgaagggttggaaagatagttcaatattctatgccacagtatttttatctaaagtggagttaaatctatgtagccactttatccttatttattttaacatgagaattagaagtctggtgtctaggaagcctgctaggctctccgttttttatttcaaaataaagagaccacatcattactatcacctgaagtaaaaagaaatcaagagatgaattgcctaaaagaacatattcacatcattatcagttcaatggtacagtataatacttccacacattgtgtgttttttttcatatttgcctttagctgttggagacaactaaagt

SEQ ID NO: 303902 - DNA, 549 bp, Homo sapiens
cacaatgattatgtaaagtttctcgaataatttttatctctcacttgcatgaaaatacatatagattaaccaacatataaacgtagacacagattcacttcctgttctcattgaactgaccaacgcttgggagtagacagacaggctaccacgggagtcacgtgcttaatctctacaactaggaaacctggtttcaaaccccagctttcacttccagccatgaatatttatcaagtcacttaatctctaggtgcctgagttaactttaaaatttgggataatacaagtaattawcttaaaatgtcatttgaacttcaatcatataatttatttgatgtttttagaatggtcctggaagattgctaagtaaacctggtaccgttcccaactaatactcttgtgcatgaaacagaaatattaatcaaggaattattagtaatataagaagaaatataatatgagtaagttttatcgttttagcttttcatatccatgttcacaaaaatgttttatctgtagagtcaaagattaagatattcaaaacaccat

SEQ ID NO: 303903 - DNA, 623 bp, Homo sapiens
atgcaactccgtgtactccaggggtgggaggggaatttgcataccagttagtgccagataatgattatgaaagatgtgcatttctctttgttggaataagtaccatataagccaaagcgatagttactgttttaaaaccatcttcatgcttaagaaaatgttgatctgtaaattagcttcttggtgcgatgaatttcgcttaagaaaggcaattccaggtgaaacaattttcatgttgtcaatgggtgccaaataggccccaaagagatcagaatatggccaaatgagaattgaaataaaacctgtctttataataattctctattaagcttgatgagagtttatgtttcgggctgccaaaatactctttttgtttttttttggatgacaatgattttgaatgtagtgctccaagtgggccyctggagctgtggtcatggtgcccacctgcctagcatttggtgaagggagttttctgggggtcttccaccatgccaatgatctcacagcaggtttctacccatccagacaggcagagagcaggtgtcactcggctcagaggtgcactctgatggtggccagggacttcggaagctttgagagcgatggccgatttccagcaa

SEQ ID NO: 303904 - DNA, 591 bp, Homo sapiens
gtgtcaccttcataaagagaaactctggctaccttccttcgagtgctttctgcaatttatctctatctgatttctctgtttattttcctcaaagcattgatcacattctgggcttatcttgcttattcattcgtgtgcttgataaatgtctgkctcctcctctagaatgtaagctccatgaaggcagcaacctcatcagtgatcccctaacatggggtctgacatatggtgggtatagaatgaatcactcatgaaaacatctcagcaaggatgacagacattaagactttcatcagaaaaagttgaagtccagtgttgggtagagagaaacttacctcaacgtcttaccaatatgaatatgtattatatacatataaacaaatgtatacacacatgtataaaaatcacagactaacatatatacatatgtacctatgatttatacatatttaaaacatacatgcatgtacatatacaaatgatattatacaaaatttcaagtatgtacaaaagtagagagaagagtatgatgaattccccccaaggctccatcaaccagccttaacagtcatctcatggttaatcttgttt

SEQ ID NO: 303905 - DNA, 558 bp, Homo sapiens
tgatacaagcagaaataaactggagtttcagggcaggtttttctttcttaacatagctggacactcatttttcttttatcttgccttggatgcagatgtaagggatgatgctgcagcagccatcttgtcactgctcatgagaattacagagatactggctctgacatctgtgagcctctgaaccaatgtcaatggccacctgtctttagacttcttggtaggaaaaagctaatttacttaagctcctcttaataggtattctgtaactggtgatagtaatttctgccaaagcatcatcattttatgtttgatgtctattttaaaacagcagtgggaatttcaggctttatattggaagaaaattagaatagacagataagtargaaaatgttttggattaaatggtgtcttattgtgcccttgaaatcacagaatacttactgtatgtacttcatgtttgcctaggccaccccaggatgatagaaaccttcttgtagtaattttttatttactacaggtttataaatatactttgtatcagtgtaggggagtagaaag

SEQ ID NO: 303906 - DNA, 655 bp, Homo sapiens
ttgtacatttaaaagtgtatattcagaatgtatattttaaaaaattcttcatgtaaaacacttttccttgaacactcttccacatgccatcttgttttgaaactaaactttaattcttagcttccatgtagttagaaatggagaccatttttttcccttaacttggataattttttatctttcaaaggtgaactcttttcaagttgcctcagggataagatagcaaaacagtcctgtctaatgcattktcttttttgggggggttgttttcccatgaatcttttcaacccgcccagtattctcattttgttaatctgccatcagatgataaattgccttcaaagagtaaatgatcctgaaactctattctaatgaatagtctgaatttgtagatagtctatatgtatttgtttattttattttattttaatttggttattgtggttagcatagttttgatagcagtttatgatttgctatataaaagtaatcctgatttggttatataagagtaatcttgcctttctttttcaataagctgctagatttgttgtagtttttgtctctctataaccttaggctggtccaatttctcaacgcagttcaagataatgttaagtaattgattgcatcgtgagttattaacaaggacaag

SEQ ID NO: 303907 - DNA, 569 bp, Homo sapiens
ttacagaacttggaaagagaaagtgacttcagacagttgctgtgagtagtaattaattccagtgatcagtgtgagcttgcgtatgggcatttatgaaatgatgttagattatgaaatgccaagtgcccctcctattctagatgtgaatttagtgagtgctgttgtacaggagaaaggggctaatacagacctttctttttgggccaagggtggctgctctgcaccaaagttgctatttttttagttgttgtttagcaagtcctactgttaaaaactcagtcaatggcagccaggccggtgtagcattgttggcattgagttagatccaagcaccaattgaatctcttggttctctgattgaagactagataygcctatcacatactgctcccaatcacatacacacaaccctcaatgtacaacaacctattattaaaaaagtgttagaaaatgatcatttacataactcaaatatcctacagtatattggctaaatgattgtatagctattcagtagaatgttatttagccattaacagacatgttataggaacataattgatgacttg

SEQ ID NO: 303908 - DNA, 569 bp, Homo sapiens
ttacagaacttggaaagagaaagtgacttcagacagttgctgtgagtagtaattaattccagtgatcagtgtgagcttgcgtatgggcatttatgaaatgatgttagattatgaaatgccaagtgcccctcctattctagatgtgaatttagtgagtgctgttgtacaggagaaaggggctaatacagacctttctttttgggccaagggtggctgctctgcaccaaagttgctatttttttagttgttgtttagcaagtcctactgttaaaaactcagtcaatggcagccaggccggtgtagcattgttggcattgagttagatccaagcaccaattgaatctcttggttctctgattgaagactagatatgcctatcacatactgctcccaatcacatacacacaaccctcaatgtacaacaacctattaytaaaaaagtgttagaaaatgatcatttacataactcaaatatcctacagtatattggctaaatgattgtatagctattcagtagaatgttatttagccattaacagacatgttataggaacataattgatgacttg

SEQ ID NO: 303909 - DNA, 559 bp, Homo sapiens
tgatactcatgcattaaaayatgcattacaataagacaactctgtacagtgtcctcatccttttagcagttgtgtttgtatgaatacatattattcctcattaaaaaaacagtggcatagtaacttcattttctttaacactgtcagtcctctctttttcccttctgtgggaggctctggctctttttttttttttgcatgtgcctttatttctctttcccctttgtcattaccattggtcacttggacttggcaggagtttgtttctaagcatagctgctgatatgagatacagttactaatttgaagcactaccttatccaaactgaaaactctagtttctcttttgtgtcattgaaaggttatatgaaaatcactccccttcaacacaaaaaaagtgaaaatttaaaattagcagacagtgccaatggaaaaatggagaaagaaaaatgggcccaattttaaagagtttgagcaagccaaagaataatgattcattgacaaatccttgtattctgaatgcggtaagatcattagtcatttttcgctttcttctgag

SEQ ID NO: 303910 - DNA, 624 bp, Homo sapiens
gggaaatagttacaaaaatgtctgagtttacaaaatgttaagttaggaaatactgataataatgtacattgcatagtatagttttagtttacaatgtactttcacgtgaattgtcttaataaatcctcaaagcaatcctgtgaaaaaggtgtcattctcatagtaaagatgagaccattgacaatggcttgccaaaggctaatacrtagtaagtggcaaaagcagaccctgaatccaggccttctcactctaaactgtgtcctttccactaacttttgtaaaatagtgcttgaagttgtgaaagcattcaccaatgatttttctttagtcatatattccaataaacataaaattgcttagtttttaaaaaaagcatattttattgaaatttccaggatgtatgtattgaatacattgaggtttactttgagaggctgtgtgccattgttgctagaggattgaaaagtatttcacacaggctgcgcataagcttctccttggcctggaagtagtaagagatgagataaatctttataggaggaaaaaaaaatctgaatttctccctttagaagccaggctaaaaatagtacaagtattctagggaaaaggaaaaatagccccacc

SEQ ID NO: 303911 - DNA, 561 bp, Homo sapiens
agctttactgtctttgtatcaactcacttgttttattttgagtttagaagtcccttgtatgctgattgtcatctatcttgcttacattcatttacagaaaagagaaaatgatcttaaaattattttgtattttgaaaaacattacctttgatagccagatgtttgatgagtacattttgatgttgcagccaagaggtaagggctgtgtctattgaaacaagttcattctgggactagctatatatcagcatttcatgcatcaattcttacaggatgaagtaaaaaggaatacaagacatactaaagattgcagcttttctccaagatttaaaatctttcagataattttttaatgagaaaaaacattaggaagtgaattcagcatataaaatgacatgtggttattgcaggatgtggtctccactagtttactgtatcaaaaccttatttgcttttatgtgttgtgaacttgcttgtgtgtgaawgtgctgtaggttgtgattaatttttaggactaaaaacataagtatgcaagtttaatataagagaataatatttttt

SEQ ID NO: 303912 - DNA, 573 bp, Homo sapiens
ctttcatctaagattgttttcactattcatggaggagccactacactggcattgttaagaattttgggtccatctaaagctaaatctccatatctgggtgaaatggcaaggcgattttattttgcagataaagaaagtaaagttttaatccaccctagattacagagaacatagaaccaataggctatttgggaacattaggctctcaatccagctcttcactttaaatatttggctaatctccccagtttattctaagctggaacatacatggctccccactctccccactcttgtctcaacttgccactttgttcacatacaaatgccctcttacttgaaacccttcaactgacttttttatcttatcataatgatgatttctccataaccagtcaaccaagcatttgctcctcttaactagccagggctgcccaaaccacaaaactttgccaaatccatctgatgtattcttctacagaagcaatggaagcwaatgtatctttcccaaagtagttattagacaccttattttagttactgatttttttttttttttttttttttagcaac

SEQ ID NO: 303913 - DNA, 347 bp, Homo sapiens
aggcagtggcagttttcccactgcatcgctcgcttaggtcctctacattatcacccatcacgtgcctttaaaaccttgccgaatttatttacggctgttcatagctcttagatctttatcatttactctctcatcccatgcctctctcacaggttgctgctaagaatagcctctccccgcagcacagtgatggaatatcatatgatgcctgtgattcattggccacttatggcgctcttctctccactcacttcctgcctcagggcctttgmacttaccggcctcttttcttgagattctcagctcccagattttcaaaatgttggcttcttctcatcctcgaagct

SEQ ID NO: 303914 - DNA, 543 bp, Homo sapiens
ttttgtttttcacacaagaaaagaaagtaagtaactgtgaaagtttgctttccatagtcattcctgttcagggactcatttgttacgttcgtcctttagtaatttttatttttgtttatttgtttccttttctctttaaaggtatagatgagaaaaataaatgatgtttagaagtgaaggaaaataaattttatggactccaaaagcctttccaggtgtctagataaagtgcctggaaatgcttatgtaatttgagttcaaagcatcaattaaaatatccacttttctaaacaataaatttcatctggggtgcactttgttacccagattgtgaataacttattataaagccacattttcatttgcaagtcccttgttcatgccaagtcttttgttgttctctattcaataaaagagaggtaagcagacattttccaaattttttcttagaatatttattttttcaggaatcatgatgggatttgatgaattaaggaacagaacaaaaaatcccatgtwactaatttgtatatgacagcaggt

SEQ ID NO: 303915 - DNA, 549 bp, Homo sapiens
agaaaatcttcacattttgtgcatctgacaaaggactaacatccggaatctacaaggaactcaaacaaattagcaagaagaaamgatacagttccatcaaaaagtgggctaaggacatgaatacacaattctcaaaagaagatatacaaatggccaacaaacatatgaaaaaatgctcaacattactaatcatcagggaaatgcaaatcaaaaccacagtatgatacaaccttgctcttgcaagaatggccataatcaaaaaattaaaaaaaatagatgttgatggggatgtggtgaaaaaggaaaacttttacactgctggtgggaatgtaaactagtaaaactgccatgaaaaacagtatggagattccttaaggaaatacaaatagaactaccatttgatccaggaatcctactactgggtatatacccagaagaaaagagttgttatacgaaaaagatacttgcacatgcatgtttatagcagcaattgcaaaaatatggaaccagctgaaatgcccttcaatcaatgagtggataatgaaattg

SEQ ID NO: 303916 - DNA, 497 bp, Homo sapiens
tgtatctcccttattttctcttgccaccatgtaagaagtgtctttcacctcctgccatgattctgaggcctccccggacatgtggaactgtaagtccaattaaacctttttcttccctatcttcggtatgtctttatcagcagtgtgaaaaagaacttatgcactccttaattcctgaaattgccaatttttttcttgatagtttcactagagttgtatcagtgttgttcatcttttcaataagccgtcttctgatttttctctttttctttgttgcatttattctattgcatggatttatgytcttgtctttattatttcactccctctgcttacttagggtttaatttattcttgtttcactagctcttttaaggtacaacctcaaatcattaatacaaagcctttttttcttttctaatacaactattcagttacatctaccaggttttgatatgtgatattatgattttaacctagttcaatttttttttatt

SEQ ID NO: 303917 - DNA, 606 bp, Homo sapiens
ttagtattattgtaaatgtcttcttgatgaaacaactcttttatcattataaaatgttctctttaaatgtgatactaatccttgttctaaaatctatttttttctgatacagacatagctattctagctttttttaaatttatgcttaacgtatagcttttaaaaatagttttattaytaacttatttaggtcattgtatttaaaagtatctcatataggcagggtagagttgagttttgcttttttatccagtctgacaatctcttccttttaatttgaatgtttagaccagtggttctcaaactttctggtcatacgatccctttacactcaacatgattttatttatgtgagttagatatttattgatagatatttatttgttgatactctattagaaatttaaaaaacatgaaaaagtttattgttacatttaaaaataagaaaaacagcattatattttaacacatatacatttatgaaaaataataacttatttttgaaaagactgaaaaaaatgtagctttttttaatatttttgcaaatctagctttctatttcttctaatgtcaattttgtaatatttgattgctgactttttttaa

SEQ ID NO: 303918 - DNA, 531 bp, Homo sapiens
gtcacctgaactcatctttccttttgggatgaggggtgacacacatactacatgtcaatttaattaagaaatctgtcaaattgatccaatttctggtaaattgatttattgtactgaattgtatacatttttaaaagccagttactctagtggcacgcaaaatcagtccaaattttggtctcagaactgttgagttcagcaaagccttctgaaagctgagaggcctaatcatgaatttgccttcaactgttgaacttgtgaagattcattccaaataaaactatgtgacattgtgctgagagttacatgacaattraaatgaaaaaataatattgatcttaagattcctagtgttgtccagagttaattataggattctgattggtcagcattaaactactccaaaattaacaaagaaatagtgcatttctccacctcctgacttcttaacatcgagctgcacctcaagaacacagagtttatatatagatgggtttacattcagcaaaaatgtttgcatgtcaggaattg

SEQ ID NO: 303919 - DNA, 531 bp, Homo sapiens
gtcacctgaactcatctttccttttgggatgaggggtgacacacatactacatgtcaatttaattaagaaatctgtcaaattgatccaatttctggtaaattgatttattgtactgaattgtatacatttttaaaagccagttactctagtggcacgcaaaatcagtccaaattttggtctcagaactgttgagttcagcaaagccttctgaaagctgagaggcctaatcatgaatttgccttcaactgttgaacttgtgaagattcattccaaataaaactatgtgacattgtgctgagagttacatgacaattgaaatgaaaaaataatattgatcttaagattcctagtgttgtccagagttaattataggmttctgattggtcagcattaaactactccaaaattaacaaagaaatagtgcatttctccacctcctgacttcttaacatcgagctgcacctcaagaacacagagtttatatatagatgggtttacattcagcaaaaatgtttgcatgtcaggaattg

SEQ ID NO: 303920 - DNA, 584 bp, Homo sapiens
caatttctatcgatcagattgactcacttcatttgagccaatgatcctgttacaaaagctgcccccttccagtgttttaccggcacagggaaacctgcagatgctctgtactgtaacaggcagtccagagaagggcatcagattgtgttttccagaccctgctaaacataatctgcaggatgtaattcttaaaaktgttcatgagttattatcatttatgctcttgcttcaggttgagataaaggttaagtctatttaattcattttaaaaataaacatttgattgtgaatgtctatgttaaccgcaaaacaaatgtagtatgagcaatactgtggcttagaaatgaggtttccctgaactggaaacctgtgaggaaagcagctgcagaaaggaaatatttgcttataatgacagattgttattaaattaatagttacctttgtctgtaaaaggaggtgttaaataagtgccagacattattgctttagtggtcaatactaagtggaatcatggatttagaaaagatgtaagaagtgaaccttctagaaagagtttatgggaaaggataagaatagagaagtag

SEQ ID NO: 303921 - DNA, 582 bp, Homo sapiens
tctgcttttaattctattatttttattgctatagcccttaccataattctttgtaatgtaagaggctgtgatatttattgagctacaacaacgagtagagatagaacattgcattaggcccaagttacatggagaaagtatggaaagcccttttacagatatactttttacttattttgtggcagtaagaattccttgaattgtttttcatgaccagaaaactcttgatgtaaagttgaggtgagctctacaaggtgatagartttgcatttattaaatctataccaaaatcacacattcagcttaggaatccctgttttttgttttgttttattttgtttggttggatgtgtgtgaattttgttggactgctttagaagtccagtaaactgactttggaagtccactgaatggttctttgctggaaaagcaatgatttcaattacgtaaagctagacaagcatatgttatgttttgcacaaatgtgtcttagtttgaaggtgaactagaactacaacaaatgctttttgttaaaatcaacaaatagcatttgatttttttaatcaaaattgtctgaaaaac

SEQ ID NO: 303922 - DNA, 559 bp, Homo sapiens
ttattaaccaaaactagtaaaggagaagtggccagattctcatccaaagcaaccactttgattttttgggggggagaaaaaggagtttaaaaaatgaaaacttgacaaggaagacatacaagaattgtgctgagtacaatgtctgtgtgtcttattctggtgactatcrtgggtccctgtccacctggatcttgggctggcatcatctcaacaaagctggattgttaatgagccaccttgaagtaactgctggtactttgcagctgggactcaagggttggtctgtatacctcaagattagtctgtggaacttctaagaaggcacataattggatacttgcatacagttagataaatgtgaagagagtatatacagtgacaaagagagggatgtggagtctattttaaggctaagggaaaaggcttctgcagtttgcttcaaggttatatcttgaaactcaagagaaaagaagttttgaaatgcattttgaagttaaactgcctggttacagtttcacagggcaggtggcgggcgtttcccacatgccagcagctgtgc

SEQ ID NO: 303923 - DNA, 550 bp, Homo sapiens
gcacactgtgccaaataaggggaggattctccaaacacaggcaggratttcagaacctgggaagccgacaagattagcaaaatgaccctcagcatgtcttgaccaccttaattcatactttcttactcttagactcatgcaaagaccaaaaattctcaataaatgtgttgcttttctagatgtcctgggataggtagggaaataaatgtttaaatttcttaataatatttttattgcaagtttatagaaagactgcatgtaggagtaagactatcaaggatgttattttttaaagttatacaagatgaataagtcctggagatctacagcatagtgcctgtacttaacaatactggatagtatactgaaaaattttctaagagggtagatcttatgttaagtactgttatcataaaaataattataataaaggaagttttggagatgataggtttatggcatagatagtagtgatagtttcatgggtatatactcatctccaaaatccctgagttgtataggttaaatatgaacagctttttgtatgtca

SEQ ID NO: 303924 - DNA, 575 bp, Homo sapiens
aataaggggaggattctccaaacacaggcagggatttcagaacctgggaagccgacaagattagcaaaatgaccctcagcatgtcttgaccaccttaattcatactttcttactcttagactcatgcaaagaccaaaaattctcaataaatgtgttgcttttctagatgtcctgggataggtagggaaataaatgtttaaatttcttaataatatttttattgcaagtttatagaaagactgcatgtaggagtaagactatcaaggatgttattttttaaagttatacaagatgaataagtcctggagatctacagcatagtgcctgtacttaacaatactggatagtatactgaaaaattttctragagggtagatcttatgttaagtactgttatcataaaaataattataataaaggaagttttggagatgataggtttatggcatagatagtagtgatagtttcatgggtatatactcatctccaaaatccctgagttgtataggttaaatatgaacagctttttgtatgtcaatcatacctcaataaaatggttttcaagaagtacataa

SEQ ID NO: 303925 - DNA, 438 bp, Homo sapiens
cttccaactaacagtataagaaagaagatagatatctttcactagaggcaattttagggaaaaatgatactgggatatataacattttaaatgaatacagaatgtataccaaattgcttttgagtgtggtggggtaaggaaaagaactttggaaaatttcttcagaacccaaggttggaatgaracattattttaatgaaaaaaaatatcatttagaaatgtaatttcacctaagaatgttgtgactttgcagtcatagccaagtctgagtgaatggtcccatctgacccaggccacagcttcaggggcatggccctggaggagtaaggaaggtgaggaaacatgcctagccatccatgttgaccaaaacctgcactggcaacccatggggtgctacatatcaaagacaggtctcagtcacatcttcattgccaaggt

SEQ ID NO: 303926 - DNA, 588 bp, Homo sapiens
ctgttgggttgatcacagtgactgtcttcattatcaatcaggcaacagtggctgagtcccaactgtgtgcatgacactaggttggatgctgtggagataaacattcttctgggaacatagttgtgatattttccagacctatgtataaagtttccttcctcttgttttttatataggtgagttattccaattagatttgactactacttaattcttaaatttctgggttgttattttttcttattacatgaatttttttacctttcttactttattattggtgtacataagtatctttgcttattcattctcatatttctgtccattatagatatgtatggactatagatgattgtggttttaaatgataattccccatatttggggatcacatyagagtttttgaagttttacctcccagtatgtcatctacgtcttcctacaacatcctaagggtgactgggggggtgatatcattatctttttaaaggctcaagacagtgaaagggacttggcttaggaatcaggttcgctgactctttgttcttgtcatagtaataagatcgtatattcagcccccaaatgaac

SEQ ID NO: 303927 - DNA, 591 bp, Homo sapiens
actcaccaggttattatgggagaaagatkcaggacctgtggtcatggcaaaatagaaacatcttctacagagcctggcatcagaagtacataaatgcaaaaggaaaaccaagatgtgaagtgtacaaagcctgaagatagtctgtggaaaactcttcccatcaggtacaaaaaagcagaggattcagatccaatagagatcagtttgaatggaaggtattgactatcagggatatattcagtaatacagcaaatacaaatgtgaatgcacctatgctttctgccttattttgataaaaattgtgcaaaataaatcttacctgaattcctatgcttgtaggacacaaaccaatagcagcactgttaaaataaataccatttatatctgtgacaaacgttaaggaagcctgaaaagttttcccaaaatttgacaacaatactaaaaaattatattgctaagataagttatcactttatgaataatgaaattaacaaaccattcttgacattggtgacatcaccaatatgagttgtgaagttgaaacttttctaaatcaacaataataaatatttttttttatcaagcatgtta

SEQ ID NO: 303928 - DNA, 591 bp, Homo sapiens
actcaccaggttattatgggagaaagatgcaggacctgtggtcatggcaaaatagaaacatctwctacagagcctggcatcagaagtacataaatgcaaaaggaaaaccaagatgtgaagtgtacaaagcctgaagatagtctgtggaaaactcttcccatcaggtacaaaaaagcagaggattcagatccaatagagatcagtttgaatggaaggtattgactatcagggatatattcagtaatacagcaaatacaaatgtgaatgcacctatgctttctgccttattttgataaaaattgtgcaaaataaatcttacctgaattcctatgcttgtaggacacaaaccaatagcagcactgttaaaataaataccatttatatctgtgacaaacgttaaggaagcctgaaaagttttcccaaaatttgacaacaatactaaaaaattatattgctaagataagttatcactttatgaataatgaaattaacaaaccattcttgacattggtgacatcaccaatatgagttgtgaagttgaaacttttctaaatcaacaataataaatatttttttttatcaagcatgtta

SEQ ID NO: 303929 - DNA, 462 bp, Homo sapiens
ttcccaaaatttgacaacaatactaaaaaattatattgctaagataagttatcactttatgaataatgaaattaacaaaccattcttgacattggtgacatcaccaatatgagttgtgaagttgaaacttttctaaatcaacaataataaatatttttttttatcaagcatgttagagggaattttctattctgtctgaatcagttatctattgcctcagtartgctgtgtaacaaatgactgcaacacctcagtggcattcaacaataaacatactgtttatgagaatgaagtcagatgggagttgaccagatggctctcttgatcttagcttggttttctccttttctgtgggtaggttaccagtaggttgatctaggctggcttcagctgacaaccagggtgactggggtatgctgcacttatctaagctggtctaagtacattcttatcaaaaggcag

SEQ ID NO: 303930 - DNA, 487 bp, Homo sapiens
gcaagctgaacctggcagggactgccccagttttaatagtgtgaagttaaaatgtaattttgccttgattttgggtattaaattagtcacgatttatacaaatgactattgtgggggaaatatgcaaagcgagtgttctgcctcacatagctcttcatctaggagagccagtccagttcttcaccaaraaaagactccaaaccacaatcactctattcacttagaagaactataattattactgttgttgttgttattcatgtactacacaccgctgttaaactgcccaaaacacaccggaatttctgaacataagtaagaaatgagttcacaacattcctggtttcatgacagagataagaaaagtatgaaaagactcttctgttttcacttgcatgcaagaaaaagcagcagtttactttcttgtagaaagaaggctttgatggtaatactgtacatgtacctttgtccctgttagtcatagctg

SEQ ID NO: 303931 - DNA, 461 bp, Homo sapiens
ttagttaaaataatccaaaatcttttaaaaattgtctttggccacttttctggtaggaactgataccacaactctcatgttttgggctgatcctacaaggcagggaggaaacctggtggagctggtgggaccattgttccaggctctcaatctgtgctgtccactgayggcagcccatctgcaactttagtgctgagggaagtattcctgctccctgctgctagataacacggtgaaactctactaaaaatacaaaaaaaaattagccgggcatggtggtgggcacctgtagtcccagctgctcaggaggctgaggcaggagaatggcgtgaacctgggaggaggagattgcagctagccgagatcgcaccactgcactccagcctgggcaacagagcaagactctgtctcaggaaaaaacaaaaacaaaaacaaaaaaatacagaatccctgatccaccc

SEQ ID NO: 303932 - DNA, 374 bp, Homo sapiens
acatgagtaccaaaaggttaaaaaaaaacattgtttcagtacaagctagttttagcatcttggaaacatctagtaaaggttaagttaccaaatttgaattggatgatggtgagggcaaatacaaaamaaaagtagttaattatcataaaaacctaaaagcattctgttttcagattgctttatgtcttaaaatttttgctcccttgtaaagaaaccaaaactagaattcaccaaggatttattgtgggccagaagacacatgtggacaaccactaatagatctctccttagaaaacagagcctagcaatgatgttcacctatgtattttcagtgacattaaattaatatggtattaatgtattattcttcatga

SEQ ID NO: 303933 - DNA, 503 bp, Homo sapiens
ggtcctaacacatgccaggagccatagccatttcccaccacagccaggctctcttacacatcctcgaatgaaggacttaaaactcaaacacggcctgagagtttctttcatctcaggtctgtacttattctaaagtgcatcctcctaaccacccaggtttttcactcctttaggacgtattcaccacctcagcctaggtggtgatttcacagggaaaacatggtgaatcactttttcactgcctcattgacataatgaggataatatacatatgaagattatatatatacatatkccatttactacttaaaggctgggacttgacaagtccttttcttgaacacaaagactaatatcacaaagggcatcttttttttcagtacctggtttctagttgctaataatctatcaggctcataatataaaataaatttatgttattttatgtgccctaaaagggctataaagtacaaataaaccttgagctatctttcctggaagtt

SEQ ID NO: 303934 - DNA, 514 bp, Homo sapiens
ggttgcaataattttcatttctatcagctatgtgtaagaattcttattttcctacaactgaagtcagtcctaggtgttattggtatatttgccaaccaaagaattccattgttttaatttgtattttcctaattaccagtgatattgatcatatttcagtatgttcattattcatttgcttttctcttccgtaattgttcattctggttcttgactgatttttcattatgggtgtcttttccctttcccatttgtagtagttctttgtctagttagcattttaacaggtaataggtgtcatagaagaaatatagagcaatgtaagtggaatcagggttatgaggtgttagctggggagatgggaattgcaattttaaatggagtgatcaaaggtgggacttattgaaaggtgacaattgagcaaggagtgaaggaggtgtaktatgggccatgtggcttattggggaaagagcattccctgtaaaggtagccagtgcaaaatctctaaggctag

SEQ ID NO: 303935 - DNA, 482 bp, Homo sapiens
tcagatatgtctttatcagcagcatgaaaatgaactaatatacaaccctttcccaaaataaacccccttctacctggggaccagactgcctctataggactaataaattatccacagaattagaaattatggtttaggagtcatgcagccagagacatcaagattcgaaatctccccagttgctcctagggataacatcactattgtaaaacccaggaagagatattttacagaccctgaactcaatgtgtcggctggagccacccagatcaataaactgattcatctggtcttgtggcccccacccaggaamtgactcagcacaagagggcagcttcaaatctgtatgatttcatctccaacctaaccaatcagcactacccatgtcccaatcccctactcatcaaattatccttagccctgatccctgaattttcagggagacagatttgagtaagaataaaactggtctctcattcagc

SEQ ID NO: 303936 - DNA, 568 bp, Homo sapiens
atcaccagtaaaagaacaaatggacaccaagtgcctccagatatgatgcgctgagaaagacacaacagttctatytcgttcatgatgtccttgccaaaagtgcatagcctgaattttacaatggggaaagttcagacaaacgcaatttgagggacattctacaaaatatcactggcctgttaaagtctccttaaaatgtcaaggtcaaggacatctcagaaaggtgaaggaactgttccacgttaaaggcaactaaaaagatgtgacaactaaatgtgatgcataatcctagattggattctggaccagaaaaaggatattcaggggacaattggaaacatttgaataattaaattgtaatattgttatgaatgttaactttctaattcttaccattatgtcacacacaagaagttggcatttaggggatttgggtgaagggtatgtggaattatttttgctactatttttgcaacttttttgtaaatctgaaattatttcagaattaaaagttttaaaacaaacggaaatataaataatagagttgctgctccgctgtttaccactg

SEQ ID NO: 303937 - DNA, 568 bp, Homo sapiens
atcaccagtaaaagaacaaatggacaccaagtgcctccagatatgatgcgctgagaaagacacaacagttctatctcgttcatgatgtccttgccaaaagtgcatagcctgaattttayaatggggaaagttcagacaaacgcaatttgagggacattctacaaaatatcactggcctgttaaagtctccttaaaatgtcaaggtcaaggacatctcagaaaggtgaaggaactgttccacgttaaaggcaactaaaaagatgtgacaactaaatgtgatgcataatcctagattggattctggaccagaaaaaggatattcaggggacaattggaaacatttgaataattaaattgtaatattgttatgaatgttaactttctaattcttaccattatgtcacacacaagaagttggcatttaggggatttgggtgaagggtatgtggaattatttttgctactatttttgcaacttttttgtaaatctgaaattatttcagaattaaaagttttaaaacaaacggaaatataaataatagagttgctgctccgctgtttaccactg

SEQ ID NO: 303938 - DNA, 596 bp, Homo sapiens
aaacataccaatggaaagtaaaggttgtgctacgcgactggcaaactggacagtgcttgcacgcaggctgtgttattgggtgaaaaccaggtgggaggatttgtttcaagcggcgctgttaccaggaagacaactttctggacaaagcagatggccaacaagaagtggggcattttcacgttaacaaaatcaacygcccaatagattctgtgaacaatataaagtacgtatcttgaaccatttgtgtcagaagctccaagtcagcccaatctcccaggcagggaagcagacgttgacagcttgtggagggctgcatgcacacctgggagggggcaaaggtggggactgctttgagtgcttaacagagcgtcctgtttttattaacacttgaagttaataaaagagttgacatttcccatacgcaaaagctttctcctcctctgaacacgcaggatgcaaagtggaagagagctcaaggtttggatcctgacagctctgatttttaatttgagctacatgctgtgtgacccacagcaaattcctctacctctctgagccttcctttcatcttcagaaatgtagggataacagtctgt

SEQ ID NO: 303939 - DNA, 565 bp, Homo sapiens
gtgtgcatctgctgtctcacgctgggtgctttctcaagcagttaccaatcatcctgacaaacccaggaggggctattatctctactttacagatgtagcaactgaggttcagaagggttaaatcagagtccaaaggccacatgaccaaggcaagaacaaaacctaagactgtctccaaagcccgtgctctttctgctataccaggctgcatagggagtgagaagtgagttttgttttgtcttcacacaaaattgaaggaccaatttgaartaaaatattaatctaaaatcttcattgtcaaaatcatcttaaaataaaattcattacttgtttaaagatggatggcaaactcacataatagttaaaactgaactattaccttatgtgcacaatcccatttaatcctcacatcaacccactgaaggggaggttaggactatcatacctaatttacaggtgtggaaactgaggctgtgagaattaaagtgctcaccctaagagccaaaagttgaacccaagcctgcccactctgatgcctaagatctgcatcacctggctatattaa

SEQ ID NO: 303940 - DNA, 555 bp, Homo sapiens
tttcaatagtaaaataaataatggcagtaatagattataaactgtcacataaagtaagaatccttgaatttgtactcacgatagaggtgatggatggatggatggatggatggatggatggatggatggatggatggacagacggatggatggatgaacagacagatgagatggataagaaggaagagcatcatatcagctagttcagtgcataagctaaatctaaccttgaagaaacattagataaactcagtaaaataactrgcttgtattcttcaaaaatgtcagcgtcattaaaaacaatggcagactgaagaactgttccagattaaaggagactacacagacatggcaactaaaggcatcatggaattctagactgtattctatattggaagaaataaatatctaaaagacattattgcggtaatagcaaaaaaactgaatgtgggctaaaataaaagtattgcatcaacgcaaaatttcttgaatttcttaactacattgtgtttacttaaaagaatatccttttataaaatatccacactagatatt

SEQ ID NO: 303941 - DNA, 582 bp, Homo sapiens
atcagttgttattgctttaagcctctgagtccatatctgatataacttgacataagagtttattagagtatgagctctctcatgtggaatatatatacacacatgtatctaggaaaaaaatataagaaggaagtgttaataaatataggaaaccccattaacagaattatctcacccatgtagaatatgcacatacacacacacctgggcaaaaagagaggtggagatgttaacaagaatgttatctccagggagcaagaagagtgttaattatcttctttatactcttttgtatttacaaagtttcctttcatgaacagataaatatatgtgaatagcattatattttaaaggttgatttacctccacaactagactgtggcctccttgattgtagaggctctttttttcgactgtgaaccccacggcttgtcacatggtagaggtacagtcaatgctatatgaatgaatgaacacasaaagcctcaggcttatccccagattcaggattggactatagctaccaacctcgtcactggtccctgtactttctctaatgtgcactataccaaagctggtgcc

SEQ ID NO: 303942 - DNA, 308 bp, Homo sapiens
gaagccaccacttcacacggccagagcaggagaaagaaagagtggaggtgaggtgtcccacacttttaaataaccacatctcacaagaactcactcattatcacaagaacagcaccaagagggctatctgccctgattattcaatcacctcccaccaggcctctcttccaatgttggggattacaattcaacatgagatttaggtggagacaaaaatttaagccatatcaggktttaacttcattcattggcatgtgaatattcagtctcctcagaaacttttgttgaaaagaatgtactttcccaat

SEQ ID NO: 303943 - DNA, 399 bp, Homo sapiens
atggtttctgctacatttacacccatgcatacatggctcatggactataggaattctcaaggaaaaaaatacttttatgtggtggctcaaaaatattcagaaaaaaacttaaaaatcacaaagaaagaaagaacgaaaaataaaaactagtttcattcttggcactgataaamataatctgatcaaaagtgtttgagccaacaagttgtatggctcactactgctacttatacagaaatggtttactgtagtgtatttttatacaaagaagaaatcacaagcatattattttgccttaatttggtaaatattatctctgtgatttggatatattttaaaactattgagaacacttgttgccgatttttgcattagaaacatcactataagaacagcatt

SEQ ID NO: 303944 - DNA, 484 bp, Homo sapiens
actactgaaaaataattgaacataaatagaccaaaataactatagattcttaaatgattggggaggtgagaggtatctgagctgaaaacatttctacrcaattaacatgggaaggcttttatttttagaaaatggagataatgtggaccttgtattctggttaattttctagtttaattagaataaactatgtcaagcttttaaaatacttactcttccattaactcatttttcctttattcatttttatgtgccttcaggcaatttcctgttttataatgttagctcctgaagcatatcttataatttattctaaaatccccagtgtctgacacagagtaggtcctcaataagcagttaatgaataaataatattgtgctgtttagatatcatgttcacatctctctgcggttgaagaattaaaaacctgaagaggatttttttaacccgtcctagattgcacagcaaaaacccagtcttata

SEQ ID NO: 303945 - DNA, 517 bp, Homo sapiens
gttttggtaaagggatggagaatttcatttcacctggtaatttacagctgggattgaatctgtaatttaaattagcacctttattttataagccagaaaaataaagacaagacttcctccccaaatgtccttatgaatttatgtaaaagcctttgtattttttaaaatacrattttgcctttgatatttcgacttaaacctatacatcccagtgtccttatttaaggagctagattttttttttacttttatgaagcatggatttaatattattaattcaataaatatttattctacaccattgcagacactaaatgtatacagtgaaaaaaaaaagacataaactatcaagggtctcacattgaaagagatctcatgtgtaagaaaatatctcactcaatggtagtgaaagaataaaggcataagactcatgagaaagatggtagccttcaagatgattcccagtgatgcccaccgctggatctccacagccttacttagtcccctcccacactgt

SEQ ID NO: 303946 - DNA, 314 bp, Homo sapiens
aagacagctctttaaaaattgatatattgatatcctttgtatgataaggtcctattttaaagatacctcttcataatacttaaggctgctttttccaaactcagtggcttggccccctaagttataggaaaatagtcaggggcattctgcctcagtggrcagctcacgtgaagatgtacactcatgttttcagccagctcacatgacccactcgggttgaagctcaaaccacgcatgatgtttcaaaatccactttttttctcttttgttaaagaaactatatttaagtgcaagtcagtggtagtattgtgatg

SEQ ID NO: 303947 - DNA, 314 bp, Homo sapiens
aagacagctctttaaaaattgatatattgatatcctttgtatgataaggtcctattttaaagatacctcttcataatacttaaggctgctttttccaaactcagtggcttggccccctaagttataggaaaatagtcaggggcattctgcctcagtgggcagctcacgtgaagatgtacactcatgttttcagccagctcacatgacccactcgggttgaagctcaaaccacgcatgatgtttcaaaatccactttttttctctttygttaaagaaactatatttaagtgcaagtcagtggtagtattgtgatg

SEQ ID NO: 303948 - DNA, 595 bp, Homo sapiens
gtttcaaactagcctgggcaacataataaaacccccatctgtacaagaaaaataaaaaaaaattccagacatgctatgcattcaggaatgcttagtgacatcagttcagtgggtgcaattcttcatttgagttgatatttcatagtcttttaatcattttaaataaaattatcttgctagcaacaatgagtgaacaattaataaaaattattttttcaaagtaatttttattttaaaaaaagaaaaaaatttaaaacaatttaaactattttatcctaatttttttcactcctctgctattcaaaaagttccacttctttctataaagcaactagccataatttaaaacatttactgtttcttcatccttaactgcggacatgccaaataccttgyagaaacttttttttttaagctgtcacaaaagatagctatagaccaagaattttattccagggctttataaaatcaagtttagtgtttgacccattcttccttatttaaattggtcctgattctcaaagtagtggtcaataattaaacaggtttccgtaattctaataaagcccctcccatatttgtagaaatattctcc

SEQ ID NO: 303949 - DNA, 593 bp, Homo sapiens
aataaatgtatattgtttacctattaaaggacatttgagatatgttggatatatgattttactgattttctgttaatttatctaccaggaaatttaaattatgcatgtggcttatgtctccatgggacaacacagttttagagagtaaatccccaactttcttgaacatgtctacctatagtacatgcaatttaaatctatcctcagtatttactttcaaatagcaaatctgtcaagctctataaaaaggtggtgtattttataaaatgtatggaaaaataaaaatttcaaaaaggcaaaacaaaaacagagagagaaattctcatactttctttcagatctccagtagcttatgtgatgtacycttttagaagctaaaaaaatattacttgcaactttgtttatgagccaactagctaatcacatgtggctaatcctgacaggcttaaagaaacagagagatggaaaaaaatgtttatttgtaaacacattttaagttacatataaaattttgtgttaggtttaaatatcttgttatctatttagtacttatgtacaaatactggcctaagtactaaattaatataaaatac

SEQ ID NO: 303950 - DNA, 645 bp, Homo sapiens
tattccaaattgacatgagtgtaaatgacacactacagtctgaagactttatgcagaaaaaaatgaaaatatattattggcaatttacattgaattgatgctgaaataatttttttgacattttgtgttaaaatacattactaacattagtttcattggcttcagttaactttttaatgtagctattagaaaattctattatatatatatacacatagtgtacatagacacattgagggattacaggcatgtgccatcacacctagcctattagaaaattccaaattgagtatatgtcttgcttatatttccacaggatgttgttgcttttgagtattttgagtggacwtgtgtataacttgtaagctttgtgatgaacggtagattaaaaattactctaatccatgacaacgcttgagtctttgagactttcttcaattcaaaaatttaccacaatgtagtgaagcagtgatcgcattaaagtttggtttggattggttagtgtagaagttgagtgtatggagtttgggaggactatttttaatttggtaaaagatttttcctataatctgcagctaaccatagaaattaacttaacaaatgtctgaagaaaaaataaaaaagtaaaatttaaaaaatcagact

SEQ ID NO: 303951 - DNA, 574 bp, Homo sapiens
gagtactctggttagacattagaccgtggaacaaagttgaaacactaagaacatttaagtccttcaccatcatcattgccatgctttgctcttgattgcttttcttatctctgctagcaaggagctggtgaggaaatcacgtggtcagcaggcttggggaatcaatatgctttgttatcatttattcccagctgtagtgctgccgttgtcctggctgccaagcactgtcacctcccgggaggcacctagagaggttaattagtttacrgctggccataattaggagcaaaaagcagcaagaaagaagctcttcagaatcctaacaaaaagcatatgcaaaggtgatgctgtcagcttgggcacactgtagtgttttaacgagaaactaggcatctaaaagtttggaaattgctagataggagtgccaggtaaaggcataattacaaagattaagagacatccaggaattccacagtggtgagaggctgtgctgggaagaaggagacatttaggcacttgactgaccgggccatccctgtgagccagttttctcaaaagtgaaatgaggtgtttc

SEQ ID NO: 303952 - DNA, 604 bp, Homo sapiens
ctccaaaagcttcttctgttggtgagtcagaccaaagaaacacacaaatcccagagtggggagaggaagatgccctggatatgcccataacttcattgagtcacttcattttggtggatccctygcagttaatatacccttcagaactaccttccctcgactacatgtgaaaggcctcccaggcctctctttttcactctttttaatttttcttcatagcattctattttttattttttatctctttattgtctctgtctcccactgcactgtcagctccatgaagccaaaatgtttgattattttgttaactcctccatcccaaacacctagaataatgccaagatgatagaagcaactcaactcatatttttgaataaataattgagtgtatgaatgcaggagaaaaacatgaatatccattttacaaaggaggaatctggttttcccagaggttaagtaatttgcagaacttacaccgttcgtaaatattagatctgttatgaaaacttgggtctgtttgagtccttaccctggctctatccagcacaccatgctacagtccaaggatggtgtggctttttgcaaacgttcacccagtcga

SEQ ID NO: 303953 - DNA, 469 bp, Homo sapiens
gacagaccctgaggttcttgtgagataccatcaagggtgtcaatatttgcattataagaatcccaggataggataaagagaaagggggcagaaaaacaagaaaataatacctaaaatgttcacaaatctaatggaagatatgattatacacatccaagaaattaaattaactccaaacaaaatacaatttaagatacacagtgagacacattataggcaatcattagtatcataaaacaaagagacttttgaaagctgaatgagaaccaagacttgtcacacatataagagattctcaataaaaataagaactaatttctcacatgttggccaggggtcagygggattacatattttaaattctgaaagaaaaacacctctgaactacgaacctgtatccagaaaaaaatatctatcaagaatgaaggagaatttcatacatttctagataagcaaagcattgaataat

SEQ ID NO: 303954 - DNA, 622 bp, Homo sapiens
gatatataaaatgcaattcttgctttcaagttgactggagatgagtggctgaaatagacaaacagacctgcacataattaagtgggtgagcaaaacgccatcataataataagcccatgagcaagagaaaaagcctataaaccgatgataagaagtatgttttgtctgrgatgtaaactaaaggagaactgggattgtaaaaggctttaaacatagagagcacagtgtacaatggccaaagagcagaagaaaacaaggcacaccctaccctgcacgttggtctgtgtacctgcctgtaattggaggtgagaaacagtgaagtaacatcagattttcatttaagactaatcactctggctacaacttggctaatggatcagaaactgcaaagcctgagatcatgaaaattagaatgatttgaggtagttcacttagtaggtgatgtgagctgaactaaagtagaggtagtgtgactaagagaagaagaaccttaaatattaacagctataatgattaatacaggaagtggtggttgatttcagtaaacgatcaagcaaggatgcatctccagtttccagatcacgggacgactgttctcagcctgtaaattccatccgtttga

SEQ ID NO: 303955 - DNA, 652 bp, Homo sapiens
ttggtctggccttcatgatcaaatccaaggtcacttctttctttcatcacctcaaacgtttctgacacagagctcagtgcacaagaaaaaatcacttgtggtatcagaatagatgttggaattggctgggcccggtggctcacgcctgtaatcccagcactttgggaggccgaggcaggcggatcacgaggtcaggagattgagactatcttggccaacacrgtgaaaccccatctctactaaaaaaattacaaaaaaaaaaaattagctggccatggtggtggacgcctgtagtcccagctacttgggaggttaaggcaggagaatggcgtgaacccgggaggtggagcttgcagtgagccaagattgcaccactgcactccagcctgggcaacagagcaagactccatctcaaaaaaaaaaaaaaagaaaaagaaggagtagatgctggaattataaatcttgattcctaactccacactttactaacttgataatgttaggctatttaattagcctttctgagttccatggcattcttcagcaaataattaaatataaaaatacctattccagggggctgttgtgaggaagatatgagggaatataggagaaagtgctttataagctccaataggctctaaatagcatg

SEQ ID NO: 303956 - DNA, 589 bp, Homo sapiens
agatagaaccttcagctgtggacacagccagcaggcagcaactccactgggaagggaatcagtaatccaatctctctcctcygtcccacttattgcttgctcatattccctattggccgagcccaaattcagcctagtggtgagacaggaccattggtgcaggtctcttggggcatagagcagcccgaagaagaataaagaggagtgtcagaaaaatgtcagcacattcctctgaagcacatttcctctctcagtgcctggcttcagtcaagaatgattgctatagggtagtggttctagaactctgctcccagagcagcagcttctcgcttggggaaattcttagaaatgtaaattcttcagccccactgcagccttacttaatcagaatatgtgaaggtaggacccagattcttgtgttttaacaagccattcagataatcctaatgcatgctaacctttgagaaccaatgctctaggaaggtgggagccttggttgagagggtcccggaagaaggaaaattatcagtcaaagagcctccgtcatagactgttgtgtgatgtgcaaataaacttacattgtgttgag

SEQ ID NO: 303957 - DNA, 589 bp, Homo sapiens
agatagaaccttcagctgtggacacagccagcaggcagcaactccactgggaagggaatcagtaatccaatctctctcctccgtcccacttattgcttgctcatattccctattggccgagcccaaattcagcctagtggtgagacaggaccattggtgcaggtctcttggggcatagagcagcccgaagaagaataaagaggagtgtcagaaaaatgtcagcacattcctctgaagcacatttccwctctcagtgcctggcttcagtcaagaatgattgctatagggtagtggttctagaactctgctcccagagcagcagcttctcgcttggggaaattcttagaaatgtaaattcttcagccccactgcagccttacttaatcagaatatgtgaaggtaggacccagattcttgtgttttaacaagccattcagataatcctaatgcatgctaacctttgagaaccaatgctctaggaaggtgggagccttggttgagagggtcccggaagaaggaaaattatcagtcaaagagcctccgtcatagactgttgtgtgatgtgcaaataaacttacattgtgttgag

SEQ ID NO: 303958 - DNA, 589 bp, Homo sapiens
agatagaaccttcagctgtggacacagccagcaggcagcaactccactgggaagggaatcagtaatccaatctctctcctccgtcccacttattgcttgctcatattccctattggccgagcccaaattcagcctagtggtgagacaggaccattggtgcaggtctcttggggcatagagcagcccgaagaagaataaagaggagtgtcagaaaaatgtcagcacattcctctgaagcacatttcctctctcagtgcctggcttcagtcaagaatgattgctmtagggtagtggttctagaactctgctcccagagcagcagcttctcgcttggggaaattcttagaaatgtaaattcttcagccccactgcagccttacttaatcagaatatgtgaaggtaggacccagattcttgtgttttaacaagccattcagataatcctaatgcatgctaacctttgagaaccaatgctctaggaaggtgggagccttggttgagagggtcccggaagaaggaaaattatcagtcaaagagcctccgtcatagactgttgtgtgatgtgcaaataaacttacattgtgttgag

SEQ ID NO: 303959 - DNA, 589 bp, Homo sapiens
agatagaaccttcagctgtggacacagccagcaggcagcaactccactgggaagggaatcagtaatccaatctctctcctccgtcccacttattgcttgctcatattccctattggccgagcccaaattcagcctagtggtgagacaggaccattggtgcaggtctcttggggcatagagcagcccgaagaagaataaagaggagtgtcagaaaaatgtcagcacattcctctgaagcacatttcctctctcagtgcctggcttcagtcaagaatgattgctatagggtagtggttctagaactctgctcccagagcagcagcttctcrcttggggaaattcttagaaatgtaaattcttcagccccactgcagccttacttaatcagaatatgtgaaggtaggacccagattcttgtgttttaacaagccattcagataatcctaatgcatgctaacctttgagaaccaatgctctaggaaggtgggagccttggttgagagggtcccggaagaaggaaaattatcagtcaaagagcctccgtcatagactgttgtgtgatgtgcaaataaacttacattgtgttgag

SEQ ID NO: 303960 - DNA, 520 bp, Homo sapiens
ttcatatgttcacttaatttcccttattcattataagcctagagaggaaaactttccatttctatgttaggagatgaagatgtcaaaattcagagaattaaggactttcacaagtagttggcagagttgttgagatcataagagtgcagagcttgactagtgattatagaatgaaacagaaacttcttagaaaagcacagaaggtatcctatctcttgatctgatcctgactttaaagttaccagcccctccagcctctcatggccctgggatgagtccgggtrtttctatgctttcacaaagactgcttcttctgctagtatgtctctccaactctttcccctgaacaccactgactgatctttttatgactctgcatcaagagacgactttttgaagcttccctggaatcagacaatctttcttattcctggctcccagggtaacccatgcttgaacctgcacaattgttccaacccatattactattgtgagtagataagtttgcctcacccagaga

SEQ ID NO: 303961 - DNA, 610 bp, Homo sapiens
ggacactgacagagcttcaaggctctaccaggaactgaactgagtgcttcaactctctgcttcatgattcartcagcgaggtaatactatttcctttcacagaatgagaaagctgagactcacaggctaaggtccttgcctacagtgacataactcataaatagtgaagccaggatttcaaaggtgatttcacagctcggattttcgagggcatcagtctttatctagcttagaccttaggactttttgtcagacacagaaattaacttgtcagtctccaatgtttccacattttctgaagatgtcttcgtgtctttgtttagcagaaaactcacctttaatgcaaattccattctataatgaattccacccagccattcatttttatagacttttttatacaaacatactgcaaaggtgtttcagattgtgccatataaatcataatggcaagttgatggttttctttctatacactttatcttttctcataccttttctattgttattaaatcaagaaaatgtttacatgttctgatggaagtaacacaaaaaaagacaagatatcctcgtgtatgctaagggactgcctaaatgaatcattaagttc

SEQ ID NO: 303962 - DNA, 576 bp, Homo sapiens
tgaaatccaacaaaaagaagccagaaaatcaatccaagttttgaaaaatgacatagctatattaagaaagaaccaaaaagatgttctaggaatgaaaaatttattgcaggaatttsaaaatacagttggaaacctgaataacaaatgggaccaaacagaagacaagatttcagagctcaaagattagtcctacaagttgactgtattagacaaaaaacaaagcaaaaagaattttaagaagtgaacaaagccttctagaaatatgatattatgtaaaacaatcaaatctatgacttattggcattcctgtgagagaataatagaaaatcagcaacttggaaatcatatttgaggatataactcaggaaaaatttcttaatcttgctaaagattaagaaacatgcagatacaagaaatttagagatctcctatgagatactacacaagatgcccatccccgaggcacatagtcattaaatgactatccaagatcattacaaaaacaacaaaaacaaggcaaaacaaaacaaaacaaagtttaaatacagctagaaaaaaaggttatattacctgtaa

SEQ ID NO: 303963 - DNA, 604 bp, Homo sapiens
acaccattgtgttacgttccacctacaaatattctcactacttctctgagtgatattccttttmtttctcttttaattatgaagaaaataaatatctgagcatttgtagcaatatgaaagcatatacagtcaaatttactttttgatctttttcctttcttccctctcattccagaacgctagaggtgactcttcagaggtgacctctattttcagtgggtgtgcatcttcctaaaatccttatgtgtcttagtttgctagggctgcaataacaaaatatcccaggctggctggcgtaaacagccaaactttctcaccatcctgaaagttcaatgtgagggtgtcacagattcaatttatcttaaggcctctctgcttggcttgcaggtgttcttttctctgtaagcactcatctccagtgcctctgtggcctctgtgtgtctacatttcctctttgtaatgagcacactggtaagatgggattagggcccaccctaacagcttcatttaaacttaattacctgcaaatcagtcacctcttgaggtcctggggttagggcctcaacatatgaactttggggaggcacattccgcccacattgca

SEQ ID NO: 303964 - DNA, 556 bp, Homo sapiens
gatgggcaaaactcactattttaatatacatttttcttgtaagcagagagtctgaatatcttttttatatgtgccatgtgtaatttagttgctgtgtgtctaaattgtctgtttatattagatacccattttttattgggctgttggtcttttggttattcataataattctttatatattctgactatttgtactttatctgttttacattttaaaatatttatattagatgtgacttatagcttaaccttgtttttgggatttttcaacctagagagattttacatttttatatgatctaatctgtcagtattttccktttaaagatttgtgtgtttgggtatgtcatgtctactaacagacaatggtaccattttcctgtaagttctttggtatgaattaattaaacgtatttctcttttttaccatgtcataggtttagactatactgaagaacttgcagtgaaacatgaaggtctactttccttgtccaacccctcactgcacacacactcctaccttgcctgcctgggcaaccacattcactgcttagca

SEQ ID NO: 303965 - DNA, 564 bp, Homo sapiens
tttttttttctgtttttctctgatgcatatttttctttccatttaccttcgtatctataccatcattttgatattataaatgggatcttttcctttttacttttttttggggggatggtacagagtctcactctgttgccaggctggagtggagtggcgcagtctcagttcactgcagcctccacctcctgggttcaagcaattctcctgcctcagcctcccaaatagctgggattacaggagtgtgccaccatgcccagctaatttttgtatttttagtagagacgaggtttcaccatgttggccaggctggtctcaagctcctggcctsaagcaatccacctgccttggcctcccaaagtgctgggattacaggcatgagtcacctctcttggccattcttattaaattttataatttgttattgctgctatatcagaaagttattttctttgcatatttatcttgcatcattaaaaaccagtcttgtctctaagaacttaaaaatttatgaaaaaatataaagttaatattcaaattagaatataggaataattagggtgt

SEQ ID NO: 303966 - DNA, 449 bp, Homo sapiens
atccacctgccttggcctcccaaagtgctgggattacaggcatgagtcacctctcttggccattcttattaaattttataatttgttattgctgctatatcagaaagttattttctttgcatatttatcttgcatcattaaaaaccagtcttgtctctaagaacttaaaaatttatgaaaaaatataaagttaatattcaaattagaatataggaataattagggtgtaattctgtgacctattgtgtaaattaccttcagggttctaaaaggttcaaatacacttataatgaccataaggagcttaatggaggagcaactcaacctgatcctttaggaaaaggcagctccctaagcaatggattacagtgaacaatggcatgaagatgagatttagtatggtatatgcttaaaacagwgattagcgtttcttggcagatcagagaggg

SEQ ID NO: 303967 - DNA, 457 bp, Homo sapiens
agtcttaaatcttttatcccaacatattttatatgtaattgttatctttctctaaaagactagttacattctttaaattgtgctttgtcctgttggcatgaatataatattcatgtaaacagtaaacagatcagtaaacagatctactcacacaaaacaaactgatttccattgttgtaagtacctatagtcaattgctattctatttttcacaggccattgttaagggaattatcggaagcttcataaaacaatgtatatcacttccatggtttttggtcatttgtttttattcagtttatgaataaatgtcaataggtttattttgtttgttaaggagagaaaarataaatttaatattttcatccaaatttagtgggactcaggtatctaataattctctggcttgacaggacaggaaagaaatagaagtagtaaatatcatttccaacgctgt

SEQ ID NO: 303968 - DNA, 573 bp, Homo sapiens
gagtttatgtctgattacttcatttacctgtggtgtgaccttttactcatttaccttattggtaaatttaagaatagatttttgtttattgagatatactgaaaaatgcacaaaccataattgtacatccattcttagtgaattttcacaatgaacacattgataaaaatagtttcaggtgtggtagcttatgcctgtaatcccagcactttgggaggccaaggcaggcggatcatgaggtcaggagtttgagaccagcctgactaatatggtgaaaccctgtctctacttaaaaaaaaaatgcaaaaattagccgggcatgctggcatgtgcctgtagtcccagctgctcgggaggctgaggtaggagaattgcttgaacccaggaggcagaggttgcagtgagccaagatygcaccactgcactccagcctgtgtgacagagtgagacttcatctcaaaaaaaaaaaaacacacacacacacacacacacacacacacacaaaaccccacaaaaacaaatagtttcaacccagaagccctacttaggactttctccccatcagttttcatc

SEQ ID NO: 303969 - DNA, 510 bp, Homo sapiens
ctataaactcttaactctaaactattaaactaaaaagctctgcacagcaaacaattaacagagtgaagagataacctgttgagtgagataaaatatttgcgaactattcatccaacaaagcactaatatccagaatatacaaggaacccaaacaactcaacagtataaaaacaaataatcccagtgaaaagtgggcaaatgacaagtgtagacatttctcaaaagaagacatacaaatggccaaccggtatatgaaaaraatgctcaacatcactaatcatcagagaaatgcaatgaaaaccacaagatatcatcttaccgcagttagaatggctattattaaaaagacaaaaaaaaaaagatgctaacaaagatgcagagaaaataacctcttatatactgttggtgggaatgtaaatcagtacagccactaagcaaaacagtatgaagattactcaagaacttttttagaactaccatacaatcctgcagtctcactactgagtattt

SEQ ID NO: 303970 - DNA, 673 bp, Homo sapiens
atgtttacagcaccacggtttgtaattgcaaaaatatggaaccagtccaaatgcccatcaatcaatgagtggataaagaaaatgggatatatatatatatatatatatatatatayacacacacacacacacacacacacacacactgtggaatactactcagccataaaaaggaatgaaataatggcatttggagcgacctggatggaattggagatcattattctaagtgaagtaactcaggaatggaaaaccaaatgttatatattctcatttataagtgggagctaagctatgaggatgtaaaggcataagaatgatacaatggactttgaggactcaggggcaagtgtgggagggggatgagcgataaaagacaacacattgggtacagtgtgcactgcttgggtgatgggtgcacgaaaatcttagaaatcaccactaaagaacttatccacgtaactaaacatcacctgttcccccaaaacctattgaaataattaataataataataaaacaaaaaccccaattctaaaaaaaaccttgtaaaaaaataaattttatataaatggaaaaaaatagctgctacattcacctagtgcttgccatgagtcagtgttccaagcatttacaaatattaactccattaatcgttatgataatcctatgagg

SEQ ID NO: 303971 - DNA, 556 bp, Homo sapiens
caccctgctatagctaccaagtgcatagcagatgctgggatggcagtaaggagaggcactgatcctgagaaagctttggtgtccaccatctaccttgaggttcttcagagataactgcctctgctgtcactttgccttagatctatttcttcccatcatcacttcatgatttaaccctgagacaaaactattcaatcctcagatgatggaaatggtgttaactatttagataggaaaaaagccacatcccatcaactggtggcaaccttcatccactagcacagccgacattccttcttaagaagacagagctaggtctgtctctccataaggcaaggcaatctcccaagtaagacagttaaaaaatgggccaaacacgtgtatacctatgtaacaaactggcacgttctgygcgtgtatcacagaacttaaagcataataattttttttaatggggcaaaaccccaaagctctcccttccatgcttacaaacccatcagggtcggttcacttcagctgttggcatgctaacattaaagagtatgaaaggcaaagt

SEQ ID NO: 303972 - DNA, 496 bp, Homo sapiens
ttcaccatgttggccaggctggtctcaatctccagacctcgtgatctgccttccttggcctcccaaagtgctggcattacaggtgtgagccaccgcacccggcccatagcatctcctaacctgtgtctcactccatgttgaggttggctgttcttgaacccttcttagttcctacctgctcaagtccacccagctaccaacacctattacctgcagactttacccttctaatcattaaaccaatgagaaaatctgctagtcaacctattagaaaacttgactattcaggtgttggggctttttctgccaacatatgttatagwcagtgttctttgaagtaatagaggtgagcaaaatcacaaaatactgcctagacattaagctacttctgcccaccagccagccttccctctaatgggaattgcattttgcttcactggcttcagcttcttgcctgaggtccctactgggatggatgcccagaatcgggcagtag

SEQ ID NO: 303973 - DNA, 575 bp, Homo sapiens
ttatctatcagctaattttttgtagtttagtagagaaggggttttaccacattggccaggattgtctggatctcctgacctcatgatccacgcacctcagcctcccaaagtgatgggattagaggcatgagccacaaagtgctcaaaaaatctattaattaaaaaatgtgtatgtagccgtctttaatctaccatgtccattagcagataaatactataagcaaaatagcaacaatgagagaaacatagacttagagtagatactctgatttatttaataaaaatttgaaaatagaccaaattactctatgataaaaaaaaaatctgttgctattgaggatgagggttagtgtttggaaaggggcaggagaagtatcactatttttagtaatgttctattttcatacatggttataagcaaatamatgtgtttcattaatgaagctatccatatttaatcattgtacttttctgcatgtatgatatatgtcaataaatgtcttatatacagcaaaaatagacaaaaccacaagaagacatacacaaatgttaaacctagagagaaatttgaatat

SEQ ID NO: 303974 - DNA, 483 bp, Homo sapiens
actgctagaacaaaccgaaaaayaggatggagaggtttggaacagcatgattagcaaaatggacatatctgtcttttaatataggcagaaacatagttagataaaaaaaggacttgtctcagagcatgatttctgaaaatagtggaatcgagtttgaatctagtaagtacatataaataaatgtcttaaaactcctcttatgttagctaattaagaaacattattgtaatagacattagaaaatattttaataaattgagtggatttaacacgctaaggaaatgatcttacttgcatttgatagttcaattagatacatatacacctataggtagtttaaaatatttctaataaccttatatacttttaaaaagcattgatatctgtttgcactatttggtctatagagtacacataccaaacatgattatagctcttctgctataaacttcaaatgtctaagtaatacaaaaatctagaatg

SEQ ID NO: 303975 - DNA, 483 bp, Homo sapiens
actgctagaacaaaccgaaaaacaggatggagaggtttggaacagcatgattagcaaaatggacatatctgtcttttaatataggcagaaacatagttagataaaaaaaggacttgtctcagagcatgatttctgaaaatagtggaatcgagtttgaatctagtaagtacatataaataaatgtcttaaaactcctcttatgttagctaattaagaaacattattgtaatagacattagaaaatattttaataaattgagtggatttaacacgctaaggaaatgatcttacttgcatttgatagttcaattagatacatatacacctataggtagtttaaaatatttctaataaccttatatacttttaaaaagcattgatatctgtttgcactatytggtctatagagtacacataccaaacatgattatagctcttctgctataaacttcaaatgtctaagtaatacaaaaatctagaatg

SEQ ID NO: 303976 - DNA, 556 bp, Homo sapiens
agacctctgggccatttgagggtaggtgcaggggaggaaagggaagtttgcatccctcatgctgtggagagaacccgtggggagcacagaccttgtcctaactgaaggcagacccccttgctaaccagattctcatcagccaaccctggatgagtttctatgtctatttactaaataatcctcattgcttttcttyacatgggcaaagtatggtttgcagggaatattgttcctttgaacacccatcatggaaaacccttcctgttgtgggaaaacaggcttccatatgtgtcttattgggaaacacataggcaatttctatgtttttactgcatctatttcagggatatgggaactgaatagtgcccatcaaaggctcacctgatgttggaaattgatctgagagcgcggaaggacataattctttctttgttcctgggcagcggtggttgagggttcactttgtggcagctacagtggcaatgatggaggcagaatggagggctcagtaccaagacaaggagagacttggcctcacaatggcagcattgcaggg

SEQ ID NO: 303977 - DNA, 567 bp, Homo sapiens
cagtggcaatgatggaggcagaatggagggctcagtaccaagacaaggagagacttggcctcacaatggcagcattgcaggggtgcgctctacagagcatttgctcacatggttttgggcattgtctctaactacattgcttccccaataggttgacccattctaactaactccttttctctttaaaaaagcaaacttcatttgtatgacttgcaattgtaaacgacaccaattggccagttatcattcaaattctctgttacttaatcctgccttttcctgacgtatgcaaatttsccctaaaaaattggacactttgttgcttactcattgtctttacacattttaaaatgttgctttaggccccaatccctaactacattttcaatgttttgcaagtggagtccatgtgttcttgatttacatgaagctcaaaataaaggttatagtaactagtacttcataattaagcaaaaagctcttattgaaaaatgacagaactatacatagggatgacaacatggagagatatttcgtgagatcacaaacttatggtatagcagaagt

SEQ ID NO: 303978 - DNA, 567 bp, Homo sapiens
cagtggcaatgatggaggcagaatggagggctcagtaccaagacaaggagagacttggcctcacaatggcagcattgcaggggtgcgctctacagagcatttgctcacatggttttgggcattgtctctaactacattgcttccccaataggttgacccattctaactaactccttttctctttaaaaaagcaaacttcatttgtatgacttgcaattgtaaacgacaccaattggccagttatcattcaaattctctgttacttaatcctgccttttcctgacgtatgcaaatttcccctaaaaaattggacactttgttgcttactcattgtctttacacattttaaaatgttgctttaggccccaatccctaactacattttcaatgttttgcaagtggagtccatgtgttcttgatttacatgaagctcaaaataawggttatagtaactagtacttcataattaagcaaaaagctcttattgaaaaatgacagaactatacatagggatgacaacatggagagatatttcgtgagatcacaaacttatggtatagcagaagt

SEQ ID NO: 303979 - DNA, 607 bp, Homo sapiens
ttcgtgagatcacaaacttatggtatagcagaagtagaacgctgagtagagactctgtgttccyaatcattatttctaccaccagctttctattttgatgttaataatgttcttatgtgggaaaccctacatatttgccaatgtttagttcattgacaaagaaatagaaagagcttcaagaacactcgaatctttaaaaaataaaatacctataattggccatacgaaataattggtacttgacatatactgagatcgttttattttgtgctagataaatgaagtcatagaacagaatgtgctttaaatattatgaatagtgcctgcgtgtgtgtgtgtgtgtgtgtgtgtgtgtgtgtgtgtctatagatgcatattaggccactgaaaagttttattattctttccaggagagagactgccaacttttgaacctaactagaacaatatattgcttcttcatattttgattaaggcaaagagagtctagttaaaaataattcaacttgtcgtggaaatgctataaattgctgtgaagtgagttgctggctatggcttgtcagagtaaatatattgtacaaatcttaggggagaatcagtgctcgtg

SEQ ID NO: 303980 - DNA, 607 bp, Homo sapiens
ttcgtgagatcacaaacttatggtatagcagaagtagaacgctgagtagagactctgtgttcccaatcattatttctaccaccagctttctattttgatgttaataatgttcttatgtgggaaaccctacatatttgccaatgtttagttcattgacaaagaaatagaaagagcttcaagaacactcgaatctttaaaaaataaaatacctataattggccatacgaaataattggtacttgacatatactgagatcgttttattttgtgctagataaatgaagtcatagaacagaatgtgctttaaatattatgaatagtgcctgygtgtgtgtgtgtgtgtgtgtgtgtgtgtgtgtgtgtctatagatgcatattaggccactgaaaagttttattattctttccaggagagagactgccaacttttgaacctaactagaacaatatattgcttcttcatattttgattaaggcaaagagagtctagttaaaaataattcaacttgtcgtggaaatgctataaattgctgtgaagtgagttgctggctatggcttgtcagagtaaatatattgtacaaatcttaggggagaatcagtgctcgtg

SEQ ID NO: 303981 - DNA, 548 bp, Homo sapiens
gatcacaaacttatggtatagcagaagtagaacgctgagtagagactctgtgttcccaatcattatttctaccaccagctttctattttgatgttaataatgttcttatgtgggaaaccctacatatttgccaatgtttagttcattgacaaagaaatagaaagagcttcaagaacactcgaatctttaaaaaataaaatacctataattggccatacgaaataattggtacttgacatatactgagatcgttttattttgtgctagataaatgaagtcatagaacagaatgtgctttaaatattatgaatagtgcctgcgtgtgtgtgtgtgtgtgtgtgtgtgtgtgtgtgtgtctatagatgcatattaggccactgaaaagttttattattctttccargagagagactgccaacttttgaacctaactagaacaatatattgcttcttcatattttgattaaggcaaagagagtctagttaaaaataattcaacttgtcgtggaaatgctataaattgctgtgaagtgagttgctggctatgg

SEQ ID NO: 303982 - DNA, 546 bp, Homo sapiens
caaaagaattgaaagcagagtcttgaaaaaatatttgcacatccatgtttgcagcagcattattggcaatagctaaaacgtagaagcaattgaagtgtccaacaacagaygaatggatatgcaaaacatgatatatacatacaatggaaaatcattcagccttaaacatgagggaaatattcagacatatgttgcatcttggatgaaacttgaggatattatgccaagtgaaataagttagtcagtgaaggacaaatacagtacaattccatttgtataagagacttaaactggacagaatcatagagatagtacaatgatgaatgccagaagctggggggaggaagacatgggaaagtactgtttaatgggtatagagtttcagtttcacaagatgaaacgagttatggagatggatggtagggacggctgcacaatgttatgactatatttagtaccactgaactgtacatttaaaatggttaacagagtacattttatgttatgtgtattttaccacaataaaaaaataaaataccttaggaa

SEQ ID NO: 303983 - DNA, 618 bp, Homo sapiens
aactactcattaatgtcacatctatttattttctgccttataccaagcttgtgggattctcttaaatacaacatttttatacttacacctatgaaatacccattaacatcgccttcctaaatcagtggaaattgagtctctgtaaggtgcagtaacttactaagatacaaaactsagcatttaagtctgtatacttcaatatcctgccctcttctcatttgtctttactgccttttatgtatgtgttagatgttcaataaattctcttttttaaactgaatttaagccgtggagcagtgttttgttgaacaataaatatgatattggacactcttcctccctttcatttacgatcctgttcaagaaaaagagaaattctttcattgtgctagaagcttaaaataatgaaaatgccactttctacattaaacagaaactgaagggaatcaaggtgaattggatgagacatagaaaacaagtgggaaataaatctagtataatttcccctttgtgtacctttgttatttagcatttgagaaaatttttcccccaaatatcttcccatcttaattcatgtctataaagtagacatttatgcctcaccttgtcaagaagggc

SEQ ID NO: 303984 - DNA, 618 bp, Homo sapiens
aactactcattaatgtcacatctatttattttctgccttataccaagcttgtgggattctcttaaatacaacatttttatacttacacctatgaaatacccattaacatcgccttcctaaatcagtggaaattgagtctctgtaaggtgcagtaacttactaagatacaaaactgagcatttaagtctgtatacttcaatatcctgccctcttctcatttgtctttactgccttttatgtatgtgttagatgttcaataaattctcttttttaaactgaatttaagccgtggagcagtgttttgttgaacaataaatatgatattggacactcttcctccctttcatttacgatcctgttcaagaaaaagagaaattctttcattgygctagaagcttaaaataatgaaaatgccactttctacattaaacagaaactgaagggaatcaaggtgaattggatgagacatagaaaacaagtgggaaataaatctagtataatttcccctttgtgtacctttgttatttagcatttgagaaaatttttcccccaaatatcttcccatcttaattcatgtctataaagtagacatttatgcctcaccttgtcaagaagggc

SEQ ID NO: 303985 - DNA, 171 bp, Homo sapiens
gggaaataaatctagtataatttcccctttgtgtacctttgttatttagcatttgagaaaatktttcccccaaatatcttcccatcttaattcatgtctataaagtagacatttatgcctcaccttgtcaagaagggcaaactctaacataaacatttcccaaaaatgctt

SEQ ID NO: 303986 - DNA, 171 bp, Homo sapiens
gggaaataaatctagtataatttcccctttgtgtacctttgttatttagcatttgagaaaattyttcccccaaatatcttcccatcttaattcatgtctataaagtagacatttatgcctcaccttgtcaagaagggcaaactctaacataaacatttcccaaaaatgctt

SEQ ID NO: 303987 - DNA, 171 bp, Homo sapiens
gggaaataaatctagtataatttcccctttgtgtacctttgttatttagcatttgagaaaatttttcccccaaatatcttcccatcttaattcatgtctataaagtagacatttatgcctcaccttgtcaagaagggcaaactctaacwtaaacatttcccaaaaatgctt

SEQ ID NO: 303988 - DNA, 531 bp, Homo sapiens
aataaatctagtataatttcccctttgtgtacctttgttatttagcatttgagaaaatttttcccccaaatatcttcccatcttaattcatgtctataaagtagacatttatgcctcaccttgtcaagaagggcaaactctaacataaacatttcccaaaaatgcttcctgctaaaayataagctcggtctggctagaaattaagctcacttcataaaaattaattggtagctaatctttgcatgctgttctctgaacttgagtgaaagctgtccatcaggcatacagggaatgacggaaaaggtgacaacagaagatgaatgctatgtcactaaccttcaaagatgaccttccttttctttcaaattcttgatgtcttaagatttcattaattcatctttctttgcccttggttcaacattgtgctataccaaaactcatgtaaaacgattatgtattgtaataaaaatggcatttttctttcatgtagatgcaagctatgtggcatttttacaatcgacatatttccgt

SEQ ID NO: 303989 - DNA, 531 bp, Homo sapiens
aataaatctagtataatttcccctttgtgtacctttgttatttagcatttgagaaaatttttcccccaaatatcttcccatcttaattcatgtctataaagtagacatttatgcctcaccttgtcaagaagggcaaactctaacataaacatttcccaaaaatgcttcctgctaaaacataagctcggtctggctagaaattaagctcacttcataaaaattaattggtagytaatctttgcatgctgttctctgaacttgagtgaaagctgtccatcaggcatacagggaatgacggaaaaggtgacaacagaagatgaatgctatgtcactaaccttcaaagatgaccttccttttctttcaaattcttgatgtcttaagatttcattaattcatctttctttgcccttggttcaacattgtgctataccaaaactcatgtaaaacgattatgtattgtaataaaaatggcatttttctttcatgtagatgcaagctatgtggcatttttacaatcgacatatttccgt

SEQ ID NO: 303990 - DNA, 531 bp, Homo sapiens
aataaatctagtataatttcccctttgtgtacctttgttatttagcatttgagaaaatttttcccccaaatatcttcccatcttaattcatgtctataaagtagacatttatgcctcaccttgtcaagaagggcaaactctaacataaacatttcccaaaaatgcttcctgctaaaacataagctcggtctggctagaaattaagctcacttcataaaaattaattggtagctaatctttgcatgctgttctctgaacttgagtgaaagctgtccatcaggcatacagggaatgacggaaaaggtgacaacagaagatgaatgctatgtcactaaccttcaaagatgaccttccttttctttcaaattcttgatgtcttaagatttcattaattcatctttctttgcccttggttcaacattgtgctataccaaaactcatgtaaaacgatkatgtattgtaataaaaatggcatttttctttcatgtagatgcaagctatgtggcatttttacaatcgacatatttccgt

SEQ ID NO: 303991 - DNA, 506 bp, Homo sapiens
aattaatctcaattagctgatcacaattaaaattaatagcttattattgctgataaaaaatcatgactctcctgttctcaaatgtgcaagtaattcttgtaattttaatacaaatgtgcatattattactaattgatttaatctcattgtatttggttcatggatccaatttattaaaatattgatagtgtggtaatgatttgtctccccatttcatttacactaaaagacacaattcgtacaatggtctgcaagcccatcatgatctgccgcatgttaaccrccaaaattcttttatgtcttcacccttgaccttaccagtggtcctgtccacctcactgtcctctggacatgccaacatgctgctgtcttatgaccaagactctagttaatttcttggctttgaaagaaatccccccatatatccattgatcagctcattcgactcctcaaatctttactgaaacctcatattctcgatgagacctattcagtatttcaaactg

SEQ ID NO: 303992 - DNA, 607 bp, Homo sapiens
ggcctcttcctttgaactttgcagctggacccaaactctgcacaatttggggcagaagtctcgtgttgactttgcagcctaaattatcttgtagtttgtctaaccctcaataaatttgytttcatcaaatattgtatttgttaccccaaaattaccatcatgtttttttctccaaataactaacattgggagaaatagccagctgaatctgtaactcaacagaaacaagtgatccatataccatataagtggccatttcattttgcctccttccaccagatcttagcaacctcaaccattgccatgagccactgtaggcctaccatctacaaacaaacaagtatcttttaaaaagacttcatactcccatttgataaatttcccagcaaagagatgcttactttaactctatgcaagtggctcatattctcaaagtctggagatattattcatgtagtgtgagaaaatcatcccagcgatgccagcacattctccttcccatgatctgcttactttgcaaagatattcaggccataggtgagagatttgtatttcaaagtacaacaattttatggaggtcattgaaacttagatttagcattttagc

SEQ ID NO: 303993 - DNA, 607 bp, Homo sapiens
ggcctcttcctttgaactttgcagctggacccaaactctgcacaatttggggcagaagtctcgtgttgactttgcagcctaaattatcttgtagtttgtctaaccctcaataaatttgctttcatcaaatattgtatttgttaccccamaattaccatcatgtttttttctccaaataactaacattgggagaaatagccagctgaatctgtaactcaacagaaacaagtgatccatataccatataagtggccatttcattttgcctccttccaccagatcttagcaacctcaaccattgccatgagccactgtaggcctaccatctacaaacaaacaagtatcttttaaaaagacttcatactcccatttgataaatttcccagcaaagagatgcttactttaactctatgcaagtggctcatattctcaaagtctggagatattattcatgtagtgtgagaaaatcatcccagcgatgccagcacattctccttcccatgatctgcttactttgcaaagatattcaggccataggtgagagatttgtatttcaaagtacaacaattttatggaggtcattgaaacttagatttagcattttagc

SEQ ID NO: 303994 - DNA, 607 bp, Homo sapiens
ggcctcttcctttgaactttgcagctggacccaaactctgcacaatttggggcagaagtctcgtgttgactttgcagcctaaattatcttgtagtttgtctaaccctcaataaatttgctttcatcaaatattgtatttgttaccccaaaattaccatcatgkttttttctccaaataactaacattgggagaaatagccagctgaatctgtaactcaacagaaacaagtgatccatataccatataagtggccatttcattttgcctccttccaccagatcttagcaacctcaaccattgccatgagccactgtaggcctaccatctacaaacaaacaagtatcttttaaaaagacttcatactcccatttgataaatttcccagcaaagagatgcttactttaactctatgcaagtggctcatattctcaaagtctggagatattattcatgtagtgtgagaaaatcatcccagcgatgccagcacattctccttcccatgatctgcttactttgcaaagatattcaggccataggtgagagatttgtatttcaaagtacaacaattttatggaggtcattgaaacttagatttagcattttagc

SEQ ID NO: 303995 - DNA, 292 bp, Homo sapiens
tttgtctaaccctcaataaatttgctttcatcaaatattgtatttgttaccccaaaattaccatcatgtttttttctccaaataactaacattgggagaaatagccagctgaatctgtaactcaacagaaacaagtgatccatataccatataagtggccatttcattttgcctycttccaccagatcttagcaacctcaaccattgccatgagccactgtaggcctaccatctacaaacaaacaagtatcttttaaaaagacttcatactcccatttgataaatttcccag

SEQ ID NO: 303996 - DNA, 292 bp, Homo sapiens
tttgtctaaccctcaataaatttgctttcatcaaatattgtatttgttaccccaaaattaccatcatgtttttttctccaaataactaacattgggagaaatagccagctgaatctgtaactcaacagaaacaagtgatccatataccatataagtggccatttcattttgcctccttccaccaratcttagcaacctcaaccattgccatgagccactgtaggcctaccatctacaaacaaacaagtatcttttaaaaagacttcatactcccatttgataaatttcccag

SEQ ID NO: 303997 - DNA, 292 bp, Homo sapiens
tttgtctaaccctcaataaatttgctttcatcaaatattgtatttgttaccccaaaattaccatcatgtttttttctccaaataactaacattgggagaaatagccagctgaatctgtaactcaacagaaacaagtgatccatataccatataagtggccatttcattttgcctccttccaccagatcttagcaacctcaaccattgccatgagccactgtaggcctaccrtctacaaacaaacaagtatcttttaaaaagacttcatactcccatttgataaatttcccag

SEQ ID NO: 303998 - DNA, 292 bp, Homo sapiens
tttgtctaaccctcaataaatttgctttcatcaaatattgtatttgttaccccaaaattaccatcatgtttttttctccaaataactaacattgggagaaatagccagctgaatctgtaactcaacagaaacaagtgatccatataccatataagtggccatttcattttgcctccttccaccagatcttagcaacctcaaccattgccatgagccactgtaggcctaccatctacaaacaaacaagtatcttttaaaaasacttcatactcccatttgataaatttcccag

SEQ ID NO: 303999 - DNA, 560 bp, Homo sapiens
tatttacccttaccttcaagatttccaagattcatttattatctttagatgatgggcatttaaagatttaccaaatacaactgtaatagtggaaaatatcaagatgttattaaattcatcttgtgcacataattgtttctataattttatgtttcttgcaaaacttgcagtaatgctcatgcacaaaataatttyctaaataaaaaaacgttttctcagtcattaattcttaaaattatttctccccaataattaatgtgaattaattcttaattcttaatgatagaataatgttgcccttcagagttcggaaacttttacatgttgtacacatttcacaaaccagaacaacttctgaaatattggcattagttaatgtcactcagcaattattgatttcaaaggcattaaataccattcctattctgaatcacaagggtactttggcatcttatttaatcaagctctttgtatcatcatctacaatttaattacttaacaaacatttctctgtgtgagaaagattgagcaggttattgtgcttttttaagatgcaactt

SEQ ID NO: 304000 - DNA, 579 bp, Homo sapiens
cttgcagtaatgctcatgcacaaaataattttctaaataaaaaaacgttttctcagtcattaattcttaaaattatttctccccaataattaatgtgaattaattcttaattcttaatgatagaataatgttgcccttcagagttcggaaacttttacatgttgtacacatttcacaaaccagaacaacttctgaaatattggcattarttaatgtcactcagcaattattgatttcaaaggcattaaataccattcctattctgaatcacaagggtactttggcatcttatttaatcaagctctttgtatcatcatctacaatttaattacttaacaaacatttctctgtgtgagaaagattgagcaggttattgtgcttttttaagatgcaacttttgcttaatctagagataggcaatgctccctataagggacaaggagaaaaataaatgagcaatagagatgtgacaggcatggaaaaagacactacatttatcaaacaaatagggccacggatgacgataatggggatcaaatcttgagatactgactcagtttataacctcactgtatgata

SEQ ID NO: 304001 - DNA, 599 bp, Homo sapiens
atgtcaaaagatttaaaaaacctaagtggcagtgtcacaatttcttctttttagtttacatggtttcttaaacgcctacaattattttaaaggaagccttgaatctaggaaaaattgagacatatggaataaattactaacccatttctccttgaaatccattagatgcttgatgatttytcacatatatttctgaattgaaaagctagctgtgaattatttttatatgcatatccttaggtaatattttgtttttaacagtgaattgaaggtttaaagattaaattattctatccagagaataaaaagcaattatttcacaaggagaacatgtgtacgttgacacgacattttaaagtctagaatttaaaaaaggacccatatacttttgtgtcaaatagaatatgtttgtatcagtctgtctacagttttacacctgtcaaaatgtacttgaactacaacaacaaccttgaacaattttgaaatttatgattcctctgaaactgattaaaagaattatggtagagtgaaattctgattgacataatttgggagagaaattattccttggacatcaacctctgccaagatagtttata

SEQ ID NO: 304002 - DNA, 599 bp, Homo sapiens
atgtcaaaagatttaaaaaacctaagtggcagtgtcacaatttcttctttttagtttacatggtttcttaaacgcctacaattattttaaaggaagccttgaatctaggaaaaattgagacatatggaataaattactaacccatttctccttgaaatccattagatgcttgatgatttctcacatatatttctgaattgaaaagctagctgtgaattatttttatawgcatatccttaggtaatattttgtttttaacagtgaattgaaggtttaaagattaaattattctatccagagaataaaaagcaattatttcacaaggagaacatgtgtacgttgacacgacattttaaagtctagaatttaaaaaaggacccatatacttttgtgtcaaatagaatatgtttgtatcagtctgtctacagttttacacctgtcaaaatgtacttgaactacaacaacaaccttgaacaattttgaaatttatgattcctctgaaactgattaaaagaattatggtagagtgaaattctgattgacataatttgggagagaaattattccttggacatcaacctctgccaagatagtttata

SEQ ID NO: 304003 - DNA, 599 bp, Homo sapiens
atgtcaaaagatttaaaaaacctaagtggcagtgtcacaatttcttctttttagtttacatggtttcttaaacgcctacaattattttaaaggaagccttgaatctaggaaaaattgagacatatggaataaattactaacccatttctccttgaaatccattagatgcttgatgatttctcacatatatttctgaattgaaaagctagctgtgaattatttttatatgcatatccttaggtaatattttgtttttaacagtgaattgaaggtttaaagattaaattattctatccagagaataaaaagcaattatttcacaaggagaacatgtgtacgttgacamgacattttaaagtctagaatttaaaaaaggacccatatacttttgtgtcaaatagaatatgtttgtatcagtctgtctacagttttacacctgtcaaaatgtacttgaactacaacaacaaccttgaacaattttgaaatttatgattcctctgaaactgattaaaagaattatggtagagtgaaattctgattgacataatttgggagagaaattattccttggacatcaacctctgccaagatagtttata

SEQ ID NO: 304004 - DNA, 610 bp, Homo sapiens
tggcagtgtcacaatttcttctttttagtttacatggtttcttaaacgcctacaattattttaaaggaagccttgaatctaggaaaaattgagacatatggaataaattactaacccatttctccttgaaatccattagatgcttgatgatttctcacatatatttctgaattgaaaagctagctgtgaattatttttatatgcatatccttaggtaatattttgtttttaacagtgaattgaaggtttaaagattaaattattctatccagagaataaaaagcaattatttcacaaggagaacatgtgtacgttgacacgacattttaaagtctagaatttaaaaaaggacccatatacttttgtgtcaaatagaatatgtttgtatcagtctgtctacagttttacacctgtcaaaatgtacttgaactacaacaacaaccttgaacaattttgaaattkatgattcctctgaaactgattaaaagaattatggtagagtgaaattctgattgacataatttgggagagaaattattccttggacatcaacctctgccaagatagtttataatgacattgaggctttttgatttacacaatttgttat

SEQ ID NO: 304005 - DNA, 527 bp, Homo sapiens
ctttttgatttacacaatttgttatatgaaaaatactaagacgatggcagataatacacagactttaattaaaattgtactacaattaaatgtctaaataaattagaagggtacatggtacatctaattgtatgtttatatattttatttgtgcatttttttcctagggtttcttttgctttagtttgtaaaacgttcttatgtttatrataatgtagcatatactaaataaagaaaaatcaggaaatagaaaatgaagaagaaaacattagctattgtcaaccaaacaaaaattgtgcaatctctaagcacatgaactatgtaatatttgtacagcatagtacaatgtttatgcttcacagggtgaggtagagactgcaaaaccttgaacttgggacaaacaagaaagtaaggaaattttcacaacatattaatattatagaaaatgttgaacttaacagttaagatacaagtagtgaaaaatgatagtatttaaggagatctagaaaatttaatctatacctgta

SEQ ID NO: 304006 - DNA, 454 bp, Homo sapiens
ttatgaactctcaccttggccatgtctaatctgatgagttcatttttgagtttttaatttaaaataactacatttttatacaaactwcttttcaaatttgctacatgaattttttagtctcctaacaatatattcattttttaaaaaattttttgaaagcaaatgtgctttgtaatctaacagtgatatttctactaatgaacctttgtggatctgtttgtagtctttttctgctttcctttcaaatggtggaatatcatttccttgcatgcttagatgcctttgaatgacaaatatttatttttctctgaaaattatttttgtacacttttgcagattagtaagtagaaaatttgccaaagagaagttgaatttttttgtgattctactaaaggcaccaccattctgggaccacattatgataattcttggcctaaaggtgttcggacatatg

SEQ ID NO: 304007 - DNA, 454 bp, Homo sapiens
ttatgaactctcaccttggccatgtctaatctgatgagttcatttttgagtttttaatttaaaataactacatttttatacaaacttcttttcaaatttgctacatgaattttttagtctcctaacaatatattcattttttaaaaaattttttgaaagcaaatgtgctttrtaatctaacagtgatatttctactaatgaacctttgtggatctgtttgtagtctttttctgctttcctttcaaatggtggaatatcatttccttgcatgcttagatgcctttgaatgacaaatatttatttttctctgaaaattatttttgtacacttttgcagattagtaagtagaaaatttgccaaagagaagttgaatttttttgtgattctactaaaggcaccaccattctgggaccacattatgataattcttggcctaaaggtgttcggacatatg

SEQ ID NO: 304008 - DNA, 454 bp, Homo sapiens
ttatgaactctcaccttggccatgtctaatctgatgagttcatttttgagtttttaatttaaaataactacatttttatacaaacttcttttcaaatttgctacatgaattttttagtctcctaacaatatattcattttttaaaaaattttttgaaagcaaatgtgctttgtaatctaacagtgatatttctactaatgaacctttgtggatctgtttgtastctttttctgctttcctttcaaatggtggaatatcatttccttgcatgcttagatgcctttgaatgacaaatatttatttttctctgaaaattatttttgtacacttttgcagattagtaagtagaaaatttgccaaagagaagttgaatttttttgtgattctactaaaggcaccaccattctgggaccacattatgataattcttggcctaaaggtgttcggacatatg

SEQ ID NO: 304009 - DNA, 454 bp, Homo sapiens
ttatgaactctcaccttggccatgtctaatctgatgagttcatttttgagtttttaatttaaaataactacatttttatacaaacttcttttcaaatttgctacatgaattttttagtctcctaacaatatattcattttttaaaaaattttttgaaagcaaatgtgctttgtaatctaacagtgatatttctactaatgaacctttgtggatctgtttgtagtctttttctgctttcctttcaaatggtggaatatcatttccttgcatrcttagatgcctttgaatgacaaatatttatttttctctgaaaattatttttgtacacttttgcagattagtaagtagaaaatttgccaaagagaagttgaatttttttgtgattctactaaaggcaccaccattctgggaccacattatgataattcttggcctaaaggtgttcggacatatg

SEQ ID NO: 304010 - DNA, 609 bp, Homo sapiens
tgtctccccaaggagcatacaaaattttgtcaattcttcaaaatgatctacaaattgataaacctcatgaataattgcggttgtagttagattcaacttccttttgattgtgtacaataaattttttgcatacatctttaaaattttttcccttaatttagcagcaggctttgaggataggaaacatattatagctgaccttttttaactgatcattgcccttttcctcagagttcctactgactaaactctgtgctaggtgtctgctctctctgcccttgtcaascctctaatagtcaaacatctgaaattcctcttttccagtgaagatgctgcagagtacttggaagagaaaacgagatatttctggcttgtctggacaaggttagacccccgatagcagcagaaaagggatacaggatgtcagtgataaatgggttgtctctgttcaaacaatagaatgcatgcattctcccaaagtgcttggaaaatccccagtagctgtgtactccaagccatcctggttggatgtagatacatttcaccagtctcaataccctttttctttcataaatatcttctattctaaaagaaagtgaatagaaagta

SEQ ID NO: 304011 - DNA, 604 bp, Homo sapiens
ggacaaggttagacccccgatagcagcagaaaagggatacaggatgtcagtgataaatgggttgtctctgttcaaacaatagaatgcatgcattctcccaaagtgcttggaaaatccccagtagctgtgtactccaagccatcctggttggatgtagatacatttcaccagtctcaataccctttttctttcataaatatcttctattctaaaagaaagtgaatagaaagtacaagctaatctcacacataacytaagcataacataaaggagaaattttaaaaatttaatttatagtaaacatacattatagccagatgcttgtacttatacctagaatcgttgtgaatgtgacacctacaaatgcagactggtactggagtgatacatcgatgactcaaataccacagggggcatcaccattggtattgtaattttccagaatgatgaactacagtgggttaagttatgcgtgaagcaacatccagttttccttgcctttataaagtgcattcctaaaaattcagtgaggcaacgtccaattttctttgcatttataaattgtattcctagaaaattcagtgcatttaaaactactcaaaag

SEQ ID NO: 304012 - DNA, 638 bp, Homo sapiens
tacataagtatattaccattcattttcttaaaaggaatatactgcactattctacacctgattttcttttttctttttttttctttttctttttttttttttttaagatggagtctcgctctgtcgcccaggctggagtgccattttcatcattttcaagtgtagagttcagtggcattaactacattcacatcattatgctccactgccaccatccatctctaaaactttttcatcttcctcagctgaaactttgtaccattaaacactctctactgttaactttccaagaatcatgtaggattcaaactggaaatctaaggaagcttgctttctgaagacttccacatgggctatcaccagcttctaaggtttgcctaacattgagattgtttagttygccacatgtttattgatggtctactatgttctggcactaacattaggcatacaatatatcgctgcaatagttgaggacattgttcctaatataaaccctaagaggggccgggcacagtgtcttacacctgtaatcccaacactttgggaggctgaggtgggcagatcacttgaggccaggggttcaagaccatggtggccaacatggtgaaactccatctctactaaaaatacaaaaa

SEQ ID NO: 304013 - DNA, 542 bp, Homo sapiens
tttgtgccccgccccttatattttctgcctgaggttagtgtttcgcttgccttaacctattcctggccctggtcccaaccctctatcccaacaaactataatacaaaaactgctacaggaatgaaaactatgctgactacgctagaggagacattcaaatccaactaatttctccacaatccaagtgagtccaggaagcaacatgtcaagtggggcagggaatgtgagctttagggctagacagatctggaattaaatcctgccttgcctccttatcagtctgagtaattacttacccagtctgagcctgttgtcttatttttaaaaggatcagtcattttttagtgagagttaaaygagatcacttgtgtaaagcctctgtattcaatgaatgttcacctgtgtccttccctactttagaaatagtagattgactcacaaacactgagttgcccaaagacttgctcccagaagtgctggcattgaaatttgaacccaggtgtagagaaagtcctgtgctcttctcactaaattgcactaat

SEQ ID NO: 304014 - DNA, 495 bp, Homo sapiens
tgagccaccacacttggcttcaatgtatgtctaaatagtcatgcaaacctttaagtaaaggaaatttttttaacwtttttttttttttttttttttttttttttttaaagacagggccttgctttgttgcctaggagcacagtggctcttcacaggtgtgatcacagtgcactctggcctagaactcctggcttcaagccatgctctcctcttgccccagcctcctgagtagctgagaatacaggccgttgctaccatacccagcttaagttaaggaaattttgagtcacctttgtcctggtttagccatagttcataatgttaaaaaggaacttaatttctggtgccaaaatatcaccacagtttttactgatttgttcttatatgctttcacctccagaatataaaataagttaggagcaaaatatatgtaatggaatgctgtatgtagggagaaaattgggttgaccataacccctgaaaaagaaaaataat

SEQ ID NO: 304015 - DNA, 495 bp, Homo sapiens
tgagccaccacacttggcttcaatgtatgtctaaatagtcatgcaaacctttaagtaaaggaaatttttttaacatttttttttttttttttttttttttttttttaaagacagggccttgctttgttgcctaggagcacagtggctcttcacaggtgtgatcacagtgcactctggcctakaactcctggcttcaagccatgctctcctcttgccccagcctcctgagtagctgagaatacaggccgttgctaccatacccagcttaagttaaggaaattttgagtcacctttgtcctggtttagccatagttcataatgttaaaaaggaacttaatttctggtgccaaaatatcaccacagtttttactgatttgttcttatatgctttcacctccagaatataaaataagttaggagcaaaatatatgtaatggaatgctgtatgtagggagaaaattgggttgaccataacccctgaaaaagaaaaataat

SEQ ID NO: 304016 - DNA, 495 bp, Homo sapiens
tgagccaccacacttggcttcaatgtatgtctaaatagtcatgcaaacctttaagtaaaggaaatttttttaacatttttttttttttttttttttttttttttttaaagacagggccttgctttgttgcctaggagcacagtggctcttcacaggtgtgatcacagtgcactctggcctagaactcctggcttcaagccatgctctcctcttgccccagcctcctgagtagctgaraatacaggccgttgctaccatacccagcttaagttaaggaaattttgagtcacctttgtcctggtttagccatagttcataatgttaaaaaggaacttaatttctggtgccaaaatatcaccacagtttttactgatttgttcttatatgctttcacctccagaatataaaataagttaggagcaaaatatatgtaatggaatgctgtatgtagggagaaaattgggttgaccataacccctgaaaaagaaaaataat

SEQ ID NO: 304017 - DNA, 578 bp, Homo sapiens
aaataagttaggagcaaaatatatgtaatggaatgctgtatgtagggagaaaattgggttgacyataacccctgaaaaagaaaaataatgcatctctcatttgtggcagcagtaaattgaacaaacgctttgctttgtttcccacttacagtattaaagaagacatttgatatgtcatggcacacactcctttcctgatctatttcctaacactcctctccttgtgaatgtttacctgtcactctgctgagtgtctgtatcttttttttaccctctaacattaacccatctccttgtcactagaagggaagcagatgtgagcatagctgttccatagtaccactttccccatctatatgactaccacagaaacaatcaagttcttatagaactctgctgcccccatctctgttgtttggcccaggggttggggacaccacataaaccaggtcaaggacttctagacttttcctctggtaggggagactttagatgcaaatattggaaactgttattattcgttgttgtagttgaattatgtctcctgaaaaaaggtatgttgttgaagtcctagcccc

SEQ ID NO: 304018 - DNA, 578 bp, Homo sapiens
aaataagttaggagcaaaatatatgtaatggaatgctgtatgtagggagaaaattgggttgaccataacccctgaaaaagaaaaataatgcatctctcatttgtggcagcagtaaattgaacaaacgctttgctttgtttcccacttacagtattaaagaagacatttgatatgtcatggcacacactcctttcctgatctatttcctaacactcctctccttgtgaatgtttacctgtcactctgctgagtgtctgtatcttttttttaccctctaacattaacccatctccttgtcactagaagggaagcagatgtgagcatagctgttccatagtaccactttccccatctatatgactaccacagaaacaatcawgttcttatagaactctgctgcccccatctctgttgtttggcccaggggttggggacaccacataaaccaggtcaaggacttctagacttttcctctggtaggggagactttagatgcaaatattggaaactgttattattcgttgttgtagttgaattatgtctcctgaaaaaaggtatgttgttgaagtcctagcccc

SEQ ID NO: 304019 - DNA, 509 bp, Homo sapiens
caataggactggtgtccttacataataaaaaagggaaatttagactcagagacagacacacacagaaggaagaccatgcgaagagacacagggaggagatggttatgtgactggagtgacgcatctaaaagccactggctgtcaaggattgcccgcaaacatgggaagctgggagaggccagaaaggattctccccgagtcctctgagtgggcrtgccctgccaactccttgagcttggacttctaacctccagaattgtaagacaatagatttctgttgttttaagacaactcatttttagtgtgttattatagcagccctagaaaataatactgtgttgtgtttttttttttctcatcatatggagtggagagaactagtgagagtatgcaggtttttttttgttttttttttttttttttgagagaagcgtcacagtgagtctgatagcttttgaatcttggttttgagtcctttctgagacctaaatgcatgactgtcctttctg

SEQ ID NO: 304020 - DNA, 605 bp, Homo sapiens
ccctgccaactccttgagcttggacttctaacctccagaattgtaagacaatagatttctgttgttttaagacaactcrtttttagtgtgttattatagcagccctagaaaataatactgtgttgtgtttttttttttctcatcatatggagtggagagaactagtgagagtatgcaggtttttttttgttttttttttttttttttgagagaagcgtcacagtgagtctgatagcttttgaatcttggttttgagtcctttctgagacctaaatgcatgactgtcctttctgtgtattggttattcaatcttttcttggattacatgaaccgattatcagtttttgtgagggtggagtgtctaagttgattgagttggatttctggcacttttctggcacttccaatgagaaatagctaatgaatcctgagtatctaagcagcctaggaacgtgacattttctaatacaaatgacataaaacttttttaggtgttgtattacctgaaggccaaagttctccttttctaacactatgacatattgatatatttaattcctcacataaaacaggaaaaaattacttggagaaaatacagcttttat

SEQ ID NO: 304021 - DNA, 509 bp, Homo sapiens
caataggactggtgtccttacataataaaaaagggaaatttagactcagagacagacacacacagaaggaagaccatgcgaagagacacagggaggagatggttatgtgactggagtgacgcatctaaaagccactggctgtcaaggattgcccgcaaacatgggaagctgggagaggccagaaaggattctccccgagtcctctgagtgggcgtgccctgccaactccttgagcttggacttctaacctccagaattgtaagacaatagatttctgttgttttaagacaactcatttttagtgtgttrttatagcagccctagaaaataatactgtgttgtgtttttttttttctcatcatatggagtggagagaactagtgagagtatgcaggtttttttttgttttttttttttttttttgagagaagcgtcacagtgagtctgatagcttttgaatcttggttttgagtcctttctgagacctaaatgcatgactgtcctttctg

SEQ ID NO: 304022 - DNA, 401 bp, Homo sapiens
attatgtaagaaaatcaaacaatgaggacgtatctctgagaaactccaaccactctgaaaaactccaaaagaccattcttggtaactgtgccaagtgaatggcctggtctctgaaactctacactcagacacaggtcatcctggagagtggtgtccttctggattgtcacataccctgtgaatgaagcatgtgttacaacaataatggaaaatatgcaaatgagaaaaaaagtttctcagtgccccaccaacctaaattctggctccacccctatttgttttctcatatttgtctgaatttctccaagragcccataatcaatgctgggtcattcctggagtcttgacggtcaccaggattcacctttggcttttgtttcagtccaaaagtaagagttagt

SEQ ID NO: 304023 - DNA, 401 bp, Homo sapiens
attatgtaagaaaatcaaacaatgaggacgtatctctgagaaactccaaccactctgaaaaactccaaaagaccattcttggtaactgtgccaagtgaatggcctggtctctgaaactctacactcagacacaggtcatcctggagagtggtgtccttctggattgtcacataccctgtgaatgaagcatgtgttacaacaataatggaaaatatgcaaatgagaaaaaaagtttctcagtgccccaccaacctaaattctggctccacccctatttgttttctcatatttgtctgaatttctccaaggagcccataatcaatgctgggtcattcctggagtsttgacggtcaccaggattcacctttggcttttgtttcagtccaaaagtaagagttagt

SEQ ID NO: 304024 - DNA, 401 bp, Homo sapiens
attatgtaagaaaatcaaacaatgaggacgtatctctgagaaactccaaccactctgaaaaactccaaaagaccattcttggtaactgtgccaagtgaatggcctggtctctgaaactctacactcagacacaggtcatcctggagagtggtgtccttctggattgtcacataccctgtgaatgaagcatgtgttacaacaataatggaaaatatgcaaatgagaaaaaaagtttctcagtgccccaccaacctaaattctggctccacccctatttgttttctcatatttgtctgaatttctccaaggagcccataatcaatgctgggtcattcctggagtcttgacrgtcaccaggattcacctttggcttttgtttcagtccaaaagtaagagttagt

SEQ ID NO: 304025 - DNA, 618 bp, Homo sapiens
atttttaccatgaaatctgaatgtttggggatatacaagtaaatgtttcttgacatatgatttccccaaagtgaatataaaaatgccctgatcttgaattgaaaaacagaacatgtggttaaactagcaaagacagaaaacactatagtaaatattgtcgttcaatgatcagctaaactaaagctgattattgaaggtttctccttattttgtgcttacttcctatctctccccgtttcttgtagttttagaattccagattctcttatgtgttatcatgttgggggtctactttgatcaagaatagcattttttaatatactattcctctgaacaatataagcagcccctatgttgtattgatctattactctgacactactttaaacagacaaataagcaaacattctgattcctttatgggcctyttatcagattttggtgggactctttcaacaaatagctgatgtaactcagttagtttggacactgctaaacttgtggaaatacctctgaggctagcaggcttctggccaccatgtacttttagaaactaagttgtaacactcagtgacagtgtttattcccatggaaataatgtaataattaaagactgaa

SEQ ID NO: 304026 - DNA, 573 bp, Homo sapiens
taagcagcccctatgttgtattgatctattactctgacactactttaaacagacaaataagcaaacattctgattcctttatgggccttttatcagattttggtgggactctttcaacaaatagctgatgtaactcagttagtttggacactgctaaacttgtggaaatacctctgaggctagcaggcttctggccaccatgtacttttagaaactaagttgtaacactcagtgacagtgtttattcccatggaaataatgtaataattaaagactgaattcyttggacagggatatttggccggatacttaatgatgtcattaaagaaaaaacacaacagcacaagtttccaaaccaataaaaaaatagtaaaactgttttctagcttctttaaaatgggcttactatattgttactttgattttagcagggaccctaatgattgacaaaatgtactcgtagtacatgaaaatacaactccactgtggtgtaaattttctctaaaactaatatgctggtgataataaacattacgcatttaactaacaacaattttgcttcgtttgcagaat

SEQ ID NO: 304027 - DNA, 329 bp, Homo sapiens
ctccactgtggtgtaaatttkctctaaaactaatatgctggtgataataaacattacgcatttaactaacaacaattttgcttcgtttgcagaatttagaaaagctttttggtagcattttggaaggctcagatttctttaagacatctgtctagggaaatttgaactaatttctcttttatttccctcttgtaaaaattcccattagcaagcaaatgcattcaaaaccattccattgatcttataactgtgttttataacaatagccatgagcttttcctttctatcctgtgggctgaaagcactgcagtggggtgtctgaatggcac

SEQ ID NO: 304028 - DNA, 329 bp, Homo sapiens
ctccactgtggtgtaaattttctctaaaactaatatgctggtgataataaacattacgcatttaactaacaacaattttgcttcgtttgcagaatttagaaaagctttttggtagcattttggaaggctcagatttctttaagacatctgtctagggaaatttgaactaatttctcttytatttccctcttgtaaaaattcccattagcaagcaaatgcattcaaaaccattccattgatcttataactgtgttttataacaatagccatgagcttttcctttctatcctgtgggctgaaagcactgcagtggggtgtctgaatggcac

SEQ ID NO: 304029 - DNA, 597 bp, Homo sapiens
tggaaggctcagatttctttaagacatctgtctagggaaatttgaactaatttctcttttatttccctcttgtaaaaattcccattagcaagcaaatgcattcaaaaccattccattgatcttataactgtgttttataacaatagccatgagcttttcctttctatcctgtgggctgaaagcactgcagtggggtgtctgaatggcacacaggaaccaggggaactgggaagtgaggggcagccagctttgagagggaccccggtctgtctttctagcacagcaaatgtcaggggaaagggatttggcttcaccctttttgttttctgaccctgtttccaggaagactttgtaaaagttgaagactgccaggaacttatttaaaactataatggaagtttwaaaatgatcataaaatgccagtttcatgacagcttcatgacaaaatcacagtttggccttcttctccaaaaaccaaagaattcctacgaagcaaagcactcaccccaaattcagtcacatcccatctttacatttctcccagtaccttctggtcctatcagttcaatgtcatgctgaggatataaaggcccagga

SEQ ID NO: 304030 - DNA, 537 bp, Homo sapiens
aaaccattccattgatcttataactgtgttttataacaatagccatgagcttttcctttctatcctgtgggctgaaagcactgcagtggggtgtctgaatggcacacaggaaccaggggaactgggaagtgaggggcagccagctttgagagggaccccggtctgtctttctagcacagcaaatgtcaggggaaagggatttggcttcaccctttttgttttctgaccctgtttccaggaagactttgtaaaagttgaagactgccaggaacttatttaaaactataatggaagtttaaaaatgatcataaaatgccagtttcatgacagcttcatgacaaaatcacagtttggccttcttctccaaaaaccaaagaattcctacgaagcaaagcacycaccccaaattcagtcacatcccatctttacatttctcccagtaccttctggtcctatcagttcaatgtcatgctgaggatataaaggcccaggaacaaatgtggcaggggatgggttcaatttatctgatgcaaccct

SEQ ID NO: 304031 - DNA, 592 bp, Homo sapiens
tagagatggggtttcaccatgttgctagggtggtcaaactcctgggctcaagcggtccactcacytcagcctcccaaagtgctgggattacaggcgtgagccactgtgcctggtctgtgatacatattattgcattgaatccccaagtaagttagagattcttagtctctctacagttaaggaaaccaaggctcagcaggatcatacagcaagatttcccctgattgcatggctagtaagtgttgaggctgagattctaactgaggtctatctcatggaaaacccatgctcacagccactgtgctgtgtgctcttcctgtctggatgtggtccttgtctgggtacctcagtgttctcatgaggcacctctggcttctgagatgtagacagaaactaggtattaggttggtgcaaaagtaattgcagtttttgccataaaagtatgttttagaattaacatcccaaatgaaaggtacttgaagtttaagccactctgaatactaataagatacatagtgtaatagtaacgtatgcctgagacccagcctaatattcttctttgaattcacacttaacactcactcacgcaacc

SEQ ID NO: 304032 - DNA, 592 bp, Homo sapiens
tagagatggggtttcaccatgttgctagggtggtcaaactcctgggctcaagcggtccactcacctcagcctcccaaagtgctgggattacaggcgtgagccactgtgcctggtctgtgatacatattattgcattgaatccccaagtaagttagagattcttagtctctctacagttaaggaaaccaaggctcagcaggatcatacagcaagatttcccctgattgcatggctagtaagtgttgaggctgagattctaactgaggtctatctcatggaaaacccatgctcacagccactgtgctgtgtgctcttcctgtctggatgtggtccttgtctgggtacctcagtgttctcatgaggcacctctggcttctgagatgtagacagaaactaggtattaggttggtgcaaaagtaattgcagtttttgccataaaagtatgttttagaattaacatcccaaatgaaaggtacttgaagtttaagccactctgaatactaataagatacatagtgtaatagtaacrtatgcctgagacccagcctaatattcttctttgaattcacacttaacactcactcacgcaacc

SEQ ID NO: 304033 - DNA, 592 bp, Homo sapiens
tagagatggggtttcaccatgttgctagggtggtcaaactcctgggctcaagcggtccactcacctcagcctcccaaagtgctgggattacaggcgtgagccactgtgcctggtctgtgatacatattattgcattgaatccccaagtaagttagagattcttagtctctctacagttaaggaaaccaaggctcagcaggatcatacagcaagatttcccctgattgcatggctagtaagtgttgaggctgagattctaactgaggtctatctcatggaaaacccatgctcacagccactgtgctgtgtgctcttcctgtctggatgtggtccttgtctgggtacctcagtgttctcatgaggcacctctggcttctgagatgtagacagaaactaggtattaggttggtgcaaaagtaattgcagtttttgccataaaagtatgttttagaattaacatcccaaatgaaaggtacttgaagtttaagccactctgaatactaataagatacatagtgtaatagtaacgtatgcytgagacccagcctaatattcttctttgaattcacacttaacactcactcacgcaacc

SEQ ID NO: 304034 - DNA, 592 bp, Homo sapiens
tagagatggggtttcaccatgttgctagggtggtcaaactcctgggctcaagcggtccactcacctcagcctcccaaagtgctgggattacaggcgtgagccactgtgcctggtctgtgatacatattattgcattgaatccccaagtaagttagagattcttagtctctctacagttaaggaaaccaaggctcagcaggatcatacagcaagatttcccctgattgcatggctagtaagtgttgaggctgagattctaactgaggtctatctcatggaaaacccatgctcacagccactgtgctgtgtgctcttcctgtctggatgtggtccttgtctgggtacctcagtgttctcatgaggcacctctggcttctgagatgtagacagaaactaggtattaggttggtgcaaaagtaattgcagtttttgccataaaagtatgttttagaattaacatcccaaatgaaaggtacttgaagtttaagccactctgaatactaataagatacatagtgtaatagtaacgtatgcctgagacccagcytaatattcttctttgaattcacacttaacactcactcacgcaacc

SEQ ID NO: 304035 - DNA, 615 bp, Homo sapiens
ggtctttttcaaaagctttgaaggttcttgtcaaaagtacatgcattatccaggagaggaaatgcaattgaccaccactatcccagaataagctggctgaaattagctagctaatctcacttggcaaggcctgaacaacagcttcctctctcttgagtttgaatccctgtctgtcatttctgcatgatctatgctaatttttgaccccactgrtcctctttcttgccccacaatttatcctccctaactgacacagatatagtgggcatcagagataatgttttccaggctccagcaagagccaccctttcaacccccagtcccaacaacgaaacactgtaagaagctttgtctatgtcaggcattctctggcttacaaggaggaaagattttccttcctaacctaactgaacttaatcctgaacttaatcctgaaatcttctcatcgctttttcacctctgaaaaatgtgaccttaatcaaacatgactgctaaatattggacagggtgagagccacagagaatcaaaaggaaacatgctgaaaggtagtgtgtatgtgtattaaactttcctgagcaatttcaaagaggtagtagttgtgtgaagggtagaat

SEQ ID NO: 304036 - DNA, 567 bp, Homo sapiens
gttgctgtgtctgtgtagagggaagtggacatgggagactccattttgttctgtactgggaaaggttcttctgcyttgggatgctgttgatctgtgaccttacccccaacccagtggtctctgaaacatgtgctgtgtccactcagggttaaatggattaagggtggtgcaagatgtgctttgttaaacagatgcttgaaggcagcatgctcgttaagagtcatcaccactccctaattgcaagtacccagggacacaaacactgcggtaggccgcagggtccactgcctaggaaaaccagagacctttgttcacttgtttatctgctgaccttccctccactattgtcctatgaccctgccaaatccccctatgtgagaaacacccaagaatgatcaataaaaaaaaaagaactaagattagatgagaattataaaagcatattgtatgcaaggattatatatgcattaacattgttgatacagtgcaattgtgctatacatctattttttaaaagtggggaagatgaagaaagtatatacaaaaatgatttagctgttttcagta

SEQ ID NO: 304037 - DNA, 567 bp, Homo sapiens
gttgctgtgtctgtgtagagggaagtggacatgggagactccattttgttctgtactgggaaaggttcttctgctttgggatgctgttgatctgtgaccttacccccaacccagtggtctctgaaacatgtgctgtgtccactcagggttaaatggattaagggtggtgcaagatgtgctttgttaaacagatgcttgaaggcagcatgctcgttaagagtcatcaccactccctaatygcaagtacccagggacacaaacactgcggtaggccgcagggtccactgcctaggaaaaccagagacctttgttcacttgtttatctgctgaccttccctccactattgtcctatgaccctgccaaatccccctatgtgagaaacacccaagaatgatcaataaaaaaaaaagaactaagattagatgagaattataaaagcatattgtatgcaaggattatatatgcattaacattgttgatacagtgcaattgtgctatacatctattttttaaaagtggggaagatgaagaaagtatatacaaaaatgatttagctgttttcagta

SEQ ID NO: 304038 - DNA, 522 bp, Homo sapiens
gggttgagggaactcacaccagttaaaatgaattgaattgctgttgtctaacttagcctgcctcaaattcactcaggagacttatttaaaaaggaagatttcccagagagatttatttaagggaaagcagaattggcattcttctttggacttagagcaccttgrcaagctgttgccaggacacgcaagtgggatggtgtctcttgtgcaactgataagaggaagtgacccttggattgaaggaagtagaaagattaaatcagaaagaatcaaggttcagagtctgcaaagccacaagccctctgtatgggccagcaagcccctgggcctgagaggcatcagtaattgtcacccgagttggattgaactgaaataaagaagtaaagatcctatatcatctattgaaatctttaaaagggttgcaagatatgcattactaatctatatattatcttaaaaacaaacaagacttgactctgaagagagcgctagatctcccagcacaatgtttgagctctgcca

SEQ ID NO: 304039 - DNA, 535 bp, Homo sapiens
gctggcatctggtgggtgcccctctgggatgaagcttccagaggaaggaacaggcagcaatctttgctgctctgtagcctccactggtgatacccaggcaaacagggtctggagtggaactcctgcaaactccagcagacctgcagcagaggggcctgactgttagaaggaaaactaacaaacaggaaggaatagtatcaacatcaacaaaaaggatgtccactcagaaaccccatctgaaggtcaccaacatcaaacaccaaagggagataaatccatgaagatggggtgaaaccagcgtaaaaaggctgaaaattccaaaaaccagaatgcctcttctcctccaaaggatcacaactcctcaccagcaagggaacaaaactgtacagagaatgagtttgacaaattgacagaagtaggcttcagaaggtgggtaataacaaactcctctgagctaaaggagcatgttctaacccaaggcaaggaagctaagaacmttgaaaaaatgatagatgaattgctaactagaataacc

SEQ ID NO: 304040 - DNA, 450 bp, Homo sapiens
atttctttgaaccattgttttaactggctagaggaattttgtgtttagaattttattatcttatcattttgggttggaaatttttgttctatagccgcaatgcagaccagcctgcaatgccaccacygtttctatccttgcttgtctgctttggtacctttttcccttggactttccagagggtagaacagagggcagcccggtgttagagccctgataatgggagggaaaatgttccaaatattctaaatggggcaactgtttctacacttgggtcagctggaagactcttccagcttcatagtgtatttgttggcttgcttgctttctgtttgtcattctcagattctccacaaatattcatcctgcgtttccaacccccatgtttactctcgctcaacacaggctcatatttgaaccagaaggtcatctagtacaaatttctcacat

SEQ ID NO: 304041 - DNA, 545 bp, Homo sapiens
aatgttccaaatattctaaatggggcaactgtttctacacttgggtcagctggaagactcttccagcttcatagtgtatttgttggcttgcttgctttctgtttgtcattctcagattctccacaaatattcatcctgcgtttccaacccccatgtttactctcgctcaacacaggctcatatttgaaccagaaggtcatctagtacaaatttctcacmtgcttgatgaggagcctgaggtgtgagtagggtggtggctctcaggttacagaaaggggtggctgtccagtggagctgtgtcccagcactgctcatggtggcccagtaatacttgcaagccagtgttctgtgaccatccaactcccaacatctgcttttcatttccttcctccatccctataaacatcccctacacccagaaatgcaccccgctatgtgcgcgcacacacatacacactcacactctctctctctgttttcttctttctgcaaatccccttcccttcccatcttggcaagctgccaaaagtatgaaaaattaggca

SEQ ID NO: 304042 - DNA, 602 bp, Homo sapiens
gcgttagcctgccctctagtggtgcctgaaaacgtgtgctagactgtggtgcccaatgcagagctttgcttgtcccagagatagacgcttgaaaacctcaagattagaaggaacgcttcagcagctttccagtaaatacagtaggtggagacaaacactggaaaactgcaacctaggcaacattgctttcgtttgactcttagaagattgctaggcacccagagttattgaaacttgggttgaccataatttgtcatgcttaatatttcctgcttttaaaaaattgttaaaaatgttaatatatgragattttaaacacattcagtttataaatccgttggcgcttcatgccattaattatcttaaatacccaccaaaagcagaaatttgggtggtggtatggaggtgcaaaggttaataagacacagaccctgtccttaaaacttactctctgtttggaagagaagatctatttgaatgtaattacaatacatggcagtggtataacaaagagacagtttaaatatatatatatgtttaaatatatatatatatatatatgtacacacacacacacatacacacacacacacaaaactgtg

SEQ ID NO: 304043 - DNA, 247 bp, Homo sapiens
gcaactcactgacccaaccagtgagagcacaggtagtttccactgtgagaaactcaactacagaaccagagtagaattagaaagaaasaaaagtggaggtaacagctgaactagtgagaagcggaagcacagagaggtgaaggagagaagtggaattgtgagtacggcaccgtcaggagtcaggggccaaaggtccctcttctcaagggggcattaccattactgactcaaaggggagcccttactg

SEQ ID NO: 304044 - DNA, 526 bp, Homo sapiens
ctggactacaacctgcctagtgtcatacctgtgcttccttattgccttaagtatctttccaatcacccacaacaccagaggtcacccgagaatacttgatctttgcaacagaaagtgtaactcctgcagcaccaaagtggtgcggaggagagtgaggaagtgtggtyggaagggtggatgcagcaggggctttaccaggaggcaatgccaaagcagagttctgagctataatgaggggttcgcaaggaagacagaggggtttgcaaggaaggagctgcaacgaggagtttgcaaagaagacagaggaaggtacctcaataattctgtgtttattccagtactggacataacccatggcaaaccttaatttccaggatctcctttgtgtaatgacaccagaaatcctttcttcaggaaccctggctttgagagagtggcatgagaaaggagaattttctcttttatggagggtgtaagtcctgaagcttgatgtgctgaccttattgtgtgtccttaaatattggca

SEQ ID NO: 304045 - DNA, 526 bp, Homo sapiens
ctggactacaacctgcctagtgtcatacctgtgcttccttattgccttaagtatctttccaatcacccacaacaccagaggtcacccgagaatacttgatctttgcaacagaaagtgtaactcctgcagcaccaaagtggtgcggaggagagtgaggaagtgtggtcggaagggtggatgcagcaggggctttaccaggaggcaatgccaaagcagagttctgagctataatgaggggttcgcaaggaagacagaggggtttgcaaggaaggagctgcaacgaggagtttgcaaagaagacagrggaaggtacctcaataattctgtgtttattccagtactggacataacccatggcaaaccttaatttccaggatctcctttgtgtaatgacaccagaaatcctttcttcaggaaccctggctttgagagagtggcatgagaaaggagaattttctcttttatggagggtgtaagtcctgaagcttgatgtgctgaccttattgtgtgtccttaaatattggca

SEQ ID NO: 304046 - DNA, 471 bp, Homo sapiens
gggttggtttcagctcttggctattgtgaatagtgctgctatgaacacacatgtaccaatatctcttcaagatactgctttcaattcttttttggatatatgcccagaaatgggattgctggatgtattagtccattctcacaatcctataaagaactacctgagactgggtaatttatgaagaaaagtggtttaattgactcacagtttctgcaggctgtacaggaaacatgactgggaggcctcaggaaacttacaatcacagcagaaggtgaaggggaagcaggcatatcttcacatggtggcaggagagagagacagagtgaaggaggatgtgctacacacttttaaaaaccagatctcatgagaactctgtcatgagacartactagagggatgatgcaaaaccattagaaaccacccccgtgatccaatcacctcctgccaggccccactttcaacacgtgggga

SEQ ID NO: 304047 - DNA, 371 bp, Homo sapiens
atgggtgtgaggtgacatgtagattgactttaaagtacaaaccccctttgaaatggtaaggggatctctgaactttcatgccttctggtaaactttgattttatcaaccagctgaaatcattcactgaagtacatgttattttgatctagacaagttgttaggatcctggaaagagatcttagatttctttaaacttggtaaatgtaaaactggaagccccaagactgggggctacctgagaagtcccayatcaggtacttctctctcagttgttttgaccctgaggacattttttattgaatgaaaacaaacattttcatcagaattattccaacatttccggaaatattatcaagaaattattttctag

SEQ ID NO: 304048 - DNA, 582 bp, Homo sapiens
tagtcattttctaccaaacctaattttcctgggctagattttgcaggtataatttttgacaagaagatttgattcttttgtcaatctttaacgtcaattacaaatttttctgtgtaaagctttcacctttgtcagttttattttgtgttatttgcataaagtgcaattttaagagttcacttttgtagttttgagacttaccaacacaatgagattcttcagtcagttttttgtcaatatcaaagttaacatatatcattttagttattatcagtttgatcctgtgtagattctttttacatctactttttttttctagtgacccgttgaaaatatacttgatataaaaatatcaaggccataacatcatgttttcatccaaagctactctgtttaaaaatatttaaaaagtagaatcgacctttttagaggcatgggcttcacaggtaaatccttaatctagaagtgacaagttctgggtgtttgtctttgttctgcrctcatcacccctgtgtctacagtctggtagtcctcatctaaaagtgaagtgattgaagtgtgtgatttctaaatccccttgca

SEQ ID NO: 304049 - DNA, 548 bp, Homo sapiens
gattcactcctccctaaccctaaccctaatcctcctgacaaccagcctgtctgcacttgctcagacctgggtaggagcctctgatgttccctacacagatttgcatgttgttcttagagtcttggcttctgatctgctccagagcgccactgctctcaggctttctgagctcaacccatatcctttctgattgagcaccgaccagctgggctcagagcagcctgcctccaccctgccttcatctgcctggaagctacgaggttatcaggraccatgctgagccttgtctttccccatccccactcctcagcctaactcctatcacctctctttgtgggttaggcatgaagggacaatcgtggggttatgtggatgtagtttagggtagaccaatcttaaaggcagcagagttaggacagatcccaaggccattgtaggcaggaaggggagataagatagaccacatcatttaaggaatcatttcaggatcccaggaggaatgtgttgggccatttgcactagaacaattggagggaggtttagtgaag

SEQ ID NO: 304050 - DNA, 470 bp, Homo sapiens
tcaacccatatcctttctgattgagcaccgaccagctgggctcagagcagcctgcctccaccctgccttcatctgcctggaagctacgaggttatcagggaccatgctgagccttgtctttccccawccccactcctcagcctaactcctatcacctctctttgtgggttaggcatgaagggacaatcgtggggttatgtggatgtagtttagggtagaccaatcttaaaggcagcagagttaggacagatcccaaggccattgtaggcaggaaggggagataagatagaccacatcatttaaggaatcatttcaggatcccaggaggaatgtgttgggccatttgcactagaacaattggagggaggtttagtgaagggactgtttacaaatgatgagcagtgtttatggagtccataaaggacagtgtagcaccactgagttcagttatgactcctcaccagaaatga

SEQ ID NO: 304051 - DNA, 470 bp, Homo sapiens
tcaacccatatcctttctgattgagcaccgaccagctgggctcagagcagcctgcctccaccctgccttcatctgcctggaagctacgaggttatcagggaccatgctgagccttgtctttccccatccccactcctcagcctaactcctatcacctctctttgtgggttaggcatgaagggacaatcgtggggttatgtggatgtagtttagggtagaccaatcttaaaggcagcagagttaggacagatcccaaggccattgtaggcaggaaggggagatargatagaccacatcatttaaggaatcatttcaggatcccaggaggaatgtgttgggccatttgcactagaacaattggagggaggtttagtgaagggactgtttacaaatgatgagcagtgtttatggagtccataaaggacagtgtagcaccactgagttcagttatgactcctcaccagaaatga

SEQ ID NO: 304052 - DNA, 470 bp, Homo sapiens
tcaacccatatcctttctgattgagcaccgaccagctgggctcagagcagcctgcctccaccctgccttcatctgcctggaagctacgaggttatcagggaccatgctgagccttgtctttccccatccccactcctcagcctaactcctatcacctctctttgtgggttaggcatgaagggacaatcgtggggttatgtggatgtagtttagggtagaccaatcttaaaggcagcagagttaggacagatcccaaggccattgtaggcaggaaggggagataagatagaccacatcatttaaggaatcatttcaggatcccaggaggaatgtgttgggccatttgcactagaacaattggagggaggtttagtgaagggactgtttacaaatgatgagcagtgtttatggagtccawaaaggacagtgtagcaccactgagttcagttatgactcctcaccagaaatga

SEQ ID NO: 304053 - DNA, 470 bp, Homo sapiens
tcaacccatatcctttctgattgagcaccgaccagctgggctcagagcagcctgcctccaccctgccttcatctgcctggaagctacgaggttatcagggaccatgctgagccttgtctttccccatccccactcctcagcctaactcctatcacctctctttgtgggttaggcatgaagggacaatcgtggggttatgtggatgtagtttagggtagaccaatcttaaaggcagcagagttaggacagatcccaaggccattgtaggcaggaaggggagataagatagaccacatcatttaaggaatcatttcaggatcccaggaggaatgtgttgggccatttgcactagaacaattggagggaggtttagtgaagggactgtttacaaatgatgagcagtgtttatggagtccataaaggacagtgtagcaccactgagttcagwtatgactcctcaccagaaatga

SEQ ID NO: 304054 - DNA, 447 bp, Homo sapiens
acaggcacaggctgctcctctagcttgttcatgtacatcccagtaaaatcaagtggagaagatcatccagagaagactgggaggaaaagggttagcatgcttgcatcaccttgggtgaggaatgagttaaatgcartgacctttgtgaatttcagctgatgtcattgtataagtcatgtatttccctggcagctgctgtctaaggcatggccttcaccttgaattggttctgggtcaacagaagcctaggctgggttgattagctcacttcactcttccctgagaggcctcggaggagctggccacagtgggagctttgggagggtaggatcaatgcctttggatatctgggtggggtagagggagctttaagtatagagaaagggggaggggagagagtgttgaaagggtgctgatggcacatctggacaaggggcagacctgggc

SEQ ID NO: 304055 - DNA, 447 bp, Homo sapiens
acaggcacaggctgctcctctagcttgttcatgtacatcccagtaaaatcaagtggagaagatcatccagagaagactgggaggaaaagggttagcatgcttgcatcaccttgggtgaggaatgagttaaatgcagtgacctttgtraatttcagctgatgtcattgtataagtcatgtatttccctggcagctgctgtctaaggcatggccttcaccttgaattggttctgggtcaacagaagcctaggctgggttgattagctcacttcactcttccctgagaggcctcggaggagctggccacagtgggagctttgggagggtaggatcaatgcctttggatatctgggtggggtagagggagctttaagtatagagaaagggggaggggagagagtgttgaaagggtgctgatggcacatctggacaaggggcagacctgggc

SEQ ID NO: 304056 - DNA, 514 bp, Homo sapiens
cacaggctgctcctctagcttgttcatgtacatcccagtaaaatcaagtggagaagatcatccagagaagactgggaggaaaagggttagcatgcttgcatcaccttgggtgaggaatgagttaaatgcagtgacctttgtgaatttcagctgatgtcattgtataagtcatgtatttccctggcagctgctgtctaaggcatggccttcaycttgaattggttctgggtcaacagaagcctaggctgggttgattagctcacttcactcttccctgagaggcctcggaggagctggccacagtgggagctttgggagggtaggatcaatgcctttggatatctgggtggggtagagggagctttaagtatagagaaagggggaggggagagagtgttgaaagggtgctgatggcacatctggacaaggggcagacctgggcctacttaagatggcattgcattgggctcagggtttatagagcatataatatgctttacatggaatgatgcca

SEQ ID NO: 304057 - DNA, 447 bp, Homo sapiens
acaggcacaggctgctcctctagcttgttcatgtacatcccagtaaaatcaagtggagaagatcatccagagaagactgggaggaaaagggttagcatgcttgcatcaccttgggtgaggaatgagttaaatgcagtgacctttgtgaatttcagctgatgtcattgtataagtcatgtatttccctggcagctgctgtctaaggcatggccttcaccttgaattggttctgggtcaacagaagcctaggctgggttgattagctcayttcactcttccctgagaggcctcggaggagctggccacagtgggagctttgggagggtaggatcaatgcctttggatatctgggtggggtagagggagctttaagtatagagaaagggggaggggagagagtgttgaaagggtgctgatggcacatctggacaaggggcagacctgggc

SEQ ID NO: 304058 - DNA, 447 bp, Homo sapiens
acaggcacaggctgctcctctagcttgttcatgtacatcccagtaaaatcaagtggagaagatcatccagagaagactgggaggaaaagggttagcatgcttgcatcaccttgggtgaggaatgagttaaatgcagtgacctttgtgaatttcagctgatgtcattgtataagtcatgtatttccctggcagctgctgtctaaggcatggccttcaccttgaattggttctgggtcaacagaagcctaggctgggttgattagctcacttcactcttccctgagaggcctcggaggagctggccacastgggagctttgggagggtaggatcaatgcctttggatatctgggtggggtagagggagctttaagtatagagaaagggggaggggagagagtgttgaaagggtgctgatggcacatctggacaaggggcagacctgggc

SEQ ID NO: 304059 - DNA, 514 bp, Homo sapiens
cacaggctgctcctctagcttgttcatgtacatcccagtaaaatcaagtggagaagatcatccagagaagactgggaggaaaagggttagcatgcttgcatcaccttgggtgaggaatgagttaaatgcagtgacctttgtgaatttcagctgatgtcattgtataagtcatgtatttccctggcagctgctgtctaaggcatggccttcaccttgaattggttctgggtcaacagaagcctaggctgggttgattagctcacttcactcttccctgagaggcctcggaggagctggccacagtgggagctttgggagggtaggatcaatgcctttggatatctgggtggggtagagggagctttaagtatagagaaagggggaggggagagagtgttgaaagggtgctgatggcacatctggacaaggggcagacctgggcctacttaagatggcattgcattgggctcagggtttatagagcatakaatatgctttacatggaatgatgcca

SEQ ID NO: 304060 - DNA, 658 bp, Homo sapiens
tggaatgatgccacctccaatgcctgagatgcactgtatagactgagatgctgctggaactgtggtgggggtgggcaagaggggtggttggggaggcagtgggcataatctcccttcagagtcctgtagcacagagttctgccacagaacaccactgttctgctttaaacaccattgcaaatggttagcattcaccttagctgaatttgtagagagggagaggaaagagggaaaagaggagaaaaagagagaatgtatttgtccagctcaatgcatatggatgagttggttctggtgctcctatttaatcaaacgattcatatttgtggatgggtggggcagcaggagcagagtaggctgtgggctgagcaaatacttagaagcatgtctgttacaatcatgctttgcttctggtcagtggcacaatatatatatttaacacattctcttgggaatattaaaatccaatataatataagccagtggcaagtagtctttcttttattatatccattgggcaacgsgttggtcagcagagggaagagagatcagaaagcagaaagctggatggaggaatgacctcctctcactaactccaaagtgttgcatctaccttgaccagaatccatggcttctaaaagaattcattggaagaaag

SEQ ID NO: 304061 - DNA, 654 bp, Homo sapiens
ggaagagagatcagaaagcagaaagctggatggaggaatgacctcctctcactaactccaaagtgttgcatctaccttgaccagaatccatggcttctaaaagaattcaytggaagaaagaaatagggaggtgaaaagaaaggagagaatggagacgagagaaatataagcaagaaaagtgagtttttctagaaagaattttattgtcaaataattctgcaagggaacaaagtcttctgagaagcatgaagcataatctttctcctttctgtttttttctattccctatagaaaaaacctgttaattttgtattaaaaacaaaatacatttctttttttttgagtgctctataattgtataggaatgtgtatcacttcctccccataattttgagaatatttctgaagacagtgacatattctgactctttaagaacaaaacaattcaattttaaaatcactgagtgacagcaatcaaagttctgaagtgatgcagttcgcctcaacacttgttcgaaatgtcattagaaaaccaacatatagcgggttgttatggcaactggaataccagagtttataacatcactgtaattaatgttatccaaatgttattaatctttcaacatcactcacattctctgaaggaacggcagt

SEQ ID NO: 304062 - DNA, 563 bp, Homo sapiens
aaaacgagcctattttctctggtgaaaggactgagaagggtatctcactgaagacccagtgaggagattcctactgatccatgccacagcagctccgctcargcctggccctcagcatcacacccaggccacaaaggctctgctgaccacggcgcagagaccacactcagaacccggcgtttccttaacctacccccgccgcacagggcaaccccagcaacatgcacagggattgaaccagagccccagcagatccagaagaacaaacgagaccagaatagcactgggagggctttgaaaactaaattgtcattgactctacatttcccctaaagcaggctggggcctatatggtaaaccaaataagggtaccatggactgaactggaatgttcaaataggataaaaagtttccttacataataaccgaaatctccagaacatatttgaaattatttgtcatatcaggaaacataaaaagcaacttgaagcctggtgagggggctcccacctgtaatcccagcactttggaaggtcaatcaggaggatggcttgagcccggga

SEQ ID NO: 304063 - DNA, 563 bp, Homo sapiens
aaaacgagcctattttctctggtgaaaggactgagaagggtatctcactgaagacccagtgaggagattcctactgatccatgccacagcagctccgctcaggcctggccctcagcatcacacccaggccacaaaggctctgctgaccacggcgcagagaccacacycagaacccggcgtttccttaacctacccccgccgcacagggcaaccccagcaacatgcacagggattgaaccagagccccagcagatccagaagaacaaacgagaccagaatagcactgggagggctttgaaaactaaattgtcattgactctacatttcccctaaagcaggctggggcctatatggtaaaccaaataagggtaccatggactgaactggaatgttcaaataggataaaaagtttccttacataataaccgaaatctccagaacatatttgaaattatttgtcatatcaggaaacataaaaagcaacttgaagcctggtgagggggctcccacctgtaatcccagcactttggaaggtcaatcaggaggatggcttgagcccggga

SEQ ID NO: 304064 - DNA, 563 bp, Homo sapiens
aaaacgagcctattttctctggtgaaaggactgagaagggtatctcactgaagacccagtgaggagattcctactgatccatgccacagcagctccgctcaggcctggccctcagcatcacacccaggccacaaaggctctgctgaccacggcgcagagaccacactcagmacccggcgtttccttaacctacccccgccgcacagggcaaccccagcaacatgcacagggattgaaccagagccccagcagatccagaagaacaaacgagaccagaatagcactgggagggctttgaaaactaaattgtcattgactctacatttcccctaaagcaggctggggcctatatggtaaaccaaataagggtaccatggactgaactggaatgttcaaataggataaaaagtttccttacataataaccgaaatctccagaacatatttgaaattatttgtcatatcaggaaacataaaaagcaacttgaagcctggtgagggggctcccacctgtaatcccagcactttggaaggtcaatcaggaggatggcttgagcccggga

SEQ ID NO: 304065 - DNA, 527 bp, Homo sapiens
tgaagcaaaacctgatagagcttaaaaaagaaatagaaaaatccataattatagttgggatatgtcgacatctcactttcagaatttgtaaaattactagaaaaaaaatcagcaagaatataggataactaaacaatattattagccaatagggtaaaattaacatttatggaaaactctayccatcaacagcaaactatgcattattttcaagctcttatagaacagactctagatcttaaaacaaaccttaacaaatttttaaaaactgaaatcatacaaagagtgtcctctgaccaaaatggaatcaaactggaaataaattgcagaaagacaagagaaaaatctgcaaacacttggaaattaagcagtaaacatttatatacaatgtggacaagaagaagtctcaaagggaatttttaaaaagcaagtaacaatgaaaatatggcatatcaaaatttgtggatgaggctgggtgcaatggcttactcctgtaatcccagcactttgggaggctgtggcaggtg

SEQ ID NO: 304066 - DNA, 629 bp, Homo sapiens
aatttcactcaagttatgcaagactgttttaatatttgaaaagccaatccacatattctgttttgtaaactgaagaaaaatcataatgatcttatcaattgacataggaaaaggttttgacaaaattcaaaaccyattcatgatataaactcttagcaaacttggaatagagggtaatttcctccaacttcataaagagcatttacaaaaatctacagttaacatcacatttaatggtgaaagaatgaatgctttccccttaagagcaggaacaaggcaagaatgttccctttcaccattttaattcaagatagtactagaagttctaaccagtgtaataagaccagaaaaagaaataaaaagtatgcagattgaaaagaaagaaagaaaactatcactacttgcatgtggcataatcatctacataaacagtcccatggaacaaaaaaaaaatccttgatataaagagtgagaatatcaaggctgcaatacacaagaataacacacatacacaaattacatctctctatggtaacaataaacaagtggaaaccaaaataaaaactgcaataccatttacaactgctcaaaatacatgaagtattaatatgtaggaataaatctaataa

SEQ ID NO: 304067 - DNA, 629 bp, Homo sapiens
aatttcactcaagttatgcaagactgttttaatatttgaaaagccaatccacatattctgttttgtaaactgaagaaaaatcataatgatcttatcaattgacataggaaaaggttttgacaaaattcaaaacccattcatgatataaactcttagcaaacttggaatagagggtaatttcctccaacttcataaagagcatttacaaaaatctacagttaacatcacayttaatggtgaaagaatgaatgctttccccttaagagcaggaacaaggcaagaatgttccctttcaccattttaattcaagatagtactagaagttctaaccagtgtaataagaccagaaaaagaaataaaaagtatgcagattgaaaagaaagaaagaaaactatcactacttgcatgtggcataatcatctacataaacagtcccatggaacaaaaaaaaaatccttgatataaagagtgagaatatcaaggctgcaatacacaagaataacacacatacacaaattacatctctctatggtaacaataaacaagtggaaaccaaaataaaaactgcaataccatttacaactgctcaaaatacatgaagtattaatatgtaggaataaatctaataa

SEQ ID NO: 304068 - DNA, 629 bp, Homo sapiens
aatttcactcaagttatgcaagactgttttaatatttgaaaagccaatccacatattctgttttgtaaactgaagaaaaatcataatgatcttatcaattgacataggaaaaggttttgacaaaattcaaaacccattcatgatataaactcttagcaaacttggaatagagggtaatttcctccaacttcataaagagcatttacaaaaatctacagttaacatcacatttaatggtgaaagaatgaatgctttccccttaagagcaggaacaaggcaagaatgttccctttcaccattttaattcaagatagtactagaagttctaaccagtgtaataagaccagaaaaagaaataaaaagtatgcagattgaaaagaaagaaagaaaactatcactrcttgcatgtggcataatcatctacataaacagtcccatggaacaaaaaaaaaatccttgatataaagagtgagaatatcaaggctgcaatacacaagaataacacacatacacaaattacatctctctatggtaacaataaacaagtggaaaccaaaataaaaactgcaataccatttacaactgctcaaaatacatgaagtattaatatgtaggaataaatctaataa

SEQ ID NO: 304069 - DNA, 437 bp, Homo sapiens
agcagggcacagtgtagaccacagtgtgttctccacactagctctatagtgtgttgccttctaggttgatcatcgacattctgctttggggtgtgatccccttccacccatgtggatcattgtttgatatcactttgccctgcaagcttgtgaagaaccagagctttgccacttcaactcattgtgaaatttctgatgttacaatgattggtcctaccagcctgggccacacaggaagaccctgtctctacaamatatttaaaattagccaggcatggtggtgtacgcccatagttctagctactccagaggctaagacaggaggatcacttaagcccaggagtttgaggctgcagtgagctatgattgtcaaaaagaattttttttttaattcaagaaataggccaggcatggtggctcatgcctgtaatcccagc

SEQ ID NO: 304070 - DNA, 437 bp, Homo sapiens
agcagggcacagtgtagaccacagtgtgttctccacactagctctatagtgtgttgccttctaggttgatcatcgacattctgctttggggtgtgatccccttccacccatgtggatcattgtttgatatcactttgccctgcaagcttgtgaagaaccagagctttgccacttcaactcattgtgaaatttctgatgttacaatgattggtcctaccagcctgggccacacaggaagaccctgtctctacaaaatatttaaaattagccaggcrtggtggtgtacgcccatagttctagctactccagaggctaagacaggaggatcacttaagcccaggagtttgaggctgcagtgagctatgattgtcaaaaagaattttttttttaattcaagaaataggccaggcatggtggctcatgcctgtaatcccagc

SEQ ID NO: 304071 - DNA, 453 bp, Homo sapiens
cacacaacaactttaaatataaaaaagccattcaggctaggcgcagtggctcacgtgtgtaatcccagcactttgagagaccgaggcaggtggatcacctgagatcagaagttcaagaccaggctggccaacatggcaaaaccctgtctctacaaaaaaatataaaaattagctgggcatggtggtgcatacctgtaatcccagctactcgggaggctgaggcacgagaatcgcttgaacctgggaagcagaggttgcagtgagccaagcttgcaccactrcacttcagggtgggcaacagagtgagactccgtctcaaataaataaataacaaagccattcaactaaagaaccgattatcaagcagaagcacaaagcccaggttccatcaggtttttaattgtacatcagtgactggtgaaaaagcaattatttccataattaaaatacaca

SEQ ID NO: 304072 - DNA, 566 bp, Homo sapiens
ggtcacaagcctaatcaggcctatatttaaaacaagtcatcaggtcaggcacagtggctcatgcctggaatcccagcactgtgggaggccaaggtgggtggatcacctgaggtcaggagttcgagactagtctgaccaacatggtgaaaccccatctctactaaaaatacaaaaatgagctgggcatggtggcaggcacctgtaatcccagctacttgggaggctgatgcaggagaatcacttgaacccagagatggaggtcgcagtgagctgagatcacaccattgcactccagcctggtagacaaaagcragactccatctcaaaaaaggaaataaataaataaacattgattttcttcatgatgtctacaattattccaaaatattaaattagctaggaacagtggctcatgcctattatccaagcactttatgaggctgaggcgggaggatcccttaaggccaggaggtcgaggctgcagtgagctataattgcaccagtgcactccagtttagggaacagaagaagaccttgtctccaacaataaataaaataaaaattaa

SEQ ID NO: 304073 - DNA, 464 bp, Homo sapiens
aacggattgatacagtttggctttgtgtcccyacccaaatctcatctcaaattgtaatctccaggtgttgagaaagggacctgttgagaggtgattggctcatgggggcagtttcccccaggctattctcatgatagtgagttctcatgagatctgacagtttcataagaggctctttgcccttcatttccttcacaagctctctcacctgctgccattaagacatgccttctaccccttccaccatgattgtaagtttcctgaggcctccccagccatgtggagctgtgagtcaagtaaacctcttttctttataaattaccaagtcttgggcagttctttatagcagtgtgagaacagactaatacacagaccaaaagaaaattaatagaaaggggcatggctgtactgaatggaactgctcgttacagaagaccagacatctatcagaaaaacctgcccaa

SEQ ID NO: 304074 - DNA, 464 bp, Homo sapiens
aacggattgatacagtttggctttgtgtccctacccaaatctcatctcaaattgtaatctccaggtgttgagaaagggacctgttgagaggtgattggctcatgggggcagtttcccccaggctattctcatgatagtgagttctcatgagatctgacagtttcataagaggctctttgcccttcayttccttcacaagctctctcacctgctgccattaagacatgccttctaccccttccaccatgattgtaagtttcctgaggcctccccagccatgtggagctgtgagtcaagtaaacctcttttctttataaattaccaagtcttgggcagttctttatagcagtgtgagaacagactaatacacagaccaaaagaaaattaatagaaaggggcatggctgtactgaatggaactgctcgttacagaagaccagacatctatcagaaaaacctgcccaa

SEQ ID NO: 304075 - DNA, 548 bp, Homo sapiens
ttcttaaccctttcatattcatacctttctctgagacttctgcccagactttaggaatgaagttgtgttttccactggtgatctggtccttcagtgacacttgagtcctgtgctcagagaaaggtggatacccactaaggcttaatattggtagagagagaaaggaaaagaaatcaagtggcattctcagtggcattcagatataaagayttctttttcagcataatgaaaagtcagatttttctttaaatcaatggtcaaaaagtgagctaggctgggcacaatggctcatgcttgtaatcccagcactttgggagggccgaggcaggaggatcacttgagcccaggagttcaagaccagcgtgggcaacatggcaaaaccccatcactacaaaaaatagaaaaattagctgggcatggtggtgtgcgcatgtagtcccagctactcaggaggctgagatgggaggatcacttgacccagaaggcagaggctacagttagccaagatcaagccactgcatgccagcctggacaacagagcaagacac

SEQ ID NO: 304076 - DNA, 644 bp, Homo sapiens
ttgccctgactctggtcctgtcactggcctagccccagccctgttgctggtcttaccatggcccagaccctgccttggcccttccctgacactgtcctggaccctggctgtgccaagatcctgcactgaccgtgtccttgttttgctcctgccccaaacctggtcctgcccaggccatggccatggccctggccctggccctgccctggctgttccctggccctgccctgccttggccctatgctttcctggccctgtcttgcctgtcctggccctgccttggccctagcctggctttgaccctgccctggccctaccttggccttcaccctagccttacctggccactctgttggacctggccatagcacagacctggttgtggccatggccctgtcccagaccctagccctgccrggtacctgtcctggcccagctctgggcctggctttgtccctggttcttagatgaacctggccctgcacctgcccttgcccttgccctggcactggccttggacatgtccgtggtcctaaccctggccctgccctggagctgccactgtcttggccctgccctggctctggccctgccctggccctggccctgccccggccccagccatagacctgccctggttggtc

SEQ ID NO: 304077 - DNA, 596 bp, Homo sapiens
cctgccctggctctggccctgccctggccctggccctgccccggccccagccatagacctgccctggttggtcrtgccctaccttaaccctgtgctaccctgggcctgctccaccctgccctggccctgccctccctttggccctgccatgaccctgccttggccctcacactggccctagcacagacctggtcctatctgtggccttagcctggcattgacccctgctcctgaccctggccctgccatggcccttgccctgccaatgaccctgacagccctggccctggccctgtcttggccctggccctgaactggccctgccctgaccctggccctgaagtggatttgcaggtgtcttgtccatgatttaacctggtcttatcatggccctgtccctcccctggctctgtcctggtcttgtgctgaccctgacccagaccttggccctgcctcagccttgtccttgacctggccatggccctgcctctgccctggaccggcgctggcactggcatggaccctggccctggccgttcactacttaaggccataccctggcccagccctggtcctgaccctgtcctggccctaat

SEQ ID NO: 304078 - DNA, 596 bp, Homo sapiens
cctgccctggctctggccctgccctggccctggccctgccccggccccagccatagacctgccctggttggtcatgccctaccttaaccctgtgctaccctgggcctgctccaccctgccctggccctgccctccctttggccctgccmtgaccctgccttggccctcacactggccctagcacagacctggtcctatctgtggccttagcctggcattgacccctgctcctgaccctggccctgccatggcccttgccctgccaatgaccctgacagccctggccctggccctgtcttggccctggccctgaactggccctgccctgaccctggccctgaagtggatttgcaggtgtcttgtccatgatttaacctggtcttatcatggccctgtccctcccctggctctgtcctggtcttgtgctgaccctgacccagaccttggccctgcctcagccttgtccttgacctggccatggccctgcctctgccctggaccggcgctggcactggcatggaccctggccctggccgttcactacttaaggccataccctggcccagccctggtcctgaccctgtcctggccctaat

SEQ ID NO: 304079 - DNA, 596 bp, Homo sapiens
cctgccctggctctggccctgccctggccctggccctgccccggccccagccatagacctgccctggttggtcatgccctaccttaaccctgtgctaccctgggcctgctccaccctgccctggccctgccctccctttggccctgccatgaccctgccttggccctcacactggccctagcacagacctggtcctatctgtggccttrgcctggcattgacccctgctcctgaccctggccctgccatggcccttgccctgccaatgaccctgacagccctggccctggccctgtcttggccctggccctgaactggccctgccctgaccctggccctgaagtggatttgcaggtgtcttgtccatgatttaacctggtcttatcatggccctgtccctcccctggctctgtcctggtcttgtgctgaccctgacccagaccttggccctgcctcagccttgtccttgacctggccatggccctgcctctgccctggaccggcgctggcactggcatggaccctggccctggccgttcactacttaaggccataccctggcccagccctggtcctgaccctgtcctggccctaat

SEQ ID NO: 304080 - DNA, 569 bp, Homo sapiens
ttgaccctgccctggccctaccttggccttcaccctagccttacctggccactctgttggacctggccatagcacagacctggttgtggccatggccctgtcccagaccctagccctgccgggtacctgtcctggcccagctctgggcctggctttgtccctggttcttagatgaacctggccctgcacctgcccttgcccttgccctggcactggccttggacatgtccgtggtcctaaccctggccctgccctggagctgccactgtcttggccctgccctggctctggccctgccctggccctggccctgccccggccccagccatagacctgccctggttggtcatgccctaccttaaccctgtgctaccctgggcctgctccaccctgccctggccctgccctccctttggccctgccatgaccctgccttggccctcacactggccctagcacagacctggtcctatctgtggccttagcctggcattgacccytgctcctgaccctggccctgccatggcccttgccctgccaatgaccctgacagccctggccctggccct

SEQ ID NO: 304081 - DNA, 510 bp, Homo sapiens
cctgccttggtcctgcccagaccctggctcgggccctacctctgccctggccatacccttgccctggcctggacctcggtcctggtccttgtcctgccccagccatggtcctggccctgccctgcctgtgccctgttctatcctgggctggccctgccatggcctggtcttgccattgccctgccttagcctgccctgcttgtgccctagatctgccccggcctttgycccgtcttggttctagccttgacgcagccctggaccttccctgaccttgccttagccctggcactaccctggccttggcttggcatttgccctactctatggcctggctctcgtcctgcccttatgcaggcctgaccctgcctgtgccttggctttggcctggaccttggccgtacagtgaccctgccatgaccctttcctggccctggcctggaacctggccctgccaaggactcgccctggctctgtcatggccctggcccttttctggatttggatgtg

SEQ ID NO: 304082 - DNA, 510 bp, Homo sapiens
cctgccttggtcctgcccagaccctggctcgggccctacctctgccctggccatacccttgccctggcctggacctcggtcctggtccttgtcctgccccagccatggtcctggccctgccctgcctgtgccctgttctatcctgggctggccctgccatggcctggtcttgccattgccctgccttagcctgccctgcttgtgccctagatctgccccggcctttgccccgtcttggttctagccttgacgcagccctggaccttccctgaccttgccttagccctggcactaccctggccttggcttggcatttgccctactctatggcctggctctcgtcctgcccttatgcaggcctgaccctgcctgtgccttggctttggcctggaccttggccrtacagtgaccctgccatgaccctttcctggccctggcctggaacctggccctgccaaggactcgccctggctctgtcatggccctggcccttttctggatttggatgtg

SEQ ID NO: 304083 - DNA, 603 bp, Homo sapiens
tgtatgagtatctaatgacctttccaaattaatttttatttttagctctattagatttttctcagtgtaacaaatgtttattcctatgtaattaagggcgtatttcctgtacagagtattcatattacctaattgaaaattatataatacaaaaatataatattatttttaggccaggcatggtggctcatacctgtaatcccaacattttgagaggccaagttgggagaatcatttgagtccaggagttgaccagcctgggccacatattgagaccttttctttattaaataaataaataaataaataggttgggcactgtggctcatatctgtaatcccagcattttgggttgcaaaggcaggaggattgcttgagcccaggagtttgagaccagcctgggcasaatagcaagactccatctctacaaataataaaatattaaccaggtgtggtggtgcgcacctggggtcccggctacccgggaggctaaggtgggaggtttgctcaaggctgcagtgaactgtgaatgcaccactgcattgcagcctaggccacagaacaggaccttgtctataaataaagaaataagtaaaaacataa

SEQ ID NO: 304084 - DNA, 598 bp, Homo sapiens
agattaaatgcgatgagatgaattgagatgatatgaaataatgaaactaggtgaaataatgaaatgagatgaaacgaaataatgawatgaaattgaaatgagatgagaagaaatgacgagatgaaatgttgaaatgaaaggaagaaatgatgagatgagatgaaatgatgagatgaaaaattatgagatgaaaatatgagatgaaatgaaatgagatgatatgaaatgacataatgaaataaatgagattagatgaaatgaaatgaaatagtgaaatgaaatgatgaaatgatgaaatgatgaaaatgaaatggagatgagatttgatgaaaagatgagatgatatgatgagatgggatgggatgagataaaatgatgagatgaaatgatgagatgatgagatgaaatgatgaggtgaagtgatgcactgtcacgtgtgtgtctattctttttcccaaccaacaaaaattataattcattaattttaattttatttaacaatactcttaagagttgaaggaaaaatattatctacattatgggttacaatctaagtataaataatacataaatatattaaaacttacaaagaatatgt

SEQ ID NO: 304085 - DNA, 598 bp, Homo sapiens
agattaaatgcgatgagatgaattgagatgatatgaaataatgaaactaggtgaaataatgaaatgagatgaaacgaaataatgaaatgaaattgaaatgagatgagaagaaatgacgagatgaaatgttgaaatgaaaggaagaaatgatgagatgagatgaaatgatgagatgaaaaattatgagatgaaaatatgagatgaaatgaaatgagatgatatgaaatgacataatgaaataaatgagattagatgaaatgaaatgaaatagtgaaatgaaatgatgaaatgatgaaatgatgaaaatgaaatggagatgagatttgatgaaawgatgagatgatatgatgagatgggatgggatgagataaaatgatgagatgaaatgatgagatgatgagatgaaatgatgaggtgaagtgatgcactgtcacgtgtgtgtctattctttttcccaaccaacaaaaattataattcattaattttaattttatttaacaatactcttaagagttgaaggaaaaatattatctacattatgggttacaatctaagtataaataatacataaatatattaaaacttacaaagaatatgt

SEQ ID NO: 304086 - DNA, 548 bp, Homo sapiens
tgatgaaaagatgagatgatatgatgagatgggatgggatgagataaaatgatgagatgaaatgatgagatgatgagatgaaatgatgaggtgaagtgatgcactgtcacgtgtgtgtctattctttttcccaaccaacaaaaattataattcattaattttaattttatttaacaatactcttaagagttgaaggaaaaatattatctacattatgggttacaatctaagtataaataatacataaatatattaaaacttayaaagaatatgttttggaatcgaatataccatgcttctgtgatgacagttatttcatgctggttgtcacaattttacgtgaaaaactaatgaaaaagtgtttttaactgtttctaaaaataagtttccaaaacagttttacattcgaaatatgaaaaagatgtctttgtgttccttaatctgatgagattttcacactctgcacatgataattgttagatttttattgtgttgataaattgtatatcaaataaaaaatgttattacctcttaaattaggattttta

SEQ ID NO: 304087 - DNA, 548 bp, Homo sapiens
tgatgaaaagatgagatgatatgatgagatgggatgggatgagataaaatgatgagatgaaatgatgagatgatgagatgaaatgatgaggtgaagtgatgcactgtcacgtgtgtgtctattctttttcccaaccaacaaaaattataattcattaattttaattttatttaacaatactcttaagagttgaaggaaaaatattatctacattatgggttacaatctaagtataaataatacataaatatattaaaacttacaaagaatatgttttggaatcgaatataccatgcttctgtgatgacmgttatttcatgctggttgtcacaattttacgtgaaaaactaatgaaaaagtgtttttaactgtttctaaaaataagtttccaaaacagttttacattcgaaatatgaaaaagatgtctttgtgttccttaatctgatgagattttcacactctgcacatgataattgttagatttttattgtgttgataaattgtatatcaaataaaaaatgttattacctcttaaattaggattttta

SEQ ID NO: 304088 - DNA, 431 bp, Homo sapiens
tgtcacgtgtgtgtctattctttttcccaaccaacaaaaattataattcattaattttaattttatttaacaatactcttaagagttgaaggaaaaatattatctacattatgggttacaatctaagtataaataatacataaatatattaaaacttacaaagaatatgttttggaatcgaatataccatgcttctgtgatgacagttatttcatgctggttgtcacaattttacrtgaaaaactaatgaaaaagtgtttttaactgtttctaaaaataagtttccaaaacagttttacattcgaaatatgaaaaagatgtctttgtgttccttaatctgatgagattttcacactctgcacatgataattgttagatttttattgtgttgataaattgtatatcaaataaaaaatgttattacctcttaa

SEQ ID NO: 304089 - DNA, 548 bp, Homo sapiens
tgatgaaaagatgagatgatatgatgagatgggatgggatgagataaaatgatgagatgaaatgatgagatgatgagatgaaatgatgaggtgaagtgatgcactgtcacgtgtgtgtctattctttttcccaaccaacaaaaattataattcattaattttaattttatttaacaatactcttaagagttgaaggaaaaatattatctacattatgggttacaatctaagtataaataatacataaatatattaaaacttacaaagaatatgttttggaatcgaatataccatgcttctgtgatgacagttatttcatgctggttgtcacaattttacgtgaaaaactaatgaaaaartgtttttaactgtttctaaaaataagtttccaaaacagttttacattcgaaatatgaaaaagatgtctttgtgttccttaatctgatgagattttcacactctgcacatgataattgttagatttttattgtgttgataaattgtatatcaaataaaaaatgttattacctcttaaattaggattttta

SEQ ID NO: 304090 - DNA, 597 bp, Homo sapiens
agatgggatgggatgagataaaatgatgagatgaaatgatgagatgatgagatgaaatgatgaggtgaagtgatgcactgtcacgtgtgtgtctattctttttcccaaccaacaaaaattataattcattaattttaattttatttaacaatactcttaagagttgaaggaaaaatattatctacattatgggttacaatctaagtataaataatacataaatatattaaaacttacaaagaatatgttttggaatcgaatataccatgcttctgtgatgacagttatttcatgctggttgtcacaattttacgtgaaaaactaatgaaaaagtgtttttaactgtttctaaaaataagtttccaaaacagttttacattcraaatatgaaaaagatgtctttgtgttccttaatctgatgagattttcacactctgcacatgataattgttagatttttattgtgttgataaattgtatatcaaataaaaaatgttattacctcttaaattaggatttttaggtgatataggcagaaaggaaggcaagtttttataactttgtctaaatgaactttctaaatgcctgagtatgaaa

SEQ ID NO: 304091 - DNA, 597 bp, Homo sapiens
agatgggatgggatgagataaaatgatgagatgaaatgatgagatgatgagatgaaatgatgaggtgaagtgatgcactgtcacgtgtgtgtctattctttttcccaaccaacaaaaattataattcattaattttaattttatttaacaatactcttaagagttgaaggaaaaatattatctacattatgggttacaatctaagtataaataatacataaatatattaaaacttacaaagaatatgttttggaatcgaatataccatgcttctgtgatgacagttatttcatgctggttgtcacaattttacgtgaaaaactaatgaaaaagtgtttttaactgtttctaaaaataagtttccaaaacagttttacattcgaaatatgaaaaagatgtmtttgtgttccttaatctgatgagattttcacactctgcacatgataattgttagatttttattgtgttgataaattgtatatcaaataaaaaatgttattacctcttaaattaggatttttaggtgatataggcagaaaggaaggcaagtttttataactttgtctaaatgaactttctaaatgcctgagtatgaaa

SEQ ID NO: 304092 - DNA, 461 bp, Homo sapiens
tttttaggtgatataggcagaaaggaaggcaagtttttataactttgtctaaatgaactttctaaatgcctgagtatgaaaagatagcatgtctataaatcacaatgtatatattactgtatgacctaggaccaatcaaaactgttatctctgataacattatattgtgcccaatataaaatagatatrataatacctcaaacttcaatctaggcattgtcattgaatatcttaagaatatgcagcaaaggtgcttttaaaaatacaagctagtgattgtactaaatttgtaaatcacataggatagtgggtcattttaagaatattagttatttcaatctataaacttggatgtctttccttttttgtgttttctttaatttctttcattaatatttgtcatttttgttgtcaaaatcttttacttccttggttaaatttataagtacatttttgtagct

SEQ ID NO: 304093 - DNA, 551 bp, Homo sapiens
atgttagcaataaacttttagtatagcagtcaaagtattaatttctcacattgcaatttccttcaaagacatgaatacaacctttctaatgactccttgttcatcaagatacctcttcaaattattctatttrtttcattcagtatattatctgtgtataccgatatgatattacactttttttttttgagatggaatctcattctgttactgatgctggagtgaggtggcatgatctcggttcactgcaacctccacctcccaggttcaagcgattctcctgtctcagccccacgggtagctaggactacaggtgcacaccaccatgcctggctaatttttgtatttttagtacagtcagagtttcaccctgttgtccaggctggtctcgaactcctgacctcaggtgatccacccaccatggcctcccaaagtgctgggattacaggcataagccaccgcacccagcctgatgttgcactcttggattttgaacactgaatatctttttgaaagattacacctctttacctctttgtgcttcagaaatt

SEQ ID NO: 304094 - DNA, 551 bp, Homo sapiens
atgttagcaataaacttttagtatagcagtcaaagtattaatttctcacattgcaatttccttcaaagacatgaatacaacctttctaatgactccttgttcatcaagatacctcttcaaattattctatttatttcattcagtatattatctgtgtataccgatatgatattacactttttttttttgagatggaatctcattctgttactgatgctggagtgaggtggcatgatctcggttcactgcaacctccacctcccaggttcaagcgattctcctgtctcagccccacgggtagctaggactacaggtgcacaccaccatgcctggctaatttttgtatttttagtacagtcagagtttcaccctgttgtccaggctggtctcgaactcctgacctcaggtgatccacccaccatggcctcccaaagtgctgggattacaggcataagccaccgcacccagcctgatrttgcactcttggattttgaacactgaatatctttttgaaagattacacctctttacctctttgtgcttcagaaatt

SEQ ID NO: 304095 - DNA, 440 bp, Homo sapiens
aggctgaggcaagagaatcacctgaacctgggaggcaaaagttgctaggttgctgtgagccaagttcgcaccattgcactccagcctgggtgaaaagagcaaaactctttctcaaaaaaaaaaaaaaaaaaaaaaacccaccaaaaactgcttttgaatggagttgtacatacaattttgatgaaaaaaattatcaagtgcataagtgcataataraaaaaccaataatactccaagcacaagttagtactaaaaaaaatatgttgagtattctctactacaacttgctttttcccttcatgaacaatttgtgttttactgagaagactcattgtttatggtagacattagagtacagatgaatatgtactttaaacactcttagttgctttcttaattttatatctgctgctttatgcttctgtttattttcattcttt

SEQ ID NO: 304096 - DNA, 440 bp, Homo sapiens
aggctgaggcaagagaatcacctgaacctgggaggcaaaagttgctaggttgctgtgagccaagttcgcaccattgcactccagcctgggtgaaaagagcaaaactctttctcaaaaaaaaaaaaaaaaaaaaaaacccaccaaaaactgcttttgaatggagttgtacatacaattttgatgaaaaaaattatcaagtgcataagtgcataataaaaaaaccaataatactccaagcacaagttagtactaaaaaaaatatgttgagtattctctactacaacttgctttttcccttcatgaacaatttgtgttttactgagaagactcattgtttatggtagacattagastacagatgaatatgtactttaaacactcttagttgctttcttaattttatatctgctgctttatgcttctgtttattttcattcttt

SEQ ID NO: 304097 - DNA, 456 bp, Homo sapiens
ggaggggtatgtctctgtgcactggaagagagggaggactaaatcactgggaagtcttatrataaagaagccattggcttaaatcagcaaagcaagccatcccttggtttaaggtgtttttcctggccatcctgtcttgactagaactttacctacaccttcctttttggtttaggcaaattatagtatctaaaactgaagtctcagctctgtgtctttgagatataaatgttctaccatgtcttctctggaacctgataactatctatctctttaaaatgcaagtctagggagatgattcatcagaaaaagaagaaaaaagaggtatttggaaattgtgcaaattaaagcagcccctgatgccaaagtctacacattcctgagtgagtcagttctggccagttctagctggatcaagagagctctgctgggcaggcctgaagaacacctggatgg

SEQ ID NO: 304098 - DNA, 456 bp, Homo sapiens
ggaggggtatgtctctgtgcactggaagagagggaggactaaatcactgggaagtcttataataaagaagccattggcttaaatcagcaaagcaagccatcccttggtttaaggtgtttttcctggccatcctgtcttgactagaactttacctacaccttcctttttggtttaggcaaattatagtatctaaaactgaagtctcagctctgtgtctttgagatataaatgttctaccatgtcttctctggaacctgataactatctatctctttaaaatgcaagtctagggagatgaytcatcagaaaaagaagaaaaaagaggtatttggaaattgtgcaaattaaagcagcccctgatgccaaagtctacacattcctgagtgagtcagttctggccagttctagctggatcaagagagctctgctgggcaggcctgaagaacacctggatgg

SEQ ID NO: 304099 - DNA, 332 bp, Homo sapiens
ttcagacctttcccttggagacaaaacaaacatgacaaggaattctgaggtcaggggacaagaatcacaagttccctagtgggagactgaggaggcagtgtccttcctgccmttggtctactggctaagaaccttcctcagcctcacctttgcacattgcactttcagctctgtttgcaattttcctcctttagtgctgagggaatcccagtgttcaatcctgaaatctataggttcctaatgggtggttaaaaaaaacctcagcgagagaagcagaaaatgtttcctcttcctgaaaaactgtagaaaggcaggcaccattctgggtgagg

SEQ ID NO: 304100 - DNA, 332 bp, Homo sapiens
ttcagacctttcccttggagacaaaacaaacatgacaaggaattctgaggtcaggggacaagaatcacaagttccctagtgggagactgaggaggcagtgtccttcctgccattggtctactggctaagaaccttcctcagcctsacctttgcacattgcactttcagctctgtttgcaattttcctcctttagtgctgagggaatcccagtgttcaatcctgaaatctataggttcctaatgggtggttaaaaaaaacctcagcgagagaagcagaaaatgtttcctcttcctgaaaaactgtagaaaggcaggcaccattctgggtgagg

SEQ ID NO: 304101 - DNA, 638 bp, Homo sapiens
tacataagtatattaccattcattttcttaaaaggaatatactgcactattctacacctgattttcttttttctttttttttctttttctttttttttttttttaagatggagtctcgctctgtcgcccaggctggagtgccattttcatcattttcaagtgtagagttcagtggcattaactacattcacatcattatgctccactgccaccatccatctctaaaactttttcatcttcctcagctgaaactttgtaccattaaacactctctactgttaactttccaagaatcatrtaggattcaaactggaaatctaaggaagcttgctttctgaagacttccacatgggctatcaccagcttctaaggtttgcctaacattgagattgtttagttcgccacatgtttattgatggtctactatgttctggcactaacattaggcatacaatatatcgctgcaatagttgaggacattgttcctaatataaaccctaagaggggccgggcacagtgtcttacacctgtaatcccaacactttgggaggctgaggtgggcagatcacttgaggccaggggttcaagaccatggtggccaacatggtgaaactccatctctactaaaaatacaaaaa

SEQ ID NO: 304102 - DNA, 509 bp, Homo sapiens
atgttactattatatcgatatactatgaatgctatttctagaaaaagtctagtgccaaatttgtcttattaaataaaaacaaygtaggagcagcttttcttctagtttgatgtcatttaagaattgctaacacagtggcagtgttagatgaagatgctgtctacaaggtagataatatactgtttgatactcaaaacatttttcattttgtttaaagtagaagttacataattctatattttaagtcttgggtaaaaaagtagttttacattttatgaagtaaagatgtaaatgattcaggtttaaagctctatttgactttgttgttgttgttgtttgagatagagtcttgctagtgtcaatagcaaaagccttctagctatctgcctttcagctacatggtggggcatacttaactgttttctttgatgttgggcatagcatggacctacttggttcactatctgacactatctgcatttattaacactatctgtgttgatttgtgc

SEQ ID NO: 304103 - DNA, 509 bp, Homo sapiens
atgttactattatatcgatatactatgaatgctatttctagaaaaagtctagtgccaaatttgtcttattaaataaaaacaacgtaggagcagcttttcttctagtttgatgtcatttaagaattgctaacacagtggcagtgttagatgaagatgctgtctacaaggtagataatatactgtttgatactcaaaacatttttcattttgtttaaagtagaagttacataattctatattttaagtcttgggtaaaaaagtagttttacattttatraagtaaagatgtaaatgattcaggtttaaagctctatttgactttgttgttgttgttgtttgagatagagtcttgctagtgtcaatagcaaaagccttctagctatctgcctttcagctacatggtggggcatacttaactgttttctttgatgttgggcatagcatggacctacttggttcactatctgacactatctgcatttattaacactatctgtgttgatttgtgc

SEQ ID NO: 304104 - DNA, 599 bp, Homo sapiens
agcttttcttctagtttgatgtcatttaagaattgctaacacagtggcagtgttagatgaagatgctgtctacaaggtagataatatactgtttgatactcaaaacatttttcattttgtttaaagtagaagttacataattctatattttaagtcttgggtaaaaaagtagttttacattttatgaagtaaagatgtaaatgattcaggtttaaagctctatttgactttgttgttgttgttgtttgagatagagtcttgctagtgtcaatagcaaaagccttctagctatctgcctttcagstacatggtggggcatacttaactgttttctttgatgttgggcatagcatggacctacttggttcactatctgacactatctgcatttattaacactatctgtgttgatttgtgctatttcctgtgtgtgatttgtacatctgccattgctttttgtctctagttactgctttcttttcctgtttgccttgttcttgtagaaccctttctgactctctcaagagggaccttttcaaccccaactcccactggtctaatcctaaccagcaccagctggttgggaagtagagcaggaa

SEQ ID NO: 304105 - DNA, 599 bp, Homo sapiens
agcttttcttctagtttgatgtcatttaagaattgctaacacagtggcagtgttagatgaagatgctgtctacaaggtagataatatactgtttgatactcaaaacatttttcattttgtttaaagtagaagttacataattctatattttaagtcttgggtaaaaaagtagttttacattttatgaagtaaagatgtaaatgattcaggtttaaagctctatttgactttgttgttgttgttgtttgagatagagtcttgctagtgtcaatagcaaaagccttctagctatctgcctttcagctacatggtggggcatacttaactgttttctytgatgttgggcatagcatggacctacttggttcactatctgacactatctgcatttattaacactatctgtgttgatttgtgctatttcctgtgtgtgatttgtacatctgccattgctttttgtctctagttactgctttcttttcctgtttgccttgttcttgtagaaccctttctgactctctcaagagggaccttttcaaccccaactcccactggtctaatcctaaccagcaccagctggttgggaagtagagcaggaa

SEQ ID NO: 304106 - DNA, 615 bp, Homo sapiens
cttgcttctgctagcaacgtgagcattagaaacatttcctggccaagtagccttgaatcagctaggagtgggggtgcaatgagtctgggttcactttgctcagggtgacaaggctttagagtattggttaattgtcaaactcttttgtttaagagacaaggtaaacatacatacatgcatacatagagaagctttctagggttacttaggctttatgtgattactagcagaaatgtttgtatttgcaagcaaagcttataaatcacctcttagatatctttgcaaaatgaagctaaaacgtggtttaaagaatcaaaaatataagatatttacaatgatttataattgaatcaggaatgcatytggtattttttaaaaggaataattggctaagatttaaattaatttgttttccttaaaaactcagagcctaaacaatagaaagaaataagaacagttacactgggtgtgtgaggggtggagggggggacccaactgggactgaaatttcttggagaaaatctacaaaatcggccaagcacacatggattgtgtgacttcatttagttggaggagaactgagcaacccgctgatctcaaatgcctttccccagg

SEQ ID NO: 304107 - DNA, 615 bp, Homo sapiens
cttgcttctgctagcaacgtgagcattagaaacatttcctggccaagtagccttgaatcagctaggagtgggggtgcaatgagtctgggttcactttgctcagggtgacaaggctttagagtattggttaattgtcaaactcttttgtttaagagacaaggtaaacatacatacatgcatacatagagaagctttctagggttacttaggctttatgtgattactagcagaaatgtttgtatttgcaagcaaagcttataaatcacctcttagatatctttgcaaaatgaagctaaaacgtggtttaaagaatcaaaaatataagatatttacaatgatttataattgaatcaggaatgcatctggtattttttaaaaggaataattggctaagatttaaattaatttgytttccttaaaaactcagagcctaaacaatagaaagaaataagaacagttacactgggtgtgtgaggggtggagggggggacccaactgggactgaaatttcttggagaaaatctacaaaatcggccaagcacacatggattgtgtgacttcatttagttggaggagaactgagcaacccgctgatctcaaatgcctttccccagg

SEQ ID NO: 304108 - DNA, 615 bp, Homo sapiens
cttgcttctgctagcaacgtgagcattagaaacatttcctggccaagtagccttgaatcagctaggagtgggggtgcaatgagtctgggttcactttgctcagggtgacaaggctttagagtattggttaattgtcaaactcttttgtttaagagacaaggtaaacatacatacatgcatacatagagaagctttctagggttacttaggctttatgtgattactagcagaaatgtttgtatttgcaagcaaagcttataaatcacctcttagatatctttgcaaaatgaagctaaaacgtggtttaaagaatcaaaaatataagatatttacaatgatttataattgaatcaggaatgcatctggtattttttaaaaggaataattggctaagatttaaattaatttgttttccttaaaaactcagagcctaaacaatagaaagaaatargaacagttacactgggtgtgtgaggggtggagggggggacccaactgggactgaaatttcttggagaaaatctacaaaatcggccaagcacacatggattgtgtgacttcatttagttggaggagaactgagcaacccgctgatctcaaatgcctttccccagg

SEQ ID NO: 304109 - DNA, 615 bp, Homo sapiens
cttgcttctgctagcaacgtgagcattagaaacatttcctggccaagtagccttgaatcagctaggagtgggggtgcaatgagtctgggttcactttgctcagggtgacaaggctttagagtattggttaattgtcaaactcttttgtttaagagacaaggtaaacatacatacatgcatacatagagaagctttctagggttacttaggctttatgtgattactagcagaaatgtttgtatttgcaagcaaagcttataaatcacctcttagatatctttgcaaaatgaagctaaaacgtggtttaaagaatcaaaaatataagatatttacaatgatttataattgaatcaggaatgcatctggtattttttaaaaggaataattggctaagatttaaattaatttgttttccttaaaaactcagagcctaaacaatagaaagaaataagaacagttacactgggtgtgtgaggggtggagggggggacccaactgggactgaaatttcttggagaaaatctacaaaatyggccaagcacacatggattgtgtgacttcatttagttggaggagaactgagcaacccgctgatctcaaatgcctttccccagg

SEQ ID NO: 304110 - DNA, 516 bp, Homo sapiens
ctcaaacactacagaatgggccaagcaagggaagacattccctaccactgtcctcccacccatctattacctatctgtgccttctattggttgaacccaaatgcaagccagaaggcaaaggagccctggtgataaagttggaaggtgttcrtttccttgggaagaagagcagggaaaggcagagaatgaattgagggggatcagggtatcttgggtcctagggaagtggcaaacagaaaataaagcttcctaaggggagtctctttgtcttcaagtgaattaaaaacacatgtgtgcacacacatgcaaaacactacaggaaaggccatgattggcaagacttggcagctatttaagggagatattctctacaatggggaacaagaaataaacttaaggaagttaaattgcagactgaaggtaaatagcagactacaacaatattaagcagtatatggtgatcgtcagattaatggtgtaggccctagatgttaaaggagtttgaaggatgaaaga

SEQ ID NO: 304111 - DNA, 516 bp, Homo sapiens
ctcaaacactacagaatgggccaagcaagggaagacattccctaccactgtcctcccacccatctattacctatctgtgccttctattggttgaacccaaatgcaagccagaaggcaaaggagccctggtgataaagttggaaggtgttcatttccttgggaagaagagcagggaaaggcagagaatgaattgagggggatcagggtatcttgggtcctagggaagtggcaaacagaaaataaagcttcctaaggggagtctctttgtcttcaagtsaattaaaaacacatgtgtgcacacacatgcaaaacactacaggaaaggccatgattggcaagacttggcagctatttaagggagatattctctacaatggggaacaagaaataaacttaaggaagttaaattgcagactgaaggtaaatagcagactacaacaatattaagcagtatatggtgatcgtcagattaatggtgtaggccctagatgttaaaggagtttgaaggatgaaaga

SEQ ID NO: 304112 - DNA, 516 bp, Homo sapiens
ctcaaacactacagaatgggccaagcaagggaagacattccctaccactgtcctcccacccatctattacctatctgtgccttctattggttgaacccaaatgcaagccagaaggcaaaggagccctggtgataaagttggaaggtgttcatttccttgggaagaagagcagggaaaggcagagaatgaattgagggggatcagggtatcttgggtcctagggaagtggcaaacagaaaataaagcttcctaaggggagtctctttgtcttcaagtgaattaaaaacacatgtgtgcacacacrtgcaaaacactacaggaaaggccatgattggcaagacttggcagctatttaagggagatattctctacaatggggaacaagaaataaacttaaggaagttaaattgcagactgaaggtaaatagcagactacaacaatattaagcagtatatggtgatcgtcagattaatggtgtaggccctagatgttaaaggagtttgaaggatgaaaga

SEQ ID NO: 304113 - DNA, 472 bp, Homo sapiens
catagctaatgtttgtggagtaggaggagagaggacattcagactctttagtctgaatacaaatcacctggggatcttgttaaaatgcagattttgattaagaggcttaggatagggactgagattcttcattcttaacaagcttctaaatgatggcaatgctgttaatccatggaacatgccttctatggcatggattcagaggaaggagtaaaagatgcactaccagaggtagtacagatttcaggagacagttttctttttcttgaagtatctggtcaattttaaatagtaaaaaaaaaaaaaaaaaaaaaaggtctttccttgtgatgatgggtttctcagctgtacacactgaacactaaraatcatggtacattcaaagaatatttgtctttttccttgagttatatattaaagtctttttccattgttcccccaacattttttttagttaactctaatcaggagt

SEQ ID NO: 304114 - DNA, 472 bp, Homo sapiens
catagctaatgtttgtggagtaggaggagagaggacattcagactctttagtctgaatacaaatcacctggggatcttgttaaaatgcagattttgattaagaggcttaggatagggactgagattcttcattcttaacaagcttctaaatgatggcaatgctgttaatccatggaacatgccttctatggcatggattcagaggaaggagtaaaagatgcactaccagaggtagtacagatttcaggagacagttttctttttcttgaagtatctggtcaattttaaatagtaaaaaaaaaaaaaaaaaaaaaaggtctttccttgtgatgatgggtttctcagctgtacacactgaacactaaaaatcatggtacattcaaagaatatttgtctttttccttgagttatatattwaagtctttttccattgttcccccaacattttttttagttaactctaatcaggagt

SEQ ID NO: 304115 - DNA, 579 bp, Homo sapiens
ggcttgtttgggtgtgatggaaaaaatgttctcagtagtgaatggacggcactatcagatatttactctgaaacatataataygtattattgtttttctgaaaataagcattgaaatgtggtaaggttttattttttcttgtttactacaatggcaatgattactctccagctgacgttctctaaaacatgcttatcacaactgctgtctgacagttgtaacttgtgaatgcagttctttgtcaatgtgaaaaattattcattgactaacagtccaaataattttaacactttctaaaatctttcatccaatcttagactactgaagtcatagttacttaataagttacccttagatgtaagcaccaacggcaaggaacaagatagaaaattctgtttaataaaaacttaatgaaaaactgaaatgagaaattaaaatgaaatttagatatataataaattttggtatatttgtattctttaacagtgaaaataatgtatgtcacttgtaaatattgaatactttttcattgtacttcatcttaaaatttattactaatgtggacagaatggcagaaaa

SEQ ID NO: 304116 - DNA, 579 bp, Homo sapiens
ggcttgtttgggtgtgatggaaaaaatgttctcagtagtgaatggacggcactatcagatatttactctgaaacatataatacgtattattgtttttctgaaaataagcattgaaatgtggtaaggttttattttttcttgtttactacaatggcaatgattactctccagctgacgttctctaaaacatgcttatcacaactgctgtctgacagttgtaacktgtgaatgcagttctttgtcaatgtgaaaaattattcattgactaacagtccaaataattttaacactttctaaaatctttcatccaatcttagactactgaagtcatagttacttaataagttacccttagatgtaagcaccaacggcaaggaacaagatagaaaattctgtttaataaaaacttaatgaaaaactgaaatgagaaattaaaatgaaatttagatatataataaattttggtatatttgtattctttaacagtgaaaataatgtatgtcacttgtaaatattgaatactttttcattgtacttcatcttaaaatttattactaatgtggacagaatggcagaaaa

SEQ ID NO: 304117 - DNA, 602 bp, Homo sapiens
agcagcagcaaaaatctaatataccaatatctaattttctatcacttacacaggaatttaatcccattatcttttctatttcctctaccataaattttctctattttagctccatttaaggttcaaaaaaaagttttccattaatcttctgcccaaactactgacattatgtatttctttcctttccgcaccattcatattaaaaaaatagtttatgtcttccatacttgcctctcaaaccacggtattgacccttgctctgctctgtctgaatgggtttttcaacctcaatagaagtttctttctgtttgacaaagttaactgaactcttttctcacctgaggcatttgcagttttcaacrgtagtggcttgtcctcttctggctcttgctgttattttgattattctttcttgaattcttcacaagctctttttttttttttttttttccactagggctaccccttacatgtcaatagatcgctaaggttctacatttctctatttccttttttactttccacataaaacttgggttatcccatctaccctcatagttttaattaccagttacaagcagagaacttctaatctcctagtc

SEQ ID NO: 304118 - DNA, 557 bp, Homo sapiens
agtatggataaatacacatcaaaaactgatgtgaaccaaagatcatgtaatttctaaaaatacaacatcaaagaatatttaagaaaaactagaagaggctgtacaataattgagtatgaaaggaaacattatggatggtgtggcagtggagataacagttcagagatctgccatactttgtgaggaagatcatccatcttccttaggtggccagcacacagatgaataggatgccatctatgtyctcaagtgattacaatcaggaaggaaggaaagtcatgtgaacaaatgggtggaataagggactgccagagctaccacatgtatgcatagcatcataaaaggaaagggtggtaaattctttatgggactagataagccttccagaggaattaattaaaccaaattaaaatgtaatgcttttgagaaagaaggaagcaaatagtaatatcaataattgttggctgggccctgtggctcccgtctgtaatcccagcagtttgggaagctgaggtgagcagattgcttgaggccaagagttcgagaccagcctgcac

SEQ ID NO: 304119 - DNA, 557 bp, Homo sapiens
agtatggataaatacacatcaaaaactgatgtgaaccaaagatcatgtaatttctaaaaatacaacatcaaagaatatttaagaaaaactagaagaggctgtacaataattgagtatgaaaggaaacattatggatggtgtggcagtggagataacagttcagagatctgccatactttgtgaggaagatcatccatcttccttaggtggccagcacacagatgaataggatgccatctatgtcctcaagtgattacaatcaggaaggaaggaaagtcatgtgaacaaatgggtggaataagggactgccagagctaccacatgtatgcatagcatcataaaaggaaagggtggtaaattctttatgggactagataagccttccagaggaattaattaaaccaaattaaaatgtaatgcttttgagaaagaaggaagcaaatagtaatatcaataattgttggctgggccctgtggctcccgyctgtaatcccagcagtttgggaagctgaggtgagcagattgcttgaggccaagagttcgagaccagcctgcac

SEQ ID NO: 304120 - DNA, 549 bp, Homo sapiens
atatatacacattgtgtaatgattataacagtcaaaacattcattatcactcatagatattgtgtgttgaaggtggggaaaaggagacttaaaatcttctctatcaaaattcaagcaaacaatacaatattattaactatagtcactatgctgcaccttagatgtccagaacttattcttataactgaaagtgtgtaccctttgaccaatatctccccatgtccctcaccccctagacactagcaactaccctttttctgtcttttgagttcaaaatttttaaattccacatatatgtgagattatacaatatttgtgttttgtttgtgtgtctgacttattttactaaccataatrtcacccaggtccatccatgttgtaaaaattcctagaaacgtataacctaccaagactgaatcatgaataaatagaaaagctgaacagacgaataacaaataaggagattgaatcagtcattaaaaacttcccaagaaagaaagatagaatactatagaggtggttttgcatgacttgcagggctaggaaata

SEQ ID NO: 304121 - DNA, 549 bp, Homo sapiens
atatatacacattgtgtaatgattataacagtcaaaacattcattatcactcatagatattgtgtgttgaaggtggggaaaaggagacttaaaatcttctctatcaaaattcaagcaaacaatacaatattattaactatagtcactatgctgcaccttagatgtccagaacttattcttataactgaaagtgtgtaccctttgaccaatatctccccatgtccctcaccccctagacactagcaactaccctttttctgtcttttgagttcaaaatttttaaattccacatatatgtgagattatacaatatttgtgttttgtttgtgtgtctgacttattttactaaccataatgtcacccaggtccatccatgttgtaaaaattcctagaaacgtataacctaccaagactgaatcatgaataaatagaaaagctgaacagackaataacaaataaggagattgaatcagtcattaaaaacttcccaagaaagaaagatagaatactatagaggtggttttgcatgacttgcagggctaggaaata

SEQ ID NO: 304122 - DNA, 611 bp, Homo sapiens
tattttactaaccataatgtcacccaggtccatccatgttgtaaaaattcctagaaacgtataacctaccaagactgaatcatgaataaatagaaaagctgaacagacgaataacaaataaggagattgaatcagtcattaaaaacttcccaagaaagaaagatagaatactatagaggtggttttgcatgacttgcagggctaggaaataaaggatacttcagtttctatcttgtcctttcttggatcatttactctggagaaagccatctttcatatcatgaggacattcagatgcccttgtggaagggcgtctcagttcatatggggatggactgaggccttctgccaacaactcgcaaatagtagccagccatgtgagtgaaccaccttgaaagtagatcttccaactcttgttatgcctttagatgattgcatacctggcccccattttgattacaaattcatgagagacaaccasaatcatccagatgagctgcccctgaatgctttatccacagaactatctatatgtatcccataacattatgttgtaaacctcaaatatatacaataaaatttattttaaaaaagaaactgtgagacataat

SEQ ID NO: 304123 - DNA, 437 bp, Homo sapiens
acaactcgcaaatagtagccagccatgtgagtgaaccaccttgaaagtagatcttccaactcttgttatgcctttagatgattgcatacctggcccccattttgattacaaattcatgagagacaaccacaatcatccagatgagctgcccctgaatgctttatccacagaactatctatatgtatcccataacattatgttgtaaacctcaaatatatacaataaaatttattttaaaaaagaaactgtgagacataatgaatgcatattgttttagcttggaaagtatgacttaaaggggaagccatacatatgactgtaaaattcartgttgaaaatctcagaaaaatatatagtggtacctcagagaaccattcagttaaacaataggacttatttgtcatagactaagctgaaaccaaggtagaatacatat

SEQ ID NO: 304124 - DNA, 616 bp, Homo sapiens
aaagaggtttaagacattatactagtaattgtcagataaataatttaacataagtcagttgcactccaaaaactgatgtgatgaattcttataatttcatgttgtgttggcatcttttaaaaattattttattttcaatttttgtgggtacatagtaggttatatattaatggagtacatgagatacccagttacagacatgcaacgtatactaatcacaacatgtaaaatggggtattcattcccttaagtttttcttctttgtgatacaaaaaatccaattataaacttttagttatttaaaaacttacaataaaattattattgactayggtcaccctattgtgctatcaaataggtcttatttattctttctaactagttttattttgtacccattagtcatccccacctccactcttcccagcctctggtaactttctactctctatgtccatgagtgcaattgttttgatttttagaccccacaaataattgagaacatgcaatgtttgtctttctgtgtttgccttatttcatttaacataatgatctccagttccatgcatgttgttgcaaatgactggatatcattctttttgtggctgaatagtac

SEQ ID NO: 304125 - DNA, 519 bp, Homo sapiens
ttcagatttttcatattcagtttgataccagctgtgggtctgtcatatatggcttttattatgttgaggcatgttctttatagacccagttttttgagcatttttatcacaaagggatgttgaattktataaaatgctttgtcagcatcgattgaaatggtcatgtggtttttgtccttccttctgttgataggatgtattgcattgaatgatttgcatggtttgaaccatccttgcatctctggtataaattttactttttcatgatgaatgatcttttaaatgtattgttcaatttggtttgctaatattttgttgaggattgttacacctaactcttcagtttgctagtattttgttcaagcattttatgcctaatatagaagaattaggcgtaaaatgtattttttggtgtgtctgtctggttttggtatcaggtcatattgacctcatagaatgagtttgcaagtattcatattttctctgttttgcagaatagtttgaagatgattggtatta

SEQ ID NO: 304126 - DNA, 580 bp, Homo sapiens
gatcaacaaaattatccattttgaatctatgtataaagtagaagaaacagatcttttgggaatcttgagaggctttatttctcttgtacactcagaatgcatgcatctagagattctaacttccctgactttgcattcacttttggacccatcatcagatgggacttactacaagtcctttgttcataaagctggtcatcatatttacggaaaattgcctccatgagtattactatacttggtttggtagagtaggtcttcattaattatttgttaaatagaaytaaattcattaatgggtttcagtcagtagctgataaggcagaaaatgttggaaacaaaactagtagcctctagcaaagaacttgagaggaggatatcttaatgtgactaaaaattccatcctgaactacttaaaactggaatatttaattggcattgaaataaaaatgtgaggaatttttagcatacgatcactattttcacaaatatccccttttacaaaccatttggtattgctttctaaagatctgtgctcgctcttaattgcatccctttcctttgacttatgatgaaaagt

SEQ ID NO: 304127 - DNA, 643 bp, Homo sapiens
ttgtatttaaatgaggcagacagaagcatcagtctcagtgtccattcttaatattaagcctatcctcatgtcatgggctatactagaacgctcacagcagggcctttatgggctgctscctggtgtacccaactgtgactcataccaggtctgatggctaaagtggaagtacctagctttttcaggcagagtgagtctagtgaaactatttctctgaatactgcttgtctttatttactatttgatattcatctttctatcttaagcaactggagtatgctagcatgtagtaagaactcagctatatttttggatgaataaatccttcagaggaaggttagtcataatgtattttatgaaaaaaagctcattaaggtgtcttctactgtctaaaattaaatatttgcaaacctgtataatctgaaatagtgaattatatgatatttgtttgataaggggacaacatggaaagtaataatgaaaattatcatgggttaatataccactgtcccattatgctaaagagaaatattatagaactcagtagataaatattttatttaaattagtaccatttttggatactggtcaatggtcctttaatatatcagtatgttaagataatctctttctaagtgttcag

SEQ ID NO: 304128 - DNA, 584 bp, Homo sapiens
cacaagtaagggaatttggctttatatgttagkgaaagtcctgattgacagccagcaaggaaatggggtccttagtcctacagccacaaggaactgacttaagaaaacaacccaaatgagcttgcaagtggaccctttccagagtctcccccaaaagagctcaggacaactgacacttcgatttttgccttgtgaaactcagaacagagaaaataattgacttcagacatacagaactataagatcataaatttgtgtttcagccaaaattctgtggtttattacagtggcaataggaaactaatacaaggttaaagaggtaagtaaaaaccaggttatataggtccttatatgcccactaggttatgatagaggtttgcttcaaagtgcctctatcaaagtgatagaggcaggaggcagagaaaatctaggcagacaggggcagggccctagtggaaccccaccttcaagctgaaaagcccaaaacctgccacccaaagtgagaacttctatctctgtttgccgactctctctctctgactggttctttctgaataatgtctttttaccaatggaatgttgcc

SEQ ID NO: 304129 - DNA, 540 bp, Homo sapiens
caataagtgtggagacagacataggacaagaaagccaaaaattaaagcagacttcagtatcatgactcatggaactgactggtaaaaaataaattagaagcctactgcattttcaaaggaaagttatcataagcttgaactattaaatacttctgattgttccaaaggtagagtcagggaataaggaaaaygacagacataggaagtcttcctgagcagaataataaacatataaaggtgcctctaccacgcagggtaggaggtcttcaaaacatctgcccagttgaatttctaagttgctacagaggagtcactgctatgtgctgctcagtcttcctttgtccaaatgaattggttttttgcagtcatcttgttcctatttcaattttacacactgatgtgggctgtatgcaggtaacctgtctttttagttcacatattcacctcataattgattcacaatggaactgaatgtctcatgaaaatcatagattttgaatttgattaattaacttattggaacattgggttgtctcactt

SEQ ID NO: 304130 - DNA, 645 bp, Homo sapiens
ctaaataattgtgtgacatttcacagcagcaaataaggaataaaagtggaaattaccaattataaaattaaaaaacaatgaaacatagcaccgctgtctgctttttttttttttcttcatctctggttactcattcctaaacttattcaatgcttttcactgagctcacggtcttttccacacctattaccttaaataatggttcctcaaggttccatttagaactcttctttttggtttaaacccaagacttaatttatattatccacacctgtggaccaccatacacactggcttccaatactgtatctgtagctcggatttactttacaaacttcaggccagtacttctgacttcttacttttcaccttcacctgaacataaccacatrctcaacttatcaaaacaacactcagtacatttttcaagactgcttctgctcatataatctatattttaaccaactgtcccaccatttttcaagatgcccatgccttaaactggggaatcactttagtctccttcctttgtcctaattgtctgcatatgatcaattactaacttcagttgactctgcctctttaatctctcctctttccctaatctaccattcctacttctgttgccttagttcagacatgctc

SEQ ID NO: 304131 - DNA, 570 bp, Homo sapiens
tattttctcacaattctgttctggaaactagaagttcaatatcaagaggtaaattgtattgattccttctgaggactctaaatgagaacatgttttatgcctttcttctagcttctggtgatgcctggcaatttttgatgttccattgttcatagatgcaacattacagtctctgtctgtatctccacatcgcattctctgtgccgtcacacaaacagctgaacaagactgggaaatacacctatttcatgcagctggactcccctgaattcatgactaaatatgaaaacatccttaatgctgcccacatatcctttttsctaatcaatcctcttactactattctagagaatttgttcatccctttctctttctcctcaaatctccaactctgcttctccctatttactctcagttaatagcttattattttacggaaaaaacaaaagaaagaaaagaatttccatcttctatctctaaaactacatgcatttacatacatatgtattcccaaattctgccttgagtcttttcactatgaatgagctaggttctcatctatggctcacc

SEQ ID NO: 304132 - DNA, 651 bp, Homo sapiens
tgctgggtcacatggtagctgaatttttagttttttgaggaaccttcaaactgttctccatcgtggttgtattwatttacattcctaccaacagtgtatgagggttcccttttctccacatcttcagcagcatttgctattgcctgtctttggatataagccattttaactggggggagatgatacatcattgtagttttgatttgcatttatttgatgatcaataatgttgagcaccttttgatatgcctgtttgccatttgtacatcttcttttgagaaatgtctattcaaatcttttgctcatttttttgattggattattagactttttcctattgagttgtttgagctccttatatattctggttattaatttcttgttagttggtagtttgcaaatattttctcacatcctgtgggctgtctctttactttgttgattgttacctttgctgtacagtagctttttaatttgatgtgatcacatttgtccttttttttctttggttgactgtgcttctgaggtgttattcaataaatttttgtcctgaacaatgtcctggaaagtttccccaatgtttccttatagtagttttatggtttgagatctttaggtttaagtctttaattcatttcaatttgatttttg

SEQ ID NO: 304133 - DNA, 651 bp, Homo sapiens
tgctgggtcacatggtagctgaatttttagttttttgaggaaccttcaaactgttctccatcgtggttgtatttatttacattcctaccaacagtgtatgagggttcccttttctccacatcttcagcagcatttgctattgcctgtctttggatataagccattttaactggggggagatgatacatcattgtagttttgatttgcatttatttgatgatcaataatgttgagcaccttttgatatgcctgtttgccatttgtacatcttcttttgagaaatstctattcaaatcttttgctcatttttttgattggattattagactttttcctattgagttgtttgagctccttatatattctggttattaatttcttgttagttggtagtttgcaaatattttctcacatcctgtgggctgtctctttactttgttgattgttacctttgctgtacagtagctttttaatttgatgtgatcacatttgtccttttttttctttggttgactgtgcttctgaggtgttattcaataaatttttgtcctgaacaatgtcctggaaagtttccccaatgtttccttatagtagttttatggtttgagatctttaggtttaagtctttaattcatttcaatttgatttttg

SEQ ID NO: 304134 - DNA, 619 bp, Homo sapiens
gcagcagcaagagaaaatgaggaagaagcaaaagcagaaacccccataaacccatcagatctcatgagacttrttaactatcatgagaatagcatgggaaagaccgaccgtcatgattcaattacctccccctaggtcccgcccacaacatgtgggaattctgggagatataattaggttgagatttgaatgggaacacagccaaaccatatcagtgagcccccacatcagtggcaaagttaggattgcaagcccaggtcatgtgactccagagtccattctcttaactactctgctatgctgtctcttacaatactttctaggccgtctaactgccactaattgtatgacctttggaaagacccttaaattatcaggaccactgctttcacatatgagaaatggggataataataaaaattattacagtgctgttttgagcattaaatgagttaatgtttgaaagcacttataagtgtttgacacactataagcactgtaaaggtgttggctaaaatgagttcttttaaatattaccttacaattatcttattggtatcagttaacgtttttataagtagattaaaaagtttgtacaatttataattaaataaaagaa

SEQ ID NO: 304135 - DNA, 627 bp, Homo sapiens
gtagcctatgtggaatgtgctatcattccttccattttacacatgaggaaactaaacatcaaagcatttacactgtatatatatgataaatccaggaattcaaataaaggtctccctagcacacataccaaactccttccacaatgcttttccacatttattagaagaaaacaggaacaaaaaaagcagtactcaataaaagcwaaataagttaccctggtgaaaaggaatgctgggaggaatgcttttggctatttataatcatacctacatcctcaaaaatccattgccagagtctatttccctgtttaacaatttgtgaggatccttagagaatcaacagcaggaggcaccactgttcagcccattagatatgatccaagatttgtctcagtgcctgactcttctgttctctagtaagggggtctatcaaaacccaatgtacttcatttttagcagaaaggacacatttcccaggggaaattgaaggtgatccttctcaaagtacaaatctagctgttttttgaggtgcgatatatcgatgtctggatgaccatattgtgcaagacaattctcttcaggcccaaagttcttttcatatttacaataaaggaatgctatacagaa

SEQ ID NO: 304136 - DNA, 570 bp, Homo sapiens
tacacaaaaaaagtgactacttaggtattttaccatgcatttatacaatacaacactatgaaaccactaaagtcatattttgcaagattaagaaatattcattatgtttattatgaactcaagtttataggcagataactgttaagtaaaagaagctatttccaatttttttaaaatctaagatgctaatgaaggcttcttctgtgtggtgagattatgattgactctttcttattaaaatacatgtcctaaaaattctacaatgggcatgtctctttactactctgagactcagtttccttaccaattaactaasaaaaatttccccataatattttttttttcactctacaatgatacctccacattttcgatgtggataacactttctgctcatggattgtgccttgttgaataaccataaaatgataaacctagagttagggcaaagaaatatcactgattaggaatgccaatagtatacatcctacactgttgctctgtttcactttttccattaaacctgcaattgcactaatactacattccctaagtaagcaatgaattaaa

SEQ ID NO: 304137 - DNA, 558 bp, Homo sapiens
gctttccctataagtgctgggtctgaagagtaaaagtgtggatatctagtygtcttgtggtcacccaagaccatgcttctattggtaagttccctcaattcattcaccaatacgaaaaaatgtatttttctgcctcctactttggtttctcagctcctttaacatttgaaggtcactttgcttatatagccctttcacgtaacattacaattattgtcacatattttgcttctatgtatgttaaaatccaaaatacattgttatacaatcaattatcctgtttaaaaaatgatgaaaacaatctctttttatttgcaacacacatttaccacttctaatcctcttcatttctttacatacttttgagtttatatctgttattattttcattttgcctgaagtaattcaactaacatttttatagtactggtctattggttaaaaatctttgagcttttgtttaagaaagtatttagttttctatcttaaacaaatttaaataaatattttagagtagtttttgattcacaaaaatgttgcaaagataatacagagaat

SEQ ID NO: 304138 - DNA, 528 bp, Homo sapiens
ttggaaaaaaattggaatgtttaagaacctgaaagaggaaaaagaatgaagtatagtggccaaacaggcagtttcagaagaagaaattaaaagctagaccacatagaaatgtgtgggctactatgagaaatttagattttattctaatgaatatgaggccattataggatttcaagcatgagaccaattacagtcataatagcaatgctaaaaataatacctcacaattttacagcatttytctgcatagtggcaaagcaaaaaaaaaaaaaaaaaaaaaaaaaagcaatatattgctaatctgtttctttcagtaataaccatattactaagccaacaagtcaagttttcagaaagggaaacaactttaaacacagctttaatatttataaacctattgcctagttttaatcccttctaaataggcacagttcactgttgctcaacagtgtcaaagatggaaatacttttgcatatgatagtcttatgacaacaaggacactaaaagtatcatgggaacaagagatc

SEQ ID NO: 304139 - DNA, 621 bp, Homo sapiens
tcaagataaacaggtggaaacaaatattccatgcaaatggaaaccaaaagtgagcaggagtagctatccttacatcagacaaaacaaactttaaagcaatagcagttaaaaaagacaaagagggacattatataatgataaacggactagtccaacaggaaactatcaccctaaatatatatgcacctaacactggagctccaaatttataaaacaattactactacacctaagaaatgagacagacagcaaaacaataatagtaggagacttcaacactccactgacaggactagacagatcatcaagacagaatgtcaacaaagaaacaatggacttaaactacacactagaacaaatggacttaactggtatctacagaacattttacccaagaactgcagaatatatattcttctcaacagcacatggagcattctccaagacagaccawatgataggccaaaaaacaagtttcaatatatttttaaaaactgaagtcatatcaagtatcttttcagaccacagtggaataaaactagaaatcaactccaaaaggagccctcaagactatatatctatatatatatacatatacacacacacacatatattacatgg

SEQ ID NO: 304140 - DNA, 655 bp, Homo sapiens
gacttcataaaaccacgtgccctacccacccttcaaacacaatctgacattatatttggctctaattatacagtgccaagcaagctgaacttaagaggaatatgcctttatacatctcacgggcaataatgactattaaatcaataataaaatgatcgtattcgtatgaggttgtgtgggtatttaataacagcacgtggcacatactaatttttagacyttataagcaccgtttatagatatcaccaagtattaattttatatgtaatgctgcagactctgaattttgactagatgtcaaaaaccattaaaatattaccttgtggaaatctgagtccttgttgctccttacagcatattcacactgtaagaatgtactggaatccaatcacaccctcatcctcttcccaaaccacgaaaagtgcacagggcaaaaaatgcaccgggcaagaagacagcttatagaatgcaaagtacagcttataagaggtaaagttcaaacgaggaaaaagcacatgaggattagtgtattacagccaaactatatatgggtaagcctcacagcacaactaattttctctaggataataaggcactcactttgtaaaggtgagagtcaataggaaaagtgcgccctgtgcacacccacaaggcg

SEQ ID NO: 304141 - DNA, 589 bp, Homo sapiens
tagtgtatttattttagtggctatgtattatttcaaattatctttttctgattgaagatcatgtcagtttctaatttttttagattacaaatcataactctgaacattctcttgtatctttttctcctctttatatatttatatttacataggcatttataatatatatgtgtgtgtatatgcttctgtgtctacatgtgtacatcatcatatactgtatatacacacatccacacatactatgcatatccctaaaagtgaaacttacatgtatattcctagaagtgacatggctgattcctactgcccaattgctctayaaaatcactacattttatttagtttcctaccgatagtgtaaaggagtttcattttctctacatctgtatcaatcaggaatgcacttcattgcacgtataggacatctgactcacagtgacttctttaataagagtttgccttttctcacgtaacattttggagacaagcagctgctactactggagcagatcgatcaggtcagaagcagcgtctctgtgaggagcttggctttaccttcatgctcgtctcccaaggttatatgaaggct

SEQ ID NO: 304142 - DNA, 563 bp, Homo sapiens
gactccgtcttaaaaaaataataaagaatatttaagtttaaattgtgacatgaaaatatcgttttccttcctatttgtcacattttactctataattgaatttatccaataggtatattcaccttcaatgttaagctctattttttaatattcatggatttatatacatttcrgagacagaataaacacataactgaatttttatttaggttattggggatttggctatatttttgagcatacgtgtgtgcatttcaataaagagaaacttctagtgtgtgtatgagcttgggaaaattactttgtttctctgtacttcagtttccttttctgtaaaacacatgtggtaataatgtctactttttaggactcttgagtttatgtatgtagatgagttaatatatttcgaccactgaaaacactgctagacaccttgtaagttctctacatgtttattgttgttataactaactctactcgatctcttaattttgtgtttttagtcaggttagtcaggagtatgaaatctgtctctctttgttctatttttttatctttctttc

SEQ ID NO: 304143 - DNA, 534 bp, Homo sapiens
aagcaaaacgtgaaactcccatgtaaataacaccctctctacactaaaaggaatagcaacattcttatcttcaaggacaaagagtcaagaccaagaaaatactatgcagaccttggtaggctaactcttagcttgtgggcctcctgatatcattyagtcacatttcacagttgactatccttttgccaatacaggatattggtatcggattcaaactgctttatccaaaatttggttcacagcctttataagattacctatttaaataaatcttaccctgagcaacataatgagaccctgtctctataaaaatttagaaattagccaggtatggtagctacatgcctgaggtcccagctactcaggaggctgagggaggaggatcacttgagcccagaaggtcaaggctacagtgagctgtagtcacatcgctgcactccagcctgggtgacaaaacgagactctgtctcaacaaaataaaagagaaatcttaaagtttgaccctatcccattttgtcagaaaaataatctgga

SEQ ID NO: 304144 - DNA, 567 bp, Homo sapiens
ctgttgtcaccatttcttttcaagataaatggagtttcttaattacaattttgggggatagacttaagcagactgaaacaaggtttcaggtgggagctaayttgataagatatcaacgctttggatgagatacagcaaaagtcagataaagtcacgtggtgcacaatgacgttttcatcagtgacggactgcatatatgacacccatatgcatatatgatcacgtaagattataacagagctgaaagattcctgtcacccagtgacagtgggcagctgtggcagtgttgtagcccattgcattactcatgtgtttgtggtgatgctggtgtaaacaaacctactttatacttcataaagtaaaaacttatagtaagctaagaccaacttatcattgaagaaagaaaaactgtttttaataaatttggcatagcttaagtatacagtgttcataaagtctacagcagtgtacggcaacgtcccagccttcccattcactcaccgctcattcactgatccacccagagcaactcccagtactgcaagctccattcatggtaagtgacct

SEQ ID NO: 304145 - DNA, 518 bp, Homo sapiens
cctataaaacaataacacaataagaaaacaaaccatctaggtaacaattaacatgatgactggaacagtacctcacatctcaatattaatgttgaaagtaaatggtgtaaatgctccacttaaaagatacagaktggcagaatggatagaaaaatcataaaccaaatatctgtattttagaaacccacttaatatgtaaagattcatataaattcaaggtaaagtggtgaaaaaagatattccacacaaatggaaaccaaaagctagcaggagttactatccttatatcagataaaacagactttcaaacaacaatagtaaaaaaaaaaaaaaaaaaaaaaaaaaaaaaggacaaagaaggtcattatataataataaaaggatcaatccaacaagaggatattacaatcctaaatttacatgcccctaactctggagctcccagattcataaaacaattactattagacctaaaaaatgagatagaacagcaacacaataatactgggggacttcaa

SEQ ID NO: 304146 - DNA, 578 bp, Homo sapiens
aaatggcccagactaggccttctggaatgaaggttttggtcactccaccaggaaaaaaaaaaacacaacctgctgaggtgcttcctgaaggcaaagggaatacagaatcggtggtagaagaaggctgtcatcaataccagctacaaccatgtgatcagttgcagaaatgaagaccgtaattgtcatgagtatttcctccttcttttgttaagaacatgtttgtgcatgtatacatttgtastaagaaaatatcttcattttattttctttcttttttctttaccatgtgacataagacctattaacttcatattagcatttaagtgttgttaactttaggtaatagcatttgtataggggattggtgcattttgggttgtacaaaaaatagctgcattatgttaggcataattttggccttttgtctttattttctttatttgaaaatcatgtatgacttcaggagatgtgtgtgggttcaggttgacaaggggtggactcttgatggttaatattgaatgttaacttgattggattgaaggatgcaaaatatcattcctggatgtgactatgaaggg

SEQ ID NO: 304147 - DNA, 578 bp, Homo sapiens
aaatggcccagactaggccttctggaatgaaggttttggtcactccaccaggaaaaaaaaaaacacaacctgctgaggtgcttcctgaaggcaaagggaatacagaatcggtggtagaagaaggctgtcatcaataccagctacaaccatgtgatcagttgcagaaatgaagaccgtaattgtcatgagtatttcctccttcttttgttaagaacatgtttgtgcatgtatacatttgtagtaagaaaatatcttcattttattttctttcttttttctttaccatgtgacataagacytattaacttcatattagcatttaagtgttgttaactttaggtaatagcatttgtataggggattggtgcattttgggttgtacaaaaaatagctgcattatgttaggcataattttggccttttgtctttattttctttatttgaaaatcatgtatgacttcaggagatgtgtgtgggttcaggttgacaaggggtggactcttgatggttaatattgaatgttaacttgattggattgaaggatgcaaaatatcattcctggatgtgactatgaaggg

SEQ ID NO: 304148 - DNA, 520 bp, Homo sapiens
acagttataagaggtatttctatatttgaggttgtaaaataataatactgaatactatatgcaaagtcaggagcaaatcaacagttctaacagtctaacagtgatgtgtcattcttacattacacagtaaattggatcatagagcatgaaacagattcaggaagaatcatctcrggtgttcacaatgaccattaaaaatctgtagttgaacttagtttaaattaactgttttcaaaatttgccattttccacaactcttatttttcttgattctgagtcctgatcctgtaaacttgcaatactctgtggaaaggatttcaagagagatatacttttatctttaataagaacatgaattaaaccagaaaaaaaggaaatgagttgaaggccactgctgtggctactgaaataattgatgcattttatcttaatacttgactggaaatttcctgtttctttggtttgtatcttgttattaatttttatcattaaaatgtataatagctttatagtagcacat

SEQ ID NO: 304149 - DNA, 616 bp, Homo sapiens
gaataggaagcctcaggccctcatttccccatggagagactgacttgacaacaatgtatgaactacaatgcctttgtgagaactctagaaactagttaagaggttgcagcaccttaggtgaatgcaaagccaggaaaagatgcatcaaaatgaggagaaattgttgtcgcattttactcattccagccactctttcaccctggcacaatgcgacttgatctacagaaaacattaaagttccagtggaacaggaattaaaagaaattaaaaactgtgtaagcaaaaactcagttttatgtaaaaaaaaacccccaatttcccttaargaagagaaagggctggagtcctttaaaattaactgcctatttttctttctgaggctagtgagccttatctctgtctttcccaggcatggtgaagcattgtttttctagctgtgcagctgcaagatcactagacagataatctcaagtcataaaacatgttgtttcttgaaaaggaagaaatgatgtaatgcatgtcttaattaaataactgtctttgtttctcacttctgtaatatgcttcctcctgcacagatctccccccaccccacaaaatgcttaaaaggtaacca

SEQ ID NO: 304150 - DNA, 580 bp, Homo sapiens
ttcttatgataatatggaaaagttaaccattatagaaaagcaaagcttgagtttcctaaatgtaagcttttaaagtaatgaacattaaaaaaaaccattatttcactgtcatttaagatatgtgttcattggggatctcttgatttgcctgacattgacttcagcaaaagcacggggctgtaaattaccatttactagattagccaaatagtctgaatttccagaaaacaaggcagaatgatcattcccagaaacatttcccagaaaatgtttcccagaaaactagacagmatgatcattcaatggatcacagtgaagcaaaggacacaactttttattgtaccccttaattgtcaacaggagttaactgatttgttgtggtgctcagacttttttatacaggtgctagtgttttatcctatgtattttaactcattagtgcataaaggcaagccccatataatgaagtctcagggtatatgaaagtagctggcttcaaaataaaatttttgagtgcatattttgttttaacactcgttttgttgttttttcccttaacacagaataagtcaacaatgac

SEQ ID NO: 304151 - DNA, 535 bp, Homo sapiens
ccaaacacatttctatactactgtagctgtctttgtttcctttgtcctttttcaatacaacaaactagattctgataaaataatacccgtgtgcatagttgctacttgctaaatatttgctatattaatgactgcataaataaaatatggcaagcttgttacagggctgatgggtcaagaaaatatttgaatgaatgaaacatagatttaaagggtttattgctaccagttaaagtcagtcaacagtctcttcatttcaggatgagaattttataatgtcactgaccctgggatatgggtttacatgaaacttcttggcagcattagtttagtctggtagcacaaaayaatgtatataaatgggccttggaaagaacaaagctttgtgtcaataattgtaaggattgctcccatttatttttctgacccctatgtgtgtcagatctcatgctaggcatttttacgtatattgtcttgtttaattctcacaaaaatcacgaaggataaatgttatcattttattttaaaattgagg

SEQ ID NO: 304152 - DNA, 529 bp, Homo sapiens
gttttctttaaatgaggatttttttcttatctctgctggatttgcagagtcctagttttgtaaagagtttctttctttctttttttttttttttgagacggagtctcgctctgtcacccaggctggagcgcagtggcgcgatcttggctcactgcaacctcccgggttcatgccattctcctgcctcagcctcccaagtagctgggactacaggtgccygtcaccacgcttggctaactttttgtatttttagtagagatggggtttcaccatgttagccaggatggtctggatctcctgacctgatgatctgcccgcctcagcctcccaaagtgcagggattataggtgtgagccactgtgcctggcctgtaaagggtttcaagtgaattcagagtagacgttctggatattaatcatacccatgatgatacacaaatatgagaaacaaggtcatttatataggctataatttattatggtccacaatgttaggagtaagttagaaccctacgttgaaatatgttttt

SEQ ID NO: 304153 - DNA, 529 bp, Homo sapiens
gttttctttaaatgaggatttttttcttatctctgctggatttgcagagtcctagttttgtaaagagtttctttctttctttttttttttttttgagacggagtctcgctctgtcacccaggctggagcgcagtggcgcgatcttggctcactgcaacctcccgggttcatgccattctcctgcctcagcctcccaagtagctgggactacaggtgcctgycaccacgcttggctaactttttgtatttttagtagagatggggtttcaccatgttagccaggatggtctggatctcctgacctgatgatctgcccgcctcagcctcccaaagtgcagggattataggtgtgagccactgtgcctggcctgtaaagggtttcaagtgaattcagagtagacgttctggatattaatcatacccatgatgatacacaaatatgagaaacaaggtcatttatataggctataatttattatggtccacaatgttaggagtaagttagaaccctacgttgaaatatgttttt

SEQ ID NO: 304154 - DNA, 586 bp, Homo sapiens
ttcatgcagagctgggctggctgtatgggagactagagttttattattactcaaatcagtctccgtgaaaacttggagactagagttttcaaggataatttggtgggtaggggttgaagagtggggagtactgattggtcatgtctgagatgaaatcatagagagtcaaagttatctttttgtagagtccrttcctgggtggaggccacaaaaccagatgagccagtttacacatctgggtggtgccaactaatccatcaagtgcagggcctgcaaaatatctcaagcgcttaggttttacaatagtgatgttatccctaggagcaatttagggagggtgagaatcttgcagcctccagctgcatgactcctaaaccataatttctaaacttgcggctaattttgtagtcctacaaaggcaatgtagtccccaggaaggaagggagtttggggaaaggactgttatcatctttgtttcaaagttaaactataaactaagttcctcccaaagtttatttggtttatgcccaggaatgaacaaggacagcttggagattagaaaaaagatggaatcagttaggtcaga

SEQ ID NO: 304155 - DNA, 604 bp, Homo sapiens
gcagccccatcaccaaaactcagaggtaagaagggaataaagacaatttttaaccactcttctctttcattaaaaacaatcaaaatgtctctgacttttgaatgaattttgagtcaggaaaagctatgcctctggattataaaagctggctctgcagcacctggttttccaggagttagagaagtgtcaaactggcttaactcaaacctgcttgtgcaccacctttgaaatttgggcacactaacctcttcgaggccaccttcagagttcattttcatgctctgatccccaaatctgctggttctctctcaatctctgtactcttcagttaaaatgtcacagtgggatgacatttgatttgcagaagatagaagcataatcattgccttggattcagtcctattaaaaatttccctgakaacaagtttacctgggggaggaaggagaaagaaaaaggaaatctctgtgtgtgtgtgtgtgtgtgtgtgtgtgtgtgtgtgcatgcacatgtgtggtgtggaaggtggggacatccttagagctctgctgataaaatcagcagagatttgagagtgcattacagttttattttttgaccaaaccg

SEQ ID NO: 304156 - DNA, 565 bp, Homo sapiens
ccgagataatactgattgcggccacaaatcaaccttgtcaagttaaatatggcacccacagaaattctcacacattcttggcatttgttctcttggtgctgtgatgggctgattaacagctctgctctttcaaaaagaccatcattcatgggttctgtctctctgaccactcccagtatgactcatgttgctgtataggtatggamtttttcactgccaaaataaaaaaaagttatgttttccatgatgtaaattgaacagccatacctaagatagttcagcatggttacagcttgtaatgaaataaattatacgtgcaagaaacaaaaaaatgtacagaaatgcaatttagatcttggaaaatgaagagaaagaataacaggtttgtaagctctttctgattagcttgtaacttgctggtgtctttattagtagttcattggagccatgtgagctcctgaatcattgatcaaagtcaaatctaaactctcctcttccactctcataaaaataatagttaacatatattgagaccatattgtataccagaggcagtcctacagat

SEQ ID NO: 304157 - DNA, 639 bp, Homo sapiens
aaaaaaaaaaaaaagcaacacaagaatgcatgtcatgtgagatcattattaagaaccagaagaatttctgatggaaaattccaaattctctttgaacaactgccttggggaatgtcctttaggaaacactggacttacatataatatgtcattaactgtgcttatgatttcctttcagtgtttataggtaggagttaaggcgtggaatgtacaaatgtaacacaaaaattacagtacagtgattgcttcctttgccaattcactctccagaaagtcatgaaattcattgcagcgtcatctctggtatgaacagcataccagaaacttaagcttttacctttctttaacctcacaagttagatctgacccagagtctgtattgtacacatattgtgacaagcactttgagtgaatttggaaatgtggggcactcctaytgtagacaagtccaaaatctctctgtaccagagacatcttcctcagccttacttatgtatgataggaggaagagacattgtctctggaaaaaaataataatgtggagttggattcctgggctgttctccacattagccattgctgatttgtcgcgtttggggactgtggctgtggagaaattatgggttgaattggtgaaag

SEQ ID NO: 304158 - DNA, 568 bp, Homo sapiens
agatggtcatttccaagtgaaggagagaggcctgaaaagaaaccaaaccagctgataccttgatcttggacttccagcctccaaaataaatttgtacagtttaagcccatcttgtccatgctatattgttacagcagcatgcgcaaactagtaccwcctttttaaggcatttggaacattgatgagagaggggtgtgatttttgagggcagaaaatctcagcacgtttgatatcacatcagtaaacaataatctactctacattggctttgatgagcaagtaggatttttattctagtttggcttagaatcataaaatcataataaccttagatactacctatttcaatctcctcattttatatgtaatgatacagaggtgcatatggaagaactgacttgtccaaagccccacattagtttttgatcaagtcaggactacagttcaaatacttcaacttccagtgctctttttggctactgtataaaatgtcatatctcatttttatgtttttccatcaattctgttgtatttactaaccatcatagtctaagcatttaccttttca

SEQ ID NO: 304159 - DNA, 577 bp, Homo sapiens
aatacgttagtgttttccacaacccatctccgctttacagagatcactccttttccaagcttcaagttactagcgtgataggggagagaagagagtgaagtatttgactggttaggtacctgatttgtcttgatgcaaatgaccaggaggtaaaagaatggggtgtactgaatggtagcaaagcatctggcacactgcctaccatatagtatacgccaartgagtacttggagaggaaattaagtgtagactctggatttaaattctggcactattccttttcagctgtgtggatgttagcaggtacttaacctgctagtgtctctgttttcttagctaaaacaatattaatgcttcctaggaatgatttaaaaactgtgtgagaaaacgcatgcacattcttataagtatacatagctagtgctaaattcgtgtatttgctgaagaagaacaacaaatagaaaaaattgattctagccacgttgaaggtccattttccctcattcttcaaataatatttgagatatgggtagaaatacccacacttttttatagccattgcatccctgaaagaagg

SEQ ID NO: 304160 - DNA, 559 bp, Homo sapiens
atagtagggtagactgcagatataggctctttcatcaaaagtcagggaagatggttccagtagctgcaactccccaggaaaagaaatataacatastctttatgagtacaggtagctcagtggcttctgtcattcgcaactaatgaaattcaaattataaaaatcatcattacaagacttaaacatgataatggatgggtagttcttttttttaaataaattctttattttattttattattattatactttaagttttagggtacatgtgcacaatgtgcaggtttgttacatatgtatacatgtgccatattggtgtgctgcacccattatctcgtcatttagcattttttatggctcgttggtctaggggtatgattctcgcttaggatgtgtagttcttacctacagtgactggatgcgtattgagttctcagtaaatgttaactttaactattatcctataatacattgtaaaaatgtaactttctaacatattagaaatatatcagatgagattgagcaatatttcaggacttctgctattgaatacaaacat

SEQ ID NO: 304161 - DNA, 610 bp, Homo sapiens
aaaatttgatataggtagaaaatgttcaactaaattaaattctatgataattaatgaaccttgtatatattcaatatcctatgaaatataaacaaaagtgtacaattcctcaaagaaaatagagtggattttgagtcacaattaggttcaaagcctagcacctacttatgactttcccttaggaaagtgactttaactgattctctttccatctaatgggagtaaacttgcctattttatagattcgttttagagaaaaaccaaacagtgcataacaaacaccgagcagaaggccacacamatagcagatttgccagatattttagttttttttctgcccaccttcaagaaacttgacttttcattgggacaatgtggcatgaacatattatttccttaaccatctatcaggctatctgggattatggagcaatgtaagctactcagataggaagttactcagagaactcatgagaaggacaatgctggggccttatgaaaaagcagggattggggttggttgctgaaaggaaaagtgggaaaggctttgctaaaagagacactggtgttttaaggagcggcaatggaattggaggtgactgaggaaaga

SEQ ID NO: 304162 - DNA, 551 bp, Homo sapiens
gaaaactaacgaacaaaaaggaatagcatcaacatcaacaaaaaggatgtccactcaaaaaccctatcagaaggtcaccaacatcaaagttcaaaggtagataaatccatgaagatgaggaaaaaccagtgcaaaaaggctgaaaattccaaaagccagaactcctcttctcctccaaaggatcacaactcgtcggcagcaagggaacaaaactggatggagaatgagtttgatgaattcacagaagtaggcttcagaagttgggtagtaacaaactctttcaagctaaaggatcatgttctaacccaatgcaaagaagctaagaaccttaaaaaaaggttagaggaattgctaactagaataaccagtttagagaagaacataaatgacctaatggagcttaaaaacacagcacaagaatttcgtgaagcatacacaagtatcaatagctgaatcgatcaagcgaaagaaaggatgtcggagactgaagatwaacttaaaggaataaagcatgaagacaagattagagaaaaaagaatgaaaatgaataa

SEQ ID NO: 304163 - DNA, 493 bp, Homo sapiens
acatcacacaccgaggtctgtcagggggtgggcggctaggagaggaatagcattaggagaaatacttaatgtagatgaccggttgatgggtgcagcaaactgcatgtcacgtgtatacctatgtaacaaaactgcacattctgcacaggtatygcagaacttaaagtataataaaaattatttttaattgtcatacagtaaaatgagtcttttttattttgataaattaactataaattttaaaacatgtatagatttgtgtaacagctctatagttagtattcggaacagttctccctcacctccaaaaattcacttgtgctattcattatgatcatcttctaagctctggtacaatattacacaaatacacaattgtttgagattgactagcttctttcattaagcataatgcctttgaagcccatccaagttattgtatatatcaacagtttgtccctttttattgctgaataatattctatggcatcaa

SEQ ID NO: 304164 - DNA, 618 bp, Homo sapiens
tgataaggagttttaaatgttatattggaatttcttgaactaactacagttgaattttcagcagcaaaatatatgcactgatttttgttgcagtttgacaaaaaggacccaactgcaatcccagtttatatattcccatgatccttcctttttcagaggagaaaagaaagaatgtgtgattataaaagcaaagaaycctccatttttcctgctcattgttaaaaaatactgtttttatttgtttttttggacattgatcttttagaaatatttatatttgctttttcttcttattcagaagggcaagggtaggctcagggttttgtgcagagataatattaagtgtttgatatttaaccaaagcttacacaaatctgtttggatcactaatatgttgtgattacagtgaaaatctgttaagatacagattttccttgaatgtccaagtgcctctggcttataaataaagccacaacatttaatctgagcacttttggaataagatggaaaatgacaaatttaccctcctcctgaaaacaaacaaaattaaaactgtcttctctcatctcctcaaagaaaaaaaacaaatacagacagaaataaaatacactgccacac

SEQ ID NO: 304165 - DNA, 618 bp, Homo sapiens
tgataaggagttttaaatgttatattggaatttcttgaactaactacagttgaattttcagcagcaaaatatatgcactgatttttgttgcagtttgacaaaaaggacccaactgcaatcccagtttatatattcccatgatccttcctttttcagaggagaaaagaaagaatgtgtgattataaaagcaaagaaccctccatttttcctgctcattgttaaaaaatactgtttttatttgtttttttggacattgatcttttagaaatatttatatttgctttttcttcttattcagaagggcaagggtaggctcagggttttgtgcagagataatattaagtgtttgatatttaaccaaagcttacacaaatctgtttggatcactaatatgttgtgattacagtgaaaatctgttaagatacagattttccttgaatgtccaagtgcctctggcttataaataaagccacaacatttaatctgagcacttttggaataagatggaaaatgacaaatttacsctcctcctgaaaacaaacaaaattaaaactgtcttctctcatctcctcaaagaaaaaaaacaaatacagacagaaataaaatacactgccacac

SEQ ID NO: 304166 - DNA, 618 bp, Homo sapiens
tgataaggagttttaaatgttatattggaatttcttgaactaactacagttgaattttcagcagcaaaatatatgcactgatttttgttgcagtttgacaaaaaggacccaactgcaatcccagtttatatattcccatgatccttcctttttcagaggagaaaagaaagaatgtgtgattataaaagcaaagaaccctccatttttcctgctcattgttaaaaaatactgtttttatttgtttttttggacattgatcttttagaaatatttatatttgctttttcttcttattcagaagggcaagggtaggctcagggttttgtgcagagataatattaagtgtttgatatttaaccaaagcttacacaaatctgtttggatcactaatatgttgtgattacagtgaaaatctgttaagatacagattttccttgaatgtccaagtgcctctggcttataaataaagccacaacatttaatctgagcacttttggaataagatggaaaatgacaaatttaccctcctcctgaaaacaaacaaaattaaaactgtcttctctcatctcctcaaagaaaaaaaacaaawacagacagaaataaaatacactgccacac

SEQ ID NO: 304167 - DNA, 554 bp, Homo sapiens
atgatcagaaacatccttcttcctttgccttccaattcatctcaggttaatgacattaattccacaggaaagagtgtgtctgccatctcaatagttaaaagaattagcttgacttccaagggtagctgcacaggagtaccaagcaataaagagcctgggagctgggaatgagaaacaattagagaacacttcattaatgyttaatgatgcggagcgggcacacagcaaagctgattgtgtgctctgtcttagccaatgatgctcacacaatgccagggtggtgttataaatgcctctgctctataggctatggatgaaagaaggcagaagataaaattatctggggaaacttagtatgacaatttggagagaaaccagaaaatgaccactgtggattctactgccaatctcagtgcagggttagaacattttatatacttttcatatttggttctctaagcctaattcctaataggcatggctaaatcccactgaggatttctgttcctaataatgcattaagcatctcagttggaaggtcccataaagcattt

SEQ ID NO: 304168 - DNA, 585 bp, Homo sapiens
aatttaaagatactttatacacaaacacaccacacataccacacacacacacacacacacacacatacattatttatttcaggattttgtatttacctttatgggctagtaattccttatctgtgaatagtaataatgataaagctatcattaaatttacatttgtcctaaaatgaattgcatttgagaattagagaaatgcgttacatcgggaatgagtgttgcctataggaacattctatttgacctctgtttgacctcatgactttggacttgaatgtctgagaacagatgtctaaagcaatatctgtgttcatctgtccatctgtctgtctgtatgtatgttcaggggttagctcggtacctggtatgtattaatactagacacttcataatcgataactactattattaatttcacccawttctggcctccaccttccagcttgtacacaagttgagcacacttacgtacataagcatagagcttggactgattggcactctggcaaactcccccagtgctgtgtgtctttttgcccctctcccagttttgtctctgcctgctctcttagattgttaata

SEQ ID NO: 304169 - DNA, 435 bp, Homo sapiens
gcgtctgcagcaaagtcagatgaaattcctccttgatttctgtttatatctgccattgatttgtttatttgtttgcttasttttacattggatccataattcttttccttttgttcagaatggcttctattgccagttttccacaataactccttcaaagaaaatagtgccagaagaaacaaaatatgcaaatgaataagcaagaaacaaaaaatctctggtcttttcatttaattgtcttattactgttgatatagtaactggtagaatctttgtcttcatttggttagaggcaaattgacatctaactataccatgaattctgatttgctgattttatgtatgcctttcttgctttatttatttatttatttttgctcattaatattttttaaaccctggtttctgcaccttgttattttttaattttgttgc

SEQ ID NO: 304170 - DNA, 435 bp, Homo sapiens
gcgtctgcagcaaagtcagatgaaattcctccttgatttctgtttatatctgccattgatttgtttatttgtttgcttagttttacattggatccataattcttttccttttgttcagaatggcttctattgccagttttccacaataactccttcaaagaaaatagtgccagaagaaacaaaatatgcaaatgaataagcaagaaacaaaaaatctctggtcttttcatttaaytgtcttattactgttgatatagtaactggtagaatctttgtcttcatttggttagaggcaaattgacatctaactataccatgaattctgatttgctgattttatgtatgcctttcttgctttatttatttatttatttttgctcattaatattttttaaaccctggtttctgcaccttgttattttttaattttgttgc

SEQ ID NO: 304171 - DNA, 515 bp, Homo sapiens
tcatgtcatgactttttatgttttgatgttttaaataatgcagtatttgatagcttagtagaaaatatgcaatgtaaatagaagtcaagacacatagcaatagaacagaagtccctgagtccaccttctaacttaagtaatttactgttacaaacactgctgaagccatccttgacatgtgtccttgtctcataagcaggaatttctgtagggctgcatttaaaactgtatagttgagtggaatttacacattgwaaggtacgtgtacaatcatttttacatgataccctgaattgctttcctaagtgaatacaccacctatacttctcttagcttcaggagatagttattctttctttcgagctttaccaacactttgatagactcttatttcttaaattttgccaatacatccaaaggtgcaaaacagtacttcatcatggtctatctttgactgagtcttttttttttttttttttttttttttacctatcatgtttctgcctgtgaaatac

SEQ ID NO: 304172 - DNA, 552 bp, Homo sapiens
aaatgccttgtggggaattaggagtaggccaggaggcaatgccagaccccggtttagtgcttctatctatataattcttcttacaataccaataagtgtcactaaaacccatcacaattaccttgcactctttaaaatgacaagtctatgttttagagaactatttcttcaaatatggtccagggacagcctccctcacaatcatttagaatgctactttaaattgcagtttctgagttccacgccaagcctgtgtcacctctggtactgccctgaggacagctgcagtggaaaatttgtaactttaaaaccattatcagaggaaatatgatgcagtgctgtgtagtgattaaggaaaaatattaaaaccaacttttcgggggtttgaagtcaggttaacgctgtgaaacattgagcaagttacttaacttcattwcgcctcagctcctggtctttaaaataggcacaggtacagattatataataataccgacattacacatatattatgaaaattaagtaaatcaatagtgtaagcagtttagagaagtg

SEQ ID NO: 304173 - DNA, 489 bp, Homo sapiens
tctattttctaccaagtgccatgagctctcttagctgagagtcactaaacatactgcaatttctacctgaaaaaccttccccagaatcttccccttctctgttctaaatggtttctcagtgggtctgggtttctgtcaactccatggagcatcttgctgacaggagccttctctcattcatccctaagtcaccagtgcctggtagagggcacatttctattgaaggaaggaaggaacaagggaaactgcagcctatgattcttccaatttgcttgcattctccagtggagcatctgcatgaatattaatccagattgttacccaccagacacatgactctggatgtgctacaggcaagactggatagatagaaagtgaccaggctgaagaacattcaaccagggagagcattccaagaaagccctacagaagctccaaggcttcacctaagctagcctctakagtcactctaccacacttctattgcac

SEQ ID NO: 304174 - DNA, 493 bp, Homo sapiens
gttaactttacctccagtcactacttgatatggttttgctgtgtccctacccaaatctcatcttgaattgtagctcccataattgccacatgttgtgggagggacctggttggagataattgaatcatgggggcagtttccccccccatgagatctgatggttttataaggagaaaccctttgcacttggctctcattctctcatctgctgccatgtaagacgtgcctttttccttctgccatgatcgtgaggcctccccagtcatgttgaactttaagtccattaaacccctttttctttacaaattacccagtcttgggtatgtctttatcagcagtgtgaaaacggactgatagactaccacatatttcctggctgcactatagactctatcaggcactccctaaaaygttttcaatgtatattaataatatccatctaaatgttatagtatcaatatatcaacaatgtctgagagttttataaagacag

SEQ ID NO: 304175 - DNA, 618 bp, Homo sapiens
ctccctgcatttttccggagtcatgctcagggtttagtggtctttcaagagcacgctctcccttggctggctccattttactccattctctctaggaccggtggataagttcttatcacatgacaatggcaagtaagattgcaactggaggtcagagaggggaatgaaaataaaatgtaggatcagaaaggaaaaaaaaaaacatcttttgtcattatgacctgaaccactgaaaaagtgaaaaacagctctgttaacaaccagagtgaagtgtttgcaggagaacataaataatgctcacacaaggcaaagcctacgaccacactgaccatgtttggatgagatatagacaaggctcctcatgaccacaaaatcgacaatgattaatgtgaaattctgcaactaagtgtcctcatctcctgatgtatgctgtctttttcaagtgatggttgcccctgtatgtatggcaattcaaaccccacttyatttctcctgcctcttagataaaatctgctatgatttccagtcattaaattctcactttttgattagctcttaatacaaactggttccactttccccaatcctgcttagaaacctctaacccaagtccaaatc

SEQ ID NO: 304176 - DNA, 618 bp, Homo sapiens
ctccctgcatttttccggagtcatgctcagggtttagtggtctttcaagagcacgctctcccttggctggctccattttactccattctctctaggaccggtggataagttcttatcacatgacaatggcaagtaagattgcaactggaggtcagagaggggaatgaaaataaaatgtaggatcagaaaggaaaaaaaaaaacatcttttgtcattatgacctgaaccactgaaaaagtgaaaaacagctctgttaacaaccagagtgaagtgtttgcaggagaacataaataatgctcacacaaggcaaagcctacgaccacactgaccatgtttggatgagatatagacaaggctcctcatgaccacaaaatcgacaatgattaatgtgaaattctgcaactaagtgtcctcatctcctgatgtatgctgtctttttcaagtgatggttgcccctgtatgtatggcaattcaaaccccactttatttctcctgcctcttagataaaatctgcyatgatttccagtcattaaattctcactttttgattagctcttaatacaaactggttccactttccccaatcctgcttagaaacctctaacccaagtccaaatc

SEQ ID NO: 304177 - DNA, 517 bp, Homo sapiens
gatagtgagttctcatgagctctggttgattagaagtgtgtgacaccttccccacccctaacccccttctctctctaacttgctcctgtttttaccatgtgatgtgcctgctcccccttcacctccaccatgattgtaagctttctgaggcctctctagaagtagagcagatgcccacaacatgttttctgtaaagcctgcagaactgtgagccaattaacctctttttatttttaatattactcaatctcaggtatttcgttatagaaatgcaagaatggcctaatacaattactgaatggtgaaggaaaggaagggaggaagaaaagagagaaagaaaaagagacagaaaagaaactaaacctttacctctctacatgaactcaagatgggtcacgatgtacatgtaaaatgtacaattataagacccttggaagaaaacatgagaataatcttgtgamcttgagttaggcagagttcttagatatgacaccaacagcacaatcttaaaaaagaa

SEQ ID NO: 304178 - DNA, 596 bp, Homo sapiens
tttgggggtgacaattattttgtatcttgattgtggcagtggttacataaatctatatggatgttagaataattagaatagtatacccaaaatttaaaaagttaactttattgtatgctagcttaaaattatattttaaaaagataaaaattctattgcaactgtaaaactaattttccaaaatgattggagaaacccttgtgtaaatttatagctgttgaacacattcagctcctaaatcaaggttaaatgtctctccttaaagctacattacctgtgttcttctttctctctctctctctctctccctcccccaccrcccccgtgtttgtgtgtgtgtgtgtctttctgtctgtctgtgtgtgttgtgttgcactcattaggaatatttgcctggacctcaaatttgaggaactttgaaattatagttgctttccagtagcttctagttcaagagagcctccagaatcttcattacaacccttgatatacattaacatccaccccttctgaagctaagtgtatggatttaagagtgagagggtctcagaatctgaaagccatattttgttttttagaagaattggaaatatgcg

SEQ ID NO: 304179 - DNA, 596 bp, Homo sapiens
tttgggggtgacaattattttgtatcttgattgtggcagtggttacataaatctatatggatgttagaataattagaatagtatacccaaaatttaaaaagttaactttattgtatgctagcttaaaattatattttaaaaagataaaaattctattgcaactgtaaaactaattttccaaaatgattggagaaacccttgtgtaaatttatagctgttgaacacattcagctcctaaatcaaggttaaatgtctctccttaaagctacattacctgtgttcttctttctctctctctctctctctccctcccccaccacccccrtgtttgtgtgtgtgtgtgtctttctgtctgtctgtgtgtgttgtgttgcactcattaggaatatttgcctggacctcaaatttgaggaactttgaaattatagttgctttccagtagcttctagttcaagagagcctccagaatcttcattacaacccttgatatacattaacatccaccccttctgaagctaagtgtatggatttaagagtgagagggtctcagaatctgaaagccatattttgttttttagaagaattggaaatatgcg

SEQ ID NO: 304180 - DNA, 596 bp, Homo sapiens
tttgggggtgacaattattttgtatcttgattgtggcagtggttacataaatctatatggatgttagaataattagaatagtatacccaaaatttaaaaagttaactttattgtatgctagcttaaaattatattttaaaaagataaaaattctattgcaactgtaaaactaattttccaaaatgattggagaaacccttgtgtaaatttatagctgttgaacacattcagctcctaaatcaaggttaaatgtctctccttaaagctacattacctgtgttcttctttctctctctctctctctctccctcccccaccacccccgtgtttgtgtgtgtgtgtgtctttctgtctgtctgtgtgtgttgtgttgcastcattaggaatatttgcctggacctcaaatttgaggaactttgaaattatagttgctttccagtagcttctagttcaagagagcctccagaatcttcattacaacccttgatatacattaacatccaccccttctgaagctaagtgtatggatttaagagtgagagggtctcagaatctgaaagccatattttgttttttagaagaattggaaatatgcg

SEQ ID NO: 304181 - DNA, 596 bp, Homo sapiens
tttgggggtgacaattattttgtatcttgattgtggcagtggttacataaatctatatggatgttagaataattagaatagtatacccaaaatttaaaaagttaactttattgtatgctagcttaaaattatattttaaaaagataaaaattctattgcaactgtaaaactaattttccaaaatgattggagaaacccttgtgtaaatttatagctgttgaacacattcagctcctaaatcaaggttaaatgtctctccttaaagctacattacctgtgttcttctttctctctctctctctctctccctcccccaccacccccgtgtttgtgtgtgtgtgtgtctttctgtctgtctgtgtgtgttgtgttgcactcattaggaatatttgcctggacctcaaatttgaggaactttgaaattatagttgctttccagtagcttctagttcaagagagcctccagaatcttcattacaacccttgatatacattaacatccaccccttytgaagctaagtgtatggatttaagagtgagagggtctcagaatctgaaagccatattttgttttttagaagaattggaaatatgcg

SEQ ID NO: 304182 - DNA, 609 bp, Homo sapiens
ggtaacatcacttagaaatgaagatascatgcagacctctcagatgaaagaaaaccaagagaattcatgccaggagacctactttaaagaaaatctgaaggaaggtttcaggctgaagggaaatgatgtgaatgggaaagtttgatcttcaggaataaagaaacaaatacaaactgtaaacagctggataaatataaaatatatattttcccctgctctaagctctttaaaatacatatgatgatttaaggcaaatattctaacattgcctggtgctttcagtgtatacagatgtaatacatatgacaaccataacataaaaggcaggagagaataagaaaggacccacagaatggcaatgttttctagatttcacaggaaatagtaaaaatatcaactcttcagactgttaaaagttaaatatgtatattgtaattcctagagcaaccataaaaaaggtaatgtaatgtgtccataaagccaatagataaactaaaagagaattcacataatccaaaataagacaggaccatgaacacagaggaaaacaacaaaaataagaggagagagaacagtaataaaattgtacacttaaatttaattaaatca

SEQ ID NO: 304183 - DNA, 548 bp, Homo sapiens
aaaacaacaaaaataagaggagagagaacagtaataaaattgtacacttaaatttaattaaatcaatgattacactaaatattaatcatgtaaacaatgtaattaaaatttagtgaataacacagtggagaaaatagtaaggctctcctatatgttgcctatgagagaaacactttaaaaatgaagacacaggtgaaaataaatggatgaaaaaaaaaaaagacataccatgcacgaagtatagaggagtttggagttgctatgttaatatcacataaaatagacttgaattcaaagagtrttagcagagataaggagaaaattctataacaaaacaagggaatacttcaccagctataaataataattatcagtgtgtatgtatgtagtaacaggacctcaaaacatacgaggcaaaaacagacgtaattagctgaagaagtagatgattccacagctaagagagctttaataccccatctctacaactgataaactaagcaaaaagttactaaaagcatagaagatctagcaacactagcaaccac

SEQ ID NO: 304184 - DNA, 540 bp, Homo sapiens
tttgtccactctgttttgttaaataacaacagctgacttttctgtttggggattgttttcttatgcctgtctcaatccactcttactgtgtttagcctgrgagactaatgctaaatgctgttgtcattcaccttcatcacaggcaggggttgtggaggtgggaatctcagtccagttcattctcaaccagcaaatagtggaaatgaactggattcccagccatgaacccttgttttctgactctaggactggctttttttgtttacaagtgtttttcaaagaatttaaagggctacctgctaccaaggtcagctgggcgcttgtaaattgcagaatcaggtgctcccaccaaccttatggaatcagaacctttggcttctcatatcgtctcttcctgtttgctttctgtatatatttcttttaaaaaaatcactgttttttatctctgccatcttgtttttaaaaataatccttaagctaagtttacaattattattaaatattcatccatattgccatgtaataaatatttgccaagct

SEQ ID NO: 304185 - DNA, 540 bp, Homo sapiens
tttgtccactctgttttgttaaataacaacagctgacttttctgtttggggattgttttcttatgcctgtctcaatccactcttactgtgtttagcctgagagactaatgctaaatgctgttgtcattcaccttcatcacaggcaggggttgtggaggtgggaatctcagtccagttcattctcaaccagcaaatagtggaaatgaactggattcccagccatgaacccttgttttctgactctaggactggcttttkttgtttacaagtgtttttcaaagaatttaaagggctacctgctaccaaggtcagctgggcgcttgtaaattgcagaatcaggtgctcccaccaaccttatggaatcagaacctttggcttctcatatcgtctcttcctgtttgctttctgtatatatttcttttaaaaaaatcactgttttttatctctgccatcttgtttttaaaaataatccttaagctaagtttacaattattattaaatattcatccatattgccatgtaataaatatttgccaagct

SEQ ID NO: 304186 - DNA, 586 bp, Homo sapiens
gggcagtagtgggaaggaattgtatttaaggaacatttacttgatgtacagtctgcataactttcgtttgactaaatttgaagcatgagagtaaaagaggaagaaatgtggatatatttgtaaaaatgatactggattgtataataaataaattataaatttccatggcttgataaaatagagctttatttctcagagactttccagaacagatgttcctgacagatgactgtctttcttccatgtggtgacttagggaacccaaatgtatcaccctgtgactctgtcatgccctcatgccttggaattcttttcatacaactagtagagagggaaatagagtaccaggaagaagagatacttcctcraagctccagactgacaattacgtatataacttccacttatattgcactgtctattagtcacatggctaggtctgaatatagtactccccacctatgtatgaggggcatgttccaagacccccagtgaactcctgaaacctcaatagcaccaaaccctgcatatactatgttttttcaatctgataattgagatatctactaagtgactaattggtagg

SEQ ID NO: 304187 - DNA, 586 bp, Homo sapiens
gggcagtagtgggaaggaattgtatttaaggaacatttacttgatgtacagtctgcataactttcgtttgactaaatttgaagcatgagagtaaaagaggaagaaatgtggatatatttgtaaaaatgatactggattgtataataaataaattataaatttccatggcttgataaaatagagctttatttctcagagactttccagaacagatgttcctgacagatgactgtctttcttccatgtggtgacttagggaacccaaatgtatcaccctgtgactctgtcatgccctcatgccttggaattcttttcatacaactagtagagagggaaatagagtaccaggaagaagagatacttcctcaaagctccagactgacaattacrtatataacttccacttatattgcactgtctattagtcacatggctaggtctgaatatagtactccccacctatgtatgaggggcatgttccaagacccccagtgaactcctgaaacctcaatagcaccaaaccctgcatatactatgttttttcaatctgataattgagatatctactaagtgactaattggtagg

SEQ ID NO: 304188 - DNA, 609 bp, Homo sapiens
tgggtcagatcacataggtgtgaggtttcattgcatcattcaaaacagcacacaatttaaaacttatgaatccaatatttttggtttaatattttgaaatcacatttgaccayggataactgaaatcatggaaagcggaaccgcagatcagcaaagactactgtacaaagaaggcaggggaacacagtttagccatgtacctaggcaaacaagagggcaacagattctaggagacaactatatctgttgcctacagatagcttcaaggaggccagcatgtgaccatgtatgagtgctggtgtcacttgttaatatgaacaataaacaataaagagaatgatgctaggatattctgaacatgtttactgtgttttatggaccatcttattggagatatccaggagaaatttggtttgtagatttgaaacttggagaaaatatttgggttaccttttaaatatgggagaaaactcataggctcagctgactgttgtagaatttattcaataaataaaaatacggtgctagaaataaaatgatggttgaaatagatgtattctctctattcagggtaagagaggatagtgctggataaaatgagggaattag

SEQ ID NO: 304189 - DNA, 609 bp, Homo sapiens
tgggtcagatcacataggtgtgaggtttcattgcatcattcaaaacagcacacaatttaaaacttatgaatccaatatttttggtttaatattttgaaatcacatttgaccatggataactgaaatcatggaaagcggaaccrcagatcagcaaagactactgtacaaagaaggcaggggaacacagtttagccatgtacctaggcaaacaagagggcaacagattctaggagacaactatatctgttgcctacagatagcttcaaggaggccagcatgtgaccatgtatgagtgctggtgtcacttgttaatatgaacaataaacaataaagagaatgatgctaggatattctgaacatgtttactgtgttttatggaccatcttattggagatatccaggagaaatttggtttgtagatttgaaacttggagaaaatatttgggttaccttttaaatatgggagaaaactcataggctcagctgactgttgtagaatttattcaataaataaaaatacggtgctagaaataaaatgatggttgaaatagatgtattctctctattcagggtaagagaggatagtgctggataaaatgagggaattag

SEQ ID NO: 304190 - DNA, 609 bp, Homo sapiens
tgggtcagatcacataggtgtgaggtttcattgcatcattcaaaacagcacacaatttaaaacttatgaatccaatatttttggtttaatattttgaaatcacatttgaccatggataactgaaatcatggaaagcggaaccgcagatcagcaaagactactgtacaaagaaggcaggggaacacagtttagccatgtacctaggcaaacaagagggcaacagattctaggagacaactatatctgttgcctacagatagcttcaaggaggccagcatgtgaccatgtatgagtgctggtgtcacttgttaatatgaacaataaacaataaagagaatratgctaggatattctgaacatgtttactgtgttttatggaccatcttattggagatatccaggagaaatttggtttgtagatttgaaacttggagaaaatatttgggttaccttttaaatatgggagaaaactcataggctcagctgactgttgtagaatttattcaataaataaaaatacggtgctagaaataaaatgatggttgaaatagatgtattctctctattcagggtaagagaggatagtgctggataaaatgagggaattag

SEQ ID NO: 304191 - DNA, 609 bp, Homo sapiens
tgggtcagatcacataggtgtgaggtttcattgcatcattcaaaacagcacacaatttaaaacttatgaatccaatatttttggtttaatattttgaaatcacatttgaccatggataactgaaatcatggaaagcggaaccgcagatcagcaaagactactgtacaaagaaggcaggggaacacagtttagccatgtacctaggcaaacaagagggcaacagattctaggagacaactatatctgttgcctacagatagcttcaaggaggccagcatgtgaccatgtatgagtgctggtgtcacttgttaatatgaacaataaacaataaagagaatgatgctaggatattctgaayatgtttactgtgttttatggaccatcttattggagatatccaggagaaatttggtttgtagatttgaaacttggagaaaatatttgggttaccttttaaatatgggagaaaactcataggctcagctgactgttgtagaatttattcaataaataaaaatacggtgctagaaataaaatgatggttgaaatagatgtattctctctattcagggtaagagaggatagtgctggataaaatgagggaattag

SEQ ID NO: 304192 - DNA, 556 bp, Homo sapiens
aggctggaaaacagtagtatagatttctatccagcaatgatccccattttgatgaaaggagaaaatttattttggtgagcaggtaacagtttctgcaccactcctgttatgtaaaatatcgtatagatccaattgacatattttctatctttctaatataaaaaaaccataatcttctgtttttcaagtgtcaaaacttatgccaccttactgtctcctccawtcccctggcttcttttgatttctttataatatacgtatttgttttcatttatctgcgcttgagatgctttgattcattccaagtcatcccaggctcaaaactccacacacagttgtaggtcagtctttgagatgtcggccaaatccttcccttctgtattcgtccattttcacactgctgataaagacatacccacgactgggtaatttataaagaaaaagaggtttaatggactcatggttccatgtaactaactggcctcacaatcatggtggagggtgaaaggcacatcttacatggtgacagacaagaaagaatgatagccaagaaaaa

SEQ ID NO: 304193 - DNA, 556 bp, Homo sapiens
aggctggaaaacagtagtatagatttctatccagcaatgatccccattttgatgaaaggagaaaatttattttggtgagcaggtaacagtttctgcaccactcctgttatgtaaaatatcgtatagatccaattgacatattttctatctttctaatataaaaaaaccataatcttctgtttttcaagtgtcaaaacttatgccaccttactgtctcctccattcccctggcttcttttgatttctttataatatacgtatttgttttcatttatctgcgcttgagatgctttgattcattccaagtcatcccaggctcaaaactccacacacagttgtaggtcagtctttgagatgtcggccaaatccttcccttctgtattcrtccattttcacactgctgataaagacatacccacgactgggtaatttataaagaaaaagaggtttaatggactcatggttccatgtaactaactggcctcacaatcatggtggagggtgaaaggcacatcttacatggtgacagacaagaaagaatgatagccaagaaaaa

SEQ ID NO: 304194 - DNA, 571 bp, Homo sapiens
gggaaacccgttataaaaccatcagatctcgtgagacttattcactaccatgtgaacattatggggggaaccacccccctgattccattatctcccacttggtccctcccacaacatgtgggaattatgggaactacaattcaagatgagattygggtggggacacagccaaatcatatcaccttcctaactattcttgctgtggtcacctttcagaccttgacaacattttcactgaactttcctattagttttcagtgagacttcctgtctcctctttttctctcctccaatccgttctatacactgtttctagttaaaatccatacaaccccccgcccccacccaaagaaattcccagcttgacatttgtgataatttcacatatattttaaaatttagacttgtcttaccctgagggtaaagatgcttcttacaatggtaataatctacattccttatatcgccataaattttatagaatgcactgtagtttggttctcacaatccaaatccattttccaaaaacatttattacatttttatccctgctctagcaaattaccatgga

SEQ ID NO: 304195 - DNA, 571 bp, Homo sapiens
gggaaacccgttataaaaccatcagatctcgtgagacttattcactaccatgtgaacattatggggggaaccacccccctgattccattatctcccacttggtccctcccacaacatgtgggaattatgggaactacaattcaagatgagatttgggtggggacacagccaaatcatatcaccttcctaactattcttgctgtggtcacctttcagaccttgacaacattttcactgaactttcctattagttttcagtgagacttcctgtctcctctttttctctcctccaatccgttctatacactgtttctagttaaaatccatacaaccccccgcccccacccaaagaaattcccagcttgacatttgtgataatttcacatatattttaaaatttagacttgtcttaccctgagggtaaagatgcttcttacartggtaataatctacattccttatatcgccataaattttatagaatgcactgtagtttggttctcacaatccaaatccattttccaaaaacatttattacatttttatccctgctctagcaaattaccatgga

SEQ ID NO: 304196 - DNA, 618 bp, Homo sapiens
caaaaatataaagtgtataaaaattcaatattaaacctaaatttatttgtatttattttgattctatttatttccacaggtttttactatttttaaaaatataacagtgtgttaatattaattttttatgtttaatttatttgtattaaggtatctatgtttaccatttttaagtatacaattcagtgataataaaactatatttacattcttctttyttccttttctctgactatccttcctagccttcagtaacttccagtctattctctatcttcacgaaatggatctttttagcttccacataaggatgagagcatgttacatttgtctttctgtgcttggcttatttcattcaacaaaatgggctctagttccatccatattgctccaaatgacaggatttcatcttttttatggcttaataatgttccattttgtatatataccatattttctttatccatttatccattgatgggcacttaggttgactctatagtttcgttattgtaaatagtcctggaatacacaagaaagtggagatatctcctcaatgtattgagttcctttcttttggatatatacctaatagcagaattatgggagcatataatt

SEQ ID NO: 304197 - DNA, 618 bp, Homo sapiens
caaaaatataaagtgtataaaaattcaatattaaacctaaatttatttgtatttattttgattctatttatttccacaggtttttactatttttaaaaatataacagtgtgttaatattaattttttatgtttaatttatttgtattaaggtatctatgtttaccatttttaagtatacaattcagtgataataaaactatatttacattcttctttcttccttttctctgactatccttcctagccttcagtaacttccagtctattctctatcttcacgaaatggatctttttagcttccacataaggatgagagcatgttacatttgtctttctgtgcttggcttatttcattcaacaaaatgggctctagttccatccatattgctccaaatgacaggatttcatcttttttatggcttaataatgttccattttgtatatataccatattttctttatccatttatccattgatgggcacttaggttgactctatagtttcgttattgtaaatagtcctggaatacacaagaaagtggagatatctcctcaatgtattgagttcctttcttttggatatatacctaatwgcagaattatgggagcatataatt

SEQ ID NO: 304198 - DNA, 496 bp, Homo sapiens
tcaagctaaaaagcttctgcacagcaaaagaaacaatcaacaaagtaaagagacaacccatggaatgggagaaaatatttccaaactatcagaatatatgagagcaaataaactcaatagcaaaaaaacaaataacctcattaaaaattggctaaacatctgaatagacacttcccaaaagcagatacacaaatgatcaactggtatgtgaaaaaaatgctcaacatcactaatcatcagagaaatgcgagtaaaaagcacaatgcaataatatcttactccagttaaaatggcttgcatcaaaaaggcttttacttattattcaaagattacagtcaaatataaagaaagaatctttggaaagaagatagaagactcataatccaaaaccccaagctcattagcagctgtgtgagtgtgcatgtgtgtgcatgtgtccttgtacatgtaygtgttcatgcctgtttctgtgtgtgcacacatgaatgttaattgc

SEQ ID NO: 304199 - DNA, 479 bp, Homo sapiens
tgatttacactttttatttttataattggatacaggtcatttgagtgaataaaatatgctttatttttcttttttagtggaaaagaycaattttataactgtgggcactgagcacaaaatatactcttattgcaagtttatacaaacagtaaatagaaagtggacatttaactatataaataaataactgaaactatgtttttgaatgaaaatgaacattttctaattaatttttgaattaaaaaaaacagcaacaatagccataattttaacactacaaaaagatttcactttatcagcaatataagaattttataaagtaaaactgcatgtaaaatagcattaccacgaaatattttattgtcttttagaaaacttgataaacctacagaaaaaattctcggaaaataaattttttttcatcaaattaatgctgtggactgaattgtgtccccaccaaattcatatgttgaagcctt

SEQ ID NO: 304200 - DNA, 479 bp, Homo sapiens
tgatttacactttttatttttataattggatacaggtcatttgagtgaataaaatatgctttatttttcttttttagtggaaaagaccaattttataactgtgggcactgagcacaaaatatactcttattgcaagtttatacaaacagtaaatagaaagtggacatttaactatataaataaataactgaaactatgtttttgaatgaaaatgaacattttctaattaatttttgaattaaaaaaaacagcaacaatagccataattttaacactacaaaaagatttcactttatcagcaatataagaattttataaagtaaaactgcatgtaaaatagcattaccacraaatattttattgtcttttagaaaacttgataaacctacagaaaaaattctcggaaaataaattttttttcatcaaattaatgctgtggactgaattgtgtccccaccaaattcatatgttgaagcctt

SEQ ID NO: 304201 - DNA, 479 bp, Homo sapiens
tgatttacactttttatttttataattggatacaggtcatttgagtgaataaaatatgctttatttttcttttttagtggaaaagaccaattttataactgtgggcactgagcacaaaatatactcttattgcaagtttatacaaacagtaaatagaaagtggacatttaactatataaataaataactgaaactatgtttttgaatgaaaatgaacattttctaattaatttttgaattaaaaaaaacagcaacaatagccataattttaacactacaaaaagatttcactttatcagcaatataagaattttataaagtaaaactgcatgtaaaatagcattaccacgaaatattttattgtcttttagaaaacttgataaacctacagaaaaaattctcggaaaatraattttttttcatcaaattaatgctgtggactgaattgtgtccccaccaaattcatatgttgaagcctt

SEQ ID NO: 304202 - DNA, 573 bp, Homo sapiens
tgtcataaatgatgcattaggtgaaagtctggtaagtactctgaagacaggaaattcttaaacttcttaaaagttacttaaatagtcatgaccagaatgctactaaaagtctagagagtaaagctcattctgatgaaggctcaaatgaaacaggaacaataaattagaattggattaaagaycattcttgttatgaagtagcacaaaatagctcaattttttttcatgccgaagaactttctggaatgcagaacttaagcgggatgaactaggatacttggaagaaatatctaggcagcaaagcattcaggctgccatatgcttacttttaactatatgcaatgagatgcaagaggaaaggattgacttaaagatagaatttataattaaaaggaaagcagagtggaaagacattgaaaatttgaagtctggtcatgtaaaaagtggaaaggtgtgttcaggagacaatactaagtgtgtggccaagcaaccaattgctaaatataatgtcatggatacaaataagccaggtgctatttttcaagacaatgaaacaaagaccctgaaggcatt

SEQ ID NO: 304203 - DNA, 573 bp, Homo sapiens
tgtcataaatgatgcattaggtgaaagtctggtaagtactctgaagacaggaaattcttaaacttcttaaaagttacttaaatagtcatgaccagaatgctactaaaagtctagagagtaaagctcattctgatgaaggctcaaatgaaacaggaacaataaattagaattggattaaagatcattcttgttatgaagtagcacaaaatagctcaattttttttcatgccgaagaactttctggaatgcagaacttaagcgggatgaactaggatacttggaagaaatatctaggcagcaaagcattcagrctgccatatgcttacttttaactatatgcaatgagatgcaagaggaaaggattgacttaaagatagaatttataattaaaaggaaagcagagtggaaagacattgaaaatttgaagtctggtcatgtaaaaagtggaaaggtgtgttcaggagacaatactaagtgtgtggccaagcaaccaattgctaaatataatgtcatggatacaaataagccaggtgctatttttcaagacaatgaaacaaagaccctgaaggcatt

SEQ ID NO: 304204 - DNA, 561 bp, Homo sapiens
ttttagtagagatggggtttcaccgtgttagccaggataatctccatctcctgatctcgtgatccaccctcctyggcctcccaaagtgctgggactacaggcgtgagccaccttgcctggcctgtacattggttttatgaagggtcatgaagctcaattgtgcatgtgcatgtttgtcctttcataaatattcatgactcctcttatagcttattgaatatgtacatttggtgaccctgcataaattcctgtttcctttgcccctcccttgctggaaactatactgctgggcctttcagaataaccacgctgcaggctgcaacgctttatgtgaaataaaaccctcatttccaaatttataaacctcatcattcttcagttgacaatatgtatcttatgcctagagtataataggtgacaggctattaagtcatatggctgaagaatttacttgctctgaaacactgggcatgtaaaatgagaacaatgatagtatcttccatgcaagatagttgtaatggttaaatgaaataatcaatgaaaaagaattcataagcattt

SEQ ID NO: 304205 - DNA, 554 bp, Homo sapiens
aagactgtgagtcaattaaacctctttacttcataaattacccagtctcaggtacgtctttataccagtgtgaaaattgtctcatacataagtcatgggctcaatcaagtcattttaacttttggggggttttgttgcttgatctgtaaaatgaagttttactggataagttctactctctcaacttccctaagtctaagaattcatttctagctttttgcaactattgtgacacaccctgatcaggtatcctccattctcctctccagattcattctccacccttcagtactctgcastataccccaagagactgacccctaagaactacatcagtgggctcccttgtccctgagaatggggcagcagaagtgataaagaagagcgaggtctcggtatttatttcctggcttcctacaagtacacaatacattaaggggaaaaatgattcctaacttcacttgtgaatttttggaagcagaggaaggacacgtaatggactgaactgtgtcctcccaaaatgcatatgttgaagccctaaccctcaatttaaa

SEQ ID NO: 304206 - DNA, 471 bp, Homo sapiens
tggtaatagcagaggaatgaagacaaaggggctgtattgtaaggaagtattaattcaatattaaattatctaagtaattacgtgtgcaataaccagacattgtaatgtaaatcacattatctaatctgtatttttgtgaagttaaaaaaaatgagctcagctggtaagcatttgcaatttgaatcagtagacagaattttggagaaatgacactgccacttaacagacaaaaaacattgtggaattttttttccatttgtgtgtgtcttctattacctctttcagcagtgttttatagttctccttatagagatctgtcacctccttagttacatayagtcctaggtattttaatttttttgcagctattgtaaatgggattatgttcttcatttcactcttgcttgttgtgtatagaaatgctgttgagttttgtacatcgattttgtatcctgtaactttattgtagtt

SEQ ID NO: 304207 - DNA, 471 bp, Homo sapiens
tggtaatagcagaggaatgaagacaaaggggctgtattgtaaggaagtattaattcaatattaaattatctaagtaattacgtgtgcaataaccagacattgtaatgtaaatcacattatctaatctgtatttttgtgaagttaaaaaaaatgagctcagctggtaagcatttgcaatttgaatcagtagacagaattttggagaaatgacactgccacttaacagacaaaaaacattgtggaattttttttccatttgtgtgtgtcttctattacctctttcagcagtgttttatagttctccttatagagatctgtcacctccttagttacatatagtcctaggtattttaatttttttgcakctattgtaaatgggattatgttcttcatttcactcttgcttgttgtgtatagaaatgctgttgagttttgtacatcgattttgtatcctgtaactttattgtagtt

SEQ ID NO: 304208 - DNA, 471 bp, Homo sapiens
tggtaatagcagaggaatgaagacaaaggggctgtattgtaaggaagtattaattcaatattaaattatctaagtaattacgtgtgcaataaccagacattgtaatgtaaatcacattatctaatctgtatttttgtgaagttaaaaaaaatgagctcagctggtaagcatttgcaatttgaatcagtagacagaattttggagaaatgacactgccacttaacagacaaaaaacattgtggaattttttttccatttgtgtgtgtcttctattacctctttcagcagtgttttatagttctccttatagagatctgtcacctccttagttacatatagtcctaggtattttaatttttttgcagckattgtaaatgggattatgttcttcatttcactcttgcttgttgtgtatagaaatgctgttgagttttgtacatcgattttgtatcctgtaactttattgtagtt

SEQ ID NO: 304209 - DNA, 586 bp, Homo sapiens
ggagagacctgaggcaggaggatcccttgcatcccccagaggttgaggctgcagcgagctgtgattgcaccactgtactccagtctgggtgacagagtgagactctgtcttaaaacaacaacaagaacaaaacagacaagaggccaacaaacatacgaaaaaatgatccacattactaattgtcagagaaatgcaaatcaaagccataatgagacaccatctcacaccagtcaaaatggctatcattaacaagacaaaaacaacagatgctggtgargctgtggagaagagggaatgtttacatactgttggtgggaatgtaaactagttcagccactatggaaagcaatttggagattcctcagagaacttaaactgctattcaacccaacaatcccattactggttatacatccaaaagaaaataaatagttctaccaaaatgaaatactcatatgttcattgtagcactagtcacaataatgaagacatcgactcaacctatgtgcccatcaatggtgaattatataaagaaaatgtggtacatacacactgtggaatactagccagccataaaaatgaacga

SEQ ID NO: 304210 - DNA, 551 bp, Homo sapiens
attgtttactcagaacactccaatccccacaaaatttaaactacagtgtactgcttttatctgtcttctctgatgargccagaacttagaatgccatatggaacatttgacttccagaatgttaatatttacagtgacattcctgtcccaggattccatttttttctcagtgactgcatagaaggacatggaacattaaaggatctgatcagtggttaggagtggtgtttcatcagactgcactgtcgcaaacaatagacctagaataggaaatttaagccaattgttaatcactgtgttaattgtcttgaggtatctatgaccaggaatctaactaggaaagaagataaaaccaaaatcttcatcacctctctactatatttaaaacacatcatcttgtaatcagctaatcacgaacttaactcttaaatgtaaagcctgttttagcctttattggttcaaagttgctctaaacccagtaaaaaagtgtgtttttaaaatttaactgaatcattaaggagttaaacataaacattgttttctaaaaacat

SEQ ID NO: 304211 - DNA, 551 bp, Homo sapiens
attgtttactcagaacactccaatccccacaaaatttaaactacagtgtactgcttttatctgtcttctctgatgaagccagaacttagaatgccatatggaacatttgacttccagaatgttaatatttacagtgacattcctgtcccaggattccatttttttctcagtgactgcatagaaggacatggaacattaaaggatctgatcagtggttaggagtggtgtttcatcagactgcactgtcgcaaacaatagacctagaataggaaatttaagccaattgttaatcactgtgttaattgtcttgaggtatctatgaccaggaatctaactaggaaagaagataaaaccaaaatcttcatcacctctctactatatttaaaacacatcatcttgtaatcagctaatcackaacttaactcttaaatgtaaagcctgttttagcctttattggttcaaagttgctctaaacccagtaaaaaagtgtgtttttaaaatttaactgaatcattaaggagttaaacataaacattgttttctaaaaacat

SEQ ID NO: 304212 - DNA, 576 bp, Homo sapiens
gtgctttttaacatataggctgtaaatgttagtatttctgagtttcgcagatccctactcgccctggttttggagaaaaagctaagttccatcctcttgcctcatttcatgggtcatttatatgtacatgagcctcttcagcagcaatatacagtatctgcctcctctctcaatgaccaactttgagtattgtccctgatcmgccatacatgttctgcaacagtgcggggttgactcaaagacaacaagagtggctatttccttctgctagttcagccctcacagttatgatctagctgtgggaagccctgttttctctcgggtgttctctataccacagctagtgtttgttgatcacttctgaaaaatgcactttttttgagacagtcttgttctgtcacccaggctggagtgcagtggcaagaccatagcgcactgtaatctggaactcctgggctcaagcaatcctccatcctcagcctcctgagtagtggggactacaggtgtgtgccatcatgcccagctaagtttttattattttttttttatacagatgaggtcttgctatgtttctca

SEQ ID NO: 304213 - DNA, 576 bp, Homo sapiens
gtgctttttaacatataggctgtaaatgttagtatttctgagtttcgcagatccctactcgccctggttttggagaaaaagctaagttccatcctcttgcctcatttcatgggtcatttatatgtacatgagcctcttcagcagcaatatacagtatctgcctcctctctcaatgaccaactttgagtattgtccctgatccgccatacatgttctgcaacagtgcggggttgactcaaagacaacaagagtggctatttccttctgctagttsagccctcacagttatgatctagctgtgggaagccctgttttctctcgggtgttctctataccacagctagtgtttgttgatcacttctgaaaaatgcactttttttgagacagtcttgttctgtcacccaggctggagtgcagtggcaagaccatagcgcactgtaatctggaactcctgggctcaagcaatcctccatcctcagcctcctgagtagtggggactacaggtgtgtgccatcatgcccagctaagtttttattattttttttttatacagatgaggtcttgctatgtttctca

SEQ ID NO: 304214 - DNA, 478 bp, Homo sapiens
tactgaggttgaaataatctcccatattctctctttgcatcttacatacatgaagagaagttgtaattagatacagtgatgtgaacaacatacagatactttcttaaatcagattttcagagaacaataaggtatagaacaattcacctcttggagcatcctgatgtacctgtttcctcacttccccctcgtaattttctcccagctcaatgcagtcatcttatcaagacaagcatcaacattyttttgtttcctaattactcacctttcccattagaatatgagcccttcagcacgcatgggttgtcaatctgatgtaccgaagcacagagtagttgctcagtactacagttgaatgaatgacttcttttttttttttttttttttttttgaaatggagtctcgctgtcgcccaggctggagtgcagtggcacgatatcggctcactgcaggctccgccccccggggttcacgccgt

SEQ ID NO: 304215 - DNA, 618 bp, Homo sapiens
catccatctaaatgctataaatagctcacccacttttatcaggggagtctttcatttgaaatcagaaattctcacaaagaatttctgggaccgtgtgtattacatatatcactagagtgcactgctttgtttcaggactctcatttaaagctctgtttaatcatcctcaaatcatcttattccttatgaggatcatgtgaatagccagtgggtccctttcatgggtgtgaaactgatccctttattgatgtggccccactgttctgtctactctcctggagtgatgctctggaaaaacaaagttgcctgcaatacagtttcatgtcaaattagcatatggcacagcatatggaataacaactagaggactggtttctcagacctgagaaggtaccaaaaacatattttcggaagagacacatctcttattgaaaaggcagctgcccaacacacaattgtctcccagtagactggtactggcaaagacaactgtcttgactgaaagaacactgccaagaaactgaccttagggggaacggaagagagcagagcatgatatttayatttctttaaagtctctttcaagttttgaaaatcactcctaaaaatacactcaac

SEQ ID NO: 304216 - DNA, 552 bp, Homo sapiens
ctgaataggaagtcattttattgattttcgtttcaaaaatatttactcaagggacaatggaaagtgttgatttagtggaaaagacaagtaatatattcaccagtaagacacttaaaaattaatgaacttattacaacaatgatagatacataaaaatgtacatgtttgcaacaaggttatgagctataacatcagaggctgatggtaacagagtaactaattactattagaatgtagacttttttctttgtcagaaccatgtttctacatttgcaactttcatattactttagtcacagtttcatatgtattgctataaacacatatttcaaatactgggtggaaactaaggcagccagatagctcaataaactaagtgacagaatggaatctcatagataaaacttctcctctgtataaccttaggtctaggaagatgatcttagtttgaatggctcttgttaggtaactcttctaagttcagtatttctctgtaaygtaattgtagttatttaataagtatcatagatattataaatttgtgtccaacct

SEQ ID NO: 304217 - DNA, 440 bp, Homo sapiens
tcttgcctgctgccatgtaagacgtgtcttgcttccccttcaccttccactatgattgtgaggcctccccagccatatggaactaactatgagtcagttaaacctctttttttttataaattacccagtctcgggtatgtatttattagctgcatgagaacagactaatacagtcagcctcactctacaaccttcatcactatttggcttacttactatagcagctaaggtcttattaaatccatacccattccatttttatccttagttacctcttccttcatgtcagtatctttcactatgcatttgtccaatctgcgtcatcacattaagggaaagctygcgtgcctcttgcattcatttttttcttcttctaagagtgtcatacaccaaagttcactttcattcctagtactaaacatttttcacttatgctttat

SEQ ID NO: 304218 - DNA, 583 bp, Homo sapiens
tcttgtgtttataaattcatatgttgaaatcctaacttccaatgcaatagtattaggaggtggggccatctggaaggtaattaggtttaaatgagttcatgagggtggaacccccatcatgggattattgaccttataaaaagaaaaagagactagagcttactctcttggccacatgaggacacagcaaggcagcagctaagtacaagccaggaagagagaccacatcaaaaaccaaatctgctggtgccttgatcttagacttccctgcctccaggactgtaagaaataaacwttgtttaagccagccagtctatgatgtcctgttataaccgcccaaactgactaagacatcctccttccaggtacacagtgggactgcattttgtcacttctttatagttaaatatggctgcgtgactccatttagctaatgaaatatgaacatgatccctaagagctagtacatgatttgctatgtgctcttctccctgctatggtgagctttatagcctatgccgggatggcgcctctgctgcttggggtctctgagcgactgtattgagtagacataacagctgtc

SEQ ID NO: 304219 - DNA, 493 bp, Homo sapiens
  misc_feature (1)...(493): n = A,T,C or G
ccagctccatctcgtgaagccttctgatccagagacagttaccacttcagagttcttatgtacagagttaatacctctcccggaattcagcacattcactggtattgtaactattttgtgcctggctatttagcattcttcaccctctggacacaacattttcaggagtcgtagagattgaggggaaacacaattaaatgcacactattattccaggagaaaagtctgtcttaaatttctgacttcccttgtctccaagtgagctattctggagatkttagaatgaaccccaaaaggtcctatttctgtgtattcccaagcctagagcaaacctaaatcacctattccaggcttgctttctcatcctgttccacaatttctccagagttaaagtaaagccaaagccagtttatcttccaacaccacaaaaagtcaggaaagagtaaactgcatntacttcatgggttttcttctcagcactcnnnnnnnnnnn

SEQ ID NO: 304220 - DNA, 493 bp, Homo sapiens
  misc_feature (1)...(493): n = A,T,C or G
ccagctccatctcgtgaagccttctgatccagagacagttaccacttcagagttcttatgtacagagttaatacctctcccggaattcagcacattcactggtattgtaactattttgtgcctggctatttagcattcttcaccctctggacacaacattttcaggagtcgtagagattgaggggaaacacaattaaatgcacactattattccaggagaaaagtctgtcttaaatttctgacttcccttgtctccaagtgagctattctggagatgttagaatgaaccccaaaaggtcctatttctgtgtwttcccaagcctagagcaaacctaaatcacctattccaggcttgctttctcatcctgttccacaatttctccagagttaaagtaaagccaaagccagtttatcttccaacaccacaaaaagtcaggaaagagtaaactgcatntacttcatgggttttcttctcagcactcnnnnnnnnnnn

SEQ ID NO: 304221 - DNA, 543 bp, Homo sapiens
gtgaaggcagtactgaattcctaaggcaaaagatatgttttgggtaattgtcgctgtgaaaaatgggccattattactctgcaaagtcttaggcagcccaaatctaggaattatttcctttcgtagaagtttagcaacctcaattgccttttcagactgagtagaaaaagcctcaatccaactagtaaaggtgtcaatgaatactaataaatattaaaacactttacatgggggcatttgagtatagtctatttgccartcttcaccagggtacgttcccctatgctgaacaggccttactagaggaggaggtaaagattggttatctggtttattccaggtacataattcacaggcccgagttacctgctttactgttttaagaaagccttttcctataaaaagctgcaacattaattgaaacagggaatctcttcccaaatgagtagagttatgcaaatgcttaactattttccactgattagcatctggtattaacagtttgttgtcattgataagccagtcagaaggattttgaattaa

SEQ ID NO: 304222 - DNA, 654 bp, Homo sapiens
tgcaattccattaaaagcactagctattgaaaggcaagtagcaataacaaaaaactgttgcttttaggcaacaactagaaaatacttgcttgtcatgaatgtcctgtcttggttgtttaatcaagagtggaagcagacatgttacaggcagctggagaggctgcagtggctcaaaaggaatggccatgatgacaaggccaaaatctcactcataaaggaaggagatggcatgctactcttcaatgctgtcttctagagcttcttttccactgcaaggaagatccacctcccactagcacacccctcctcttccttgttgggatggcattttgccaagcattgtgccagatgccttctacatattagttcattaaattctcaccacaagcctaagaggaaggtattgcaacccatcttataaattattgtcattaagcgtcttacccagggttatattgccaataaatggtagaaactagggttagaaatcagatccttgtaagtcacgagtgatagagagtgaaatttacaccagtgaagagtaggcctatacaaaggttytctgtctttagccagaatgtgtgtataagggaaaatacagactcatcctttcagctttttcagattacttccttggctacatccacaagtggc

SEQ ID NO: 304223 - DNA, 494 bp, Homo sapiens
taagtggttacatggggactaggttaactctgtcatgcacttgaatgactagtagagataagcagagtgaactcagttaagctgagtrcaaaagccagtcaatgcggggaagaatatcttttccaacaaatggtgtggagcaattggatatccatggaccaaacaaacaaaaacaaaacctcatgccttatacaaaagttaactcaaaatagattatagatttaaatgtaaagcataaaaattttaaaagttttagaacaaaataaaggagaaaatcttcagtacatagagctttatgaaaagctcatagacataataccaaaagcatgatcataaaagaaaaaaaactggtaaattatgcttcatcaaaattaaaaacgtgctctgggaaatactttgttaagaaaaaaagacaagctacaaactgggagtaaatatttgaaaaccacatatctgataaagacctcatgtctagaatacatacagaactctca

SEQ ID NO: 304224 - DNA, 494 bp, Homo sapiens
taagtggttacatggggactaggttaactctgtcatgcacttgaatgactagtagagataagcagagtgaactcagttaagctgagtgcaaaagccagtcaatgcggggaagaatatcttttccaacaaatggtgtggagcaattggatatccatggaccaaacaaacaaaaacaaaacctcatgccttatacaaaagttaactcaaaatagattatagatttaaatgtaaagcataaaaattttaaaasttttagaacaaaataaaggagaaaatcttcagtacatagagctttatgaaaagctcatagacataataccaaaagcatgatcataaaagaaaaaaaactggtaaattatgcttcatcaaaattaaaaacgtgctctgggaaatactttgttaagaaaaaaagacaagctacaaactgggagtaaatatttgaaaaccacatatctgataaagacctcatgtctagaatacatacagaactctca

SEQ ID NO: 304225 - DNA, 565 bp, Homo sapiens
tcactgcctacctgttcaaagagtaaaataaaaaatattgataataccaaatgctgccaataatgtggaaaacctgaatttctcatatgttgttgataggactataaaacagcacagcyactctagaaaatagtttggtagtttcaaaacaatgtaaacctatacctattatgctatcatttatcccagagaaataaaagtttatgtccacacaaaaacctattcacaattgttcatagcagcattatttggaatagtcatacattgggactatttccactggtgagtggttttataaatatatctatactatgatgatatgatttggctgtgtccccactcaaatctcatgttgaattatcatcttcattgctggaggagaggcctagtgggaggtgactggatcatgggggcagatttcccccttgctgttctcatgatagtgagttctcacgagatctgattgtgtaaaagtgtatggcactttctcctttatctctctctctctctctctcctgattcaccattgtgaagaagatgtctgcttctcgtttgctttctgtag

SEQ ID NO: 304226 - DNA, 565 bp, Homo sapiens
tcactgcctacctgttcaaagagtaaaataaaaaatattgataataccaaatgctgccaataatgtggaaaacctgaatttctcatatgttgttgataggactataaaacagcacagctactctagaaaatagtttggtagtttcaaaacaatgtaaacctatacctattatgctatcatttatcccagagaaataaaagtttatgtccacacaaaaacctattcacaattgttcatagcagcattatttggaatagtcatamattgggactatttccactggtgagtggttttataaatatatctatactatgatgatatgatttggctgtgtccccactcaaatctcatgttgaattatcatcttcattgctggaggagaggcctagtgggaggtgactggatcatgggggcagatttcccccttgctgttctcatgatagtgagttctcacgagatctgattgtgtaaaagtgtatggcactttctcctttatctctctctctctctctctcctgattcaccattgtgaagaagatgtctgcttctcgtttgctttctgtag

SEQ ID NO: 304227 - DNA, 550 bp, Homo sapiens
gagagttcaataaatgtctgatttggattgtactagttacacacaaaaaaaccatcattttcaactggcattatttacaaacagaattctaaaacattgatgtagaatatctccagtacacctgtcgaggaagaaccttcattcccctggccatgtcttcctgcggggagagacccaagccactcttctctgtcatgaggaagagttagcttagttatctaataagtgacttcaaggaaaccraatgtgcccagtccagcccttcctgaggtttctcctttggctttccttactcctgagaggttttggctggtctgttctccatgtggtgaatgtagaggggagccttgtgggtttgaggtataagctctttccatgggagatgcatcatgaactccttttggctgtgaatccacgttggcgctgatattaggaccaaaggaaaggactgtggacagtataaacttttagatttatgtgacttgtccacagattcaagggttgtcaacctaaaataatttaaaagagttagaatttagtttaaagagtt

SEQ ID NO: 304228 - DNA, 574 bp, Homo sapiens
ttcttttaaacacttcattctttgataatacaaactttgtgaaactggtttcgcaaaaattataaatgaggcaattattacagtgaaggatatctgacttaactgactccatcttgcttctaacctccaagctgtcctggttcattcctgggcataggccaaattaactttggaatgcagttatagtttagctttgaaagagagatagtaacagtcctttcctaaaacaaaccctcttcctgcctaragactagactgcctttgcaggattaacaaattagccacaagattagaaattatggtcatgcataggggtcatgtacagcagtcatgcagctggaggctgcaagattctaaacctccaaaattgctcttaaggataatgtcactattgtaaaacctaagatcagcatttgagatattttgcatattttacacttgatggattaggtggtggcacccagggctcatctggtcttgtggcccctacccagaaactgactcagtgcaagagcacatttttgatgccctatgactttatctccgacctgaccaattagcactcctgactcac

SEQ ID NO: 304229 - DNA, 596 bp, Homo sapiens
catatcagggtattgagtctttcttgcctcccacactcaccatttttcctgaggcaaccggtttcaattcacattaattaataatatgcttgttaataacatgcttataatttatatattgagatcaactttgcacattatktacatttcattaaggattttgtttcctacacacttctattcattttcccctcttccttttgatattgttttaagtcagagtttcgctcttgttgcccaggctggagtgcaatggtgcgacctctgctcatcacaacctccgcctcccaggtccaagtgattcttctgcctcagcctcccaaggaggtaagattacaggcatgcaccaccacacatggctaattttgcattcttagtagagacggggtacctccatgttggtcagactggtcttgaacttccaacttcaggtgatcctcctgcctcggcctcccaaagtgctgggattacaggcatgagccactgcgcctggccttaaatcaggatttttgataaaattattaatcggaatttatattataaaactacctatatttttcttactgctgaaagttatatatttcctttcttataaa

SEQ ID NO: 304230 - DNA, 596 bp, Homo sapiens
catatcagggtattgagtctttcttgcctcccacactcaccatttttcctgaggcaaccggtttcaattcacattaattaataatatgcttgttaataacatgcttataatttatatattgagatcaactttgcacattatgtacatttcattaaggattttgtttcctacacacttctattcattttcccctcttccttttgatattgttttaagtcagagtttcgctcttgttgcccaggctggagtgcaatggtgcgacctctgctcatcacaacctccgcctcccaggtccaagtgattcttctgcctcagcctcccaaggaggtaagattacaggcatgcaccaccacacatggctaattttgcattcttagtagagacggggtacctccatgttggtcagactggtcttgaacttccaacttcaggtgatcctcctgcctcggcctcccaaagtgctgggattacaggcatgagccactgcrcctggccttaaatcaggatttttgataaaattattaatcggaatttatattataaaactacctatatttttcttactgctgaaagttatatatttcctttcttataaa

SEQ ID NO: 304231 - DNA, 237 bp, Homo sapiens
ttgcctggtctttgtactctgtaaaaatgttaagcaaatggtagtaaagaaagtggtttcattagataattcagtttcatrttttacctttactttacaaagttcaaagttaagttggaacgttttttaagaaaagaaaaaaagctatgaagttttttatgtaatttccagttgtttctcccaaatagattaatgcagcatagggtgttgccttaccttgtgtatatgtgtgtacat

SEQ ID NO: 304232 - DNA, 526 bp, Homo sapiens
cctttgactttcatattctcaggaatcttaacaactttataaccaggaatggcaagtggcaagaggttctctatattcaggctttcttctacttctaccttagatcccaatcctctctgtgtcaaacttgcatccctcatgaaatccttcttagtgaaaaccctccctgggtctctccctcttctgaaactccttttgaccctgcagatgaactccttctctattctcatccctctgcatcctctcctcgcccatctgaacmctccacgctggtggcccctcctgtccccaagccttcagctgcaaaccccactcctcctctttctctacctgttacccatttaaaaactgctcaaaccacctctgcccttctccctttctgggaagtggctggggtttaaggcattgcttacgttgttcatgtccctttctccatgtctgatttgtcgcagattgaagctatgagtatattcaaaaggcctttatgtttttctcatcacaaatcttgatttcctagaaaaggttt

SEQ ID NO: 304233 - DNA, 526 bp, Homo sapiens
cctttgactttcatattctcaggaatcttaacaactttataaccaggaatggcaagtggcaagaggttctctatattcaggctttcttctacttctaccttagatcccaatcctctctgtgtcaaacttgcatccctcatgaaatccttcttagtgaaaaccctccctgggtctctccctcttctgaaactccttttgaccctgcagatgaactccttctctattctcatccctctgcatcctctcctcgcccatctgaacactccacgctggtggcccctcctgtccccaagccttcagcygcaaaccccactcctcctctttctctacctgttacccatttaaaaactgctcaaaccacctctgcccttctccctttctgggaagtggctggggtttaaggcattgcttacgttgttcatgtccctttctccatgtctgatttgtcgcagattgaagctatgagtatattcaaaaggcctttatgtttttctcatcacaaatcttgatttcctagaaaaggttt

SEQ ID NO: 304234 - DNA, 513 bp, Homo sapiens
cccagcatatgccaatatctgtgcacactcaagtccagcagtcagccctccagactggaactcctcctacatgaagagccagaccttcatatacatgcattttgcatctttcaaataacgtattttcaatcagtgtttggttttaaaaatatgtgaatataagtggacccacgcattccaaggactaagctatgagtttttcttatcttgttcraatatccaagggatgtggggagtcatgccctgcaaaccataaattctcatcaggtgagttttatttaaccctatgtattgtgacttactttccaatctaactggcataacattacatgacaaagaagaaaatcaaaatatttatccccaaacatgtttctttgccatattttgaaatggccctacaaagctgtcctttgtggggaaaaaattgcatctgtaaagaatctctattaatatagctagatctttttcttccaggccctcccaatactgaagagattaactgagagtctagta

SEQ ID NO: 304235 - DNA, 513 bp, Homo sapiens
cccagcatatgccaatatctgtgcacactcaagtccagcagtcagccctccagactggaactcctcctacatgaagagccagaccttcatatacatgcattttgcatctttcaaataacgtattttcaatcagtgtttggttttaaaaatatgtgaatataagtggacccacgcattccaaggactaagctatgagtttttcttatcttgttcaaatatcyaagggatgtggggagtcatgccctgcaaaccataaattctcatcaggtgagttttatttaaccctatgtattgtgacttactttccaatctaactggcataacattacatgacaaagaagaaaatcaaaatatttatccccaaacatgtttctttgccatattttgaaatggccctacaaagctgtcctttgtggggaaaaaattgcatctgtaaagaatctctattaatatagctagatctttttcttccaggccctcccaatactgaagagattaactgagagtctagta

SEQ ID NO: 304236 - DNA, 598 bp, Homo sapiens
gattggctcaggggaggggtcatgtgatttagtaaagaccaatgactttactaaatgacttttagtaaatgactaaatgacttttagtaaagactaaggtttgtagtcattcttccaagaggctttacagaagcagcattctctctcccctgttggaggagaataaagaagcagtagctactgccatgatgcccccattgttactgacaacccctggcacctgccctttggtagaaaataacatgagcttctgaaaatgttgttgagctgattgaatcttccatccccaaagcctgcactgactctgggcttccttttaggtgaaccaatccattttcttattctggaagccagtttgagcctggcttyttgatagttgcagccaaatgaccaagtctccttgcccttaatttcttctctacaaactgggagagtagaattagataatctaagttttcctcaaactctcaatgtctgtgaactgcatattcaggtactagcactaacaacattaacactatttgtcaattactaaagaagataaatgttattataggtatgtttctaaataactttcatttttagaaacagtaaaatg

SEQ ID NO: 304237 - DNA, 598 bp, Homo sapiens
gattggctcaggggaggggtcatgtgatttagtaaagaccaatgactttactaaatgacttttagtaaatgactaaatgacttttagtaaagactaaggtttgtagtcattcttccaagaggctttacagaagcagcattctctctcccctgttggaggagaataaagaagcagtagctactgccatgatgcccccattgttactgacaacccctggcacctgccctttggtagaaaataacatgagcttctgaaaatgttgttgagctgattgaatcttccatccccaaagcctgcactgactctgggcttccttttaggtgaaccaatccattttcttattctggaagccagtttgagcctggctttttgatagttgcagccaaatgaccaagtctccttgcccttaatttcttctctacaaactgggagagtagaattagataatctaagttttcctcaaactctcaatgtctgtgaaytgcatattcaggtactagcactaacaacattaacactatttgtcaattactaaagaagataaatgttattataggtatgtttctaaataactttcatttttagaaacagtaaaatg

SEQ ID NO: 304238 - DNA, 608 bp, Homo sapiens
gaaacaggctattgaaagctcacctcaaccacaccttggaattaaaagtcaaagaaatttaatgttgatcgtatgtttgtctacctgctagatatgaatcaaatttatgatatagtaaagttgyatttttaacatgacccaggtgtattttataatacattagtgcctattttatatttcaggtatattttagtctataatacattagtgcctattttataatccatgtacttagtacatttatgcctattttatgacctcaaacataattttactacttgtatgattataaaggtttatagatgttgtggttttacatatattttatattctcagtctggtttgtaatttctttcaaacaagagtgtaacctccaaagcattcaagactgatcctgcattctataagaatctacatgacggcatggtctctggagacacagagcaaaaattaaggcctggccacatgccatagatacttttatataaaatttgatttattatcataataaaatggtcaggaatttttggctggtttttccttgaacctataattttacaaaattacaaacacctatgagggttttccatagtttgtattttccaaaa

SEQ ID NO: 304239 - DNA, 608 bp, Homo sapiens
gaaacaggctattgaaagctcacctcaaccacaccttggaattaaaagtcaaagaaatttaatgttgatcgtatgtttgtctacctgctagatatgaatcaaatttatgatatagtaaagttgtatttttaacatgacccaggtgtattttataatacattagtgcctattttatatttcaggtatattttaktctataatacattagtgcctattttataatccatgtacttagtacatttatgcctattttatgacctcaaacataattttactacttgtatgattataaaggtttatagatgttgtggttttacatatattttatattctcagtctggtttgtaatttctttcaaacaagagtgtaacctccaaagcattcaagactgatcctgcattctataagaatctacatgacggcatggtctctggagacacagagcaaaaattaaggcctggccacatgccatagatacttttatataaaatttgatttattatcataataaaatggtcaggaatttttggctggtttttccttgaacctataattttacaaaattacaaacacctatgagggttttccatagtttgtattttccaaaa

SEQ ID NO: 304240 - DNA, 608 bp, Homo sapiens
gaaacaggctattgaaagctcacctcaaccacaccttggaattaaaagtcaaagaaatttaatgttgatcgtatgtttgtctacctgctagatatgaatcaaatttatgatatagtaaagttgtatttttaacatgacccaggtgtattttataatacattagtgcctattttatatttcaggtatattttagtctataatacattagtgcctattttataatccatgtacttagtacatttatgcctattttatgacctcaaacataattttactacttgtatgattataaaggtttatagatgttgtggttttacatatattttatattctyagtctggtttgtaatttctttcaaacaagagtgtaacctccaaagcattcaagactgatcctgcattctataagaatctacatgacggcatggtctctggagacacagagcaaaaattaaggcctggccacatgccatagatacttttatataaaatttgatttattatcataataaaatggtcaggaatttttggctggtttttccttgaacctataattttacaaaattacaaacacctatgagggttttccatagtttgtattttccaaaa

SEQ ID NO: 304241 - DNA, 608 bp, Homo sapiens
gaaacaggctattgaaagctcacctcaaccacaccttggaattaaaagtcaaagaaatttaatgttgatcgtatgtttgtctacctgctagatatgaatcaaatttatgatatagtaaagttgtatttttaacatgacccaggtgtattttataatacattagtgcctattttatatttcaggtatattttagtctataatacattagtgcctattttataatccatgtacttagtacatttatgcctattttatgacctcaaacataattttactacttgtatgattataaaggtttatagatgttgtggttttacatatattttatattctcagtctggtttgtaatttctttcaaacaagagtgtaacctccaaagcattcaagactgatcctgcattctataagaatctacatgayggcatggtctctggagacacagagcaaaaattaaggcctggccacatgccatagatacttttatataaaatttgatttattatcataataaaatggtcaggaatttttggctggtttttccttgaacctataattttacaaaattacaaacacctatgagggttttccatagtttgtattttccaaaa

SEQ ID NO: 304242 - DNA, 572 bp, Homo sapiens
tgatggacatttctgttgaccaatataggaggaggctataaggaatgtgtacaggatgaaaagctgagtggagagcaagcatgggctccactacttactgggttaatggyttataccaaagctgattgcaaggaggtatttcaaattggtctttccccagcattgcttttctattacactggccccaaatgcctgcctcctgagagttctccaggagctcaatgttctgctctggctatgctgtgcttttgatgtgagttgatgacagaaacaattctggaatatacctcaaactcatggaacaaaaacatgacttgcattttcataattgcaacagtctaaaagtctacagtcttggtatgatggactgatttgtgtcacaccaaaattcatatgttgaagtcctaaccccctctcagaatgtggccatgtttgaaggtaggacctttgaagaagtaatttagttaaatgaggtcaatttctagaggctgcccacaatccgtggctcgtgacccctcctaccctcatcaaagccaacaatgtcacatgtgtctgatgctgctttctttatc

SEQ ID NO: 304243 - DNA, 572 bp, Homo sapiens
tgatggacatttctgttgaccaatataggaggaggctataaggaatgtgtacaggatgaaaagctgagtggagagcaagcatgggctccactacttactgggttaatggtttataccaaagctgattgcaaggaggtatttcaaattggtctttccccagcattgcttttctattacactggccccaaatgcctgcctcctgagagttctccaggagctcaatgttctgctctggctatgctgtgcttttgatgtgagttgatgacagaaacaattctggaatatacctcaaactcatggaacaaaaacatgacttgcattttcataattgcaacagtctaaaagtytacagtcttggtatgatggactgatttgtgtcacaccaaaattcatatgttgaagtcctaaccccctctcagaatgtggccatgtttgaaggtaggacctttgaagaagtaatttagttaaatgaggtcaatttctagaggctgcccacaatccgtggctcgtgacccctcctaccctcatcaaagccaacaatgtcacatgtgtctgatgctgctttctttatc

SEQ ID NO: 304244 - DNA, 572 bp, Homo sapiens
tgatggacatttctgttgaccaatataggaggaggctataaggaatgtgtacaggatgaaaagctgagtggagagcaagcatgggctccactacttactgggttaatggtttataccaaagctgattgcaaggaggtatttcaaattggtctttccccagcattgcttttctattacactggccccaaatgcctgcctcctgagagttctccaggagctcaatgttctgctctggctatgctgtgcttttgatgtgagttgatgacagaaacaattctggaatatacctcaaactcatggaacaaaaacatgacttgcattttcataattgcaacagtctaaaagtctacagtcttggtatgatggactgatttgtgtcacaccaaaattcatatgttgaagtcctaaccccctctcagaatgtggccatgtttgaaggtaggacctttgaagaagtaatttagttaaatgaggtcaatttctagaggctgcccacaatccstggctcgtgacccctcctaccctcatcaaagccaacaatgtcacatgtgtctgatgctgctttctttatc

SEQ ID NO: 304245 - DNA, 560 bp, Homo sapiens
tgtctctaaactattctctagcttagctccgagagtataactcaagccgaacttgaatcatgataaagtcacattatcctctgcactaggagtggagaagtgtggagtcccatcctctccaacagcatttattgaacctccctgtggtgccagccactgagctagatgtgggaagtgtagagactactggcytagaccatgacctttaagagtttgtgccgttatctgtgaggttatgtgatgatctgaggagcctaaaacaggttgtttttagaaaagttctatactacaaaataagatgagaaaacagataatcccattgcttaatatgttggtatgcataattccatcttactactcatgtatgatcgctttatcacctgtttatctatttgtctgtcttcataaagttgttttgtattaatggaatgagtccatatgtatatattattctgcaatttggttttttcatttaacaatgtatcacagcatttttaagacccagatttctagtggtatttcattcttcttaataggtacataatacttattgaatagat

SEQ ID NO: 304246 - DNA, 546 bp, Homo sapiens
ggtctttatcttcagctctgataagcacataagggcagggactgtgtctgtcttaatattgaatttttaatccttagcacagcacytagtccatatttactgagagctgtatgagagtcagatttatatcgtaattacattattgtaattacacatgaacagagaacactatcatgtttttactatgtgcagggcactgttctatatattttgtatgtattattttgcctgtttgtcacaagcaccctataaactctctctcccattttacagacaaggaaagtaaggctgagaatatgtaactcacccaggggaactggcagagtcagtatttgaatccaggctgtctggttcctgagctctctcatggactcttccattaaatgtctctcatttatatgtgtctatattttgtcacaatgcaaaagcatctgctgttagcaaaataaaatgcactttttttttttttttttttttgagatggagtttcgctcttgttgcccagtctggaatgcagtggtgcaatctcagctcactgcaacctcc

SEQ ID NO: 304247 - DNA, 595 bp, Homo sapiens
tgtcccagctcagggcaatagagtagtttgtctaagcatgcttctctgggccacttatggatacttcctctccagtttgcaataattctatgtggaacctcaaggtccacgaaaaaggcccaatggtggtcactttgccataacatcagtgaaacttacatacaaggtgttgcaggctgggtccataggaagcacgtgaagaatagcttgcaggaagttgttgaggaatgctctcagaatgaacactaacagagaaagggcaggaagcaggactgaaggaagagggtaagggtgagtaatagtgtgagtaaagacatggagacaggaataaaatcaatcygtttgatcgcagtgtaggatgacatcagaacaacaggataaagcctgcaaaaggatattgaggcaagatagttggagatgatatcaagagccaggttaaagttttgagccaataaagaatgctgaacaagagaggaatctaaattccaagagtgaacaggaatgttgaagccatgggaaactctaaggaggaagacctgaggagatacagggcagaaaaaggtaagctctttggattagcttcaaatgagagatg

SEQ ID NO: 304248 - DNA, 547 bp, Homo sapiens
taggactcctactttttaatttaagattagaaatttttcaggttggaattgrtgaaactcaaaacatgccaccccaaaatatggcaccttagtatattaaattttttgttgttgttgagacagggtcttactctgtcacttaggatgcagagcacaatcatagctcactgcagcctcaatctccagggcttagacaatcctcccacctcagcatcccaagtagctaggactacaagtgtgcgacatcaaacctggctaactttaaattttttctgtagaaatggtgccttgctatgtctcccaggtggtctcaaactcctgggctcaagcattcctcccacttcagcctcccaaagtgttggcattataggcatgagtcattgcacccagcctacatattgaatattttaaactaatgtaatttgagaaaatggcatatgcaggaagattggagtgaagcagattataagtcactcctgtgagtggtgtcttccccgtgccccgggaaaaggaacatcctgtctccaaagacaaggggacacagaat

SEQ ID NO: 304249 - DNA, 547 bp, Homo sapiens
taggactcctactttttaatttaagattagaaatttttcaggttggaattgatgaaactcaaaacatgccaccccaaaatatggcascttagtatattaaattttttgttgttgttgagacagggtcttactctgtcacttaggatgcagagcacaatcatagctcactgcagcctcaatctccagggcttagacaatcctcccacctcagcatcccaagtagctaggactacaagtgtgcgacatcaaacctggctaactttaaattttttctgtagaaatggtgccttgctatgtctcccaggtggtctcaaactcctgggctcaagcattcctcccacttcagcctcccaaagtgttggcattataggcatgagtcattgcacccagcctacatattgaatattttaaactaatgtaatttgagaaaatggcatatgcaggaagattggagtgaagcagattataagtcactcctgtgagtggtgtcttccccgtgccccgggaaaaggaacatcctgtctccaaagacaaggggacacagaat

SEQ ID NO: 304250 - DNA, 547 bp, Homo sapiens
taggactcctactttttaatttaagattagaaatttttcaggttggaattgatgaaactcaaaacatgccaccccaaaatatggcaccttagtatattaaattttttgttgttgttgagacagggtcttactctgtcacttaggatgcagagcacaatcatagctcactgcagcctcaatctccagggcttagacaatcctcccacctcagcatcccaagtagctaggactacaagtgtgcgayatcaaacctggctaactttaaattttttctgtagaaatggtgccttgctatgtctcccaggtggtctcaaactcctgggctcaagcattcctcccacttcagcctcccaaagtgttggcattataggcatgagtcattgcacccagcctacatattgaatattttaaactaatgtaatttgagaaaatggcatatgcaggaagattggagtgaagcagattataagtcactcctgtgagtggtgtcttccccgtgccccgggaaaaggaacatcctgtctccaaagacaaggggacacagaat

SEQ ID NO: 304251 - DNA, 436 bp, Homo sapiens
taccttgggtgtctgatgaaggttcccagtaacctgagtcctctgggctgaggttctttgtggcagccacactctctggtatgacctgtgatcatcctctgctttggcaaggggaggacatttttaaccacctgagcaggaaacagtgacttcctccttggcatcccatctgaatttaatcccttctgaggattaaatcctgtggatgtttacgtgtcctctttgattttctttttcttttcaattttcctcagttacttcagaaagaaaatccttttctccaattttatcatgtcttctctaagccaaaagaggatgattgagttatcacrgctgataagcattaagagtcagtgatactgttttatatatattaaaaaatgtctgtttcagacttggttctgccatgcaatgattgtttctaatttctaattat

SEQ ID NO: 304252 - DNA, 611 bp, Homo sapiens
taacgcatacattaattatcctgaatagcctttccacaatgtatacatacatcaaaacattatgttatacaccatatatgtataatttttacttgtcaattaaagtaaataaatagtgtccagcagacacaacatgaaatgccaaaaattgtgggcagatacatgtgaaattctccttgggcaattgataaagaatgaaaaaataacacacatcaagtattcaattggagatgcattttgagagaatgaaggaaaagtagtctgcaaataattagtggctgataattttatataaattgcatatgcacaattgagaacatatataataaagcatgtatgtaataatatgtatgatgtagatattgatatatttcccagctatgtccaatataaargtctagaaaaaaatcatcagacctccagtagcaaaataaatcttcagtattaaaattgtagttttgattgcgaatgagaatctttagcatcaaagttgtggttttgtcattttcccactaaaagaatccaaacatctttgagaaatgcatgggtccaagtgtggatcaagaaatgtagaatatcagtctggaacatcttacattagatagtaaaga

SEQ ID NO: 304253 - DNA, 641 bp, Homo sapiens
tggctgataattttatataaattgcatatgcacaattgagaacatatataataaagcatgtatgtaataatatgtatgatgtagatattgatatatttcccagctatgtccaatataaaggtctagaaaaaaatcatcagacctccagtagcaaaataaatcttcagtattaaaattgtrgttttgattgcgaatgagaatctttagcatcaaagttgtggttttgtcattttcccactaaaagaatccaaacatctttgagaaatgcatgggtccaagtgtggatcaagaaatgtagaatatcagtctggaacatcttacattagatagtaaagaagctctcatgactaattatagggtcttgtgattgattcctgcctatcaaaccaattttaaaaggccactattaatgggacaatttgagcaggataataactgcaataaatggaaatccatcaaatatttaaatgcatgagttcatgatgataagaaaataattagagactcaaggaactcctctttaaaaacgatagttaaatggaaatggaagggtaagtaagatagagccagtgagaatgccacagatagtatatgtgcacagtatgaagatggaagaattcagtcctatgtgttgggagaca

SEQ ID NO: 304254 - DNA, 641 bp, Homo sapiens
tggctgataattttatataaattgcatatgcacaattgagaacatatataataaagcatgtatgtaataatatgtatgatgtagatattgatatatttcccagctatgtccaatataaaggtctagaaaaaaatcatcagacctccagtagcaaaataaatcttcagtattaaaattgtagttttgattgcgaatgagaatctttagcatcaaagttgtggttttgtcattttcccactaaaagaatccaaacatctttgagaaatgcatgggtccaagtgtggatcaagaaatgtagaatatcagtctggaacatcttacattagatagtaaagaagctctcatgactaattatagggtcttgtgattgrttcctgcctatcaaaccaattttaaaaggccactattaatgggacaatttgagcaggataataactgcaataaatggaaatccatcaaatatttaaatgcatgagttcatgatgataagaaaataattagagactcaaggaactcctctttaaaaacgatagttaaatggaaatggaagggtaagtaagatagagccagtgagaatgccacagatagtatatgtgcacagtatgaagatggaagaattcagtcctatgtgttgggagaca

SEQ ID NO: 304255 - DNA, 641 bp, Homo sapiens
tggctgataattttatataaattgcatatgcacaattgagaacatatataataaagcatgtatgtaataatatgtatgatgtagatattgatatatttcccagctatgtccaatataaaggtctagaaaaaaatcatcagacctccagtagcaaaataaatcttcagtattaaaattgtagttttgattgcgaatgagaatctttagcatcaaagttgtggttttgtcattttcccactaaaagaatccaaacatctttgagaaatgcatgggtccaagtgtggatcaagaaatgtagaatatcagtctggaacatcttacattagatagtaaagaagctctcatgactaattatagggtcttgtgattgattcctgcctatcaaaccaattttaaaaggccactattaatgggacaatttgagcaggataayaactgcaataaatggaaatccatcaaatatttaaatgcatgagttcatgatgataagaaaataattagagactcaaggaactcctctttaaaaacgatagttaaatggaaatggaagggtaagtaagatagagccagtgagaatgccacagatagtatatgtgcacagtatgaagatggaagaattcagtcctatgtgttgggagaca

SEQ ID NO: 304256 - DNA, 531 bp, Homo sapiens
taggttgtctcttcttgcattctctggtttttggtatgcttggttattctccgtgaagaaacattctagctgccttgcctctcttatgcttttcctcctttctttggcacaatattattgttctgtttttaaaaaggagactacaatttttcaaaaatttcargttgtattttagatatagagggtacatgagcagagggaccactatatatatatatttaccatattgtacttaagagaaaaaagaataaacaagataatttatttcaccctgagtcattatagatctattcatcaaagttcatagcattaattatcccttttttcccttgttgagtgagtgtacattttctaccatttctgccaaacctttggtaattcgttaggttcctttcagaggtgtggcactttggatgttttcaatgggagcattctttaaggatggctttgtgctgtgaactctgttaataatgctttggaccaaatctattgaataaatgtatcaagcttaaaaatagtattaataatcaa

SEQ ID NO: 304257 - DNA, 531 bp, Homo sapiens
taggttgtctcttcttgcattctctggtttttggtatgcttggttattctccgtgaagaaacattctagctgccttgcctctcttatgcttttcctcctttctttggcacaatattattgttctgtttttaaaaaggagactacaatttttcaaaaatttcaggttgtattttagatatagagggtacatragcagagggaccactatatatatatatttaccatattgtacttaagagaaaaaagaataaacaagataatttatttcaccctgagtcattatagatctattcatcaaagttcatagcattaattatcccttttttcccttgttgagtgagtgtacattttctaccatttctgccaaacctttggtaattcgttaggttcctttcagaggtgtggcactttggatgttttcaatgggagcattctttaaggatggctttgtgctgtgaactctgttaataatgctttggaccaaatctattgaataaatgtatcaagcttaaaaatagtattaataatcaa

SEQ ID NO: 304258 - DNA, 616 bp, Homo sapiens
gtattaataatcaaagataaagtctggctacaaagatatttagacttcttgaatggcttctaaattggtgataacacttattttcttgtgggtctcatatactgtctcagaagcaaactttgaaagaggaatccccaaaatacgttgagcctcagtacatttctttatttaatttattttttgacacagggtctggctstgttacttaggctggagtgcagtggtgcaatcttggctcattgcaacccctgcctcctgagttcaagcgattattgtgcctcagcctcttgaatagctgggactactgatatgcgccaccatgcccagctaattttttgtattttagtaggcacgagatttcaccatgttgcccaggttggttttgaactcctgagctcaggcaatccacccaccacagcctctcagtgttaggattataggagtgagacaccgtgctgggccaaaccacagtacctttagatctcaatggttttccagtgtaacaagtgaaaaatgatactcatttggatgtgtaaattatagagtttgctttatactttatgctacattctcgccatatactgtcagatgcattattgggattaaagactctcca

SEQ ID NO: 304259 - DNA, 492 bp, Homo sapiens
gacaataacgaataaagcctctataaacctctgtgtaggtttttgtgtggacatgtttttgattcctttggataataagaaggagcacaattactggatcatatggtrggagtatgtttagctttgtgagaaattgccaaactgtcttccaaagtggctgtactgtttctcacaccagaaatgaacaagagttcttgttattccacatccttgccagcatttggtgctctcagtgttctggatttgggccattctaagaggtagtatcttattgttatcttaatttgcattttcctgatgacatgtaatgtgaagcatcttttcatacgcttatttgtcatttgtgtatcttctctgatgaggtgtctgttacggtctttgacccgttttttaattgggttgtttgttttctcattgctgagttttaagagttcttttattttggaatacagtcctttatcaggtatttccattgcaaatattttctcccag

SEQ ID NO: 304260 - DNA, 556 bp, Homo sapiens
ttatttaacttttccctgtctgaagcatgagggaatttctcccagtattcactgttgtgagtctcctcacaaaactgtggagacctccaatgactggatccctttgcaagttttatctcttggtcttgtctacactatgtcttcagtaattcatcaattacatttcaggtttccctacatagtttccttggtggtttctgctccagtgagttgcccttctttgtattctcttgttgttctctccaatttagggggaattggtttgttccatgatctcaattctttgatggatctaaaaagagttgttgacttttttagtttattcagctttttactagttagaatggagtggtgacttccaagtttcttatgtgccaagaatagaaactggaagttcatgttttaaaatctctcagtaattcaatrcttttcattgatgagtagtattctattgtatctatataccaaaatttgtttatactctccccagctgatgggcacttatgttgttttcatttttttttttttgctagtgtgaatacagttactattttgt

SEQ ID NO: 304261 - DNA, 571 bp, Homo sapiens
ttgacctcatacgttaaatgttaaatatgttaaaattcctttctccactattttctgaaagagttgtgtatattatttcttactaagtgtttgrcagaaatcaccagtgaagttacctgagcttagacttttccttgtgggaggttttaaattgtgaatttaattatttaacaattaataatgaatattaagatagtaatataattaagattatctagtttttcctataattcttaataatttgtgttattcagagtatttgccaattttatcaaattgactggcattgttttttctgaatatgtccttattatctttttaagacttgtagaatctgtagtaatttcttttattcataattatggttatttatattttctctctttcttgagatatcctttaggatatacctaaggtatatcttgagatataccttaggtggtagaaggcagctggtgtgttcagtgatgtaggttgtcagtcttcttccaagacacaaggaagaagattctagctcttcagtctccttatgttctcctaatcttggggcaagagcagaaaattcagtcta

SEQ ID NO: 304262 - DNA, 571 bp, Homo sapiens
ttgacctcatacgttaaatgttaaatatgttaaaattcctttctccactattttctgaaagagttgtgtatattatttcttactaagtgtttggcagaawtcaccagtgaagttacctgagcttagacttttccttgtgggaggttttaaattgtgaatttaattatttaacaattaataatgaatattaagatagtaatataattaagattatctagtttttcctataattcttaataatttgtgttattcagagtatttgccaattttatcaaattgactggcattgttttttctgaatatgtccttattatctttttaagacttgtagaatctgtagtaatttcttttattcataattatggttatttatattttctctctttcttgagatatcctttaggatatacctaaggtatatcttgagatataccttaggtggtagaaggcagctggtgtgttcagtgatgtaggttgtcagtcttcttccaagacacaaggaagaagattctagctcttcagtctccttatgttctcctaatcttggggcaagagcagaaaattcagtcta

SEQ ID NO: 304263 - DNA, 571 bp, Homo sapiens
ttgacctcatacgttaaatgttaaatatgttaaaattcctttctccactattttctgaaagagttgtgtatattatttcttactaagtgtttggcagaaatcaccagtgaagttacctgagcttagacttttccttgtgggaggttttaaattgtgaatttaattatttaacaattaataatgaatattaagatagtaatataattaagattatctagtttttcctataattcttaataatttgtgttattcagagtatttgccaattttatcaaattgactggcattgttttttctgaatatgtccttattatctttttaagacttgtagaatctgtagtaatttcttttattcataattatggttatttatattttctctytttcttgagatatcctttaggatatacctaaggtatatcttgagatataccttaggtggtagaaggcagctggtgtgttcagtgatgtaggttgtcagtcttcttccaagacacaaggaagaagattctagctcttcagtctccttatgttctcctaatcttggggcaagagcagaaaattcagtcta

SEQ ID NO: 304264 - DNA, 571 bp, Homo sapiens
tacttgggacagaggagggatgaatgaaggcttttcctatcgttgtttrttgccttccgggagagtggaatttctacagtgatttacaattaactggagactgagcaatctggaagtgccactttgcagaacattatggaatgccattctttggacatttttacaagtggggagggataagcatggtataagagaaggagctctggattgaggttttaatgtatttcagttcccgtgctaagtactttacattacattacagtgacaccatggtcacaggcttttgagtcaggaaatctgggttggatgtgaactccccacttagcattatgggatgttaggtgagttatttaacccatctctgctttatacccttatctaataagaaaataataatttatcagccttagaaacttgttaccattaattcttaaatgtgtccataagacaaataatactattgtttccactttacagatgacaaaacagatgattagagaggttgcataacttgcccgaggtcacactcctagttcaatggcaagatggaatctgagcctgggccagtttg

SEQ ID NO: 304265 - DNA, 571 bp, Homo sapiens
tacttgggacagaggagggatgaatgaaggcttttcctatcgttgtttgttgccttccgggagagtggaatttctacagtgatttacaattaactggagactgagcaatctggaagtgccactttgcagaacattatggaatgccattctttggacatttttacaagtggggagggataagcatggtataagagaaggagctctggattgaggttttaatgtatttcagttcccgtgctaagtactttacattacattacagtgacaccatggtcacaggcttttgagtcaggmaatctgggttggatgtgaactccccacttagcattatgggatgttaggtgagttatttaacccatctctgctttatacccttatctaataagaaaataataatttatcagccttagaaacttgttaccattaattcttaaatgtgtccataagacaaataatactattgtttccactttacagatgacaaaacagatgattagagaggttgcataacttgcccgaggtcacactcctagttcaatggcaagatggaatctgagcctgggccagtttg

SEQ ID NO: 304266 - DNA, 571 bp, Homo sapiens
tacttgggacagaggagggatgaatgaaggcttttcctatcgttgtttgttgccttccgggagagtggaatttctacagtgatttacaattaactggagactgagcaatctggaagtgccactttgcagaacattatggaatgccattctttggacatttttacaagtggggagggataagcatggtataagagaaggagctctggattgaggttttaatgtatttcagttcccgtgctaagtactttacattacattacagtgacaccatggtcacaggcttttgagtcaggaaatctgggttggatgtgaactccccacttagcattatgggatgttargtgagttatttaacccatctctgctttatacccttatctaataagaaaataataatttatcagccttagaaacttgttaccattaattcttaaatgtgtccataagacaaataatactattgtttccactttacagatgacaaaacagatgattagagaggttgcataacttgcccgaggtcacactcctagttcaatggcaagatggaatctgagcctgggccagtttg

SEQ ID NO: 304267 - DNA, 585 bp, Homo sapiens
aaggaggagcaaagtcacgtcttacatggtggcagccaagagagcatttgcaggggaactctcccttataaaactatcagatctcatgagacttattaactrtcacaaaaataacacaggaaaaacctgcccccatgattcaattacctcccacgggttccctcccatgactcgtgggaattatgggagctgcaattcaaggtgagccaagccctatcagatgctataagctgtatgctaagcaaatgcagaaagacacagataggacataagatcaagggcacatgtactgagcaaataatatttatgcagaaagacacagataggacataagatcaggggcacaagtactgaacaaatcattccgttgcattttgtagatgtgggttgcccagacggggtgttgtcattagaggccctggataagaaaacaagggataggaaaagaaacttggtaaggttcatggaggaagtagagtgtcataggatgggtcagtgataaagtctgcctgatgatttgtggaaacaaagaacatattctggtccaaataaaatattgagaaagggcatcagcagaagtaaaat

SEQ ID NO: 304268 - DNA, 585 bp, Homo sapiens
aaggaggagcaaagtcacgtcttacatggtggcagccaagagagcatttgcaggggaactctcccttataaaactatcagatctcatgagacttattaactgtcacaaaaataacacaggaaaaacctgcccccatgattcaattacctcccacgggttccctcccatgactcgtgggaattatgggagctgcaattcaaggtgagccaagccctatcagatgctataagctgtatgctaagcaaatgcagaaagacacagataggacataagatcaagggcacatgtactgagcaaataatatttatgcagaaagacacagataggacataagatcaggggcacaagtactgaacaaatcattccgttgcattttgtagatgtgggttgcccagacrgggtgttgtcattagaggccctggataagaaaacaagggataggaaaagaaacttggtaaggttcatggaggaagtagagtgtcataggatgggtcagtgataaagtctgcctgatgatttgtggaaacaaagaacatattctggtccaaataaaatattgagaaagggcatcagcagaagtaaaat

SEQ ID NO: 304269 - DNA, 585 bp, Homo sapiens
aaggaggagcaaagtcacgtcttacatggtggcagccaagagagcatttgcaggggaactctcccttataaaactatcagatctcatgagacttattaactgtcacaaaaataacacaggaaaaacctgcccccatgattcaattacctcccacgggttccctcccatgactcgtgggaattatgggagctgcaattcaaggtgagccaagccctatcagatgctataagctgtatgctaagcaaatgcagaaagacacagataggacataagatcaagggcacatgtactgagcaaataatatttatgcagaaagacacagataggacataagatcaggggcacaagtactgaacaaatcattccgttgcattttgtagatgtgggttgcccagacggggtgttgtcattagaggccctggwtaagaaaacaagggataggaaaagaaacttggtaaggttcatggaggaagtagagtgtcataggatgggtcagtgataaagtctgcctgatgatttgtggaaacaaagaacatattctggtccaaataaaatattgagaaagggcatcagcagaagtaaaat

SEQ ID NO: 304270 - DNA, 614 bp, Homo sapiens
ttgcaaactaaaattcaaagagaactgtaatcctgcttgttgctgttcatcraaagatgaccttgtaatatttgagataatgatttttaaggattatgcatatcttgggttattcctaaatgcatatgaaataactcaaaatatccatataacccttgtttggtttgatagacagcatatgaaaaacctgtccttgaattatctaaaagccctctttaatttgtgtaaaatgtggtcttgaataatttttttaaataaaataatgccccttaatagttattcaagatgccctatgtcttcacaataggttttcctgggctctcacctgtaaataaattttccattctgttgtccttggatttgccgtgttaacaaatgtgtgacttctgtaaaagtgctgatgtgtgttttatgaatgtgtcccttgatgctaatatcagtacagtcaatttgcagtaattactctgttgaagaattcaccactagcaaaacacagacacatagtatattgtaaaaatacctccagaatgtaacacatggaattctacagctttctgttggttgaatcacacacgttaattgttcatgtaaccgtggaaaaatctggtataaca

SEQ ID NO: 304271 - DNA, 606 bp, Homo sapiens
ttgtgggttctctattatgttctcagaatctatgtgtttatccttccatcaatatcaccttaccttaattactatagcattataacaggtcttcatatcaggtagagtgattcctaccactttattcttatttgtcaagattgtttcagttatcctagagcctgtgccttcctccataaattttataataagcttatctatgtctataaaaaaccttggtgagattttgataagagttgtattaaacctatagatcaacatggggagaattgagatttttgctatgttgagtcttctaacccatgaaattctactttttgtctcctttgatttttttaattaacattttgtaattttcagcatacagattctatacatattttgttaaggcatatctaagtatctcattttatttggagtaatcataaatggtactgtattttaatgtcagtttctacatgttagtatatagaaaaatgactgatttgggggtttgaatgatttttcaaaaagttttccgaactcgaagatttcttgcagtgtyatgtcataactattcattagttaagtcattcaacagatatctgctgggagacttctctgttc

SEQ ID NO: 304272 - DNA, 596 bp, Homo sapiens
ttatcacagcagtcataatagaagtctaagaagtaggcattctccttagagaaatgagcggatatctgtgtatgaggagaagctacagagtgaggccaggagagttgggggtgggtatttttaatatggcagttgggcacagtcaggcaagctcacatattaagaaagcatctgtctatctctaagggactttacytaaattaatttaaaacaaaatagctgttagaattcccacttcatagaagaagaaagcaggcctgggagagatgacttgcccaggtcacatagggaagtgaaagctgacccctcaatggtacctccaaaaccttctagtcctcacatcctccttctctacatttctatatttattattgaagtctgtgttttaactacactgaagggattgggtagaaaaattgtcacattctggacacaactgagtgttcataaatatgtcaacattagtggggctgtcactgctggcccaggtgcagaaggtatagttactgccccaacacaattgactctcatccatcttaatagtgatggcaagcagataaatcaagcagttaagtctcctctgtgttaaacaaagc

SEQ ID NO: 304273 - DNA, 407 bp, Homo sapiens
gttggctctacgtcaaaatgcatccagaatttgaccacttaacatcttctccactgccattactctgctccacgccatcattaatgttgcctggatcatgtaggagcctcctaactggttttgcctcttctcttgtcccatggagttaatttgagaataaacagcaccagattgatcctgccaaaccttagttaaatcttatcactcttcgactcaaatcctttcagcgatgtcgtctctagctcagartacaaaacaaagcccttataatgatttaaaaactcttccatgatgagcccacgattatcttttggatctaaattcctactcacactgttcttgccacactaacctctttgccatttgcttaaacactccagacatataattccactccaggtggtttt

SEQ ID NO: 304274 - DNA, 520 bp, Homo sapiens
tcccaatctgcttatcttgcagcatgttttgtaaattttttctgtgatatagagattctgggtgtcaggatgagaatctgtccctttgaactgacaatagctcatagatcaagtcaactaacaggcaagaagcagaagaggtattaacatgatacatattggaatattttacatgtatgtataaattacacattcatattttcagattttacttttgcaaatggttttatcatcacttaattttttctcatagaaaaattttggcttattttactttcacctcacagtataagtccagtcttaaaataaccatttctacstaagaaagagaagaagtaaggattacaaagcatagtaatgcagcacctttcaaagttgcaactttcaaagtgaatattgcttttctcttttttctccctctcaataaatgctccaagacatccattagctgttcctagaaaaaaaattacctttatgaaatatggaaaattggaagcaaataatgctaaaaatgtaagta

SEQ ID NO: 304275 - DNA, 535 bp, Homo sapiens
cctttcctttttcacagcatgtctatggatgtgttagatggcagrctcaggatacttcgtatttgttatcagagctatgcatttcattgatgagtaatacaagttcaagaacatgatttcctcttttaagcagggaaatttttaccagtgttttcccatcctggacatcaagccactttatctacaagcattttctcttcacttattcattaatgatatcttctttgaaagttatttgctgagtttggtgatgttttttattctacctataaaaattgtaagagttttcttcagaaaaataggctgagacattgagtagaacattgaagacattgatttcaataaatcttgtgatgtaatttcaagaatacaagaacttctactaaatttgatccttgccttacaggaatcatcaaaacttcaaaatcagttaacagcaaactaaaaaacaaatcaaaagaaaataattaggatatatgctacccaaagccattttaattcattatctttctgtttcattatgttttctcctaat

SEQ ID NO: 304276 - DNA, 421 bp, Homo sapiens
taaattcttaaattatgaatggcaccatacgaagaagtaaataatcgtgagcaagtcaaatgtacatctaatgaaaattttagaagaaaagaaaataaataataagacagaggcaatatttgaaaaaaaaatattgccaaaaggtaacaaaagtcaccaattcaatagatctaataatacaccaaatcctgcawaggcaaaataaaaagaattcctattcactcatattatgttgaaagtttagaacaccacaaaaatgagaaggagtaaaaagcaaccatgagaaaagaaggcaaatcagactgccaattacatatcaaaaagaacagcagaagttggaagatggtataatagcattttcagtgttgagagaaaatcattgtcatccgattatatccagcaaaaatacctataaataata

SEQ ID NO: 304277 - DNA, 421 bp, Homo sapiens
taaattcttaaattatgaatggcaccatacgaagaagtaaataatcgtgagcaagtcaaatgtacatctaatgaaaattttagaagaaaagaaaataaataataagacagaggcaatatttgaaaaaaaaatattgccaaaaggtaacaaaagtcaccaattcaatagatctaataatacaccaaatcctgcataggcaaaataaaaagaattcctattcactcatattatrttgaaagtttagaacaccacaaaaatgagaaggagtaaaaagcaaccatgagaaaagaaggcaaatcagactgccaattacatatcaaaaagaacagcagaagttggaagatggtataatagcattttcagtgttgagagaaaatcattgtcatccgattatatccagcaaaaatacctataaataata

SEQ ID NO: 304278 - DNA, 644 bp, Homo sapiens
tggtagtgtcctcttgttgccatatggtactcaatgaagaattaacaaaccttatattactgcttttggtcctaaggcttttgagcatagggcaagacaaaagagaaagtctctcttccacacactaaatgggggcagagacygggccattctggtttctgagttttatcccacttcttggagaggagtgtcacttactttgtacttcagcatcccttgccccttgtttatactccttacaaaacaataccaatacatgacagagccagtgggcatataagctaccggtataggaaagaatttcaatggatgtagactgttttccacatttaaggattgttttcctttccagaaaggaaaatggccaatctaataattttgatgatgataatcataatgacagtgaaatggtggaaattaattccatgttctatggtttgggctttgcatataattgtattagtgagcaaaaaataaaaaaagatcttgacagacccattgaaatggaataaattacaaaattaatcaaatctatttgtcattattcctggcatattttatttttagattttatttataaaaagatgaataattaactttacttataacaaagtaagctattcatgggaactccaagtcccata

SEQ ID NO: 304279 - DNA, 382 bp, Homo sapiens
cttttccctggaaggagacattgtctttactgtactagtcaggaaataaatcttccctctgcttcagaaagaggcattatcgttattgtccaaggctatttattatacaarcatccttaaaaagaaagttttgaacaaaaagtgagacaagatgtgcataaatgtaaaagacccacacacaacagtcttccaacactctccactacactgtctatattacagtaggtttaccttgtaataaacttttacaaaactgtttatttctatagcgcttactacaattatatttaggaaaatgttagtgcaattatttgtttaatttctatcttcctcactaggttctaaattacataccaatagagaccatatttattttgtgtca

SEQ ID NO: 304280 - DNA, 382 bp, Homo sapiens
cttttccctggaaggagacattgtctttactgtactagtcaggaaataaatcttccctctgcttcagaaagaggcattatcgttattgtccaaggctatttattatacaaacatccttaaaaagaaagttttgaacaaaaagtgagacaagatgtgcataaatgtaaaagacccacacacaacagtcttccaacactctccactacactgtctatattacagtaggtttaccttgtaataaacttttacaaaaytgtttatttctatagcgcttactacaattatatttaggaaaatgttagtgcaattatttgtttaatttctatcttcctcactaggttctaaattacataccaatagagaccatatttattttgtgtca

SEQ ID NO: 304281 - DNA, 591 bp, Homo sapiens
cacttgtcatttgtttgggaaacacaacatcctttggtttaaaattgggaaaattctttaccttgtgttttgggggtggtggagacctccttcccctagaaagctggagatcacctttatactaaagcacagggatgtaacagaggatctgctaggcaggttcacccactccagtttttgactttgtaattagtgacacaatrtagttgctagtgacacaacgtgcttcctctctgtccctctttctgttgaagtggtcagtagccatgattatgaggcgtaggtctcggcacagaagtgacagggtaatgtccaatgcttgatggtggcagcaaccccttcctcatcacatcagtcctgcagcacagttttggtgatcatttctggaaacacattcagcttggttctctacactcctgctgattctgagagcttcttttgatacctttaatttcgttttctgcctactcagtccaagtcagcttctgttgaaaacctcgagtgatacagactcagcagatgcatcattccagtttatgtaggtccaatgggtttggcaagtgagagtcaggcttgtaggattaggttaag

SEQ ID NO: 304282 - DNA, 572 bp, Homo sapiens
ttttcagattagcttctttcctctagtgatatgcatttaagatccccccatgtgtattcatgtcttgatagctcacttttagcactgaatactattccattgtccggatgtaccacattttatttatcagttcacccactgaagaacatgctggttgcttccaagttttggcaactagaaataaagctgctataaatatccatgtgtaggttttgtgtggacytaagttttcaactcacttgagtaagtaccaaggagtgagactgctagatcgtatattaaaagcttgtctacttttatgggaaactgacagttttccacagtggctgtaccattttgcattcccactagcaatgaatgagagttcctgtttttccacatctttgccagtgttcgatattgtcagcattttcgattttagtcattcaaataggtgtgtagtggtatctcatttgttgttttaatttgcaattccctaatgacacttggatgttaaacatcttttcttatttgccatctgtatatctattttgatgacatatatgttcagaactttggtccattttttattt

SEQ ID NO: 304283 - DNA, 602 bp, Homo sapiens
ttggcaactagaaataaagctgctataaatatccatgtgtaggttttgtgtggacctaagttttcaactcacttgagtaagtaccaaggagtgagactgctagatcgtatattaaaagcttgtctacttttatgggaaactgacagttttccacagtggctgtaccattttgcattcccactagcaatgaatgagagttcctgtttttccacatctttgccagtgttcgatattgtcagcattttcgattttagtcattcaaataggtgtgtagtggtatctcatttgttgttttaatttgcaattccctaatgacacttggatgttaaacatcttttcttatttgccatctgtatatctattttgatgacatatatgttcagaactttggtccattttttatttggatctttcattttcttattgtcgagtcttataagttctgtgtacattttgaataatagtcctttcccagatatgtgttttgcaagtattctctccctgtttgtggcttatcctctcattctcttgagagggtgagttgatttygattctgaaactattctgaaatcactgaaggtaagcaatagaccaaatatttt

SEQ ID NO: 304284 - DNA, 574 bp, Homo sapiens
agcagttacaagttgaaagcattaaagagctgagaacattgaagagctggtgttatcttgagaaatccctttgagtttgagtggttgatagacgtgcgtgttacgtgaactgtcttggagaaggggatttgcttgtgctttgttgtgtggccagagttattcctagggcttctcwttgtgtaatgctggcttgaagcctttgcttgaccagggccagctcctagctcctcctgccaggctgctattgttagtgctgtctcccagcattctgagacagctttgtcccagaagtgcttcattgcactcttaagttattactttttcttaggacaatcttgctcaggctatttcagtttccttgacaatctcttgtgagaactgttctattgggggatgagattcttcatcttctgcctggaattctaataaaacaaaagttgttgaagaacagcaagggaagtcttgctccccagcatcaggcacaaaccttcaggtatgtcattagttctgtgagtgggaatatttgttgttcatggagcttcaactcaagtagcatggatgtcttggtctgttt

SEQ ID NO: 304285 - DNA, 585 bp, Homo sapiens
gggaagtctcatatcaagtgctggcatctggtgagggccttcttgcagtgtcatctcatggtggaaggcaagaggttgagagagtgagagaggggtagcaagaggaaggcaaactcacttttttttaaatctcagtttttgtttaygcttcgccaccggcaagctcacttttataacaaacctgctcttaggataacaacattaatccattcacgaggacagagctctcatggcctaatcacttcttaaagtttccacctgtcaacattgttgcatggggactaagtttccaacacttgaactttagggaacacattcaaaccacagcagtagatgtgcctggctcaagtggcttctcttgcctgtgaaggagggggcttccttggagttcttctggagtccctctgagttaggcacctcagaaaggcttcaggtattcagatccctacctgagacttctaactgtctcagtgttcagtcaggggcaaggcagctacttgaagagctcattcaggggcagagatgctcctttcttatggctacaccattgagctgtccaccttctcttcccctcctggacagctt

SEQ ID NO: 304286 - DNA, 585 bp, Homo sapiens
gggaagtctcatatcaagtgctggcatctggtgagggccttcttgcagtgtcatctcatggtggaaggcaagaggttgagagagtgagagaggggtagcaagaggaaggcaaactcacttttttttaaatctcagtttttgtttacgcttcgccacyggcaagctcacttttataacaaacctgctcttaggataacaacattaatccattcacgaggacagagctctcatggcctaatcacttcttaaagtttccacctgtcaacattgttgcatggggactaagtttccaacacttgaactttagggaacacattcaaaccacagcagtagatgtgcctggctcaagtggcttctcttgcctgtgaaggagggggcttccttggagttcttctggagtccctctgagttaggcacctcagaaaggcttcaggtattcagatccctacctgagacttctaactgtctcagtgttcagtcaggggcaaggcagctacttgaagagctcattcaggggcagagatgctcctttcttatggctacaccattgagctgtccaccttctcttcccctcctggacagctt

SEQ ID NO: 304287 - DNA, 585 bp, Homo sapiens
gggaagtctcatatcaagtgctggcatctggtgagggccttcttgcagtgtcatctcatggtggaaggcaagaggttgagagagtgagagaggggtagcaagaggaaggcaaactcacttttttttaaatctcagtttttgtttacgcttcgccaccggcaagctcacttttataacaaacctgctcttaggataacaacattaatccattcacgaggacagagctctcatggcctaatcacttcttaaagtttccacctgtcaacattgttgcatggggactaagtttccaacacttgaactttagggaacacattcaaaccacagcagtagatgtgcctggctcaagtggcttctcttgcctgtgaaggagggggcttccttggagttcttctggagtccctctgagttaggcacctcagaaaggcttcaggtattcagatccctacctgagacttctaactgtctcartgttcagtcaggggcaaggcagctacttgaagagctcattcaggggcagagatgctcctttcttatggctacaccattgagctgtccaccttctcttcccctcctggacagctt

SEQ ID NO: 304288 - DNA, 573 bp, Homo sapiens
ggactattttctttaacttctttcaacctctcatgtgttgagaacttgaattactgaggctgattctgtttgtgcacaggacaagacacattctggacaagttggaggctggtggaggagactccttttctcccagtgctctttcctcgcctagcaaagctgggggcactgaggagggtggactattgtagattttaaggtgatctgacyatatcactgtcatgtcagaatatcaagttgagtcacttgaatttaaaaagctattaataaacagggctctatgtttctccttctcctcttaaaacaccagtttctaaacactctgctttatttgctccaattttgtcttaactacttatttgtagaaaaataaattttactgaccaagtgaacttgctcaattctactgttggcttctaatctgtttcattccaatcactttaaactcaaaatcaattgtagtgctatataaacgacaacttcaaagtaacgatgacattttacactgaaaggacaaaacagatcaacacctacatttctcttttagattcttcatacacaggcttcaaacaa

SEQ ID NO: 304289 - DNA, 482 bp, Homo sapiens
gtcttttctgaactaaatgagatagaagccattgagtctaagggattgattataacaggaagaaccaaatggaattacgaattccagtgggttacttttattttgaattaccagcagatagaagagctcagatgatttaattagccaaggcatcactgaatttttatttcctgccctttatgttcctattatggcttcttagcctttttttttccgatgttaagcaccattgtattatagtaaattgattaagtgcctcattgcagcttgccagtgagaacttcgagggtgtgaaacatgtcatgttgagtgtcctgtgcctggctcmagactgggcatgaattaggtgctctgcaaaaattgtcatgtgaatgaataaatgagtgtcccttttccctgacaaatcacgctttcaacccacttccttgagtactctttagatagtctgtttattcttttatgtcctctccgtgagtgaatta

SEQ ID NO: 304290 - DNA, 643 bp, Homo sapiens
agaaattgaggaagagctaaataaggctcacttcttctggaaggctcagtatcgtttagatatcaattttttccaaatttatctacagatttaacacttatcccaattaaaatcccgacataaatactgtcaagctgattctaaaatttgtgtggaaagataaatgacctagaaaacattkttttaaaagaagaacaaatttagaagattcacactacttgacttcatgacttactctaaagctgtgtcagtcaagaaaatatggtattagtggtactaaattatggtatacaggtcaactgatttttagtacaagcgcaaaggcaatttgatacaaaaaggataatctttccaacagattgtgttaatacaatcggacattcatatgccaaaaaaatacataccttgacccacacctcatatcttatacaaaattaacttgaagtgaatcatagatctaaatgtaaaacacaaaattacaaatattttgaaaaaagaaaacacaaaagaaatttttcataaatttgaattatacaaaattaacttgaagtgaatcatagacctaaatgtaaaacataaaagtacaaatattctgaaaaaagaaaacacaaaaaatatttttcataaattcgaattaggaaaa

SEQ ID NO: 304291 - DNA, 643 bp, Homo sapiens
agaaattgaggaagagctaaataaggctcacttcttctggaaggctcagtatcgtttagatatcaattttttccaaatttatctacagatttaacacttatcccaattaaaatcccgacataaatactgtcaagctgattctaaaatttgtgtggaaagataaatgacctagaaaacattgttttaaaagaagaacaaatttagaagattcacactacttgacttcatgacttactctaaagctgtgtcagtcaagaaaatatggtattagtggtactaaattatggtatacaggtcaactgatttttagtacaagygcaaaggcaatttgatacaaaaaggataatctttccaacagattgtgttaatacaatcggacattcatatgccaaaaaaatacataccttgacccacacctcatatcttatacaaaattaacttgaagtgaatcatagatctaaatgtaaaacacaaaattacaaatattttgaaaaaagaaaacacaaaagaaatttttcataaatttgaattatacaaaattaacttgaagtgaatcatagacctaaatgtaaaacataaaagtacaaatattctgaaaaaagaaaacacaaaaaatatttttcataaattcgaattaggaaaa

SEQ ID NO: 304292 - DNA, 592 bp, Homo sapiens
tggtgagaataaggtcactggagagcactgtattacaggcactcctactactcaactccagccagtggtttccctgaaggactgagtgcatagaatggccagctcttaaatttttttaaagaagcctgaaattttatgtaatatttcctgatttttaaaacactttgaaaaacacctgtaggcatgatttaccccataggccaccagtctggaactccagactgtagaggtttcatttccatggggcaacctctatctaycttaaactggctgtccaaattcctgtactaggactgacatcaataaataaaaacagtgatcgcagcattcttgagtaccaaaaacacaattaaagacttctaaaagtacttttatctccccaaaccttttgcatttcaagagtttgcattcttccattctctatatgaaacttggttgggtacttccagaactccaccccaaacctaattgccctttatttttaaaatcaacttacttttgacatttgctcacatattaaatttctgtttataactattttggtctaacaattgtattttgatctcttacagttttaatttccagaatgcaa

SEQ ID NO: 304293 - DNA, 592 bp, Homo sapiens
tggtgagaataaggtcactggagagcactgtattacaggcactcctactactcaactccagccagtggtttccctgaaggactgagtgcatagaatggccagctcttaaatttttttaaagaagcctgaaattttatgtaatatttcctgatttttaaaacactttgaaaaacacctgtaggcatgatttaccccataggccaccagtctggaactccagactgtagaggtttcatttccatggggcaacctctatctatcttaaactggctgtccaaattcctgtactaggactgacatcaataaataaaaacagtgatcgcagcattcttgagtaccaaamacacaattaaagacttctaaaagtacttttatctccccaaaccttttgcatttcaagagtttgcattcttccattctctatatgaaacttggttgggtacttccagaactccaccccaaacctaattgccctttatttttaaaatcaacttacttttgacatttgctcacatattaaatttctgtttataactattttggtctaacaattgtattttgatctcttacagttttaatttccagaatgcaa

SEQ ID NO: 304294 - DNA, 568 bp, Homo sapiens
gaagaaatctcatcctaggcattttattcttggcattttggggaagaccatcctgtctatttccaggaaaccattattttactgcaagtggttaacccaagggcaaaaatagggaggtaaagatagctttcgttagcttcctaaaccaggtcttctaaatacatctttattattctgtatttaggcttttacttggatctcaataataacaaacacaaattccaaagcttgatatattttgtattctatacaagcttatatacagctctgtcttcaccattaacgcagatatttgaaaatatatattatgttgwtactatagttattgctgtgtctagatacatacacttgtgttgtgtcaaacacaccttatggccttacatattctcttgacctcacctacttctcagaccctcagcaacttcctccatctcagccactgacctgacacctacctttgagactgctgcatggttttatacctgaggccaaacaagtaacatttctggagtccctggttcctccaatcacttccaaacttagattccagaaatacacaccacatgga

SEQ ID NO: 304295 - DNA, 583 bp, Homo sapiens
tgacagcacagttgttttgtattgacatgtccactctgaagtccctatcttgtaattatattatattattacattcctttgccattccaaacagaaaagattctaacttcctcttcctcccaatttcttgcccttatatgccctctttatttcttgtgtttgtgggatgtcacagtattgtgttaaagtgtttaaatattaactgtgttttgtcaaacaggttcatttgttatttgatttggggaatctttgaaagtaatacaggatttaaacgttttaggtatttcaatatagtgtttatttaaagtagttctaagctgggaaattagacgttatataatcaaggctttgttttcttacttttacatatctatctaaatactttcagaaagtattttaaaartttcttctaaacagaactctgaaaatggaacaagatttttaggggcactcctaatttgtagaagccctgagataaatcttacaaagccagcggctgtcatctattttatctggtttcaaagtttgattttgtacatttgttctttaaatatgtacacctgtgaaccagaagttacagaga

SEQ ID NO: 304296 - DNA, 580 bp, Homo sapiens
atcatatgtaatggcttctaaatagaatgattgactctataaggaccctttcctagaagactttgaggaaatctaggtcagagtcatggcaaaaaaatcatcacacttgttgaatttttaaaaatttacttacttggaaggctgaggcaggtggatcacctgaggacaggagttcaagaccagtctggccaacatggtgaaaccccgtctctactaaraaaatataaaaactagctagacgtggtggtgggtgcctgtaatcccagctacttggaaggctgaggcaggagaattgcttgaacccaggaaatggaggttgcagtgagccgacacggtgccacttgtactccagccttggtgacagagtgagactccatctcaaaaaaaaattactttcatatttaatatttcaaactaattgcaaacaaaatattgttagtgagagatcctcaaaatacaactgggaaattcgcccatgtaatttatttcaataaatgttatgtaccttagcatatgtttctatatggtcttctccaagtctgttgtctttatgtttctttttcttttttttttttttaat

SEQ ID NO: 304297 - DNA, 594 bp, Homo sapiens
gtactcaaccccaaactgaatttttggggccactgtcaccagataagacatgtggagttaagattcacattgccagaaatatgcaggtacagtatatgaagaatataatgccacatatgaaaatggtacagaggacatctatyacttcaggcgaaagaaacactacagttaattaccaagaaggttggcaaggcattctggaatctgaacaatgcactattggctctcaatagaaaacactaaacactaaacaaggttttttgtttttgtttttcactcaacaaaaagacaccaaaaaacttagcattccattgttggggtagatacaaaaacaaacaaacaaaaatataatttattctattaatagctacacttggtggctggtagatttgcattggcaattgttaaaaatagaacaataaacatttgacatctcagtcttaattaagatgagcataatgtgatactgggttgatagggataagggacatccctggtaaatctgcaaagaagaaacaggtataacatatgagtcttagtagtatatacatattatacctgttgacttaatagaaaactcccttcctggggccc

SEQ ID NO: 304298 - DNA, 594 bp, Homo sapiens
gtactcaaccccaaactgaatttttggggccactgtcaccagataagacatgtggagttaagattcacattgccagaaatatgcaggtacagtatatgaagaatataatgccacatatgaaaatggtacagaggacatctattacttcaggcgaaagaaacactacagttaattaccaagaaggttggcaaggcattctggaatctgaacaatgcactattggctctcaatagaaaacactaaacactaaacaaggttttttgtttttgtttttcactcaacaaaaagacaccaaaaaacttagcattccattgttggggtagatacaaaaacaaacaaacaaaaatataatttattctattaatarctacacttggtggctggtagatttgcattggcaattgttaaaaatagaacaataaacatttgacatctcagtcttaattaagatgagcataatgtgatactgggttgatagggataagggacatccctggtaaatctgcaaagaagaaacaggtataacatatgagtcttagtagtatatacatattatacctgttgacttaatagaaaactcccttcctggggccc

SEQ ID NO: 304299 - DNA, 594 bp, Homo sapiens
gtactcaaccccaaactgaatttttggggccactgtcaccagataagacatgtggagttaagattcacattgccagaaatatgcaggtacagtatatgaagaatataatgccacatatgaaaatggtacagaggacatctattacttcaggcgaaagaaacactacagttaattaccaagaaggttggcaaggcattctggaatctgaacaatgcactattggctctcaatagaaaacactaaacactaaacaaggttttttgtttttgtttttcactcaacaaaaagacaccaaaaaacttagcattccattgttggggtagatacaaaaacaaacaaacaaaaatataatttattctattaatagctacacttggtggctggtagatttgcattggcaattgttaaaaatagaacaataaacatttgacatctcagtcttaattaagatgagcataatgtgatactgggttgatagggataagggacatccctgrtaaatctgcaaagaagaaacaggtataacatatgagtcttagtagtatatacatattatacctgttgacttaatagaaaactcccttcctggggccc

SEQ ID NO: 304300 - DNA, 562 bp, Homo sapiens
gccctaggaaggagctgcctaagttggagggtcctctcctttctggaacagaggggctggaatttgactccttcttttgcaacctgaattacctgattacttcctgaattgcaattgctcatttgattcctaaaagccagcttccagtgttttctgggccaagccccagaggataattggcctcctcctttttgtgttctcttcccagacccatcttccttccctctttccatggttcagtgctgwcagtggtaatactagtattaatagtgactaatgtttattgagttcttaatatatttgggcactattctaaacacattttcaaatgttaactttttggggtctcattaacaagttggggtttatataattttcacccctattttgcagctgaggaaaccaaggcacaactaacaattggctgggcctgaattcaaatctaggtagttcacagtctttatctgtaaacaatgctaattttcatgtgaatctatgttgtaacagaattacttgggataatgaaggtcatggagggaacacaatgactttcaatgtaccc

SEQ ID NO: 304301 - DNA, 519 bp, Homo sapiens
catgttacattaattattgttactcattttctaatattcctttgtggggagactttacaaaaaatcaattctagactacttatcaatggtagtggaaaggagaaattcagtctatttttaagagggagaaaaatccttgcaaaacataygggtttagctttataggaaacagtttctagacaaacatagatgaatgatttaacagcagcagggcatccatttatgtaaatactgaactgtgggactcaaaaaaaacaaactcaaagaaaaacattattaatcagcttgagtttttcccccccatcaactttctgaaagaacaaacagaacaacattaaggaacactttcaacaagaacagcaagcaagacacagtttagtgttgccctggataaaactttccagagtttcaggaaccttctcttagctattcttcattttcatgcataatctatgtgaaaatagtcaaataccaaaatgctctaatgtcctaattgttttcccattagaatacttcctg

SEQ ID NO: 304302 - DNA, 641 bp, Homo sapiens
tcacatgacactctggcacccattggaaaatgttcagcacatcacaccttaccatgcagaggggaggatcacatggctgaatctctcttcagccaatcatttttgtactctttttctttagatagttttcatacatgaatcgaaattcatggcagagttgagatgaggcasggaatgaaaacaaaactgtctacattctcctaaataatattattgactatgcggttaatgtacttagattattaggtgaccaatgttaatttgtatctctatttgaatgtctcttacatgtctttgatagtgttaaatgttgcatttaactgtagttttcaatgccaaagatgccttttgctgtattcttataaataactaggtataagtgcattttaaaagttcagtaaactgtaataggtaatttctcaaacacgcttaatgtgcacttataaaaatgtgacccatattgatgaaaatttcaatacaaatagttacattaaaaatagcttcttaatgagactatcacttttagtgtttagtaaactttctacattagagattcatatgacttaacattgctaacaacagataatcttaagtgtgtgagtatacctgtgtgtgttgtagacccctttagaaaaactaag

SEQ ID NO: 304303 - DNA, 641 bp, Homo sapiens
tcacatgacactctggcacccattggaaaatgttcagcacatcacaccttaccatgcagaggggaggatcacatggctgaatctctcttcagccaatcatttttgtactctttttctttagatagttttcatacatgaatcgaaattcatggcagagttgagatgaggcagggaatgaaaacaaaactgtctacattctcctaaataatattattgactatgcggttaatgtacttagattattaggtgaccaatgttaatttgtatctctatttgaatgtctcttacatgtctttgatagtgttaaatgttgyatttaactgtagttttcaatgccaaagatgccttttgctgtattcttataaataactaggtataagtgcattttaaaagttcagtaaactgtaataggtaatttctcaaacacgcttaatgtgcacttataaaaatgtgacccatattgatgaaaatttcaatacaaatagttacattaaaaatagcttcttaatgagactatcacttttagtgtttagtaaactttctacattagagattcatatgacttaacattgctaacaacagataatcttaagtgtgtgagtatacctgtgtgtgttgtagacccctttagaaaaactaag

SEQ ID NO: 304304 - DNA, 641 bp, Homo sapiens
tcacatgacactctggcacccattggaaaatgttcagcacatcacaccttaccatgcagaggggaggatcacatggctgaatctctcttcagccaatcatttttgtactctttttctttagatagttttcatacatgaatcgaaattcatggcagagttgagatgaggcagggaatgaaaacaaaactgtctacattctcctaaataatattattgactatgcggttaatgtacttagattattaggtgaccaatgttaatttgtatctctatttgaatgtctcttacatgtctttgatagtgttaaatgttgcatttaactgtagttttcaatgccaaagatgccttttgctgtattcttataaataactaggtataagtgcattttaaaagttcagtaaactgtaataggtaatttctcaaacacgcttaatgtgcacttataaaaatgtgaccsatattgatgaaaatttcaatacaaatagttacattaaaaatagcttcttaatgagactatcacttttagtgtttagtaaactttctacattagagattcatatgacttaacattgctaacaacagataatcttaagtgtgtgagtatacctgtgtgtgttgtagacccctttagaaaaactaag

SEQ ID NO: 304305 - DNA, 568 bp, Homo sapiens
gcttcttaatgagactatcacttttagtgtttagtaaactttctacattagagattcatatgacttaacattgctaacaacagataatcttaagtgtgtgagtatacctgtgtgtgttgtagacccctttagaaaaactaagcattctaattggcttagtttatattacttttatgattacytttacattgactcttcacaacatttaataaacaatcatttatctgccattagtaatcctagttacaggcatttttagctatttgagaatttgttattaatggggttttgtaaactattacagaggaattctttggagaatgagattacttttctgtttttttttcttgtatgacgaaaaataattagcaacttttcacagtcaaatagctagctttttaaaagcgtttaagtcattacagtttgtgcacagcttaaaataccatctaaacaacattataattaacagtggaacattttaaaaaatcactctatttacttgcaatcttctctttcaacaagctttttatttttctgaactttcttctaatcctgtctatatttttat

SEQ ID NO: 304306 - DNA, 568 bp, Homo sapiens
gcttcttaatgagactatcacttttagtgtttagtaaactttctacattagagattcatatgacttaacattgctaacaacagataatcttaagtgtgtgagtatacctgtgtgtgttgtagacccctttagaaaaactaagcattctaattggcttagtttatattacttttatgattacttttacattgactcttcacaacatttaataaacaatcatttatctgccattagtaatcctagttayaggcatttttagctatttgagaatttgttattaatggggttttgtaaactattacagaggaattctttggagaatgagattacttttctgtttttttttcttgtatgacgaaaaataattagcaacttttcacagtcaaatagctagctttttaaaagcgtttaagtcattacagtttgtgcacagcttaaaataccatctaaacaacattataattaacagtggaacattttaaaaaatcactctatttacttgcaatcttctctttcaacaagctttttatttttctgaactttcttctaatcctgtctatatttttat

SEQ ID NO: 304307 - DNA, 593 bp, Homo sapiens
gagccttcagtgtaagtcccattttgcagataaagaaaaaaatttcctagagatcaagcccttgcccaaaggcacctaactttacaaagctctgcagtagaaccatggtttgagtccaggcattctgactccatagcagatacatgtaaccgctaaactgccttttactcaagaataaaaagtttgataaactctcaactgttggcaggcacagtggctcatgcctgtaatcccagcactttgggaggccaaggcaggtggatcacctgaggtcaggagtttgagaccatcctggccaatatggtgaaacctggtctctactaaaaatacaaaaattagccaggcatggtggtgcaygcctgtagtcccagctgctcaggaggctgaatcaggataattgcttgaacccgggaggcagatgttgtagtgagctgagattgcgccactgcactccagcctgggtgacagagagagactccatcccaaaacaaaaacaaacaaacaaacaaaaaacaatgaaaatattgaaaagatcttatttctgtcattgtccagagatttaaatttcaacatcaggaccattagtctggtaa

SEQ ID NO: 304308 - DNA, 593 bp, Homo sapiens
gagccttcagtgtaagtcccattttgcagataaagaaaaaaatttcctagagatcaagcccttgcccaaaggcacctaactttacaaagctctgcagtagaaccatggtttgagtccaggcattctgactccatagcagatacatgtaaccgctaaactgccttttactcaagaataaaaagtttgataaactctcaactgttggcaggcacagtggctcatgcctgtaatcccagcactttgggaggccaaggcaggtggatcacctgaggtcaggagtttgagaccatcctggccaatatggtgaaacctggtctctactaaaaatacaaaaattagccaggcatggtggtgcacgcctgtagtcccagctgctcaggaggctgaatcaggataattgcttgaacccgggaggcagatgttgtagtgagctgagattgcrccactgcactccagcctgggtgacagagagagactccatcccaaaacaaaaacaaacaaacaaacaaaaaacaatgaaaatattgaaaagatcttatttctgtcattgtccagagatttaaatttcaacatcaggaccattagtctggtaa

SEQ ID NO: 304309 - DNA, 593 bp, Homo sapiens
gagccttcagtgtaagtcccattttgcagataaagaaaaaaatttcctagagatcaagcccttgcccaaaggcacctaactttacaaagctctgcagtagaaccatggtttgagtccaggcattctgactccatagcagatacatgtaaccgctaaactgccttttactcaagaataaaaagtttgataaactctcaactgttggcaggcacagtggctcatgcctgtaatcccagcactttgggaggccaaggcaggtggatcacctgaggtcaggagtttgagaccatcctggccaatatggtgaaacctggtctctactaaaaatacaaaaattagccaggcatggtggtgcacgcctgtagtcccagctgctcaggaggctgaatcaggataattgcttgaacccgggaggcagatgttgtagtgagctgagattgcgccactgcactccagcctgggtgacagagagagactccatcccaaaacaaaaacaaacaaacaaacaaaaaacaatgaaaatattgaaargatcttatttctgtcattgtccagagatttaaatttcaacatcaggaccattagtctggtaa

SEQ ID NO: 304310 - DNA, 575 bp, Homo sapiens
ttatattccaaactacttacttgattgcttcatttcatagaagctttaattttaacatattataaactgaactcttgatttctctactctttccacctgcagtcctcttggtaaatggtaaggccatttttttttcatttattcgttggagtcttgatggttttcctatcaatttatacagatcctcatattttataaagactaacattttttacctgtcatataggctgaaaatctttttccctaggcttttgtttgtggttgttatttttgtgtttcaaattctagatttaaatcgttcattgaacaatgattatcattcacttaaggcagtagsattaataaataaaagaagaaaaagagcattattaacaataaaagtaaaatagatttttaaaattattaagtagcatgtcttgcttattagcaagatatttaaatgaatccaatgttgtagaacacaaagtgaaactgatattttaaattcttcttggtagtttaaacttgctcaacactgttagaaaaattgttagtgttaggcatcaaaactttaatagttactacctttatttaga

SEQ ID NO: 304311 - DNA, 479 bp, Homo sapiens
ttgggctgaagtattaattaattcagcaaaccagtgattactaagcatctattccatgtaaaatgctgcagtaagtgcctcataataagaaatttaaaatgctccaactttcaagtatctgcagtttagttgggccaacaaatcatatacacaattataatccaaggacttctgagaaaagtactcttaaaattatattatgtaagatttatataaaatatgtaagatttatgtaaaatttcagaattatataggaatttataggttatttccaagtgaggattagagataaggatgagggaaatctgagaaggattatgaagagggggctttcaaattaagttttgtgggaaraataaagtgtgtgtgtgttggtataaatctatttattatgtaacaactttgccaaattttctctgaaaaatagattcatctttattgagaaaaaaccctcactaggctagagagtcagtgtagca

SEQ ID NO: 304312 - DNA, 554 bp, Homo sapiens
ctctggatgtctatttagcagaatctgctctaataagcttacttttccttaggaattattcttttcagtctttaaatgaaacttccacttccttccaggatcttcttactacacaattcatctgcctagacagtacctgtttcttcctcttctcgattaatagttgtttggaatttttactcaaaagtttttcttgctatttatgatagaatgaatattaagtcaaatctggagtgaacttccttgattgaaattgttctttgctggcattgaaataaatgcatgtggaaggagcagtgatagtgagagagggtgaaaagggtcagcttctgttgaatatctctgtaaagggactgtcttccatgtggttcacttagatctgctctcctcatttcagactccttctccagggctccaatatattctgcctcacacttccagtcccygcctgaatgaatggccctcaacccttcttctggaggcaaagaaatctgaggctttctccattcttttaaatcttgtaatacatattagtttgttaggaatgccataag

SEQ ID NO: 304313 - DNA, 606 bp, Homo sapiens
aatgaacctttgagagtggggaaattgtagcagtgaaaaggaggcctagcatgactaactccattttgctcctaaactcatcactccttttgtggtgatatcttttagggtaactgcttttgcttatttctgcatgtaggccaagctaactaygagaggaatttggtgtatagttgaaagcaaataacagttccttatgaaaactaacccagaagataaaaatagtgtacccacacgtaacaatgtagtgttgagtatttgtcggagagtcatgacccgaccaaggatggaggcatttcatggcctcctcagaccagacccatgctggcacccagatatctgtggtcatgagtcacctctggactccaaccctttcttttttccccttcccttaacataaaaccaacctgaaatgtttactgacttaagatggttaagacattagtccaccatgttcttagtttgctagctctctaaataaggtcactgaccttgttccaaatccttgtctctcaacttactggctgttgtgcggtgagctgaaagagtttggaatcagatacaagactttaaaaccaaacaattcctactagtgtcataactagg

SEQ ID NO: 304314 - DNA, 611 bp, Homo sapiens
acaaaatctaaaaagatcatcaacacagttgtgttttaacaataagcawtttctcccaaagcaataatctaaggataatatttatgttacagtctattatctataaaaatattacagctgtaataaaaattcagaacaaatacctttgttgttaaacttttagaagcacaatggaggtacatttttttataggagttaaccgttagctactacacaatcctattaatgtggtgatgttggaagatcaaggctagcatctgcataatagctgtctagagcatgatgttgggcagggtgaagagctgcattattttatctgcaatttaatcaaatttgtgacacataaaggagctttataaagggatttaattcatgtctggtacttaacaattctcttttggtaataaggctacatatttattttgtctatatataataatatgtatacattattggtcaaggctaaaataaactcataggtgttaatgctgttttgactgtaacattttatttcaaatcaaataaaaacaatatatgccactttaaaagacaaattaaggaaacaacttgactttcttttcatttgttatcaactttcccagagtataaga

SEQ ID NO: 304315 - DNA, 629 bp, Homo sapiens
ttgactttcttttcatttgttatcaactttcccagagtataagacaggacctacaatttatgttaaaattatggttagattgattgtcacaaatggttctacgggcatgtcaagaaaattcaggcctgatacttcaaaagtgccctctcagatactatgcatttttcacaggagtcagttacccaacattggtgttctcactactgacttaagaaaattaggctcaactaagaaacaaaactttgaaaaatacaattaatgtcttacagaaaactagccatcacagtaaattttcatcttttcatatttcttttcgagcaagtagaaaaacttggactgatgatgtgatttcaacactgacattaggatataatcatagatggttttgaaattagaaacrggtgtgccaacatggttggctgagcagaatgaagaactatcccttcctaatatcactacataatggatttctttgtagcaacttttgatgagcattatgttcaatcatatagtaaacataattccatctggattatatatcttgaaggagtcataaaattgtgatcttaattcctatgtgttgagattaaagtttataggttattataatttaatttaaacttagtgta

SEQ ID NO: 304316 - DNA, 609 bp, Homo sapiens
aagtataaattaattttgttaggcaattaagaaagcaaatggcaaaaataaaaagagaagtctgattacatagttttaatatccaatgcttatttactttaatgtaaaatctgtgccaatattcaaattaaaaatgtactattttcatatctgttttgctagtaaacaaaacgttgtataataattgctaaatataaatattatttagacatgcctagtactaaatgtatctatgtttaggtataacttcagatgtttataggcaaacattcaaacttgttttttaatcttctaaacttagctatttgtcctaaagtatagcttcaagtaaaacattcaattagaaaggatagggtgtttttattctaaaatagtcattaaaataaaagcaatcaaagtgaaaaacaatggaactacatagactatttctccatgaattcagcattatctttacttgaaaacytctctttgatgggatttgttctgtttgtttcaacccaggcactatgcagaaggctggatttgctgataagcagcttttttttcattttattacaactatcagcaaggtaattaataatttttaattaccaggagcctagattatgc

SEQ ID NO: 304317 - DNA, 569 bp, Homo sapiens
gattccacatatgagtgagatcatgcagcatctgtctttttgttcctggtttatttcacttcatataatgcccttcttgaaaactgctaagtgagtagaagtaaaatgttctcactacaaaataactaggtgaggtaatgcttttgttaattagctagatttaaccattccatgatgtatgtgtacttcaaaacctcatgttgttcatgataaatacatacaatttatgccatttaaaaaataaatttgaataaaatactaatttgctttctaagcaacttaataacaaaggtgagaaatgaggagacaggcattaacattaatgggaatccatccaccctgcctttcttcatatacaagaaattatgctgtctaggttcacgaaaatgattgtgctttatttttaaacctctggatgtttgatgaagcaatgtaaatatttgataagaaatcacyaagagaagtcagacacatgtgttctacatctaagtacagattctttaaattttctattccttaaaattgtaattttgccttcatggcttattgactaatagtataaaagaagt

SEQ ID NO: 304318 - DNA, 452 bp, Homo sapiens
tgttcactacagtggacattactggctttctagggctgccaacacaaagtaccacaaactcagtgatttaaaatagcagaattttattctctcacaattctggaggttaaaagtccaaaatcaaagtattagaagggccctgctccctcaaaaacctctaggggaggatccttctttgctgcttctagtagcccagacattccttggtttttggcagcaaaattccaatycctgtttctgtctgtgtctcttctcctcttcctaaaagaatacaagttattttgaagtagggtccaccctaattcagtattgcctcatcttaactagatttacttgcaaagtcccttttttcaattcagatcacattgataggtatcagggattaggacttcaacatactttttgtggggacacaattcaacccatagcaatatattctttgcaccctccac

SEQ ID NO: 304319 - DNA, 575 bp, Homo sapiens
gagaatgttgtaatctgctttctctctttttgtataagtacctgcatattattaatatctgcaattctgcctcatggcttaagatgactaaaatatttactaccttgttctttgtttaaaaatttcaccaacccctgtagtaaagaattaatttaaaatgttcttcacttatttaaattgttgaattaattgccagttatccagacatttcatagtctattgcttgggagtggaggtcctagctgaagaagrgaatgtaggagaaggctgtatgaagctaggaattattttatattcaactcaggactcatggtaatatttagtggtaaagcaaacatgattatttaggaaatggacaataacttatttttctctatcagcaatggttcatgtggaaatcactgtactcaagcaattacatttttataattttatatgacttttatggcaataataatatttccatatattagaggttactttacttgaataagtcacattaaaccatcgtggtttttgtctaactagttttgttttaaccataactagtgctattaataacatcacttatttcc

SEQ ID NO: 304320 - DNA, 524 bp, Homo sapiens
tgactgaattgctgcaatcttatgataaaacttgaacagatgaggagttgcttcttatggataatcaaagaaagtagtttcttaagatagcatctactcctggtaaagatcctgtgagcattgttgaaacaaacaaataaacaaacaaaaagatttagaatattacataagcttaagcttaattgattaaacagcagsagagtttgagaggattgactcttattttgaaagaaattctactctgggtaaaatgctatcaaacaacctcacatgttacagagaaatcttgaatgaaaggaacagtcaatgaatgtggccaacttcattgttgtgttatttcaagaaactgtcacagccaccctatgcttcagcaatcaccatgctgatcggtcagcaaccatcaacatgggggcaagaccttcttccagcaaaaagattatgacttactgaagggtccaatgatttttggcattttttagaaatagagtatttttaaattaagatatgtgcattgctttatttag

SEQ ID NO: 304321 - DNA, 597 bp, Homo sapiens
ggtgttggttagcaggcataaaaacaacattaatctccttgcacatctccatcagagctcttgggtgactaagtgcattgtcaatgagcagcaatattttgaaaggaatcttttttttttatttcctgagcagtaggcctcaacagtgggcttaaaatattcagttaaccatgctctaaacagatgtgcaatcatccaggccttgttgtttcatttatggaacacaggcagagtagattttcatgaaattcttaagggccctaggatcttcagaatggtaaatgaaaactgactttaacttaaagtcatcagctgcattagcccctaacagtagagcagcctgtcctttgaactgtgaagccaggcaytaatttcttctctctagctataaaatactaggtggcaccttttcccaatgattcactacgatgatgtagtgatttcatctacattataaatctttattgttttagtgtacccactttcttcaattatcttagctggatcttctggacaacttgctgcattttctacctcagcacttgctgcctccctttccatgtttatgttctggcaatggccactttccttaaatct

SEQ ID NO: 304322 - DNA, 581 bp, Homo sapiens
ctcgctctgtcacccaagctgcagtgcagtggtgtggtctcagtagttcactgcaagctctgcctcccaggttcatgccattctcctgcctcagcctcccgagtagctgggactacaggtacctgccaccatgcccagctaattttttgtgtttttagtagagatggggtttcaccatgttagccaggatggtctcaatctcctgaccttgtgatccacccacctcggcctgccaaagtgctgggattacaggcatgagccaccacgcctggcctaaatatttttttttttaaagctacaggtcggtatatatattaaaaatgtaaaaagaaaaaacaaagataaagacaaattmttgaaataagccagaggaggaaaatacaaccttatctataggggaacaagaataataaattcttgtcagaacaatgtaagcaagaagaggggaagtaaaatatttaaagattttaaagaaaaaatatctcaacatataattctatgtatagcaaaactatctttcaaaatcgaaggataaatgaagactgttttagatagaaaaacaaaaacaaaaactgagagaa

SEQ ID NO: 304323 - DNA, 581 bp, Homo sapiens
ctcgctctgtcacccaagctgcagtgcagtggtgtggtctcagtagttcactgcaagctctgcctcccaggttcatgccattctcctgcctcagcctcccgagtagctgggactacaggtacctgccaccatgcccagctaattttttgtgtttttagtagagatggggtttcaccatgttagccaggatggtctcaatctcctgaccttgtgatccacccacctcggcctgccaaagtgctgggattacaggcatgagccaccacgcctggcctaaatatttttttttttaaagctacaggtcggtatatatattaaaaatgtaaaaagaaaaaacaaagataaagacaaattcttgaaataagccagaggaggaaaatacaaccttatctataggggaacaagaataataaattcttgtcagaacaatgtaagcaagaagaggggaagtaaaatatttaaagattttaaagaaaaaatatctcaacatataattctaygtatagcaaaactatctttcaaaatcgaaggataaatgaagactgttttagatagaaaaacaaaaacaaaaactgagagaa

SEQ ID NO: 304324 - DNA, 429 bp, Homo sapiens
caaaactcgacaacaaataaacctagacttaactgtcattttcaaatccaatttttacctgaattggtaaaaatttatttaaaacaaaatgcaaaatacaatattgtttcaattttggcccaggagataaacactttaatgcagagttaataaactccagcgaataaataggatcattttcctaatttcacttcaaagctgccaggatttcaataaggaagttcaaaggcccgattccagaaactagaggtccccggaaagtgaggggcgtctggccacagcctcagttccaaaccaggtatagttcttgagctgtcattcttagtcctattaccamtaatacaaggtcaaaaaaacggtcctgtaaggtgtcaattaaggggtcacttttgcctaaggtttccttaacttctctcctagtgaagccgc

SEQ ID NO: 304325 - DNA, 599 bp, Homo sapiens
tcatcatttcgagccttctctgaggctagggttggcaggcctcccagagaaaccaaaacaaagcaacgtaacagggcaccacaaaacaaaaggggacctaagctgggcaatgagaagatgaaagcmctgtgtccagattcactgaagagagagacgagatatgaaaggcagcctttctctttagggtccttttcaattcacttaaaagcacacctttgaaatgaatgtcctcagcagagagagggccgttccctgaatccagaagttgaggcgttaattaccatggctaaaggaatgtgttgaaatgtcagtgcaactgctttctctatcttcactatccttaaccaaaagttgtgtcatcagtctggaatgagcaatgcctgctcaacaaacccagcttttttccttctctttgtatttgcttattcacagttcagaaattgtccagtgaccttcttactgtctaaccaagggaattcatattgttgtggaaaggaaaacaacttccatttggtttgagtgaaagatccacatgatgtttctgtttgagacgtgaaagatgaaaactgagctatactgtatagcttaaccttattaag

SEQ ID NO: 304326 - DNA, 599 bp, Homo sapiens
tcatcatttcgagccttctctgaggctagggttggcaggcctcccagagaaaccaaaacaaagcaacgtaacagggcaccacaaaacaaaaggggacctaagctgggcaatgagaagatgaaagcactgtgtccagattcactgaagagagagasgagatatgaaaggcagcctttctctttagggtccttttcaattcacttaaaagcacacctttgaaatgaatgtcctcagcagagagagggccgttccctgaatccagaagttgaggcgttaattaccatggctaaaggaatgtgttgaaatgtcagtgcaactgctttctctatcttcactatccttaaccaaaagttgtgtcatcagtctggaatgagcaatgcctgctcaacaaacccagcttttttccttctctttgtatttgcttattcacagttcagaaattgtccagtgaccttcttactgtctaaccaagggaattcatattgttgtggaaaggaaaacaacttccatttggtttgagtgaaagatccacatgatgtttctgtttgagacgtgaaagatgaaaactgagctatactgtatagcttaaccttattaag

SEQ ID NO: 304327 - DNA, 570 bp, Homo sapiens
atttcagtactagcctcacaggtagaaaggatgattcattcattaagcaggggtccagcagaggtaccaaaaaatgaagagagaaagcaaatgcagagactgaagagttctagagtgggcaaaataggatgtrcagagaacatgagacaggtcaagtagaacccacagggtgtcaatcaaaggttttagttcccaagaatgggctggctggagctggtggtataaattctgtctctagaacatccaaactgtgtttttggcccttaatttaatttagttcatttaattttaaaactcagaccaagcagaatatgttgacttatgggtactatccctggaacagactgcctacatttgtgaccctttctagttggtggctttagataaactatttacatgtctgtgcctcaatttcctcatctgaaaatggacatgacagatgtaccaactgcatggagttgttgtgagcattacttttgagaatgagtacaggtactcagggtaaagctcttaactacagtgagggctcgttaattagctgttaaaatctgaaagaatataaacttgcag

SEQ ID NO: 304328 - DNA, 594 bp, Homo sapiens
aaatgtatatttcatcttacaattctcaaatgagcctgttatgggcagggaaactgcaactcagagaaccctctgctccactgctrcccattttaagtagaaaagcagcatcaaatagtgcttagaggacactctggagccagagctactggctctattgcttactagctggataatcttgggtaagttacttaacccctaagggcattcattttctcatctgttaaaggggagatattaataggacctacttcatagcataatgtgaggatttaaaggcaattatatgtaaagcacttaggatatactgagaactctaaaaatattagctattattatcatggagacttttcataataccttttataaaactttgtcattctctgactgctcatccagctttttcttcccagatgtattacacttgacacagtaaatatttatgtacatgtatgtcattgtccctttacaaaaatgtaagtttttgttcgccactttcctagcacttaaaaaagtagctgagatatagtaagtgctatcataagtacaagttgagaatgaataatcaacttgtcaaaattctatagctaatta

SEQ ID NO: 304329 - DNA, 572 bp, Homo sapiens
taatttcatggattctaggattcagagaacaaatctctaccctttgtaattttatacatttcaatcatcttgctgttcctactatttgctcccattatcttcttagatctttttatgccagagtgcatactttatgactgctatacaaactgtgtattaacacatttatatatgcacacacttttttatctttgttcgttctcataaaagttttcattttctgtttttatatcctgcttttatttccgcatgtcaagctctcatcatatttaaggatattgtccaaagtgatgtgcagggaagaggaaaaagctgaagaaacaatgtcggggaggaaagagaataagcctgcttggcaaacagtccactttttaacctatgagtgtatacatatrtctataaatttagtactgattcttaagagaaacttgaacaagcaaacaaagtagtcttgtgttaagtttgcatattgtattgttttggacgaaaaagactcgattgctttgaattcacattaggcaataaaagtttattttgatattagaaatacaatatataatggattatactag

SEQ ID NO: 304330 - DNA, 558 bp, Homo sapiens
ctaacaaatttataaatattattttgtttaatttttacagtaccatatgagctatacattacaatatttttactatttttactggtatgcaaatggagggacaaagattttggaaatttaatgaaggtaagtgtcagagaggagagtaaaaatgagatgcacttcattccaaagcctgaawacattttccactgcactcactaaaatgccagaaaaaggattactgacacgtgtcttgtaccactctaaaataacactattgcattctaatttagtgtgctagcttaatgacaagagtcctttactttaagcaggatgccctagcactttcttttcctgatggaagtacctggccattgttcaaaatgtgtcaaaacagagtccatcatttatttacttttctccttttatctaataaatgcattccttgaaggaataagtccaatttcgagtaaagaatggatggctgggatttagggtgctattcagaactcttcagcagctgacctgctatctttgagaaagaccaatgttttctttaccttttgttttctctaa

SEQ ID NO: 304331 - DNA, 558 bp, Homo sapiens
ctaacaaatttataaatattattttgtttaatttttacagtaccatatgagctatacattacaatatttttactatttttactggtatgcaaatggagggacaaagattttggaaatttaatgaaggtaagtgtcagagaggagagtaaaaatgagatgcacttcattccaaagcctgaatacattttccactgcactcactaaaatgccagaaaaaggattactgacacgtgtcttgtaccactctaaaataacactattgcattctaatttagtgtgctagcttaatgacaagagtcctttactttaagcaggatgccctagcactttcttttcctgatggaagtacctggccattgttcaaaatgtgtcaaaacagagtccatcatttatttacttttctccttttatctaataaatgcattccttgaaggaataagtccaatttcgagtaaagaayggatggctgggatttagggtgctattcagaactcttcagcagctgacctgctatctttgagaaagaccaatgttttctttaccttttgttttctctaa

SEQ ID NO: 304332 - DNA, 563 bp, Homo sapiens
agggcaccagttctactgaattatggccccatgcttgcagcctcatttaacttttatcactaccttataggccctagctccaaatactatactatcacactgggagctgggcttcaacatataaayttggggaggatacaaacatttagtccataacaacaattattttaatttattaaattaggtagctcttctactaatttgcctagctattggcctgtttaagttgttctcaaatagattatataacttttaagaacataccaatgcctagggcccactttgagaaatttcgatttaactgatttgagatcaagcctggacattagcatttttgttcttgctgctgttgtctttgttattgatgagctgctcatttggaaaaaaaagtgactttatgtactttattcagtcatctatatccgaaatgtatctgagttacccaatgcatatattttaattgaggcaaaatttatacacaatgaaatctaaagattaatataattaaatgaattttgataaatatatagacccatatgaatattatccaaacaagatacaga

SEQ ID NO: 304333 - DNA, 563 bp, Homo sapiens
agggcaccagttctactgaattatggccccatgcttgcagcctcatttaacttttatcactaccttataggccctagctccaaatactatactatcacactgggagctgggcttcaacatataaatttggggaggatacaaacatttagtccataacaasaattattttaatttattaaattaggtagctcttctactaatttgcctagctattggcctgtttaagttgttctcaaatagattatataacttttaagaacataccaatgcctagggcccactttgagaaatttcgatttaactgatttgagatcaagcctggacattagcatttttgttcttgctgctgttgtctttgttattgatgagctgctcatttggaaaaaaaagtgactttatgtactttattcagtcatctatatccgaaatgtatctgagttacccaatgcatatattttaattgaggcaaaatttatacacaatgaaatctaaagattaatataattaaatgaattttgataaatatatagacccatatgaatattatccaaacaagatacaga

SEQ ID NO: 304334 - DNA, 563 bp, Homo sapiens
agggcaccagttctactgaattatggccccatgcttgcagcctcatttaacttttatcactaccttataggccctagctccaaatactatactatcacactgggagctgggcttcaacatataaatttggggaggatacaaacatttagtccataacaacaattattttaatttattaaattaggtagctcttctactaatttgcctagctattggcctgtttaagttgttctcaaatagattatataacttttaagaacataccaatgcctagggcccactttgagaaatttcgatttaactgatttgagatcaagcctggacattagcatttttgttcttgctgctgttgtctttgttattgatgagctgctcatttggaaaaaaaagtgactttatgtactttattcagtcatctatatccraaatgtatctgagttacccaatgcatatattttaattgaggcaaaatttatacacaatgaaatctaaagattaatataattaaatgaattttgataaatatatagacccatatgaatattatccaaacaagatacaga

SEQ ID NO: 304335 - DNA, 485 bp, Homo sapiens
gtcactcatgctaatgcaggacgtacgcggtggtgatcaatactgcagattggctgaaagggataaaaacacagaatagttctctgtaatttgagatcacaggtcactactctccttaaatacagcattttcagcaatcagttgggactgaagctcactgatagtaattgagagtaagctagtagtgagacatggaggcaagtcttttaaaacattagaaagaaaaagaaaaaatgacagttttgaatataacagatttgagggaagagattatagactaggtgaggactaaaaatgtttgtaggcaaggaaaaaaygccaggagaagtagaatttgaggatgaaaatgttaaaaataaaaacaagtcctagaagttgaacatagaagaaatatagaagaaaggaagtctcttctttgtcagaaatttggaggggggttaggaggcaggtagagactaaaggaaaacatagagtcaaagagattt

SEQ ID NO: 304336 - DNA, 620 bp, Homo sapiens
gacattggcattattaactctattttacagatcagaaactgggcctcagagagtctaactaacttggacaagattacttgtttagtgtgtggtaaagccagactacaaattcagttctatctaagtccyatcctttttaattacactagttgtacatcagagatttagctgagccaccaaatttccgaatcatagatatcttactttaatatatttttaatgtattctaagtaaaattaataacttatttaccctgcagaggtagtcttttagtggctacattattgttcaaagtttttatgtattataacatgcaggtttggaatgaaagtgcacaaatgcactgaatggccttggaactgtaatatgagagattagatttagaacctgggaaaatccgtgaagtaagttatcatcctacctaaaaacactaaagttatggtttggaaactttctagaaagagtgtgccaagctgctaatacctgtcttcctcataaggcgttggagttgatgggatggcaggagaaggcatttagattatttacttagtaattcctttttctaacatttggctcttttagttgtaaaatggaaaaaaaagaatagtatctacttcatg

SEQ ID NO: 304337 - DNA, 620 bp, Homo sapiens
gacattggcattattaactctattttacagatcagaaactgggcctcagagagtctaactaacttggacaagattacttgtttagtgtgtggtaaagccagactacaaattcagttctatctaagtcccatcctttttaattacactagttgtacatcagagatttagctgagccaccaaatttccgaatcatagatatcttactttaatatatttttaatgtattctaagtaaaattaataacttatttaccctgcagaggtagtcttttagtggctacattattgttcaaagtttttatgtattataacatgcaggtttggaatgaaagtgcacaaatgcactgaatggccttggaactgtaatatgagagattagatttagaacctgggaaaatccgtgaagtaagttatcatcctacctaaaaacactaaagttatggtttggaaactttctrgaaagagtgtgccaagctgctaatacctgtcttcctcataaggcgttggagttgatgggatggcaggagaaggcatttagattatttacttagtaattcctttttctaacatttggctcttttagttgtaaaatggaaaaaaaagaatagtatctacttcatg

SEQ ID NO: 304338 - DNA, 582 bp, Homo sapiens
cattttgctttaaagctgtttcaagcttagttataaaaaggtagatcagaagagcctctttttctgtttttaagtgtgtctatgtgcctgattttttatccaattggtccttattgttaacctccttgttcatggactacttttatttgtgtgtttcacagttagcaaactatgtggttgccataaatccttttaatcaatctcagggtgcacgcatgagatgaacagcagcaaaggaaagttcatttttctagggttctttcatttctcctacccctctgaaaacaccctccaaggaaacagtagcagattctactgagggtgaggcattgagtggggtgaggaccagttayagaagagaaggctctctgaagtgctgtcaaaaaattgctcctggggaggccaggtgtggtggcacaaacctgtagtcccagctacttggaggctgaggtaggaggatctcttgagtccaggagttcaaggctgcagtgagctgtgattgaaccacttcacaacagcctggggacagagcgagactctgcctcttaaaaaaaaaaattgctcctggaggcctaaaaatta

SEQ ID NO: 304339 - DNA, 558 bp, Homo sapiens
aagtccaggctcgagaccacactggatggacatgacaggcaggggcccacagagggaagctgcagttcagataattctccacagggaagcagtatgagatcagggtttagatagaggcagccccagcatcaccagctctccctggttctaattggagacagttttcctcctttcctttcactgtgtaagataagcaccaacagggcaagctcacctttcaggagagcccctgagcctaactgcaatcctccatgtagcyctttactcccaggcctgttcctcctcacttaaacagctggctttcagcatattgctttgtttattccatctctgacctatgcattatctgaaggatgccataagggttcaacatgcccacctttgtgaaattacctcattctgagctgctgggttcataccactgacacagaggggaaacctgcagagggaagcttagcaacatgtcacacacatgttgttcttggcagtatgaattccggtgacttttgacatttcttaaacaggagtcagttatatctttcctactctgaggaaaat

SEQ ID NO: 304340 - DNA, 558 bp, Homo sapiens
aagtccaggctcgagaccacactggatggacatgacaggcaggggcccacagagggaagctgcagttcagataattctccacagggaagcagtatgagatcagggtttagatagaggcagccccagcatcaccagctctccctggttctaattggagacagttttcctcctttcctttcactgtgtaagataagcaccaacagggcaagctcacctttcaggagagcccctgagcctaactgcaatcctccatgtagccctttactcccaggcctgttcctcctcacttaaacagctggctttcagcatattgctttgtttattccatctctgasctatgcattatctgaaggatgccataagggttcaacatgcccacctttgtgaaattacctcattctgagctgctgggttcataccactgacacagaggggaaacctgcagagggaagcttagcaacatgtcacacacatgttgttcttggcagtatgaattccggtgacttttgacatttcttaaacaggagtcagttatatctttcctactctgaggaaaat

SEQ ID NO: 304341 - DNA, 554 bp, Homo sapiens
attgtggtgtacgcctgtagtctcagctacttagtaggctgaggtgagaggattgcttgagcytaggaggtcaaggttgcagtgagccaaggtcgtctcgctgcactgctgctgcctcagtgacagagcaagatctggtctcaaaaaaaaaagaaagaaaagaaaaaaagaaactgccctttttttttggtaaggaaaattgcacatttttgtgctcctctgataaatgcaaacccacccatctgagggaacaataactacaaaatgccatccactcttagcaattatgtaattccatgtaattattttctcagtttggctaaaaaaagcaagtactttgagatctctaaaatagtcacaaactagtgcattttctagttaagaagatgtttgggagagtcaaactcttatttcagagacagaatataatttaataattacctgaatacagaaacaccaatgaagttgtggcttagacgtgttgggcatttgtaaaatataggtaatatcaagagactcctgctgtgagtcaagacaaacaagcttccccctgc

SEQ ID NO: 304342 - DNA, 581 bp, Homo sapiens
acttctcattggcaaaaaaactggccactgaacttgaacttcttgctgacaaaaggagaggaattatcatccacaaacctttttgaaactcttatatgtccagcctcaaataaagcaccagttctgcctatttctaatatgactgtttattggttagtattttcaaaacacttcaaggcaattaaacccttccccctctagatttcagcatccagtttaaaagtctctctgaatacatattatggagaatagggtcatgtcagttaatgttagttgcaaaaacaagtacagctgtcctcaacctgactttcatacttttgtgtgttggtaccataacccagttatttaaattctgggttttttcctcttagaattattattgatgaaattagcattatatagtcataaagtcattacctgcttttctaggctgtctgctgcacccccatggagagctaagtgggcccttaatgaacaagaaaaggttatctggctgcacayggtgtctcccagtctgctctggctagaagctacagcagccacagataacagttcaaagtcatgcaaatgagggctaggct

SEQ ID NO: 304343 - DNA, 561 bp, Homo sapiens
gtcattatgcctctattctattccatttcattacatgtctgtctaataaagatttaggatcttacttataattatatatgcttactcactcataaaacaattttttttgagacagggtctcactctgtcacccaagctgcagtgcagtggcatgatcgtggctcaccgtagcctctatctccccaggctcaggggatcctcccacctcagcctcccaagtagatgagactacaggcacacaccaccacacctggctaattttttgtattttttgtaaagacagggttttgccatgttgcccaggctggtctcacactcctggcctcaagcgatctgcccacctcagcctcctaaagtgctaggattacaagtgtgagccactgcaaccggcacataaaacaagatgattatcttctttgtgtatatgttagtgtaaatcactttttgccaggcatgatcttccctctcccccatcargcagttctggaagaatctgcagaaagacacctttgagtttaacacaaaacaaagctttgttgatgctttaacctagtatggaca

SEQ ID NO: 304344 - DNA, 620 bp, Homo sapiens
cacacagtatttcaagcatcaccatacgtaaaagaagttttatcatcttgatttcagagagggaaaaaatgagcacagaaagcctatatacccaaatctacttgataaataaatgtgtggcaagatcaataacaagacctaaaatctctgactccctgctatattcagtcctttaattcattgatttttaaaatgttgagtaagcacctactgtgtgtgccaagagctgggaatacagggagcctctatgggacagccgttaactcattcaatcccatttatatttaaatcagttttagtgagggagaagcatattgaaatatactactttactttagagaatttgcgtacatactagaaatacaaattctatttcactttaccatgaatgaaccagaggccatagtagactgccyttctctattaaattttaaatttctgccccctatagttatttgtagtcctttccaaatctgttgaaattgagtagattcaaatatggctatgtaaaagcagtagttctctaatgtgttctggtacacttggcaaaacttcattaaatatatgtttaattctatcatacaaactgtactgacacaaaatatggccacattatatgt

SEQ ID NO: 304345 - DNA, 584 bp, Homo sapiens
gttctgacaaaaatgcccaaatgcaaatggtgatgtctgggtaaattaagatgaagatgaaggccaggcatggtggttcatgcctgtaatcccagcattttgtgaggccaaggtgggaggatcacttgaggccaggagttcaagaccagcctgggaaacacagcgaaaccccatctctactaaaaatacaaaaattagccaggtgtggtaacatgtgcttstagtctcagctactcaggaggctgaggcaggagaattgtttgtacccgggaggcagaggttgcagttagtcaaaattccaccactgcactccagcctgggcaacagagcaagattctatctcaaaataaataaataaataaaaacaaaaaaaaatgaagattaaaattagtagaaagataaaaatagatgagacattgaaaatatagaaaactctctgttttaaaaaatgtatttttgaagttttgtatcattataattaatatttttccatattcattagccatggtagacccacattatttggcaatcattatagaacacagtttcgtaatatcaattaactatattcacctacaagataa

SEQ ID NO: 304346 - DNA, 584 bp, Homo sapiens
gttctgacaaaaatgcccaaatgcaaatggtgatgtctgggtaaattaagatgaagatgaaggccaggcatggtggttcatgcctgtaatcccagcattttgtgaggccaaggtgggaggatcacttgaggccaggagttcaagaccagcctgggaaacacagcgaaaccccatctctactaaaaatacaaaaattagccaggtgtggtaacatgtgcttctagtctcagctactcaggaggctgaggcaggagaattgtttgtacccgggaggcagaggttgcagttagtcaaaattccaccactgcactccagcctgggcaacagagcaagattctatctcaaaataaataaataaataaaaacaaaaaaaaatgaagattaaaattagtagaaagataaaaatagatgagacattgaaaatatagaaaactctctgttttaaaaaatgtatttttgaagttttgtatcattataattaatatttttccatattcattagccatggtagacccacattatttggcaatcattatagaacacagtttcrtaatatcaattaactatattcacctacaagataa

SEQ ID NO: 304347 - DNA, 575 bp, Homo sapiens
cattcaccatgaccgctgggttagtttcacttcatagcataattaagtatatcagacactttttaaaatgtcccaaagatctctgaggctctatttatttttcctatttttttttatttttttcagattggatattttgttttaaactgtcttcaaatttcctgacttttaccatttcccatctgctgttaaaccccttaaattgttattttaattttctgttctgcaattccattttgaatttcatttgtttcattgttatgctgaaatccctgacctatatgataaaattatattacatttaatttgatatttattaattttttaaatayataaataatagttgctttaaagctttttctgctaaatgcaatgttgtttcttacatgatttgataatttgattaaatattagaaactataaatattacacacattctggattgtattattgtccttgattagcactgtgacttgtttgttctagtgaagtattcgccttgcctagagattttgccttgtccttccagataagagtgtatcagcttgagagtgcaagaggggagatggagcaag

SEQ ID NO: 304348 - DNA, 502 bp, Homo sapiens
ctttgtgagaaacaaaaatcaggtgagcacttgtagtacctggttttaactttgtattgcagaaagaggcagaaaaaacagtgttgaattgctggtgccatgcctcccctatccccaagcagaggtattctggtactgacagcatttctgtgcacgggggaaaggagagcagagtaattgtgaggcattgaactcactgctgtcctgttatagcagaaaaggaaaaccggatcaatcctggctgacacccacctacggaaggagcatttgaaccaaaagragaatcgccaatcccaggggttggaacgtgagttcctgcaagcctcgccatcatggtccaaagagctcctggggctctaaataaacttgaaaagcaatctaggccacaaggactgcaactcctagaagagtcctagtgctgaacttgacccagagacaggggactagcggggaacatgacctactgagacaccagcccacacaactaagagagtgctggcat

SEQ ID NO: 304349 - DNA, 554 bp, Homo sapiens
tagaccacatgttaggtcacaaaacaagtcttaaaatattcaaaataaattgaaataatatcaagcatctcctgctacagtggaataaaactagaaatcaataatgaggaatttggggaactatacaaatacatgcacattaaactatatgctcctgagtaaagaattaagaaaatcaaaacatttttgaaataaatgatagtgaaaacacaacataccaaaacctatagaatccagcaaaagcggtactaagagggaattttattgccataagtgcctacatcaaaaaaaaacttcaaataaacaacttaatggtacatcttaaataaccagaaaatcaagaacaacataaacccagtattagtagaagaaaagaaataataatgatcagcgcagaaataaaatgaagaagatacaaaagatcaacataacaaaaagttgtttttttgaaaagtgaaacaaaactaacaagsctttaattagttagactaaaaagagagggagagaggatccaaataaataaaatcagaggtgaaaaaggagacattacaact

SEQ ID NO: 304350 - DNA, 561 bp, Homo sapiens
gataccaacctacattgtaataaaaatgtacatataagaaaatgagaagggaaccaaaatgggtcattacaaaacaatacactaaatacaaaggaaagcagtaatggggaaaatrgccaaaaagatataaaatatagataaaacaaatagcaaaatggcagaagtaattctttcttcattagtaatcacttgaaatgacagtggattaaactcttcaatcaaaaggcaaagcttagaacagagaacatcatccagttgtataccgtaggagactcaccttagatcaaaagacaaatattggttaaaagcaaaagtacagaaaaagataacccatgcaaatagtaaccaagagaggtagagtggctatactggtaccacaaacatagattttaagtcaagaagtgtcataagagacaaaggacatttcatattgataaagggatcaaatcaagaagctgtaacaattatggtcatacatacaccaaacatagccacaaaatgcatgatgcaaacactgacagaattgaagagagaaaagtcagctctatgataacagagact

SEQ ID NO: 304351 - DNA, 545 bp, Homo sapiens
gaatccagggagagcaccttttccttttctcatagtcagtagtaatggaagtaatggaggtagtaattaatgaaagactattaggaatccaggccttaataaatcagacccttgaaacattaggtttgtggtcattttttaaaataacaaattagctgaggactgtagacaaaagcaaattttttttttttgagatggagtcttactcaatcgcccaggctggagtgcagtggcagaatctctgctcactgcaacctctgcctcccaggttcaaacagttctcctgcctcagcttcccgagtagctgggattacaggcatgcaccaccacgcccagytaatttttgcatttttagtggagaaggggttttaccatgttggccaggctggtctcaaactcctgacctcaagtgatccacccacctcagcctcccaaagtgctgggattacaggtatgagtcactgttcctggccgagaaaagcaattttagtcacaaacaatcatggctgcattaacaacttcaaacaaggtctatagtaactgag

SEQ ID NO: 304352 - DNA, 589 bp, Homo sapiens
aactttaaacataatatttaccttataggtgtgtgtgcacccacatgcatagaggcatctttgtacatttaaatgtatatgcccaagcattcaagtaactatttttgaagtgagtcttcaacttttcaaatcttcatggttttttatattttattatgagaagcaccaaccacaattaktgtggaaagtgctttggggtttaaggaccactgagattttgtaattataaattttcataatatacagaaagcagttggtggagtgataaaaatacatactaatttcttcctggtactttctggatacccacaatctatagaacatgcccagctttctaaaggtaaaaataacagtttttgaaataaagttatactgtataggatacacagattaggcactgtagcaatccaaagtaaatgataataaacaaacaaaaaaaatcactccaaaggatatcttaatcaaattttagaaaactgtgataatagaaattactaaaagcagacaagtaatttttttaaagtaacattatgcacaggataacagaaaaagatcagacaaaactagagacatagacacaacaaaaaaa

SEQ ID NO: 304353 - DNA, 541 bp, Homo sapiens
ctagtcagttgagaagatggatttgaagctgatctgccatcttttcagctgtagcacctgaaagacctaaagtctttttctctggcaatactcattgcctcaatgactggctttctaaatgttacccctggcattttggtaatataatgttcaaaaggttatacatatttacatagatacacaatacctggtacactgtagaaactaaaaagtcatcatatcttttaggtgtagtaaccaygagtgagcagatcataatttcaattataagagcagctataattaaagaacagttgtccactcactgcatacccaaataaacaggcccaatataaacataattggtatccttctacaacacacaaatatactaaaataattgcagtcaatgtaactgactaattagggtagactgttcatcgtaactaatgagtgcctcgttttgtcaactatgctaggtagtaaatgtttccacatatgtttatcatggttttagatactgagattttgctacacagtataaaatattttaagttaaaag

SEQ ID NO: 304354 - DNA, 542 bp, Homo sapiens
agtgttctttcctgagattcttactctgtttgtagatgtcttacttgatttttaaaggagataaacctggactgaatcagcagtaacatttagatgtcctttagatggttcacccttaaccataaaggacagacacaccagccttggttagtgtttcttcatcactgaccatttttagcatattgtactaagttgtaaaatgtgaaagtatgtatctggaaaaaaaatgtttctggcaygattgttttcttaagagttgtaagctgtatgtatggaaataacatgtaaggaaaacattatattcaatttagtgttcatgattagatatccattttagctgagaccaaattttaaaaatgattaacattacaaggacattctactatattttatgttgaattgagaacaaagatgcgttttgtcttgacagatcagtcttagagatcaaggaaatagttttaactttccttttcatcccattcgattagtgtcacatgatacagcagtccctccttatccacgagggatagatcccaagatcc

SEQ ID NO: 304355 - DNA, 557 bp, Homo sapiens
acatagttttaaagattctaagtcttggctcgatttttgtggcaggatactagagaataccctttagataatgcaccagttttttctttaatttggttaaatataaataaagtcctaatatgggaggtatttccttctgtaagcaaaattctatgtgcattaaactttcccttgattcatatttcatctgtttactctaaagtcagaaaagctaaaagcagtagctgtttctagtacccagtaggtggtgctttcaaccagagtttggtagtcctgactctgcttccactctgtatcctcatcktaataactgtccaaagatgcgttggaaaccaatttgaattgaaaaaactgacttgccttttcatgttaaatcttcaagtacatcaatgaagagtaaatacaactagcttaaaaaatggtaatgtcttactatacacttttaaaaataagtaaaatgcaaaacatgactacaatcataaaaatagcattcctcttttcttgtttctgtattttaacttttatttcttttgcagaaccaacaaagctaccaatca

SEQ ID NO: 304356 - DNA, 534 bp, Homo sapiens
tttaattccaaagaaattaaatccaaaagcaaaatatcttgaccatgtgagtaaaatctccaaaattatttccccattgttttgttattcttttcaatctctgttagaagtattgccagtgactgaatttagttggtatgcattcaacagttccagtgtcttctattttatagtggactgagtatacatttttaaggttctaaaattatattattttagtaccaagccttgacttcacttttaaggatttttttcccctttgttctttaaatctgtatttctttgacaatccacttctaacagataacagcatcatctacacaaatgtataaagacaatatatctggcttttttctttatttaccccgacaaccattcattatccaatacctgcaactgtactaactcctcgcrcctgatcaaggacagattattgtgcctctttcactctttatatccaatcagtatcttaacttcaactatttctcaaatctccagggctatatccgttagttcatactataattatccctc

SEQ ID NO: 304357 - DNA, 478 bp, Homo sapiens
ctggcttttttctttatttaccccgacaaccattcattatccaatacctgcaactgtactaactcctcgcacctgatcaaggacagattattgtgcctctttcactctttatatccaatcagtatcttaacttcaactatttctcaaatctccagggctatatccgttagttcatactataattatccctcatttggattactgtgagagtaaccctttctttcagaacagataaaatgctctatgtctttccaaggcaccattctttaccttgggttataaaacatccagtctcttactcaagcacttcraaatacatggaaatgtatctatttattttccaacttcttctgcacagggaaacacaaaagaaaatgggaatatgcagacaaatttaattagctgtattccttatctatgctttctttgctatttgcccattacagtataaataacatgcccattttcttctgtgtga

SEQ ID NO: 304358 - DNA, 623 bp, Homo sapiens
ctgacttttaaaatagagatgtacaggatcaacccacagatattttaaattaatttttctattgtaaggataagacatctggacttaaaaaaaaaactcctatacttgtgctggtcaaacactttattaacatattataaatatttgttattttggtcactatgctcattgtgatttaatggccacaacctgaattattctgaacttattaactatttttaaarttacaaatagtttttacagagctttatgttcctatgtaagcttttgtccattaccttaaaatatactctatttttaaattaatcaaacagtactcttttaataagaaatagtcacagtgatataatttacatctttaaacatattggtagcaaaatacattttctaatatctcactgccagggacttgctctgaaatatatttgtctgttttacctataaagcaatgggaagagaatgtttttaaggtatccactgtttttgtaataacttgtaatttccatttcttttttaatttggctatatggcattcctaaaggaaagatgcattcaatttgccatgtgctacttcagcatattcctctgcatgggtgaactcattggctttgtaattgtaaagc

SEQ ID NO: 304359 - DNA, 644 bp, Homo sapiens
tgccatccatgtaagatgtgacttgctcctccttgttttcctccataatcatgaggcttctccagccatgtgaaactgtaagtgcaattaaacctctttcttttgtaatttgcccagtcccaggtcatcttcagcagcagtataaaaatggactaacacacttcccattattaaaaactattgtagtataactaggattggaacaccatttttcaatctcttagactgtgggaaacttcagccatcttataatgtcttatgtaacataacctaaaaagcagagattattggaagaaaaatgtataagcattgcagataagaaacttaaactttaacaaatgatgagggatcagttcagtgactgatagaagaggggaccaatgaggttacttacaggagggttttcagatgaggcaactagagttgtgtcatggmagatagtagaaagaaatggatttattcatttatttagcggatatttgtttaatgctatatgctagatactattctagctgctgggaatacagtgttaaatgtcatagataaaaactttattcttattccgttaaaatagagctgaacttgaataataacaatgaaaccagtttggagaatggccgagggaaaaaatctttccagaaaaa

SEQ ID NO: 304360 - DNA, 591 bp, Homo sapiens
ctaatatcaagtgaaaacttgtttaaaaatcacacaggatttcagggtagcaacagtgcctgggtgtggtagtacacaccagtagtcccagatactggggaggctgaggagggagaattgcttgaggccaggggtttgaatccagcctgggcagcatagagagaccccatgttaataaaagtaactaacagcagaaggttaaaccaaacatgggacccttctgagcacagggccctatgcagaaccaatcctgaaaataataaaggagagaagggaaaaaagtatggttggagagagagaagccagattatactgggtccttaagccatgggaagattctggatattattctaagtgtgataagaagacaatggaaaactttcaacaggaagtaaggagaatttaattataaaggcacagtctagctcctgtgcggaatggaacatttgggcratgaggagaaacaaaggtaacagttactaggctgtggcagtaggtctggaatttgtagaaagactatgcagggctgtccagtatcaacaagaaagtaagagccaagtagtgagaagcagcagcagctatcaattaggg

SEQ ID NO: 304361 - DNA, 635 bp, Homo sapiens
ataatatgccctcattttatataagtggaaaagaaactaccttgaaatatcttgaatatatacctacatataataggccctgaacctgaacataaatttgagtcctacatccaatctctgtgaaatatatataccaaataatcctgaacacaacatgcagaatatcctaactattatcattgcaatctaactatcatgtgtaatttacctcagatctgsactctttcaatttcaacatggaaacgaatcaaatctaactcttttctttcccatgcctaatgattgtaaaactcctttcagatcggcatacctgcctcagttaaaaatttggtaaagccagatcaaactcagatcagaaattgattgaatttcttactgccttctaaagtaggtctactccttaatgttttgtttaggtagtttcatgttgttttaatacaagtttctatctatttatttatcttaacaatacttttacatgcctctcattgtctcataaatttggatcctagttgtaacagcattttatttgttatgtttataagttttaggcttgtccatgcccttctctctagtctgaatgtcctaacttcttcatcagtccatgtcaaatcctaatcacctttcaagaaaaa

SEQ ID NO: 304362 - DNA, 612 bp, Homo sapiens
tttttagtaaaaatggaaattacaataccttgtagaattgttgtaagaagtatgtatatgaagctgacttccaaatcggttaggccctttcttttcttattcccattttcttgctcattccactgttgtcattctgtgtatacggcctacagccagcaagaaactgaggcctacattcatacaaccacagagaaatgaattctatacaatagagtgggtatggattatagccagcaagaaatcgaggcctgcattcctacaaccacaggaaataaattctaccaacaccctgagcagtcttcaragattttcacatgagactacatccccagccaaaacatagattgaagccttgtgagatcctaaggagagggctcagttaagtagtgttaactcctgacccacagacgctgtggacaaacaaatgttatcttaaactgctaagtttgtggcaatttattactcagcaatataagataatatactttgttttatattccctttccttatttgattacatattctttgaagactagaccatgtcttctttattctaacttgtttttaagggttttcacagtaaaagtttgaatgtaaatgtaatctttacaa

SEQ ID NO: 304363 - DNA, 526 bp, Homo sapiens
ctttgctattgttaataatgcttcaatgaacatacacattcactgtctttataatagaacaagttatattcttttgggtatatatctggtaatggtatttcttgattgaatgtgttgacgagaagagttacacttggtaaaatagttgaagagatttattctgagccaaatatgagtgaccatggcccrtgacacagctctcaggaggtccttagaacatgtgccctaggtggtcggggtacagcttggttttatgtattttagggagacatgagacatcaatcaaatcatttaagaaatccattggtttggttcagaaaggtgggacaattcaaagcaggggcttccaggctataggtaaatttaaatattttctagttgacaattggttgagtttatctgaacacctgggattaatggaaaggaatgttcaggttaagataaaggattgtggggaccaagtttcattgtgcaaaggaatctctcagactacagagagagaacagtttgtaaaaagtttcttatt

SEQ ID NO: 304364 - DNA, 490 bp, Homo sapiens
caaacagtataatgaatcaaactgaacataatcatcaagcctgttcttaccgtggccatgtaagggagggacaaaatatgatgacacttccctcgtgttccatttctctgaaagagacactgcttccttggtttgagggtagggaaaggtggagagtctgagtaaagagaagtactgagtaagaatggagaaaagtgtttagataaggcggtcttcacaggggcacctgaaaagtgcctgagctgaagcatcccttccccgataaggaatctstaaattgaagtgcctgagctagtaatgcaaacatgcctatgactatggatggctaagagggactgagtcctgagtataactcttttgagaaaactgtaaggcaccaccacgtgtgctgtgggaagggtagctttccctcatgaggcttggaaggcaaagcctttgcaactgcctatagtcaatcaaatattttacataagattttgcctggagctgg

SEQ ID NO: 304365 - DNA, 502 bp, Homo sapiens
aactaatgaatagataagatggatgccagcaattgccttctctaatgcaccttcattctcctggtgatggacaaattattttgtattgcacctggggtacactattaaattcactcctaatcattcatcatttcacggtcgtcccatcctcaggaatttcagttatttttaatgcctactttcctttagtaattgatgcattcaaagtgaagtyatctattctaagttagccttgggtttcacagagacacatgcagtaaaagcctcttgttcttccagactaccaggctggtgattctgccatatggatcctaaaggggctgataggtttaatattaaaccgtaatgaagagatgtcacaaaaatatgatgtgtatttagcatttggtctttggagagaccatctctgtaaattgcagttccttcttggcatcttcattgtattctctgactcatatatgagtgagccctcgtggggcaccatatttcaacaagtcaccct

SEQ ID NO: 304366 - DNA, 502 bp, Homo sapiens
aactaatgaatagataagatggatgccagcaattgccttctctaatgcaccttcattctcctggtgatggacaaattattttgtattgcacctggggtacactattaaattcactcctaatcattcatcatttcacggtcgtcccatcctcaggaatttcagttatttttaatgcctactttcctttagtaattgatgcattcaaagtgaagttatctattctwagttagccttgggtttcacagagacacatgcagtaaaagcctcttgttcttccagactaccaggctggtgattctgccatatggatcctaaaggggctgataggtttaatattaaaccgtaatgaagagatgtcacaaaaatatgatgtgtatttagcatttggtctttggagagaccatctctgtaaattgcagttccttcttggcatcttcattgtattctctgactcatatatgagtgagccctcgtggggcaccatatttcaacaagtcaccct

SEQ ID NO: 304367 - DNA, 502 bp, Homo sapiens
aactaatgaatagataagatggatgccagcaattgccttctctaatgcaccttcattctcctggtgatggacaaattattttgtattgcacctggggtacactattaaattcactcctaatcattcatcatttcacggtcgtcccatcctcaggaatttcagttatttttaatgcctactttcctttagtaattgatgcattcaaagtgaagttatctattctaagttagccttgggtttcacagagacayatgcagtaaaagcctcttgttcttccagactaccaggctggtgattctgccatatggatcctaaaggggctgataggtttaatattaaaccgtaatgaagagatgtcacaaaaatatgatgtgtatttagcatttggtctttggagagaccatctctgtaaattgcagttccttcttggcatcttcattgtattctctgactcatatatgagtgagccctcgtggggcaccatatttcaacaagtcaccct

SEQ ID NO: 304368 - DNA, 523 bp, Homo sapiens
caacaaaaatggaaacaatctatgtatccatcaatgaggaaataataaatacattttgatgtatctacattcacgagatgtttatgatatgttaaattaaaaaaaagtcagttgccaaaaacagtataaggtcatatttttgttgaaatatgtgtgttactaaaagtagtcatagtaaaatacactaaaatgttaggagaacttaccactaaggataggttttgatagaaaaactagaagggtcctttcacttcttattttaagtaatttccagccgggcgcggtggctcatgtctgtagtcctagaactttaggaggccaaggtgagtggatcacgtgaggtcaggtgccaagactagcttggtcaacatggtgaaactctatctctactaaaaatacaaaaattagcgggatgtggyggtgcatgcctgtaatctcagctacttgggaggctgagacaggagaatcgcttgaacctgggagttagaggttgcagtgagcccaggtcatgccattgcactcc

SEQ ID NO: 304369 - DNA, 584 bp, Homo sapiens
tatttttatttaattctgtaatcccagaacatcatcacaaagtggcctaaattaacacttttgtttagggggaaagtttatgtattcactcaataaatatttactaatagcttataatatgtaggctacagagctgtgtgctagagatgctgtaacgaacagttcagccaggaacctggccctccgctaatggatcctattggagactctatatctctttamtctctggtatcagtgttagctcattgtgttttcttcctcctaaattcctaaatctagtttataaaacttccctagcatatcatgatgtataataacagtttattaacaatactaataaagacattgaataatgtatttcagggaggagtttaccttttatttatgttatctcatttaatctttacatgaggaagctaaattagaatcaattgttacattttcataagcaattacaactttaaaaatatgttatcaattatgttttagggctttttgtgtcacacattctacttaattattctgcacttaatgaaatataactcagtgataaaattttatacatttagctgtaaagaaaaccc

SEQ ID NO: 304370 - DNA, 586 bp, Homo sapiens
gaattgtatgtgtgcacatgaattagcataacatgcatatatttcctagctgtatacactgagagaggctgcaaagtgtgaggccccagtaacagtgagcacacttaatgtccagattttggtttctaaacatcatctttcaaaaaacaataactagaatgccttggagagttcattgattccagggcaggtgcagagaatctgggacaccttgtgtaccagattttaaggatttgctaagaaaaaaaaacaaaaaacaaaaacagtggcatattgaaagggcmcactaaccaacttgaaagagcttctaatgttcaaagtgggaataatttgagcaaggaaagaaagatagtatcagattataacccaaggactatgataaaattacatgagtctatactaatagaaataaattactgaaaaattttaaatgaggtagaagtgaatattctttcttatagaaaattccaaatcacaaatatccaaagaataaggaatatagaaatcactctaaaaataataattgctacaggaaaatctatctatgaatgctaaaattggtgggcataatttgaagtggaaccag

SEQ ID NO: 304371 - DNA, 609 bp, Homo sapiens
gtggctttgcaaacagtgtgccatggatctttgcatattcttattagagtcagaggctcctaatggttctgaaacatattttccttcataataaatttcaaacacttcgtttccagtgccaggaagattggaatttttatatttttttataaatggacaaattcttttttttttctttttctttttctttttttttttcctcgagatgaagtcttgctctgtcacccaggctggagtgcaatggcacaatcttgggtcactgcaccctccgcctcctgggttcaaggtacactcctgcttcagcctcctgagtagctgggcttacaggtgtgtggctaaccttttgtattgacaaattccttaaatagcgttttatagaatgggattgcagatacaattagatttaggaaaatctccaaaattttgtacaactcattataatgagcagtataatgaacattgtgataaaaaagcttggaccaactagaggtctaattgtcctttgacccaataacttagtgaatgatacagtgtttctttgcagcagctcttcatcatctttacaacaggtactgtacttgkatcatcagtagttgtaatagttgcaat

SEQ ID NO: 304372 - DNA, 622 bp, Homo sapiens
tttatacccttgttttctgtcatgatccattcagctctccacggtgtctacattgtggcaacagattggacatagtgctgttcttccacgctgaaatgtgatcgttatagtgcagtgtttcttggattctttcgttaatcgctgctgccacatgatgtatctgttcatatacagaattccagtgctaatttgaaggaatataaaaactgcttccgataaaaatctaaattgctatatttgtttagtgcttgctgtggtgtattctttgctttacccacattttagtggttgaaactttgagagagtagagtgccttaggatttgatctgttgacaaaagcagtgggagttttttgtgtaattgcttgtcaaaatgaaaacaactacttggccatttgtgtgtgtctgcgtgtgtgttttttttttttwaaaaaaagccaaaagaaaaccaaataatacgtgctatcttttgatgtacttacaattaacttaatcaacctataaagcttttgttatccgcatatttgaattttgtaaccttacattctgtgtacacaggacaatacaactgctatgtaagcttgtagaagtacatgggaacgcagagtattactcactatgag

SEQ ID NO: 304373 - DNA, 615 bp, Homo sapiens
gtaaggtatagggtcatccacagggggtataaaatatgttagagaaggaattttcctattccaactttaaaacaaatctcggcattttctcttgtttgagctgtatctgcccctttctgtattcaatgtcttagttttacctcttgccttcctagattcattgaaactgagttagccttcaaactccatgtagctcaaaactcaatatttgacttgatggaactagggtatctgccaagttgactttcattctcgtttccactggctgtcctagtatagtgtgtgaataagtcttccagrcatgaagataattagattatcaagaggaatttgatgaaagatttgtactttgcaaagtagctaaacatgtagttccatagaaaccatgcaaatacaattgtttatgtattgaatctcatatttggacatgctgatgcctaggaaacctaattttctgcccatgaaatttcctaagatattgccaaattatattctaaacaatgtctttgagtctagtcacccaatgtccaagttttgaaaatgtccaaaatgtatgctgccctcaaagagacaggcagtttagtataaagtatatgcgcctcatagacagatgaa

SEQ ID NO: 304374 - DNA, 636 bp, Homo sapiens
cccatgcaaaccctttgattttatttgaaaattccctacttttctaaggaagctattgcttgtctgttacactatttcacgtgggagggatgagatagatcttatgaatgttcgayaaatatttgttaaataagtgaatgaatgaatgaatacatttcaaaaaggtaattttaaaaattattataataagcacatcactctttcagttagaaaaacataatttattcaccaataaataggaaatacatgaaagacaccaatgaaaattgttatgttgcttctctgttttatttaacaaattatacaatcaacaataatcaaaaccaaatgtgtgtattcaaaaaatcttgatagattgaaagtggggatttgtgataatagcaaatgtgtgtctagtttaagagccgtggagtagtatcactgatactaggtagaacacttattctgccacctgtcacagcaccatgccttactgaagcagtactctgtaaggactaataaatgttagcatcccttgaaacatggcagctcctgagttgtaaaaatattctggacaatcagcaaaggaaaagattatttcctaatatacaaagaaattggagattaaagggaaagtttcaatattaaggattttaa

SEQ ID NO: 304375 - DNA, 636 bp, Homo sapiens
cccatgcaaaccctttgattttatttgaaaattccctacttttctaaggaagctattgcttgtctgttacactatttcacgtgggagggatgagatagatcttatgaatgttcgataaatatttgttaaataagtgaatgaatgaatgaatacatttcaaaaaggtaattttaaaaattattataataagcacatcactctttcagttagaaaaacataatttattcaccaataaataggaaatacatgaaagacaccaatgaaaattgttatgttgcttctctgttttatttaacaaattatacaatcaamaataatcaaaaccaaatgtgtgtattcaaaaaatcttgatagattgaaagtggggatttgtgataatagcaaatgtgtgtctagtttaagagccgtggagtagtatcactgatactaggtagaacacttattctgccacctgtcacagcaccatgccttactgaagcagtactctgtaaggactaataaatgttagcatcccttgaaacatggcagctcctgagttgtaaaaatattctggacaatcagcaaaggaaaagattatttcctaatatacaaagaaattggagattaaagggaaagtttcaatattaaggattttaa

SEQ ID NO: 304376 - DNA, 636 bp, Homo sapiens
cccatgcaaaccctttgattttatttgaaaattccctacttttctaaggaagctattgcttgtctgttacactatttcacgtgggagggatgagatagatcttatgaatgttcgataaatatttgttaaataagtgaatgaatgaatgaatacatttcaaaaaggtaattttaaaaattattataataagcacatcactctttcagttagaaaaacataatttattcaccaataaataggaaatacatgaaagacaccaatgaaaattgttatgttgcttctctgttttatttaacaaattatacaatcaacaataatcaaaaccaaaygtgtgtattcaaaaaatcttgatagattgaaagtggggatttgtgataatagcaaatgtgtgtctagtttaagagccgtggagtagtatcactgatactaggtagaacacttattctgccacctgtcacagcaccatgccttactgaagcagtactctgtaaggactaataaatgttagcatcccttgaaacatggcagctcctgagttgtaaaaatattctggacaatcagcaaaggaaaagattatttcctaatatacaaagaaattggagattaaagggaaagtttcaatattaaggattttaa

SEQ ID NO: 304377 - DNA, 575 bp, Homo sapiens
tgtcttcaccttctgttctttctgccatctatactgtttaccctcatgctcttcttgaaatagttctgtcttttgatattagagatcttgtagagatctagtrcatagcctatggctctgcccctctcctaggcttttttttttcttccctcttgttagagggctcctgttttcttcccaccttcttggtttcagtgtctgtgtttattttgttttctctcttagtctttcttccttggaaaatttcatataggcctatggcttcatcttaaagctcaatgtggatatctgatcagcaaagcctcttccaccctttgtgcgagttgtaacaaacgtccccttcctccagatgcacaatgctcgcatcaggatcttcagcttggcagcaaactgagctggatttcagcccctgctcagcctgcacaacctcagacagttgccctgctggtcagggcctcctattcaatgctgtctatggtattccagtgcttcaaactccatgtctttccctcagtcaaactagccttccatctttcatctcctccatcactttttatacaaccaggtgccaatta

SEQ ID NO: 304378 - DNA, 575 bp, Homo sapiens
tgtcttcaccttctgttctttctgccatctatactgtttaccctcatgctcttcttgaaatagttctgtcttttgatattagagatcttgtagagatctagtgcatagcctatggctctgcccctctcctaggcttttttttttcttccctcttgttagagggctcctgttttcttcccaccttcttggtttcagtgtctgtgtttattttgttttctctcttagtctttcttccttggaaaatttcatataggcctatggcttcatcttaaagctcaatgtggatatctgatcagcaaagcctcttccaccctttgtgcgagttgtaacaaacgtccccttcytccagatgcacaatgctcgcatcaggatcttcagcttggcagcaaactgagctggatttcagcccctgctcagcctgcacaacctcagacagttgccctgctggtcagggcctcctattcaatgctgtctatggtattccagtgcttcaaactccatgtctttccctcagtcaaactagccttccatctttcatctcctccatcactttttatacaaccaggtgccaatta

SEQ ID NO: 304379 - DNA, 562 bp, Homo sapiens
gttgcttggctgaaagtgccttataaactgagcccatactggtaatgagtgatcttttcccaagttcttaaagtacagctaagattcccagaaagtaacacccgttytaagatatgggctccattgagatcaaggacagaaaggaaaattacttctgttttctcgaggatgtggcataataagaaatacatatttggcctttgttcctttctcctgggacacagctttcaaaatccatggaatctctagagtgatgagagtgtcttttgtatgctaatgagatgacttgtggctggagcccctagatagctccagcatagggtctggtctccagaaaggccaaggcacaattagaatgttggaactttcagtcccagcactcaacctccagaggcaggagaggggctgaagtctgagttaattacccttggtcaataatttacttaatcatgcctatgtaatggaacctccattaaaaaaaaaaaaaaaaaagatgggattttggagagcacctgtgttggtgaacacatcaagattcaaagagatgcatgcccataaatgg

SEQ ID NO: 304380 - DNA, 600 bp, Homo sapiens
aagcaaatgcagaaattttcataaatcactcaaaaggattgttgcttggctgaaagtgccttataaactgagcccatactggtaatgagtgatcttttcccaagttcttaaagtacagctaagattcccagaaagtaacacccgttctaagatatgggctccattgagatcaaggacagaaaggaaaattacttctgttttctcgaggatgtggcataataagaaatacatatttggcctttgttcctttctcctgggacacagctttcaaaatccatggaatctctagagtgatgagagtgtcttttgtatgctaatgagatgacttgtggctggrgcccctagatagctccagcatagggtctggtctccagaaaggccaaggcacaattagaatgttggaactttcagtcccagcactcaacctccagaggcaggagaggggctgaagtctgagttaattacccttggtcaataatttacttaatcatgcctatgtaatggaacctccattaaaaaaaaaaaaaaaaaagatgggattttggagagcacctgtgttggtgaacacatcaagattcaaagagatgcatgcccataaat

SEQ ID NO: 304381 - DNA, 562 bp, Homo sapiens
tttctaagtccaaggtcactaggctgtaatcaaaatataacttgctagatgaaaacaaacatgcattcagcctgtttgaaattttgagtaaataattcacgaatatttttatagttcttactgtgggtacattgataagtgagacttaatatatggtgcacactagatcttggttaaatctctagtttaaaggcaaataagtgttttaaaatattggcaatagttattctttttaaatgaaaaccatttcttcttatccttatcttagcatattaatgtcatccaataactagaggtcttcgagagataatataacccatagataatataatatrtttctttgttggcgggaggatggatcaatgtgccatcactgctttgtccctgagaggagaattaattatgaaacaaatggagcttaagcttcaaggcccctcagttgcatgggcctcttccaaggttctgctacatcaatgtgctcatgtggtcatacatttaggccacagtctattaagaaccctctttccattccaatttaccaaccatcacactttcccttggg

SEQ ID NO: 304382 - DNA, 562 bp, Homo sapiens
tttctaagtccaaggtcactaggctgtaatcaaaatataacttgctagatgaaaacaaacatgcattcagcctgtttgaaattttgagtaaataattcacgaatatttttatagttcttactgtgggtacattgataagtgagacttaatatatggtgcacactagatcttggttaaatctctagtttaaaggcaaataagtgttttaaaatattggcaatagttattctttttaaatgaaaaccatttcttcttatccttatcttagcatattaatgtcatccaataactagaggtcttcgagagataatataacccatagataatataatatatttctttgttggygggaggatggatcaatgtgccatcactgctttgtccctgagaggagaattaattatgaaacaaatggagcttaagcttcaaggcccctcagttgcatgggcctcttccaaggttctgctacatcaatgtgctcatgtggtcatacatttaggccacagtctattaagaaccctctttccattccaatttaccaaccatcacactttcccttggg

SEQ ID NO: 304383 - DNA, 547 bp, Homo sapiens
cttagaatgttcttttttcctttaatttacatttcttctattaggtagccaccacaggacagttaactatgatttcatagtttgaacgagtagcagtatttaaaagatgaaaccaccatatatggatatagaatgtgtggtagcaagcgcattactcataatcttcctagacctgtgtgtttctttatgctttggaaatgcttcctgttgctattcatctccttcttatctgttggtgctacagagagcatgtgaatgccatccattatttccaagactttgaggaaaccagtcatgacataccagggaagctttgattcaccagctgttgctctcggggaatggttggaaacttaatgagcatccacatgccttccacagctctcaggaaatgagcmaagtgcctaaatacagacagcagactcatctatctatcacctcaaggtcccactcagagaaaagtgctaataccttaggcatacataataaaagtcactgagaacaggcataacttaatttcgagctactcttaagcttcctgcagaag

SEQ ID NO: 304384 - DNA, 605 bp, Homo sapiens
gcaagtaaaggtacaattattaatagagtaagtgcatagaaggtccctctaagtcttaagagccaagggtggctttgagttgaaactgaaagacaggaagaagttgcccagatgaatatctagacaagcaatatggaggagggttgagtcattctcgcttacctcctacccttgccatccttcccagtatgctatcatccctaccccacccaccccacaatggtcttataattgagatcttgtgttagctgatgtagtcctttatgtttttcatggtctgtccttgagaaggttgggataattggggtggaatgtagctatgaccaagagacagcaaaatgtagcctgagtcaagtacagaaccccttctgatcttggaattcagactgaatgggaacttactcaattagcatttctccttcatttatcacacaagaattgtttgattccctacacatcaaataactcttacaaaccccatttgaggggtgaaggataaatgaataactcrtgaattatgttttccttttaaacacttgtgaatcatattttaaagggaaaagcctagcaaagccatcattattggacccacagtgctgacaagt

SEQ ID NO: 304385 - DNA, 534 bp, Homo sapiens
tctaacctgataccagcagaataagatttagaattggctggacacaatggctcatgccaacactttgggaggccgaggtgggcagatcacttgaggtcaggagttaccagcctgggcaacatggcaaaactccatctctactacaaaaattaactggccatggtggcacatgcctgtagtcccagctactcaggaggctgaggtgggaggattgcctgagcccagggaggctgaggttgcagtgagttgtgatcatgcccttgccctttagcctgggagacagtgagactctatctcaaaaataataataataataataataatagtaataatagccattaaagaatgttttctgacaaagtttgrggtttgaactctttaatgaaatgttcaataggaacatttatgtataaggtatcaaaatatcacactatatccataaatatatagttattatgtgtcaattttaaaaaagaatatttgtaaaatagtatgataaaaattgcagcttacttcctcagataacatatattg

SEQ ID NO: 304386 - DNA, 632 bp, Homo sapiens
ctgcagccccaaccttcttctttgccacataaccttttcagtttaatggtctctccttttgaaactcactttcctaaagtagaccaaactcccttatctccattggcatgaactcaaaatcctcctgatactaaaatctaaaattctgctggttgaaccttctccttgtaccaatctggcattaccagtttttcccaaatatttatgaagctttttaaaagtgttctttttttacatttaaaatgaaagtatattcatattttctgaggtataaataaaaatttttatgtttgcgttgatggttatattggtctgcatgttcttatattattcttcaggtataagcatgattctttaaagataaatttatatttctctttaagagaytgtatttatatttttaaaaattaagcagtcagtgattatagttagaaaatctcaatatgaagttcccagttctttgtttgcttggtattgatgataaatcatattttatgatcattttgttggtggaaaagtagaagcatgccttcttgatgtaccaactcttcctgcgttatttgtgtcatttgtatctgaagaatgcatacactttaaaataaattttgcaacacttaggaacctcttatttt

SEQ ID NO: 304387 - DNA, 632 bp, Homo sapiens
ctgcagccccaaccttcttctttgccacataaccttttcagtttaatggtctctccttttgaaactcactttcctaaagtagaccaaactcccttatctccattggcatgaactcaaaatcctcctgatactaaaatctaaaattctgctggttgaaccttctccttgtaccaatctggcattaccagtttttcccaaatatttatgaagctttttaaaagtgttctttttttacatttaaaatgaaagtatattcatattttctgaggtataaataaaaatttttatgtttgcgttgatggttatattggtctgcatgttcttatattattcttcaggtataagcatgattctttaaagataaatttatatttctctttaagagattgtatttatattttwaaaaattaagcagtcagtgattatagttagaaaatctcaatatgaagttcccagttctttgtttgcttggtattgatgataaatcatattttatgatcattttgttggtggaaaagtagaagcatgccttcttgatgtaccaactcttcctgcgttatttgtgtcatttgtatctgaagaatgcatacactttaaaataaattttgcaacacttaggaacctcttatttt

SEQ ID NO: 304388 - DNA, 593 bp, Homo sapiens
tcgaatcattagaatgctttttggctctaagtgacaaattcaaaatggcttacacaataaagaaatacattattttatataagaaaatattcaaaggaggactctaggttttgcttgggagcccttttccacatgttggcattgtcttctgaccacggacaagctgggcacagtggtccaagcatcctctctggtgagacactggcagagaacagagagactacctcatgtctcttcctgagcagagaggaaccttccccagagcttcccggctgatgcccctgacacctcatttgccagaactgggtcagctgtccatttctgaggcagtcactggcaagagaaatggaattgtcgttaatagcttaagtaatttttgggggtgggctgttctagaagagtagtttcacagacagctgttttagtgacagctttattcaaataagccatagtatatttgttttaagaataagacaaagccaagattctcaagtgagaarggaatggttatatcaaaataatctatggagatttttccaattagacccaccctaatctgtggagttatttcagttatttcaaactagacatag

SEQ ID NO: 304389 - DNA, 522 bp, Homo sapiens
ttgcttctgctttggtaataaccgtaaagtaataatgaataaaagttcaaacttttatcgtatttattttcagtaatctcacccataccatattgcctctaggtgacagtgttaattagttccactgacccctcaaatttagataaagaaaatgctawcagggacctgaaatttgctcacacgggaatctggagaaacacaggcatatcaggtggctctgcaggcactgttatcagctgaacctggcgttttgccaagaaaaaagatttgctaacctttaaactccttcaggggtatgataaaaggagataagattttctgtttggctactcatataaaatcaccattactcctgaagttttcctactaaatactgacaaacacttcaatttggagatggcagcagcagaaaacaccatttgaaatacagaacatctctttctttatcatcacaattattctattcacaagattacctccaataacacttattctttataagtgttcaagaatatcgtgtaa

SEQ ID NO: 304390 - DNA, 487 bp, Homo sapiens
tatattttctttccagggatatgaggattaagtgtagtgtcctgtcacatggtctctcaggaaatcctcagcctaaaagaaaacaaaacaaagccagaaacagcctgccaactgagattaatacaagtagcaaaaatcacacaccataatattttgaagataaatggaagtcaataaacatttgttaagtattaccataataagtrttttggccggacgcagtggatcatgcctgtaatctcaacattttgggaggctgaggcgggtggatcaactgaagtcaggagttcgagaccagcctgaccaacatggtgaaaccctgtctctactaaatacaaaaaattagcctggcatggtggcacgtgcctgtaatcccagctactcaggaggctgaggcaggagaaacacttgaacctgggaggcagaagttgcagtgagctgagatggtgccattgcactccagcctgagcagcaagaatgaaactcc

SEQ ID NO: 304391 - DNA, 487 bp, Homo sapiens
tatattttctttccagggatatgaggattaagtgtagtgtcctgtcacatggtctctcaggaaatcctcagcctaaaagaaaacaaaacaaagccagaaacagcctgccaactgagattaatacaagtagcaaaaatcacacaccataatattttgaagataaatggaagtcaataaacatttgttaagtattaccataataagtattttggccggacgcagtggatcatgcctgtaatctcaacattttgggaggctgaggcgggtggatcaactgaagtcaggagttcgagaccagcctgaccaacatggtgaaaccctgtctctactaaatacaaaaaattagcctggcatggtggcacgtgcctgtaatcccagctactcaggaggctgaggcaggagaaacacttgaacctgggaggcagaagttgcagtgagctgagatggtgccaytgcactccagcctgagcagcaagaatgaaactcc

SEQ ID NO: 304392 - DNA, 536 bp, Homo sapiens
agggaatgcgtggctgagaagagcaaaagcagaagagagaatgaaagtgagagccctgagaatcatcatttaacgatcaggtagagaaggaagagctggcagaggaaaataaggaagaawagtaggattaaatgacaagaatataaagacttgagaactaaaaatagtgctgaagagggtggcagtggtcaactgcatctaatgctgctggcaagatcaacaaagatgagcgctaggtctagccactccacagtgtgtatatacttcaaaacatcgtattttgcacaacaaatacacacaattttatctttcaattacaaaagcaaaaatataagaaaggtgagcattgggaagtactcttttatttgggacttgtaaataattggtgtctttgtggaggcatttattcattcatcattcattaaatacatatatatatatatgtaattttattttatttatttatttatttttttttttttttagactgagtctcgttctgtcccctaggtgcaatctgggctcactgcaacctc

SEQ ID NO: 304393 - DNA, 635 bp, Homo sapiens
ctcaaaaaaaaaaaaagaaagtgagacatttgctcttaaaagctaaatgctttttcttgcattttattgactatttagtgtcccaaaartacctatacactatatataccggcttaaggactaaatttgatataaaagctagtgagagaaaagggtagttttcttcagataaattgaaaaataatgaatgtcaccacctcttaagacagttagcaagtttccttgctaagtgtaaagatggtaaactattgataggaaaaaaatatgggactctcaggactgaacaatttgtgagaaagccatcaaaagacagctatattaagaatagttgaaataggggcattttgctacattcttgcccctattgtttgcgcagcctagttaaactgctggacaagctagaattccaagtgtcttgctcaaagagttgtgcatgccagaacacttacataaccctgaacttttgtattccaagcctggcattatgcagcatattgtaatattaacacagacaaagagattattaacacctagcttagggtaatgggcttcttatgaactagtctcttcctattcaactagaatagtgcagaattttattgacattcaataaagattgactcataaaaatgtca

SEQ ID NO: 304394 - DNA, 635 bp, Homo sapiens
ctcaaaaaaaaaaaaagaaagtgagacatttgctcttaaaagctaaatgctttttcttgcattttattgactatttagtgtcccaaaaatacctatayactatatataccggcttaaggactaaatttgatataaaagctagtgagagaaaagggtagttttcttcagataaattgaaaaataatgaatgtcaccacctcttaagacagttagcaagtttccttgctaagtgtaaagatggtaaactattgataggaaaaaaatatgggactctcaggactgaacaatttgtgagaaagccatcaaaagacagctatattaagaatagttgaaataggggcattttgctacattcttgcccctattgtttgcgcagcctagttaaactgctggacaagctagaattccaagtgtcttgctcaaagagttgtgcatgccagaacacttacataaccctgaacttttgtattccaagcctggcattatgcagcatattgtaatattaacacagacaaagagattattaacacctagcttagggtaatgggcttcttatgaactagtctcttcctattcaactagaatagtgcagaattttattgacattcaataaagattgactcataaaaatgtca

SEQ ID NO: 304395 - DNA, 635 bp, Homo sapiens
ctcaaaaaaaaaaaaagaaagtgagacatttgctcttaaaagctaaatgctttttcttgcattttattgactatttagtgtcccaaaaatacctatacactatatatamcggcttaaggactaaatttgatataaaagctagtgagagaaaagggtagttttcttcagataaattgaaaaataatgaatgtcaccacctcttaagacagttagcaagtttccttgctaagtgtaaagatggtaaactattgataggaaaaaaatatgggactctcaggactgaacaatttgtgagaaagccatcaaaagacagctatattaagaatagttgaaataggggcattttgctacattcttgcccctattgtttgcgcagcctagttaaactgctggacaagctagaattccaagtgtcttgctcaaagagttgtgcatgccagaacacttacataaccctgaacttttgtattccaagcctggcattatgcagcatattgtaatattaacacagacaaagagattattaacacctagcttagggtaatgggcttcttatgaactagtctcttcctattcaactagaatagtgcagaattttattgacattcaataaagattgactcataaaaatgtca

SEQ ID NO: 304396 - DNA, 635 bp, Homo sapiens
ctcaaaaaaaaaaaaagaaagtgagacatttgctcttaaaagctaaatgctttttcttgcattttattgactatttagtgtcccaaaaatacctatacactatatataccggcttaaggactaaatttgatataaaagctagtgagagaaaagggtagttttcttcagataaattgaaaaataatgaatgtcaccacctcttaagacagttarcaagtttccttgctaagtgtaaagatggtaaactattgataggaaaaaaatatgggactctcaggactgaacaatttgtgagaaagccatcaaaagacagctatattaagaatagttgaaataggggcattttgctacattcttgcccctattgtttgcgcagcctagttaaactgctggacaagctagaattccaagtgtcttgctcaaagagttgtgcatgccagaacacttacataaccctgaacttttgtattccaagcctggcattatgcagcatattgtaatattaacacagacaaagagattattaacacctagcttagggtaatgggcttcttatgaactagtctcttcctattcaactagaatagtgcagaattttattgacattcaataaagattgactcataaaaatgtca

SEQ ID NO: 304397 - DNA, 571 bp, Homo sapiens
ccagcctggccaatatggtgaagccccatctctactaaaaataaagaaaaactagtcaggcatggtgatgcacacctgtagtcccagctacttgggaggctgaggcaggagaatcgcttgaaccaaggaggcagaggttgcagtgggccaagattgcaccactgcactccagcctgggcaatagagggagaatctatctcaaaaaaaaaaaaaaagggaggatacarcagaagaaggaaactgaatacaggtatgacaggtactaccctgcttttctattccccaaaaccatggaacccagtaaactgctgtgaaacttggagtcattttctagaagtgatgctgatattctggcatacactatattgtttgtttctgctgaatgctttttaaaaagagagggcttcataataaagaaacttttgttctggtattcttttgagtttgtttattaataacaggattttatgtagttaacaataggaattttatacttcaggctgtaccaaagtctacaagtcaaacaacagggacaacaaataagtagatagataactcctaactttaaata

SEQ ID NO: 304398 - DNA, 642 bp, Homo sapiens
gactttaaaaatatgtataaataaactgaatttcagcaagtgttaatataggtgcttttaaaaatgacagaggcacagcacttcttttggaataggagattcttggaatgggagatcctgtccctgagggaaaagggatgtccatcccaccaaaacttgggttgctgaagaaataacatgttctgagaagggatcagccaaaatcgcctctcccgatgatataggagagcttactgggacaatctgtgccaaagttgttgtgagagctttccttcctcctacgatccaaccatgtcaaacatttcctacaaagtttgagaaacaggtatttttcattctttttaatgcttttttctttttctttctttagwcccaagaatattgaaaaaatattagtttcagtttttgtcacatatgttttgaacaatttttttaagaagtcttcaaatcataataatttggctccagtagtcaaaatgaccttttactaacttctctcttgttttggataattggatagaatataaaagaagctccactttcagtctaatcattgtaaagcatgaaagttatgcatttttaagtagttttgactttttttacatgatgaatgtaacgtacatggagattatcagttaatat

SEQ ID NO: 304399 - DNA, 642 bp, Homo sapiens
gactttaaaaatatgtataaataaactgaatttcagcaagtgttaatataggtgcttttaaaaatgacagaggcacagcacttcttttggaataggagattcttggaatgggagatcctgtccctgagggaaaagggatgtccatcccaccaaaacttgggttgctgaagaaataacatgttctgagaagggatcagccaaaatcgcctctcccgatgatataggagagcttactgggacaatctgtgccaaagttgttgtgagagctttccttcctcctacgatccaaccatgtcaaacatttcctacaaagtttgagaaacaggtatttttcattctttttaatgcttttttctttttctttctttagacccaagaatattgaaaaaatattagtttcagtttttgtcacatatgttttgaacaatttttttaagwagtcttcaaatcataataatttggctccagtagtcaaaatgaccttttactaacttctctcttgttttggataattggatagaatataaaagaagctccactttcagtctaatcattgtaaagcatgaaagttatgcatttttaagtagttttgactttttttacatgatgaatgtaacgtacatggagattatcagttaatat

SEQ ID NO: 304400 - DNA, 571 bp, Homo sapiens
ccaattttctccttgctataaatcataccacgtatctttataatcaggaaaactaaaggggaaggagtggtatttaaaggttcaagactacaaatattaaatgccatgaaaacctcagtatactaaacttttttaaaagtttacgttgggaggccgaggcggacggatcacaaggtcaagagttcgagatcagcctggccaacatggtgaaaccctgtctctactaaaaatacaaaaaaaaaaaaaaaaaaaaaaaaattagtcgggtgtggtgacgcatgcctgtaatcccagctactcgggaggctgaggcaggaraattgcttaaacccaggaggtggaggttgcggtgagccaagatcatgccattgcactcttgcctgggcgacagagcaagactctgtcttggtgggaaaaaaaataaaaagtttataagggccaggcgtggtggctcccatctgtaatttgagcaatttgggaggccgaggcaggtgaatcacttgagcacagaagttagagacgagcctggacaccatggcaaaaccctgtctctacaaaaaatacagaaatt

SEQ ID NO: 304401 - DNA, 586 bp, Homo sapiens
gccctaagctgctaagcagggttgctcagactcaacaattgtcagaagtacagactggagttaggtttaatcttaagtattcatttatcttctcatcattcaggaatgaaaaggaaagcttactatactttttaagtgagcaagacttttaatgaatattgttttgatgtgaccatctgttcatacagccaactcttgattatctaaggtgagggaatactgggataggatgcattgttgaaatgcacacattatcttcatttgggcaaatagattcagcctccccaccraatcatttaaggaagaaataatgaaatatgggagtttcttctcttttgactcctctttctcgccatctgacggagataccaatgtgcagtgaactgaaaggaagagagaaaatcccaaaaaatctgtgaagaggtcaacccatttctaaatcaagagttgactgaattgcataatctcatcaaagtttttgaaagtagacggtttttttatttatctttgcagaaagtattgagccaggaacatttgccatgtttttctccacatattgtgactgagtgaatatcattctataatg

SEQ ID NO: 304402 - DNA, 664 bp, Homo sapiens
acctctaaagtttgccatggcaatatggattgtttatttctccatttaacttactactgccccttaaataaatgtaaatgtcccttcatttgaagtcacaggaattctttaaagtctaaaatgtctctttaccttcatattttagttttattcttaagaccctatcagattttgatcagaattagagtcttaacatccccataaagctaacatttaggcagctgtttttgtgattcactcattataataatctctctaaaacatttatcttctacttcctctcagtaattatcactgcaaagtacaaatcatattactaaaatattttgacccaacacatacactgtccccataaactttctaaatatcttttgaaataattgcttaaagcttagtttgaaaacatttgttttaaatggatgtaaaccacttaaaaatgttaaaaacattttaaaaaatgttttgaaattttttgcatggcaactgmcaagacttaaagttctactgccttagctgtagttgctcctttaaaatcagcttcttattttaaaagtttttttatatattctagaactacttaataggggttaacataatgcaaatacattttcttttgttgttctcatcttacaaagttttgaatcaatctctgttgtacattagt

SEQ ID NO: 304403 - DNA, 547 bp, Homo sapiens
cttagaatgttcttttttcctttaatttacatttcttctattaggtagccaccacaggacagttaactatgatttcatagtttgaacgagtagcagtatttaaaagatgaaaccaccatatatggatatagaatgtgtggtagcaagcgcattactcataatcttcctagacctgtgtgtttctttatgctttggaaatgcttcctgttgctattcatctccttcttatctgttggtgctacagagagcatgtgaatgccatccattatttccaagactttgaggaaaccagycatgacataccagggaagctttgattcaccagctgttgctctcggggaatggttggaaacttaatgagcatccacatgccttccacagctctcaggaaatgagccaagtgcctaaatacagacagcagactcatctatctatcacctcaaggtcccactcagagaaaagtgctaataccttaggcatacataataaaagtcactgagaacaggcataacttaatttcgagctactcttaagcttcctgcagaag

SEQ ID NO: 304404 - DNA, 534 bp, Homo sapiens
agcttccacctagatttcagaagatgtattggaaaccctgggtgcctargcagagcatgctgcaggggcagagccctcagagagactctattaaggcattgccaaggggaaatgtgaggttgtaatacccccacagtgtcccaccagggaggacatgcttagtctagctgtgggaaggaggattctgccctctaaacctgagaatggtagagccacaagcagcttgcaccctgtgcctgggaaagccacaggcacttaacttcagcccatgagagcagccacaggggccataccctgcaaagccataggggcagacgtgcccaaaaccttgggagttcaccctttgcaccagtgagccatggatgcaggagataaagtcaaggattgttttggagctttcaggtttaatgtctgtcatgctgggtttctgaattatgtggggcctactgcccccttcttttggatgatttgtcccttttggaatgggaaagcttacccaatgcctatactcccattgtatcttggaagcaaatg

SEQ ID NO: 304405 - DNA, 534 bp, Homo sapiens
agcttccacctagatttcagaagatgtattggaaaccctgggtgcctaggcagagcatgctgcaggggcagagccctcagagagactctattaaggcattgccaaggggaaatgtgaggttgtaatacccccacagtgtcccaccagggaggacatgcttagtctagctgtgggaaggaggattctgccctctaaacctgagaatggtagagccacaagcagcttgcaccctgtgcctgggaaagccacaggcacttaacttcagcccatgagagcagccacaggggccataccctgcaaagccataggggcagacgtgcccaaaaccttgggagttcaccctttgcaccagtgagccatggatgcaggagataaagtcaakgattgttttggagctttcaggtttaatgtctgtcatgctgggtttctgaattatgtggggcctactgcccccttcttttggatgatttgtcccttttggaatgggaaagcttacccaatgcctatactcccattgtatcttggaagcaaatg

SEQ ID NO: 304406 - DNA, 534 bp, Homo sapiens
agcttccacctagatttcagaagatgtattggaaaccctgggtgcctaggcagagcatgctgcaggggcagagccctcagagagactctattaaggcattgccaaggggaaatgtgaggttgtaatacccccacagtgtcccaccagggaggacatgcttagtctagctgtgggaaggaggattctgccctctaaacctgagaatggtagagccacaagcagcttgcaccctgtgcctgggaaagccacaggcacttaacttcagcccatgagagcagccacaggggccataccctgcaaagccataggggcagacgtgcccaaaaccttgggagttcaccctttgcaccagtgagccatggatgcaggagataaagtcaaggattgttttggagctttcargtttaatgtctgtcatgctgggtttctgaattatgtggggcctactgcccccttcttttggatgatttgtcccttttggaatgggaaagcttacccaatgcctatactcccattgtatcttggaagcaaatg

SEQ ID NO: 304407 - DNA, 597 bp, Homo sapiens
actattaagaggggatgattatattttcgatgtgataagacatgagatttgggaggccaggacagaattatayagtttggaaatttatcccctcaaaacctcatgttaaaatgtagtccccagtgttggagttggaacctggtgaggggtgtttggatcatggaggtggatccttcattaattacttggcccatcctcatggtaatgagtgacttcttatgagatcttgtttaaaagagcctagaacgtccttccctctctcatccatttttcaccatgtgacattcctgctccccctttgtctttcaccatgattgcaagcttcccaaggccctcaccaggagcagatggtattgtcatgctgcctgtatagcctgcagaactatgagctgaaataaaccccttttctgtataaattaaattacccagcttcaggtattctttatagcaatgcacgtggactagcatacccacgattctggacttctgtatatctgagtgtgcttcagaccaattttttttttcttcaactcttaagttctgggatacatgtgcaggatgtgcagctttgttacataggtaaacacgtgccatagt

SEQ ID NO: 304408 - DNA, 597 bp, Homo sapiens
actattaagaggggatgattatattttcgatgtgataagacatgagatttgggaggccaggacagaattatatagtttggaaatttatcccctcaaaacctcatgttaaaatgtagtccccagtgttggagttggaacctggtgaggggtgtttggatcatggaggtggatccttcattaattacttggcccatcctcatggtaatgagtgacttcttatgagatcttgtttaaaagagcctagaacgtccttccctctctcatccatttttcaccatgtgacattcctgctccccctttgtctttcaccatgattgcaagcttcccaaggccctcaccaggagcagatgstattgtcatgctgcctgtatagcctgcagaactatgagctgaaataaaccccttttctgtataaattaaattacccagcttcaggtattctttatagcaatgcacgtggactagcatacccacgattctggacttctgtatatctgagtgtgcttcagaccaattttttttttcttcaactcttaagttctgggatacatgtgcaggatgtgcagctttgttacataggtaaacacgtgccatagt

SEQ ID NO: 304409 - DNA, 560 bp, Homo sapiens
ggtaattgccttactctgctgggagactgattagygtcagggaggcaacgattttcttctcttggggactgggagcgggtacgagcagagtaccaaaaaggttatttttattaagacctgaagattgtgttcaaacagcctataatttctttataattacatagtgggaactgtcccactccctttccttattctcttaatgtccagtttaaagccctgccacccattcactgtaaatctagaaatactggacttgaggaggtaggtaggaggcattttattagacttgttctgttttaaaatggagtttgtgtcttatggtcttagactctttcctagatactttaaatttttctaaaacaaattctaattatttcaagtttaaaaagaacccacaatgatttcaacactacaaaaatgcatagacagaatgaaaaaaatcaatcccccaaatcatccaaaaacttcaggaaaaaatatgaaacaaagatacaaactccattgtttggtcagatctggaaagagctccaaaatattgataagactttcaagaacaactg

SEQ ID NO: 304410 - DNA, 604 bp, Homo sapiens
tgctgcatggtttaagaattaatggtgccaaagctaatatattggtcagtgattctcatatgcartggaccagtttttatatcaaggagtagttttggtgactgcttggaaagaagcatcagcccgtacacaaatgggcgccaagcagtagatgtaaaggtaagttggagatcccagagcttaggggtgtgcttgctaatggtgatgatgcttgccaaaagcctcagtctacaggttactcacagctgagaattaggatgcgattaaaaggaaaaatacaggaaggcaattagaaacaaaatagttatttgattttggtgaacagtaaaaattttagctaccagtgtttttaatgaccacttgctttgtaattgaccaagtctagtcacgtgcattaaactgtatgccatgaaagagacaataaagtaaaagctttggagagaaaacagtctactttttgttctgctatttgagaagaaagcataatttatatagtcacagtctctttttattaataggagtaacaatagttactatctagtctgtgtttattatatttccaagtattgtgctacacacacagtttcttatgtagtcttcccaa

SEQ ID NO: 304411 - DNA, 604 bp, Homo sapiens
tgctgcatggtttaagaattaatggtgccaaagctaatatattggtcagtgattctcatatgcagtggaccagtttttatatcaaggagtagttttggtgactgcttggaaagaagcatcagcccgtacayaaatgggcgccaagcagtagatgtaaaggtaagttggagatcccagagcttaggggtgtgcttgctaatggtgatgatgcttgccaaaagcctcagtctacaggttactcacagctgagaattaggatgcgattaaaaggaaaaatacaggaaggcaattagaaacaaaatagttatttgattttggtgaacagtaaaaattttagctaccagtgtttttaatgaccacttgctttgtaattgaccaagtctagtcacgtgcattaaactgtatgccatgaaagagacaataaagtaaaagctttggagagaaaacagtctactttttgttctgctatttgagaagaaagcataatttatatagtcacagtctctttttattaataggagtaacaatagttactatctagtctgtgtttattatatttccaagtattgtgctacacacacagtttcttatgtagtcttcccaa

SEQ ID NO: 304412 - DNA, 549 bp, Homo sapiens
tgagtcagttactgtcatctatggatagactcttatgccttaaaaacaaaacgcttatacaaaaagctcatgaaagacgggctaaaccgcctcattgggcaattaccagaaatccaataggtgggaagattaaaacatctattagtaactgcccccgtcctagctttaccctccttaagcagcctttccatctttttgccactgtaaacaagggcgtagccctagaagtacttacccaaaagcatggaggccactgacaacccgtagtcttcctatcaaaaatccttaagccagtaacccacggatggcccagatgcattcartctgtagcagcaactgctttgctaacagaagaaagtagaaaaataagttttggaggaaacctcattgtgaacacacctcaccaggtcagaactatcctaagtcagaaagcagaaaggtggcttactgactccagaatcttaaagtatgaggctattctcttagaaaaagatgatttaacattaaccactgataattcacttaacccagcaggtttcctaacagggg

SEQ ID NO: 304413 - DNA, 549 bp, Homo sapiens
tgagtcagttactgtcatctatggatagactcttatgccttaaaaacaaaacgcttatacaaaaagctcatgaaagacgggctaaaccgcctcattgggcaattaccagaaatccaataggtgggaagattaaaacatctattagtaactgcccccgtcctagctttaccctccttaagcagcctttccatctttttgccactgtaaacaagggcgtagccctagaagtacttacccaaaagcatggaggccactgacaacccgtagtcttcctatcaaaaatccttaagccagtaacccacggatggcccagatgcattcaatctgtagcarcaactgctttgctaacagaagaaagtagaaaaataagttttggaggaaacctcattgtgaacacacctcaccaggtcagaactatcctaagtcagaaagcagaaaggtggcttactgactccagaatcttaaagtatgaggctattctcttagaaaaagatgatttaacattaaccactgataattcacttaacccagcaggtttcctaacagggg

SEQ ID NO: 304414 - DNA, 573 bp, Homo sapiens
atccacattgattacacagacatgcctccaattggtcgtctaaagtatttattagtaatagtagctcaccttactcattgggtagaagctatttccttttcaagtacaactgctaataatgtagttaaggcattatttgaaaatattatacccaagtttagattaatagaaaacattgattcagataatacractcatttcactgcacatgtcattaagaaattagcccaggtactggatataacatggaaatatcatattccctggcacctaccttcatcaggaagagtggaaagaatgaaccaaactataaaaaaagccacctaaccaaattagtcttagagactcggttgccatggactagatgccttcccattgccctgttgagaatctgaacaagctccttggagagatgttggcttatccccttatgaagtgttgtacaggttgccctgtttgcattccactgattacattcccacattaaaaaaaaaaatgatcagtttctcagaaattatatacttggtctttcttccactttctcttccctcagaactaaaggtctttcagcac

SEQ ID NO: 304415 - DNA, 499 bp, Homo sapiens
aagattcaaaacaaaccatagcaactgaaacagggtatcagracgcaaatgcttggctggaatggattaaacattctgtttgcaggctaaacaaaagcgcctgttacacttgtgtgacaggcaggccagagacccaaattgttccctttccacttgggtggtcctctcacagaccgggcacgagctgtgtggtagctctcttccagaaccccacagcctggggtggtgagtcatgcaagactctttcactgctgttccctgaggtcaagagccctgcgggtcagccctgaagactatccggcctccagcccctgatgttaacttcacctcatgcctttcacggcagggggaaaagttagcattccttggagacttaacagggtgcagtgaaaccaggccttttgaagagcttaccaatcagtctgcccttgttcatccccgagcagatgtgtggtggtattgctggggactactgctgggtactctgccaagtaattag

SEQ ID NO: 304416 - DNA, 352 bp, Homo sapiens
ctttcaccctagcattctgtcaatatgataaaaaaaaaattgtaaaagaagtgcctcacgtgggtcctttgacccccatgtttatataaacactattggagttctatgaggagaaccrgatgaatttaaagcccgagatcaaatagctgcaggatttaagtcagcattttcatgggtgacaataaaaacatagattggataaattacatctattatgatcaccagtggtttattaattattccacggttgctgtcaaagggataacagaacaactggggctcaccagccagatggcctggagaaacaaaatggccctggatatgatattagccacaaaaggcggtgttggtg

SEQ ID NO: 304417 - DNA, 602 bp, Homo sapiens
atggtgggatggccagcttcctcacgcactaagcaaatgtacacaccttctcggagcagcctcttgagcgctatgtaaatcagataccacctcttcaagctcgtctataaaaccccatgcatttcatcatgaactggaagacccaytcaggtgcccctctctctctgcaggagagagagtcattctcttttctctttcttttgtcgattaaacctctactcttaaattcacttcttgtgtgtccacgtcctcgattcccttggcatgagacaacaaaccttgggtatttacctccaacaacaacaccacttcattactttgaaagacacataaatgacccttatatctatggttattgtcctggtctcaaatcttactcaaaatccaagaatggctgtgtccaaggagtgaattattacccctgtgaagtgatttgagcaaggagacctctctcctccaaggctgccaaccaaattgctaacattcccaaagaagtaggttaaggcattaaaagagatcacagctgtgattcagaatttattcatttcctaatatgaagccataccccactggtggtcttcaaaatgattttaggtagctta

SEQ ID NO: 304418 - DNA, 602 bp, Homo sapiens
atggtgggatggccagcttcctcacgcactaagcaaatgtacacaccttctcggagcagcctcttgagcgctatgtaaatcagataccacctcttcaagctcgtctataaaaccccatgcatttcatcatgaactggaagacccactcaggtgcccctctctctctgcaggagagagagtcattctcttttctctttcttttgtcgattaaacctctactcttaaattcacttcttgtgtgtccacgtcctcgattcccttggcatgagacaacaaaccttgggtatttacctccaacaacaacaccacttcattactttgaaagacacataaatgacccttatatctatggttattgtcctggtctcaaatcttactcaaaatccaagaatggctgtgtccaaggagtgaattattacccctgtgaagtgatttgagcaaggagacctctctcctccaaggctgccaaccaaawtgctaacattcccaaagaagtaggttaaggcattaaaagagatcacagctgtgattcagaatttattcatttcctaatatgaagccataccccactggtggtcttcaaaatgattttaggtagctta

SEQ ID NO: 304419 - DNA, 602 bp, Homo sapiens
atggtgggatggccagcttcctcacgcactaagcaaatgtacacaccttctcggagcagcctcttgagcgctatgtaaatcagataccacctcttcaagctcgtctataaaaccccatgcatttcatcatgaactggaagacccactcaggtgcccctctctctctgcaggagagagagtcattctcttttctctttcttttgtcgattaaacctctactcttaaattcacttcttgtgtgtccacgtcctcgattcccttggcatgagacaacaaaccttgggtatttacctccaacaacaacaccacttcattactttgaaagacacataaatgacccttatatctatggttattgtcctggtctcaaatcttactcaaaatccaagaatggctgtgtccaaggagtgaattattacccctgtgaagtgatttgagcaaggagacctctctcctccaaggctgccaaccaaattgctaacattcccaaagaagtaggttaaggcattaaaagagatcacagctgtgattcagaatttattcatttcctaatatgaagccataccccactggtggtctycaaaatgattttaggtagctta

SEQ ID NO: 304420 - DNA, 561 bp, Homo sapiens
aaagagacacttatcagttcagatgttcccagggttttaggagctgtgtgtcaggaaactgggtcaagaccaaaatatattatttatgatatccaatattagaatttctgaatgagttgagaaccaaaatttacaaacctcccagacagggaggatatctgctatttttacaacaaactctcaattttccactttasttttttttgttttcatgacgcagactcagagaaaggtgtaaagagagagagatcttggagaagacaggatgaggatataaatcagaccagaaagtgccaaggtttcctcgggaaaaaaaaaaagagaaagaatggataaaggatgaaagaacagggggtagaaaagagtggtgagggcttggttttcaaactgtttatttttttcttttgcaataaggagagaactttaagatgttttgatgagtatacagatgtattttcttcctactcataggctttggaagagacatcagtaaagactaaatgattattttttttttccactttaaattctggaatacatgtgcagaacgtttaggtttgt

SEQ ID NO: 304421 - DNA, 480 bp, Homo sapiens
atgcattctttcactctcttgccatgtgatgccttccaccacgttatgacactgcaagaaggccctcacaagatgtgatgccttgatcttggacttcccagcctctggaatcatcagtcaaataaacttggattcctcataaattatccagtctttggtactctgttatagaacacaaaatggactaagatacctaatacataatgaggcttttttcttgctttcaaaattttatttttgactttgactttcaacatctatgatgtaggttactgatgtcttagcatttatcttatttagaattctttaagcttcttgggtaggtagatatatattttttcatcagatttggaatgttatcagacattatttctttaaatatttttttctgctcttttctctgtaatttccttcaggggctcccattctgcatatttattgygcttaacagtgtctcacatttctctgaagttctgttca

SEQ ID NO: 304422 - DNA, 480 bp, Homo sapiens
atgcattctttcactctcttgccatgtgatgccttccaccacgttatgacactgcaagaaggccctcacaagatgtgatgccttgatcttggacttcccagcctctggaatcatcagtcaaataaacttggattcctcataaattatccagtctttggtactctgttatagaacacaaaatggactaagatacctaatacataatgaggcttttttcttgctttcaaaattttatttttgactttgactttcaacatctatgatgtaggttactgatgtcttagcatttatcttatttagaattctttaagcttcttgggtaggtagatatatattttttcatcagatttggaatgttatcagacattatttctttaaatatttttttctgctcttttctctgtaatttccttcaggggctcccattctgcatatttattgcgyttaacagtgtctcacatttctctgaagttctgttca

SEQ ID NO: 304423 - DNA, 529 bp, Homo sapiens
gatatcccaactgttagcatccaggagatgtttaaagagcttaatagtcacatttttgttgcaccacagcctgagcttctagaagcttcttttcctgaatttctccctaattacaacctgcttacctggctacagggcagagaaggccaggatgataaagctattggggttgctaaatttagaatctaakagcattgtgtcagatctcagcttggtgacctcctagctagtgacacaacttctctgaacctcagctttttaattttacaatgggcatagtgatttctatctaaaacgttttagtgggggaataaatgtgtttatttttataaagcacttagctctgtgaaaatctgtagaacatttaaagtgcattgtactgtcattatcatgctttttatttattcagtaaatagttgagcaagtacaatctgctgggaattgtactcattcctgagggagccataatgagaaatcaagcatcatactgtacctaagaaatttatgatctaggtgacctcaatacaac

SEQ ID NO: 304424 - DNA, 614 bp, Homo sapiens
gggtgggacacacatcttcactccatttctcagctcaagtctaccacccgggccggttttcccagattcccagaaatctgtcttgctcagtgttgtccccctcctccacactgggaatatccataacacactcrtgcctatacttgtcttctcccagcactccagcttatactgattctttcttcttctcagttccttgttcatttatttattaatatttttaaatagctctccctttggcacagacccgcacaaagttatttcaatgctgtatgtgggtgtctcaccttcccacatccgtgtgaactcctgaggacagataccatgagttattcattttctgttcttgccacattgcccacaaccagaaagtctgcaagaaattaaacttagggctgaatttaactttgcgatgaaagactggtgatctgtgcttctcagcttctgctttttcagccacattttctgctctgacttgactaagctgacaatttgcaattttattgattctaaagtattttgatgagaatcatgactgccacagccacagcgggtagctgtcatttattcagcacatatgtgcttcgcattgtgcacttaatatattctctcat

SEQ ID NO: 304425 - DNA, 588 bp, Homo sapiens
ggatacctaccttagatctcaaaggagacgagataacacggccctaggaatgaaactaatggcattgctacctcacattaaataggagtttactgtctacctggtattgcactaagagctctctctgtagtaacatatttgatccttacagcaaacctttgaagtaggcactactccatttaacaaatgggggaactggggcctagaatctctatagaaatttaacatattccatcacataatagtgtttccagtaaccccagaataattatttccttaaaatatatgaaagttgatcaccctcccaaaagrtaagactttctaaaacaatttcccttcccccagttagggaattgttaccatctgaaatcactttgtaagccaacatcaaaaagagtatgacccagcctaccaatatcatagtatagtcctgtctcaagcattttcacagagtctttacttattccttttcttaatgggattgtttataatatttataaatattgtaattttgttatatgcatttgtcctttatatacaactttcaaaaatcataaatatttatagtatttagtaaggaccatcact

SEQ ID NO: 304426 - DNA, 588 bp, Homo sapiens
ggatacctaccttagatctcaaaggagacgagataacacggccctaggaatgaaactaatggcattgctacctcacattaaataggagtttactgtctacctggtattgcactaagagctctctctgtagtaacatatttgatccttacagcaaacctttgaagtaggcactactccatttaacaaatgggggaactggggcctagaatctctatagaaatttaacatattccatcacataatagtgtttccagtaaccccagaataattatttccttaaaatatatgaaagttgatcaccctcccaaaaggtaagactttctaaaacaatttccctkcccccagttagggaattgttaccatctgaaatcactttgtaagccaacatcaaaaagagtatgacccagcctaccaatatcatagtatagtcctgtctcaagcattttcacagagtctttacttattccttttcttaatgggattgtttataatatttataaatattgtaattttgttatatgcatttgtcctttatatacaactttcaaaaatcataaatatttatagtatttagtaaggaccatcact

SEQ ID NO: 304427 - DNA, 588 bp, Homo sapiens
ggatacctaccttagatctcaaaggagacgagataacacggccctaggaatgaaactaatggcattgctacctcacattaaataggagtttactgtctacctggtattgcactaagagctctctctgtagtaacatatttgatccttacagcaaacctttgaagtaggcactactccatttaacaaatgggggaactggggcctagaatctctatagaaatttaacatattccatcacataatagtgtttccagtaaccccagaataattatttccttaaaatatatgaaagttgatcaccctcccaaaaggtaagactttctaaaacaatttcccttcccccagttagggaattgttaccatctgaaatcactttgtaagccaacatcaaaaagagtatgacccagcctaccaatatcatagtatagtcctgtctcaagcattttcacagagtctttacttattccttttcttaatgggattgtttataatatttataaatattgtaattttgttatatgcatttgtcctttatatacaacttwcaaaaatcataaatatttatagtatttagtaaggaccatcact

SEQ ID NO: 304428 - DNA, 588 bp, Homo sapiens
ggatacctaccttagatctcaaaggagacgagataacacggccctaggaatgaaactaatggcattgctacctcacattaaataggagtttactgtctacctggtattgcactaagagctctctctgtagtaacatatttgatccttacagcaaacctttgaagtaggcactactccatttaacaaatgggggaactggggcctagaatctctatagaaatttaacatattccatcacataatagtgtttccagtaaccccagaataattatttccttaaaatatatgaaagttgatcaccctcccaaaaggtaagactttctaaaacaatttcccttcccccagttagggaattgttaccatctgaaatcactttgtaagccaacatcaaaaagagtatgacccagcctaccaatatcatagtatagtcctgtctcaagcattttcacagagtctttacttattccttttcttaatgggattgtttataatatttataaatattgtaattttgttatatgcatttgtcctttatatacaactttyaaaaatcataaatatttatagtatttagtaaggaccatcact

SEQ ID NO: 304429 - DNA, 518 bp, Homo sapiens
cctgtgtctctgcatttttttgagaatttagtaacacgatgtaagcacagtgacttgagcagtacctggcccatcatagacactggtgaaattttgctttctgtttcttacccagatgcactctcctcaatagatgtttccactgataaaatatatggtcctagaggctggctatggtggctcatgtctgtaatcccagcactataggaagctaaagtgggctgatcactgaggtcgggggttcaagaccagcctcgccaatatagtgaaaccctgtctctactaaaaatacagaaatcagctgagtgtggkggtgcatacatgtaatcccagctactttgggaggccgaggcacgagaatctcttgaacccaggaggcgacaggttgcagtgagctgagatcgcgccactgtactctagcctgggcgacagagcaagacgccaactctaaaaaaaaaaaaaaaaattgtgtctagagtatcttgatccataagagaagagactactgtgctcactac

SEQ ID NO: 304430 - DNA, 614 bp, Homo sapiens
ctcctgtttagaaatgaacgagtaaaactcatacagaaatgggaacacaactggaatgacctcccaaagggtagcagagtttagccaagcctcctaatgttgcttgtctatagcaccatgctgtctgacaaaaacacagggacggggtcggtctccgtgaaagttgtgcaaatggattcctgggccctccttcccctgccttgcccacccacccaggctgacctcatattgtcctctacaaacccrttcagtgcagtctctgggcctttgttcatagtggtccctcctcaaaaatgtcattcattgctcctaggcttatccctgagcagtttcccttccccaggaaacttttctcagtgagactaggccagtgcttcttagtctatggtgattaaccagttatttgtttctttattattttaatcttcaattcatcacagatcaataattttgtgaaactcaattaagattaactactagaaaaattatatttaagaaggcacataaatacgtgtccaattttttaaattgtatcaacagacataaattactctgttcaatggttataaatgtttctccatgcttcctatccacttttgtgcagattagcatga

SEQ ID NO: 304431 - DNA, 464 bp, Homo sapiens
tccttcagggtctacctctgctgcgaggttctgccttgctcagggtcacctccatcctatgacagaccaaccctaaggtctgtcaattgggcccctatacagatcactttaacaggcaacattagctccagaactgccccctaccaacctttgcagtggctggaatttgctggggcctgtatcagcatttgattaccccctctcctcaaacctatwctttccccttcctttcacaagtgttgatctctaataaatatactgtatcccaactctgtctcagcatctgcctccagaaccccccaatttgtaacagcactcaataagtacttgtttaatgaatgaataaaggaatgaatgtgctcccatatcagtagtggtctcaacattattccactatggggcacctagcataatctccaagaactgaggcaactgaacttcagaagtgatagttaagctgagat

SEQ ID NO: 304432 - DNA, 505 bp, Homo sapiens
tactctgaccactcaacgactacaatttttcagcccctcaccctccatgatcccctttaaaaactccagtccagaacttcttggggagataaatttgagagtctaaccctatttcctcacttggctaccctgcaatcattaaactctttttctgttgcaaaccctgctgtctcagtgtaattggtttgttactgtgcwgagggcatatgaacttgctggtcctgtaacatacatgctgccttctctacataaaattccccactcatctttgcctggtgtgctcctacttatccctcaggtcttgtcataaacataaatttcttcacgaagccttccatcaagcccaagtcctaaaatggtagatgcgtttgttaagtattttcgtagcattctgtccttccccaatctttgcacgagaactatcgtattttacgagctacgaccagttggagtttgttccccattttccatccccaagatgtagcttccatgagggcaaggatca

SEQ ID NO: 304433 - DNA, 505 bp, Homo sapiens
tactctgaccactcaacgactacaatttttcagcccctcaccctccatgatcccctttaaaaactccagtccagaacttcttggggagataaatttgagagtctaaccctatttcctcacttggctaccctgcaatcattaaactctttttctgttgcaaaccctgctgtctcagtgtaattggtttgttactgtgctgagggcatatgaacttgctggtcctgtaacatacatgctgccttctctacataaaattccccactcatctttgcctggtgtgctcctacttatccctcaggtcttgtcataaacataaatttcttcacgaagccttccatcaagcccaagtcctaaaatggtagatgcgtttgttaagtattttcgtagcattctgtccttccccaatctttgcacgagaactatcgtattttaygagctacgaccagttggagtttgttccccattttccatccccaagatgtagcttccatgagggcaaggatca

SEQ ID NO: 304434 - DNA, 538 bp, Homo sapiens
  misc_feature (1)...(538): n = A,T,C or G
ctactattctcggtgcatactacaaagccataatagaaacataataaatattgattatgtaattaggtagcagtgaaaatactactgcctttagttgttggaaaagttaaacatattaagttatacagtataacaaatgggtnttagagctttcaactgttgattaaaagaaaaatgctcccttagagtttccgtgttccatgtatttttaaatgacaccttccaagaggaacttctgggcttgacactgggcaagattatttcatttattgtgagctgtgtgtcatgtagctggtgatagggccctgcaagaagttttcttatttcctgaagctaatagtgataaagaagctcattttaagtttcattctgtttcaccagagttaatacctaaagaaacagtttattccagcccatttggttgtcactctatgatccagggggataaggagcaagattcataaaaactattacgtgaaagtaraataagggaaatttatgttccaggacttaaagatccactcttacatcagtgtaa

SEQ ID NO: 304435 - DNA, 519 bp, Homo sapiens
gtaaagatgaatataatccaggctggatacgttattctacattctttattattgtgttttttcttatgattctaaagtgaagttaaaacatttaggaagagtcctaaaactagtatgtgcccaagacactgtgccccaccactaggactaatgaaaacatctgctctggtcattgactttaaggtactggggaaacccactgcagctgagaataagtcacagaaaaatagtcctctgctctcccaggagcagcaaatctgcagctggggatgcaccaggaccactgagaaagcagcatcagagacccaggaacaggtgccacctgagactgagccttcatcagaaccacagaactcccccacttcacactattgggctaacaatctagctagcaacagtggcatgcaggcaagtgcatggaacgaaaccttttctgagagaaaaggcgmaatgataggagggagaaaagatcagtagttgtcacgggttgtgagtcgggggagatgttgaccccaaaag

SEQ ID NO: 304436 - DNA, 612 bp, Homo sapiens
ggtcaataagtgcagcaaaccaccatggcacatgtacatctatgtaacaaacctgcaggttctgcacatgtatcccatttttttagaagaaataaaaaaaaaacaatgaaaaaagtttagttagacatataagcagctcaatggagaaatagagaggtaattaaagggcatgttaaacattgtttgattttaaacattgggaaataagaagacatatttctagtcaaaaattgtcaccatgccatacgttgtatggctaaatctgcagtgcttgaaccggtgcttgacaggtactcattacatatwtgttgaatatgtaaatagtgaagaaattaaagagtgaaaatgataggacctgtaggtaaaatcattaaagggatcacatcagaatatcttttcaaagtcttcgagatcatttccctgatcaatgtgatttcatacctccaaacaaagcatcatgattacgtgacatgatttgtagagtgttcagaaactactgtgttctaaaatatctcctcctgtttgtcagagtgtctgagatttcacagttgaaaaggagcactcctttgcattttttgttagttgaaattttcctattagtaaatctttatc

SEQ ID NO: 304437 - DNA, 606 bp, Homo sapiens
tctgcacatgtatcccatttttttagaagaaataaaaaaaaaacaatgaaaaaagtttagttagacatataagcagctcaatggagaaatagagaggtaattaaagggcatgttaaacattgtttgattttaaacattgggaaataagaagacatatttctagtcaaaaattgtcaccatgccatacgttgtatggctaaatctgcagtgcttgaaccggtgcttgacaggtactcattacatatttgttgaatatgtaaatagtgaagaaattaaagagtgaaaatgataggacctgtaggtaaaatcattaaagggatcacatcagaatatcktttcaaagtcttcgagatcatttccctgatcaatgtgatttcatacctccaaacaaagcatcatgattacgtgacatgatttgtagagtgttcagaaactactgtgttctaaaatatctcctcctgtttgtcagagtgtctgagatttcacagttgaaaaggagcactcctttgcattttttgttagttgaaattttcctattagtaaatctttatcagctcacaccttagtggggccattttgggcaactgagtggtttggtgttagata

SEQ ID NO: 304438 - DNA, 637 bp, Homo sapiens
ttgtctcctgttctgctgcagggcacatttcacttgcttataaaagaatatcctatgatcttatgatgactttcaagaatatggctttagatactggttgctacccaataagattgaataagcatgagtgagcaaaatcaaaagcaattgaaacttcatgctttaggaagcaaaggatcatggtgactaacattttttttcagtttcttaacaggacacaaataatcaggttgtacatatattgcaagaatttatgagatatatttagatacatcaaacatttaaaattctgttatacattttaatgtctatgagaataaaactataggttataccaggaagagtaaaaagctttaaaatataaattagagtaataggtaatcgatagaacataygctatgtggacaaggcaaaaaaaatgcagtagccctaaacttttggaaatgttgatttcattattggcagttttaacagccagtcactgacaagagattgtaattgtcatgtgtttccagaccatctctccttgttgtagctcattcttggttgtcgcatttttcttagttcattgctcacttgcctttcatattgttaacaacctgctcaaataggtagggacaatgttagaaaaagcaat

SEQ ID NO: 304439 - DNA, 637 bp, Homo sapiens
ttgtctcctgttctgctgcagggcacatttcacttgcttataaaagaatatcctatgatcttatgatgactttcaagaatatggctttagatactggttgctacccaataagattgaataagcatgagtgagcaaaatcaaaagcaattgaaacttcatgctttaggaagcaaaggatcatggtgactaacattttttttcagtttcttaacaggacacaaataatcaggttgtacatatattgcaagaatttatgagatatatttagatacatcaaacatttaaaattctgttatacattttaatgtctatgagaataaaactataggttataccaggaagagtaaaaagctttaaaatataaattagagtaataggtaatcgatagaacatatrctatgtggacaaggcaaaaaaaatgcagtagccctaaacttttggaaatgttgatttcattattggcagttttaacagccagtcactgacaagagattgtaattgtcatgtgtttccagaccatctctccttgttgtagctcattcttggttgtcgcatttttcttagttcattgctcacttgcctttcatattgttaacaacctgctcaaataggtagggacaatgttagaaaaagcaat

SEQ ID NO: 304440 - DNA, 535 bp, Homo sapiens
tggcgatgttataaactttctactgcttcaaatcaggtgttgtacaatactggtttattccatcacctggttcaggtggtgcctgacaaatctctccattgtaaaggcaccttttctctttgaaatttataatcawtggggtatcgatttgattttctattttgtttctctatcttcttgagattgaaacttggctcacttttttggggtgaagggggcattcttccattttaatacacacatttaaaattgcaaacttacttatatgctcctgaatttttatgtcatgttttatcatccttccattaaaaacattttccaatttctgtatttcaccccgggattattcataagtgtactgcttaattgccaagcagttggagattttctagttatatctatgttactgatccctagcttattttcaccagggttggagaaaatactcttgacaaatttcagttctttgatgtttttgaggcttgcccatgatgaacatatgatcaattttgctacatattttatgttcactttt

SEQ ID NO: 304441 - DNA, 535 bp, Homo sapiens
tggcgatgttataaactttctactgcttcaaatcaggtgttgtacaatactggtttattccatcacctggttcaggtggtgcctgacaaatctctccattgtaaaggcaccttttctctttgaaatttataatcaatggggtatcgatttgattttctattttgtttctctatcttcttgagattgaaacttggctcacttttttggrgtgaagggggcattcttccattttaatacacacatttaaaattgcaaacttacttatatgctcctgaatttttatgtcatgttttatcatccttccattaaaaacattttccaatttctgtatttcaccccgggattattcataagtgtactgcttaattgccaagcagttggagattttctagttatatctatgttactgatccctagcttattttcaccagggttggagaaaatactcttgacaaatttcagttctttgatgtttttgaggcttgcccatgatgaacatatgatcaattttgctacatattttatgttcactttt

SEQ ID NO: 304442 - DNA, 585 bp, Homo sapiens
ccagactgggatgaccccaaccagttacctgyactgagagccaagaccacaactacaaatccagttattcagagtgctaaggcagggccatttgtctaggagacaaatctggcaactcaaacctgatcttaacccagggctttttagctctggtaagcactgtgcagctttccagatgcccaagccagacacttgggagaaagcctgtattagtctgttctcatgctgctaataaagacatacctgagactaggtaatttataaagaaaaagaagtttaatggactcacagttccatgtggctgcagaggccatacattcatggtggaaggcaaagtaggggtaaaggagaagcaacgtcacatcttacatggtgacaggcaagagaaagagcatatgcaggggcactcccctttacaaaaccatcggatctcatgagacttattcacagtcatgagaacagcatgagaaagacccaccctcatgattcaattacctcccacttggtccctcccatgacacgtgggaattgtgggagctacaatttgagatttgagtggggacacagtcaaaccatatcatagcc

SEQ ID NO: 304443 - DNA, 548 bp, Homo sapiens
agtaactctttctttgaccaaagaactctctgagttgcaaaaggactaacaaggttttttaaagctgcaaacccctgttgacctctctcccccaggctaatttagaagagagtacaattttaaagacttcaacctaccagaagcaggtctatttataaaccaaagctcaggcgcagaattctgtgagttcacttccatgctcagcaaggtccccttatcatctctggagccctgcctagtaattaagaccctgagtccaccacttctccattagggttttcctctgagatgccctatacgagttccttgcagactcagatcctcatccccacatgcccaagccaagttcattccagtcttctggatgcctgggattggctcctccctgtggcaaagttggctggttacccctgataatgcacyctccccatgcatgcccctcagtgatagaacttaagactgcatttcccagactccttgtggaggtagaagtggctgcaagaagaagttctatcaatgagatatgtttggaagtcacacgtaccagt

SEQ ID NO: 304444 - DNA, 548 bp, Homo sapiens
agtaactctttctttgaccaaagaactctctgagttgcaaaaggactaacaaggttttttaaagctgcaaacccctgttgacctctctcccccaggctaatttagaagagagtacaattttaaagacttcaacctaccagaagcaggtctatttataaaccaaagctcaggcgcagaattctgtgagttcacttccatgctcagcaaggtccccttatcatctctggagccctgcctagtaattaagaccctgagtccaccacttctccattagggttttcctctgagatgccctatacgagttccttgcagactcagatcctcatccccacatgcccaagccaagttcattccagtcttctggatgcctgggattggctcctccctgtggcaaagttggctggttacccctgataatgcactctccccatgcatgcccctcagtgatagaayttaagactgcatttcccagactccttgtggaggtagaagtggctgcaagaagaagttctatcaatgagatatgtttggaagtcacacgtaccagt

SEQ ID NO: 304445 - DNA, 548 bp, Homo sapiens
agcaaacctggtgcttccaccttcaaatagatccagactctgaccattctccccacttcccctgataccaccttggtgtaagccaccatcatttatcctgtaccttacagcaaagattcccaaatgggtctccctctttccactcttacctcctaccatctaccgttaacatagagccagaagacccttttaaaacacaagtgcaatcaatcaggtttctcctcygctcaaagccctacagtggacttctactccatgcagagtcaaacctcaaatccttgcaatggccaacaaggccccgtgtgacctgcactttccatcaactccatctgcatgcccttttctaaaaccctgactctaggtccttcctgcccttgaacattcctgcacagcttcacatctctgctgaactgttgcctctgcctagaaagttactctgccaacttcttcttcttggccaacttcctcatctccatcacgtctttgttaacattttgctttgtccatgaggccaccctgagcaccctattaaccactgcagcccacac

SEQ ID NO: 304446 - DNA, 561 bp, Homo sapiens
aaattttaaagaaatttaaattttagagaaattttgagaaattcttgttcataagaatccccttgtatactctaaaatgtcacctcttcaacatatctaaaattctactatcaaatcgttatcatctcaggctacacggcctaatatggtagccaccagccaccagccatgctaagctatttatgtttaaatctaaattaactcatatagattttaaaattcagttcctcacttgccccagctacaattccrgtgctcaatagccacaagtggttagtgattaccatattggacagcacagatatagaatacttccttcaccacagaaagttctactggacagccccactctagggaaccatttcttttttttttttttttttttttgagatggaatcttgctctgtcaccaggctggagggcagtggcacaatcttggctcactgcgatctctgcctccctggttcaagcgatccccctgcctcagtctccctagtagctgggactacaagtgcagaccaccacaccctgctaattttttgtaatttagtagagacggag

SEQ ID NO: 304447 - DNA, 579 bp, Homo sapiens
atccaactggtttggaacaagaggaagaggtgaggaccttggtagctgaaggaagagtctggggtacagacaaggcatgttagcactaaagacgcccatgtactgtgcaaggattcaggggaccaattttttctgcacctcacaggtcatcacaggcaagatcctgatggcagtctagcatgatgcgctcacacagtaggtgcttaatgcataaaattgtttaatttattttcttttcttttttcttttttccttttttttttttttttttgagacagggtctcactctgttgcccaggctggagtgcagtggcgcgatctcagctcactgcaacttccgtctccccagttcaaacaattctgcctcatcctcccaagtagctgggattataggcatgtgccaccacacccagctaatttttgtatttttagtagatggggttttgccatgttggccagggttatctcgaattcctgacctcaagtgatccacctgcctcagcctctcaaagttctgggattataggygtgtacccacacgcccagcccaaaactgctgaatttctgtgacaggtgttg

SEQ ID NO: 304448 - DNA, 412 bp, Homo sapiens
ttaagaagggctatttgatgtcccagaaacactttgaggctttttattgcccttgtaaacttaacaataagagtctaagaggtagaagttgttggcagttctgggtgaaaaacccaagaacaaagaaaaaaaattctggttagatggaggccgagaatctcagaattttgsaagtgcttcaggccggggttccagtttcaggttttctgggaggggacacgtggcaaagtagaggtctctgtgctgtaacatagagagtgccataccaacatgtgtttccccatgatgctagaaactccccattgtaaccgtaggtgaagatcaataaaaggtctcctatcccttccccctgctggtacagggaactgtgctaggacacacaggaaactacaccagtggttctcagccagga

SEQ ID NO: 304449 - DNA, 412 bp, Homo sapiens
ttaagaagggctatttgatgtcccagaaacactttgaggctttttattgcccttgtaaacttaacaataagagtctaagaggtagaagttgttggcagttctgggtgaaaaacccaagaacaaagaaaaaaaattctggttagatggaggccgagaatctcagaattttgcaagtgcttcaggccggggttccagtttcaggttttctgggaggggacacgtggcaaagtagaggtctctgtgctgtracatagagagtgccataccaacatgtgtttccccatgatgctagaaactccccattgtaaccgtaggtgaagatcaataaaaggtctcctatcccttccccctgctggtacagggaactgtgctaggacacacaggaaactacaccagtggttctcagccagga

SEQ ID NO: 304450 - DNA, 563 bp, Homo sapiens
gtccaagagaggtgaaggagtgaacagggagggtatctttgatgagctggcagcaggtgggctcgaggggagaatcagggaagcccaaggtccctgtgggagcagctgaatgggccgaccacagagctgatgtgctcctgatcttccagccctcgtatcacagtccatactcgaggggaatgctgcaggccggcagtgagagacttgagcccaattaaaggacaatgtgctctgcccatcatttgagagtccatgtgttattgtcctgttaatagaagacttttttcaaaagaacagggaataaccatcttacccttctgatgttaagagtataataagcggttatcatggaataccaagttactatgaattttaaagaaaaaaaaaacccacaagcgattttaaataaatgtcaagctgtggatttggccccaagcccccrgggagcaggaagtgactcttctatgtcctcaggggaagttgtggaggtcggaggtgcctgggtaagtcacagggtttgggtcagatgttggctctcccgaggtggggagtggcagcagggc

SEQ ID NO: 304451 - DNA, 584 bp, Homo sapiens
taacttaacatagtgtctcacgtagatgctacccactgatttgagttggcattggaagggaaaccgatgggtctccttccaggtctaacctcttattggtttggttgaaaaactgtgggaggcatcacaggtacaggagcagctcagtgaagcacagggtgaaaccaaacagagtctagcaagtagagaggtagtgacagataagattggacagagaaaggactcagaaatacatggccttaagggctagagcaagaggcttagccttgattaaaaatgcctgaggtctgagtcaggagaccaacattccagtgctartgttgcccctcagcagctgtgggaactggaaagatgattataaaactgacttcacagggtaaggattacatgagataatgctgcacactttaaaggggctgtggtagacacctgtcgttttttcttgccaaccacctattgtccccttttctgatctaggggcttgggtggccttatgctagtcactcccttgaagagtgactgaatcattatgattgactgtaggtgggcatgtgacccatatcaggccaatgacagttatgcca

SEQ ID NO: 304452 - DNA, 561 bp, Homo sapiens
ttgtttgagttgggtgttttcacttgcagccagaagatgaccaaccaatgcagaagtagacttgcagctcaggatcctgattactctaagaagggtaaggtgagagtcatgtcttagaagaattcatctggtaatgagatgaagaggggattggagaggggaaaagctggaaatgggcagtggacaaggcaatcatgcaggcaagcagcgaggagagctgtgctaaggaagtgccaatgaacctggagaagcgacaggaaggtttccagaagcctgctttgaacgtttgatttgtctaaccttaaaagtgttcattcatacagctcttgagagcatgctagggtttgtaagacattaactgaggggcttctgtgtcctgaggtgaacattttgaaaatatttccagatgctcagccaactcaacaaaaatcattaaaaaaccaaaccaaccaamcaaacaaacaaaaacaataatagcaggaatactctggccacatcttagatcaaagtgataaggatgtctgaaaatctttaacccagagacaagaactcagtaaatat

SEQ ID NO: 304453 - DNA, 487 bp, Homo sapiens
cctctctgagtctcagttcccttgcttttaaaatgaggcagctgttattgatgacccccatctccaacccagcctgaacagctcagttctttctgtcttataagttggggttctaagcaaaaaaaaaaaaaattaargattcatctgctaaaataaatgcttgaaagccattagattcagtgatctgctgtgccctttccatctctagcaggctggagctgctgcttgcctcacagagatcttgtgagataggcaagcccaggtagctccatctctccatttcacagatggtaaaactgaagcccagagaggaggagtgagtttctctgaatcacacagccagtttgtgtcatgcagagaccaaactgtattctacagatcctagatgggagttctctctgctgaaactcactgcataagatgcaaggtagggtcagaaaaagaaagggcccttggtgggtttcggccctggcactacaggtctata

SEQ ID NO: 304454 - DNA, 598 bp, Homo sapiens
accatttttagtatcaatctgttgtgcattaatttgattaatcatgatcattggtttatggcacatattatcattgggctgtgaatgttcaacttatatttaattattaacttactttaaaaaatgtaataagcatctgtgtacctctctcccaaagcaaaaacaggacctgaaaataactcacatgtaatcacacattccaccaccaacctcacccatctcctaagtgcacatcaatttgaaagtaggtaaataaattactgtatattcatatagtggaattctacacagaagtgaaaataaaygaattgaagccatgattgttaacatgcataaacctcaaatacatatcacccctggggaagagggaagatgagaataggattggggtggatatagaaagagtttccattgtatttctaatgtttcatttcttaagcaaaattctggaatgccaatatttattgcaaacttgtccaacccatagcccgtggatcacatgcagcccaggatggctttgaatgcagccaaacacaaattcataaactttcttaaaacattatgagttttctttgtgaagttttgatttttagctcat

SEQ ID NO: 304455 - DNA, 614 bp, Homo sapiens
ctggggagtcttcaaatggaaaaaattgtagcaaataatcagaaagtaaggtattacaaggcacaacagccattatttttatttttctyaaaattgatcctagtagtgagacagctgatggcaatttaggtcaccggatcctctagagtcctcaggaacacctgttttagaatagctttgaagtttaatccgtgttcctcaacttttatgggcatacagaagacatggggctcttggtaaactgaggcctaccattcattacatctgggttgtgacctaagattctgcacttcgaaaaggtcccagatgatgctgacactgctagtctatagatcatattttgtgtagcaagttttagaagagaccatgtcatcatgatctgctcatccagtcaagaaaaataaaataaaattgcatagtcaagaccaacaactttttcccatttcatagccctttaatcactcactttaagctgatttcataaaaagcataaaatattgtttaatgcacttgaatctttataagcaattttatcacaaataaaaaaacaggaaagacatgcggaggagatagctgagcatgaagcaattggtaaaacaaagataaagaaggaa

SEQ ID NO: 304456 - DNA, 623 bp, Homo sapiens
gcacatgtaagaagggcaatttggcaatactcattaaaagccttcaaaataatagtcttgactcagcaatttcacttctaagaattaatcgtaaagaagccatcatggagtttgtatgtaaagatttagctataaggacattgtttgtaagagtaaaaaatgggaagcaacatagttatctgacaacatgggacttgttaaacagattgtggtacactccagttgaattccaggctgggcgcggtggctcacgtctgtaatcccagcactttgggaggcctaggcgggcagatcacctgaggtcyggagttcaagaagagcctagccaatatggcaaaacctcgtctctgctaaaaatacaaaaataagaaaaattagccgggtgtggtggtgcgtgcccgtagtcccagctactcaggagtctgaggcctgtgatggcttgaaccagggagccggaggttgcaataagctgacgtcacaccactgaactccagcctgggcaacagaacaagactccgtctcaaaaaaaaaaaaaagagaattccatgtaaccattaaaattgatgttgtacagaaatattttaaaacatgcaaacatgtttgtaatatacagttatttttta

SEQ ID NO: 304457 - DNA, 623 bp, Homo sapiens
gcacatgtaagaagggcaatttggcaatactcattaaaagccttcaaaataatagtcttgactcagcaatttcacttctaagaattaatcgtaaagaagccatcatggagtttgtatgtaaagatttagctataaggacattgtttgtaagagtaaaaaatgggaagcaacatagttatctgacaacatgggacttgttaaacagattgtggtacactccagttgaattccaggctgggcgcggtggctcacgtctgtaatcccagcactttgggaggcctaggcgggcagatcacctgaggtctggmgttcaagaagagcctagccaatatggcaaaacctcgtctctgctaaaaatacaaaaataagaaaaattagccgggtgtggtggtgcgtgcccgtagtcccagctactcaggagtctgaggcctgtgatggcttgaaccagggagccggaggttgcaataagctgacgtcacaccactgaactccagcctgggcaacagaacaagactccgtctcaaaaaaaaaaaaaagagaattccatgtaaccattaaaattgatgttgtacagaaatattttaaaacatgcaaacatgtttgtaatatacagttatttttta

SEQ ID NO: 304458 - DNA, 418 bp, Homo sapiens
gcttctaagagacatagaatgtggaaagagaaagcccataagaattccagaaataaacagaatgtggagaagtaacatttgatgatctagcggcttaggcttttccagaatgaatgaatgacatgaattttcaggttcaggaatgtggtgtcctgaacagtgtaaataaatataaatttacatctagatgaagtggaactcataaaagcaagtaaagacaaaagccagctacctaagaacaatgataaacagacttatctcagccttattaatgaaatgacttgacaatttaatatcatttcaataygcggcagaaaaataccagataactcagaattctattcccaaatacatttttattcaacagtaaagataagacattttcagacacacagaaaatcagagccttaatattaac

SEQ ID NO: 304459 - DNA, 418 bp, Homo sapiens
gcttctaagagacatagaatgtggaaagagaaagcccataagaattccagaaataaacagaatgtggagaagtaacatttgatgatctagcggcttaggcttttccagaatgaatgaatgacatgaattttcaggttcaggaatgtggtgtcctgaacagtgtaaataaatataaatttacatctagatgaagtggaactcataaaagcaagtaaagacaaaagccagctacctaagaacaatgataaacagacttatctcagccttattaatgaaatgacttgacaatttaatatcatttcaatacgcrgcagaaaaataccagataactcagaattctattcccaaatacatttttattcaacagtaaagataagacattttcagacacacagaaaatcagagccttaatattaac

SEQ ID NO: 304460 - DNA, 518 bp, Homo sapiens
tggtaactcaggcttgccaagttgctcgggaaataacttctgccctggtcatctccatccctagggtcctgccctctcattcargccctcctccctgcctccagggaaaactgccttcacctttcaactgatcttgcaaatactttgccttttctgttggaaacttccaccatgttgctgtgaagggagctgtctaaaccacacatctgatcatgccacttctttaccttattctccttccacatagccccataggtttgaagatccaatccaaattttgtagatgagaaggcccttgtgatctgctgctgagcctcctgtgcctacttcctttcttttcctgcccctgtgttctaccctgcctccccagccaacacatagtctttgtgctcccttacggaatacttggaattgctagaaacatctatcttttcttctttttttcttttttaattatactttaagttctagggtacatgtgcacaacgtgcaggtttgttacgtatatatacatgtgc

SEQ ID NO: 304461 - DNA, 518 bp, Homo sapiens
tggtaactcaggcttgccaagttgctcgggaaataacttctgccctggtcatctccatccctagggtcctgccctctcattcaggccctcctccctgcctccagggaaaactgccttcacctttcaactgatcttgcaaatactttgccttttctgttggaaacttccaccatgttgctgtgaagggagctgtctaaaccacacatctgatcatgccacttctttaccttattctccttccacatagccccataggtttgaagatccaatccaaattttgtagatgagaaggcccttgtgatctgctgctgagcctcctgtgcctacttcctttcttttcctgcccctgtgttctaccctgcctccccasccaacacatagtctttgtgctcccttacggaatacttggaattgctagaaacatctatcttttcttctttttttcttttttaattatactttaagttctagggtacatgtgcacaacgtgcaggtttgttacgtatatatacatgtgc

SEQ ID NO: 304462 - DNA, 532 bp, Homo sapiens
tagtataaaagtacctgttaccactgaactgtgcacttaaacatggtttaaatggtgaatcttaagtattttgcttttaaagtacctttaagtttgcaaagtactttaagtactttaagaattttatgtatattttaccacagtttttttaaaacaacaaaagaacaatgttgtctctaattacrtcagacatcatatagcataccatatgatacccttcagcttcagcaagtaatgacggggtccaagattcagtaattgttaaatgtactaccctggtgattttgatgaagagaataaattaggggaaaattgtgatagtggaaaatatcttcagtagcatttgtcccaagagtctagtataaattaatatagttctactctgtcactacaaatttaacatgttttaatttaccccaaaatgctacaagctgcttattgaatcacttctctgaggcacttataccaaaaagtgacattctatttttcatcgaccttacctcacccatccaacttcacttggaattgggta

SEQ ID NO: 304463 - DNA, 532 bp, Homo sapiens
tagtataaaagtacctgttaccactgaactgtgcacttaaacatggtttaaatggtgaatcttaagtattttgcttttaaagtacctttaagtttgcaaagtactttaagtactttaagaattttatgtatattttaccacagtttttttaaaacaacaaaagaacaatgttgtctctaattacgtcagacatcatatagcrtaccatatgatacccttcagcttcagcaagtaatgacggggtccaagattcagtaattgttaaatgtactaccctggtgattttgatgaagagaataaattaggggaaaattgtgatagtggaaaatatcttcagtagcatttgtcccaagagtctagtataaattaatatagttctactctgtcactacaaatttaacatgttttaatttaccccaaaatgctacaagctgcttattgaatcacttctctgaggcacttataccaaaaagtgacattctatttttcatcgaccttacctcacccatccaacttcacttggaattgggta

SEQ ID NO: 304464 - DNA, 532 bp, Homo sapiens
tagtataaaagtacctgttaccactgaactgtgcacttaaacatggtttaaatggtgaatcttaagtattttgcttttaaagtacctttaagtttgcaaagtactttaagtactttaagaattttatgtatattttaccacagtttttttaaaacaacaaaagaacaatgttgtctctaattacgtcagacatcatatagcataccatatgatacccttcagcttcagcaagtaatgacggggtccaagattcagtaattgttaaatgtactaccctggtgattttgatgaagagamtaaattaggggaaaattgtgatagtggaaaatatcttcagtagcatttgtcccaagagtctagtataaattaatatagttctactctgtcactacaaatttaacatgttttaatttaccccaaaatgctacaagctgcttattgaatcacttctctgaggcacttataccaaaaagtgacattctatttttcatcgaccttacctcacccatccaacttcacttggaattgggta

SEQ ID NO: 304465 - DNA, 645 bp, Homo sapiens
gtccatgctaatggagttgcttgcaagaggtgttgtatgtaattctgtttaatactaatmtttatttaaaatttacagagataaaaacaaacatacttatttatatttttcaaaattggctaagttataattttttcaacataattgttctagcaccttgactgttagcccaggaaatattatgatttgaatagaattcaaattctccatggaaccagtttcctatgggtcaatacatgcagcttttctactttctgaatttagagagctccttttgttcatatagtacttaaaaactatgtaaagtcctttctacaaaaataatacaattttctcagaaagagatcttatgtcagaactaagattagctcgcattattaagtgttactgtgtaccagaaccttcacacacattatttttaattctgaaaatgctgtaaggtacagagaggaaaaattaaagacacaaagatgttaagtaatatgcctaaattcacatagccattaagaaaaaaatcaggataaaaactaaggttatataatagaaaaacctttaatctatacctatcacctcccaaagacttcaaggtaggaaatgttatctctgagtggtgattgctctcccttctgtgtatgacttttttga

SEQ ID NO: 304466 - DNA, 577 bp, Homo sapiens
ttattcagttgtacacttgaaatacacatagtttaatgtacctaaattgtacttcaataaattcagaagaagaaaaaacatttaaagaaagaaaagaaagatacaaatgaaaagttaattgccgttttatctacaagaaggcttaatgtgaagaaacatgatacaggtcaaaatyccaatctacagaaagaagtacaaaacactggaaatataaaaaagatgaatatagtgttacctcaatttctcccaaaataaccactaaattataaaataataatgtttaaatgaatgacaatgatggtagcagggattggtaggaggaatgagaaaaataatattaagtggtcctttgttacacatgaagtagtataacattatttaaaggtatatttgttagagtagtagctaggaatacatgagcagggcaagagagggacccctctcaggaacatcaggtgagtgagtatcagctgatggtcaggcagttgttaaactgtctctctaaataacagttggtctcagttagtgccagggaagagcaatcgtcggatagatagaaaacacctgacactgctgc

SEQ ID NO: 304467 - DNA, 577 bp, Homo sapiens
ttattcagttgtacacttgaaatacacatagtttaatgtacctaaattgtacttcaataaattcagaagaagaaaaaacatttaaagaaagaaaagaaagatacaaatgaaaagttaattgccgttttatctacaagaaggcttaatgtgaagaaacatgatacaggtcaaaattccaatctacagaaagaagtacaaaacactggaaatataaaaaagatgaatatagtgttacctcaatttctcccaaaataacyactaaattataaaataataatgtttaaatgaatgacaatgatggtagcagggattggtaggaggaatgagaaaaataatattaagtggtcctttgttacacatgaagtagtataacattatttaaaggtatatttgttagagtagtagctaggaatacatgagcagggcaagagagggacccctctcaggaacatcaggtgagtgagtatcagctgatggtcaggcagttgttaaactgtctctctaaataacagttggtctcagttagtgccagggaagagcaatcgtcggatagatagaaaacacctgacactgctgc

SEQ ID NO: 304468 - DNA, 577 bp, Homo sapiens
ttattcagttgtacacttgaaatacacatagtttaatgtacctaaattgtacttcaataaattcagaagaagaaaaaacatttaaagaaagaaaagaaagatacaaatgaaaagttaattgccgttttatctacaagaaggcttaatgtgaagaaacatgatacaggtcaaaattccaatctacagaaagaagtacaaaacactggaaatataaaaaagatgaatatagtgttacctcaatttctcccaaaataaccactaaattataaaataataatgtttaaatgaatgacaatgatggyagcagggattggtaggaggaatgagaaaaataatattaagtggtcctttgttacacatgaagtagtataacattatttaaaggtatatttgttagagtagtagctaggaatacatgagcagggcaagagagggacccctctcaggaacatcaggtgagtgagtatcagctgatggtcaggcagttgttaaactgtctctctaaataacagttggtctcagttagtgccagggaagagcaatcgtcggatagatagaaaacacctgacactgctgc

SEQ ID NO: 304469 - DNA, 488 bp, Homo sapiens
gaatgactgcatatttcaaaaaccaagaacagtgacctttggggaaggggaaagaatcttatttacagagatattatataagaataatcaaatgtctaatttttaacagaaagagacatagcatacaaaaaaaatcagggaaatatggcctatttgatgaaaaaatttaatctaccaaaactatccctgaggaagctaagacattgcagtttttagacaaagactttaaatccactgccttaaatatgctctaaaagctaatgaaaaccatkcataaagaaataaagtaaataaaaaaattgatgtatgaacaaattgtgaatatcagtaaaaaggatcaaaattataaaaataaatcagatataaattctggagctgaaaagtacactaactgaaatgaaaattttacaagaggggttcaacaacagatataaacttgcagaaggataataaacagacatgaagataaggcaagtaaaactacccac

SEQ ID NO: 304470 - DNA, 646 bp, Homo sapiens
cttttattagacatagctcaataaaagaaaaaaaaaacaagtttgtctttccgattgcaataactccagaaattaaagtaagtgcctgttattataggtttaatatakatatgagttcaatgaatgagttattaagtgaataaaaaaccttttatccctttccatgatgaatatggtttaatatgttagcactttcactttcggcttaacaaaaataatgtccctgtaaaggcagagaagatagcacccactaaatgtgactgccattaaccgtagggttactgactcacaaccaaggtatttcgtgaacagaagtgacatcaaattcagacttctgacactgtgaggcataagtaaatggacaagaaatattccacttttattttccttgctatgggaattcaactgatgcttgcaatgtggttaatgccatgaagaggaagtcagatttgctctccctcagttatcaccacttcagaatctaagtaactgtggcaacgtttattcaccctcaaagcttttaagatgattgagattacagttgaaaagaaaacccaaatgtttttctagaaattacagttacctaaaggaaaaacaaaaatatctattcattagagactgtttttagtgaaatgcaataaattct

SEQ ID NO: 304471 - DNA, 646 bp, Homo sapiens
cttttattagacatagctcaataaaagaaaaaaaaaacaagtttgtctttccgattgcaataactccagaaattaaagtaagtgcctgttattataggtttaatatagatatgagttcaatgaatgagttattaagtgaataaaaaaccttttatccctttccatgatgaatatggtttaatatgttagcactttcactttyggcttaacaaaaataatgtccctgtaaaggcagagaagatagcacccactaaatgtgactgccattaaccgtagggttactgactcacaaccaaggtatttcgtgaacagaagtgacatcaaattcagacttctgacactgtgaggcataagtaaatggacaagaaatattccacttttattttccttgctatgggaattcaactgatgcttgcaatgtggttaatgccatgaagaggaagtcagatttgctctccctcagttatcaccacttcagaatctaagtaactgtggcaacgtttattcaccctcaaagcttttaagatgattgagattacagttgaaaagaaaacccaaatgtttttctagaaattacagttacctaaaggaaaaacaaaaatatctattcattagagactgtttttagtgaaatgcaataaattct

SEQ ID NO: 304472 - DNA, 630 bp, Homo sapiens
gaattctgcaactattctccatgtctaactttagttaaagaaagaaaaactttaaaaagatctctaagtttccttggatttgaatattttgttaaaaattatcgaaagtgtgcttagcttaaaatatctttcatgccaaaatttggagtagattcctgctctcttgattccaagttcaataatctttccaatactcyatgtccttccaaatcttttagtgatatttttactcaaagcacaattgagttggtaatgcattaaacctcaaatctattgtttggttatatgaaatataaaacatatttttaaaaatctgtgcatatccctattcctggctctcctaaaaataacctataagctcatccacttaattttgtggttactcaattagttctactctacaaaagagatgagaaatccaagatttatttttaagactgcagtaggttggcttcttttatagatcttagaattggaggacagagaaaaggcatttagaacacttttatattcgtttttcctatcctaagctttttctttaaatttgttgtgcaaattatctctgcagttctataatgccctttctgcttctttaggagcactaaaatttatctttaataagacaagata

SEQ ID NO: 304473 - DNA, 660 bp, Homo sapiens
atttcctgcctaaactgaatcatttctgaagataagtcatcctctaataaaataactaccaaatgcctgctgctgctgatgatgatgatgataaaatatttaaaatgtaaataccaaaaaaatacaaatagcagaagagatctattaagataggatatagttgtcagagttcaaaacaggtggactctgaagactcctgctcttatttatgacctcaaatttgtttttctcctctcttcatctgagttagggtgtgttaatagtgctttaatgaaatcacttctactaacttccactaactaaaaagagagcaaggccaaattgagctttctttcaatctgttcctatttgttctatagatagcagagtttctaaatttaaaaagtcacatagaatttaaatttgtagtgctttagagatcaaccccaaattactcactatttttattctctcagttgtttcattggagatcttggaaagcataagtaaacctaagttttccaggttactatatttcttgaaaacctatgcattaaagttccccatcctcyacaatggaagattactataacatattgtaagtctaggaatctcataagatatgaattacataggatcttccagtccaatttgcacaaaattcacatctcttaatcaaga

SEQ ID NO: 304474 - DNA, 596 bp, Homo sapiens
gagaaatggactccacgtctatcattttgttatgattcatcaccattgtcatccctaactgtacacaaaagtgatgaaatttaaaagaatacattgagacctactttgtcaaaaagtatctctactttctggcaacttctaaaatggcaattaagagaccaaattgtttggcctttctcctacaattctcataaggttaaaatgtagtaagattcccagttaagggtaattctatttacattggaaacaactatgacattaaaatgatacttttaccagattttgtgtaattcacagttgcagaaaatgggtctaaaatgaatacataatagttaaatttcattttaggarcttgtcaagaaatatctcaaattgactttaggacccattcatgaaggagtactaccaatttggatggagtgcatattgagggagaaaatccttagaaagtcagattctgaattagataatacatacattctgatttactctttgaagatcaaagaattggcattcagatattgtgggtttggcctcaatgaccagtggaagtgataatatttcaatatccagaatgcagtcatcaggaagaacat

SEQ ID NO: 304475 - DNA, 593 bp, Homo sapiens
cacgagatgttaggcaaactttcagaaatcttgttgacttttacttaccagattacagcagtttaaggattcaatgaacctgtcttttattaattccaacatgctgccaaccataggcttccacatctgtttttagctctctaggtgctttctggatgctacatagagataagcatagcacagttgaaaaatcatctaattacarattagtagtagaaaaagtatacgttttaaacaatggaagtttcttatttttggtttgctttacatctagtaaatgtcaccttattttctttatattttaattaacaaaattgtatatttttgtgtacaacatgttttgaaatatgtatacacagaagaatgctaaaacctaattaacatatgcattacttcacatatttatttatggtgggcacacttaaaaactctcttagtgattttcaagaatagaatacattgttattaactatagtcaccatgtacagtacaatagatctcttaaccttactcttcctgtctaatttaattttttgtgctttgatcaacatctccccagcacgactaaccacaacacctccctcacctgctgc

SEQ ID NO: 304476 - DNA, 593 bp, Homo sapiens
cacgagatgttaggcaaactttcagaaatcttgttgacttttacttaccagattacagcagtttaaggattcaatgaacctgtcttttattaattccaacatgctgccaaccataggcttccacatctgtttttagctctctaggtgctttctggatgctacatagagataagcatagcacagttgaaaaatcatctaattacagattagtagtagaaaaagtatacgttttaaacaatgkaagtttcttatttttggtttgctttacatctagtaaatgtcaccttattttctttatattttaattaacaaaattgtatatttttgtgtacaacatgttttgaaatatgtatacacagaagaatgctaaaacctaattaacatatgcattacttcacatatttatttatggtgggcacacttaaaaactctcttagtgattttcaagaatagaatacattgttattaactatagtcaccatgtacagtacaatagatctcttaaccttactcttcctgtctaatttaattttttgtgctttgatcaacatctccccagcacgactaaccacaacacctccctcacctgctgc

SEQ ID NO: 304477 - DNA, 593 bp, Homo sapiens
cacgagatgttaggcaaactttcagaaatcttgttgacttttacttaccagattacagcagtttaaggattcaatgaacctgtcttttattaattccaacatgctgccaaccataggcttccacatctgtttttagctctctaggtgctttctggatgctacatagagataagcatagcacagttgaaaaatcatctaattacagattagtagtagaaaaagtatacgttttaaacaatggaagtttcttatttttggtttgctttacatctagtaaatgtcaccttattttctttatattttaattaacaaaattgtatatttttgtgtacaacatgttttgaaatatgtatacacagaagaatgctaaaacctaattaacatatgcattacttcacatatttatttatggtgggcacacttaaaaactctcttagtgattttcaagaatagaatacattgttattaactatagtcaccatrtacagtacaatagatctcttaaccttactcttcctgtctaatttaattttttgtgctttgatcaacatctccccagcacgactaaccacaacacctccctcacctgctgc

SEQ ID NO: 304478 - DNA, 643 bp, Homo sapiens
aatatatatatatttcacctagtatataatataagaataacccacctcctcctttaaaaaaatcagagaaatatctctaatgcagattttaggattttayttttctctttcaccaatgaacttcaaaataactagctcctcacttaccaagagaatattctggtattaatgtatattctatcatatctcaatctagacatcttgttagtcagaagacaggaacaacattgagtgttatagttttgttttctattatttttacaatacatatatattacacataatcagacaataatataaaattattgggtaacagcaactcaacaatgacaatggcttatgcaaataagggattgtgcctttgatgaattacatggtagctgtagatctggtcatttgactctcctctatttgtcctcatttcaggatccaaactgaaggaaaaacctcaatatatagcaaagtccatagcagaggtaaaagagcaagagagctgttgaaacaaagtgatggctcttagcgtttctgctcagagtcaccataccttcacttgtgatcatgttcactggccaaagaagtgtcacactcctactgttatcacagaggaggggaagaaaatgcctttcacaggaagacacagcag

SEQ ID NO: 304479 - DNA, 532 bp, Homo sapiens
gaaaagcaaaattaaaaaaagaagtaatgcaatagaaaacaagtccctcaagaaatgagacatgcaaaaattgtatttgatagctctgcaatagagaaatcatcttcagatacatatcagtggtattctgttcatgaaagataagaattcattcagacaytagaaaaaacatattgaataggctttaccaagaagaaatagacaggacattttacagaagtctcaccctttgcaaacaaagataacaatcaacaatcttaggttatcagtttacccaattcagatgaggatttttaatagatgaatatcctgtcatctactgtaatatgtttgttgatttctttatttttattcattttctataattgccataatcatagctagtcatattttggctaggttttacttataaattttatgtaaaaattttatataataaataagattaaaaataacaaactaaatagcctgctttctcccattaacccattcatctaaatgctatacatcattttctaaattattttatcat

SEQ ID NO: 304480 - DNA, 584 bp, Homo sapiens
tatcatatcctcatattcccagttcttttctctgctgaattaattggttaaattataaattacattttaattttcagagttctcagagaagtgttccatgatttggtccaggtttggtgttactgaagcaccaggggtttggtctagatcctgctgattgctgcacagaaagccagtcactgagacaatgagtacttccaggaaagaaggttttatttgrgtgttgcacctgagcagatggaagatcagtcttaaatttatctctggcctaataaaattgagggtttatacagtggggaaataatgtatctacatgtggctaaagagaaattagggatggctagaaaatcatgagggatgagggttgatacagtgtggatatttttccccttcaaatttcatgttgaaatgtaatccccattgttggaggtggggcatgatagaaggtgtttgaatcattggggtggatcaatggcttagtgacatccccttggtgatgagtgagttcatgtgatatctggttgtttaaaagtgtgtgacacctttccccatcttgctcccactcttgccctgtgatgtgcctg

SEQ ID NO: 304481 - DNA, 584 bp, Homo sapiens
tatcatatcctcatattcccagttcttttctctgctgaattaattggttaaattataaattacattttaattttcagagttctcagagaagtgttccatgatttggtccaggtttggtgttactgaagcaccaggggtttggtctagatcctgctgattgctgcacagaaagccagtcactgagacaatgagtacttccaggaaagaaggttttatttgggtgttgcacctgagcagatggaagatcagtcttaaatttatctctggcctaataaaattgagggtttatacagtggggaaataatgtatctacatgtggctaaagagaaattagggatggctagaaaatcatgagggatgagggttgatacagtgtggatatttttccccttcaaatttcatgttgaaatgtaatccccattgttggaggtggggcatgatagaaggtgtttgaatcattggggtggatcaatggcttagtgacatccccttggtgatgagtgagttcatgtgatatctggttgtttaaaagtgtgtgacacctttccccatcttgytcccactcttgccctgtgatgtgcctg

SEQ ID NO: 304482 - DNA, 496 bp, Homo sapiens
gctgattggtgcatttataaacctttagctagacacagagcgctgattggtgcgtttacaatmctttagctagaaagaaaatttctccaagtccccacccgacccagaagcccagctggcttcacctctaaataggagctaagaacaaccccaggatgacaagcatgaaggaatgaggtcttcttcctacaaccacaacgaattgggttctgtcagcaatcagaatgagcttgcacacatttatttcatccttagaccctgacatagtttggatttgtgtctccacctaaatcgcacttcaaattatagtccccagtgttggaggagggactgtgtggaacgtgggcaggtcatgggggtggatttcccccttgctgttctggcaatagtgagttctcacaagatctagttgtttaaaactgtgtagcctctctcccttcactctcttcctcgtgctctggccatgtgaacatgtgcctccttcctctttgctttc

SEQ ID NO: 304483 - DNA, 496 bp, Homo sapiens
gctgattggtgcatttataaacctttagctagacacagagcgctgattggtgcgtttacaatcctttagctagaaagaaaatttctccaagtccccacccgacccagaagcccagctggcttcacctctaaataggagctaagaacaaccccaggatgacaagcatgaaggaatgaggtcttcttcctacaaccacaacgaattggrttctgtcagcaatcagaatgagcttgcacacatttatttcatccttagaccctgacatagtttggatttgtgtctccacctaaatcgcacttcaaattatagtccccagtgttggaggagggactgtgtggaacgtgggcaggtcatgggggtggatttcccccttgctgttctggcaatagtgagttctcacaagatctagttgtttaaaactgtgtagcctctctcccttcactctcttcctcgtgctctggccatgtgaacatgtgcctccttcctctttgctttc

SEQ ID NO: 304484 - DNA, 496 bp, Homo sapiens
gctgattggtgcatttataaacctttagctagacacagagcgctgattggtgcgtttacaatcctttagctagaaagaaaatttctccaagtccccacccgacccagaagcccagctggcttcacctctaaataggagctaagaacaaccccaggatgacaagcatgaaggaatgaggtcttcttcctacaaccacaacgaattgggttctgtcagcaatcagaatgagcttgcacacatttatttcatccttagacyctgacatagtttggatttgtgtctccacctaaatcgcacttcaaattatagtccccagtgttggaggagggactgtgtggaacgtgggcaggtcatgggggtggatttcccccttgctgttctggcaatagtgagttctcacaagatctagttgtttaaaactgtgtagcctctctcccttcactctcttcctcgtgctctggccatgtgaacatgtgcctccttcctctttgctttc

SEQ ID NO: 304485 - DNA, 592 bp, Homo sapiens
aatttggcactggctagatttaaattgaatatatatatatatttttcaggcacagaaagttaattaataacttataataatttataagccttgccactaacttacatggatcataaaaagaaatatatcatttgaaaatgtaaaaaaaccacaaacttataatatataatatatgttatatactatacttatattatattaaacctataacattatttatgctgctttcagtggaaaaaaatttgaacaaaatttgaaggatgtagtatactctaaataatttgcatagaatatgtatttatgcttttaatgattttaacktattttattttctatcatatttaccatcaaaaaaataaaattaacttttaatattatttttacattaataataatcatagtaattatgttaataactctactctttcttctgctgtcaactatggagaaatctgacttctacagaccatattctagtcaaatggtttaagactcttctctaaagaatttaggtttctaatctggtaagtgaggattatactttcatacagtcttccccagacagctgagtgtagtgtttaaaggcttagtg

SEQ ID NO: 304486 - DNA, 630 bp, Homo sapiens
actatgtagctaggccattttaggctatagagtcatagatatatcagggttcagtgatttttaatttaattctagggatytattttacaaacacatttttgacattcctaagactaatttcataaggttttacctaaatccacatttctttcttactgaattagatagaaatactcattatcatatacaagtaaaatctatcttagtagattttgttacaatttttggatttaaatataaacccaaaatttaaaatgtgcttttactaatactaaaaaattcagtattattcacaatattgaatgcaataatattacataaaaggtttaaaacaaatgtaataactatttctcttaatttatatcttatatgttaacataagacttggaacattggctcaggcacatggttcatttgatcaagtaggcttttgccaacacaagcccaaagacagatgcttatgtaacacaatatttctcaaaatgtagggtacatgtgtaaaatctgacatgttgttgtttttttttaagttaatatttatgaacctcattctcagagattaatttgtcagtaggtctggattagggctagagtttagactttttgtgagtaatcttgattatattaatg

SEQ ID NO: 304487 - DNA, 630 bp, Homo sapiens
actatgtagctaggccattttaggctatagagtcatagatatatcagggttcagtgatttttaatttaattctagggatttattttacaaacacatttttgacattcctaagactaatttcataaggttttacctaaatccacatttctttcttactgaattagatagaaatactcattatcatatacaagtaaaatctatcttagtagattttgttacaatttttggatttaaatataaacccaaaatttaaaatgtgcttttactaatactaaaaaattcagtattattcacaatattgaatgcaataatattacataaaaggtttaaaacaaatgtaataactatttctcttaatttatatcttatatgttaacataagacttggaacattggctcaggcacatggttcatttgatcaagtaggcttttgccaacacaagcccaaagacagaygcttatgtaacacaatatttctcaaaatgtagggtacatgtgtaaaatctgacatgttgttgtttttttttaagttaatatttatgaacctcattctcagagattaatttgtcagtaggtctggattagggctagagtttagactttttgtgagtaatcttgattatattaatg

SEQ ID NO: 304488 - DNA, 521 bp, Homo sapiens
aacttaacagtcatgtcttcagagaaatttcctgaaaaactgatcgaaaaccatcccgtgacccattacatatgcaggaattattattatttttattatcattactattattttatcatgaccttgtgttcatttccttcacaggattccacatattatttataaacatatttacttgtatagttatttactgcatgttcctttctctaaaatgcaaattttccttttcaatgtgtaacagtggcttatcacagtatcytacgcatcctggataatcaataattacttagtaaatcactgaagcaataatgccattactctcttgttatcttcccaatatgcccaataaataagattttgcttcacttttcagtaactcttgttaaaaagtatttagtttggttgacagatgtgggtcagaatatgaaaaattaaaaacaggttttctataaattaagttagcccagtagccatttgctgcaaacagatttggagtttatactgaagttggcccaaattgc

SEQ ID NO: 304489 - DNA, 562 bp, Homo sapiens
aattcataaatccagaccctgcaaaaatcgagcagaatctggagcatgataattgaacatgatcatttgaagcaagtggtgacttcaatttcagacactctaccagacatggtgtctgtactagagagaaatatggctggatgcagtgggtcacgcctgtaatcccagcactgtggaaggctgaggcaaggggatcactcgaggccaggagttcgtgaccagcctggccaacgtggcaaaaccctatcactactaaaagtacaaaaattagctgggcatggtgatccaagctacgcaggaggctgargcaggagaattgcttgaacttgggaggcggaggctgcagtgagctgagatcacgccactgcaccctagcttgggcaacagagcaagaccttgtctcaaaaaacaaataataataattagcatgatctcagatacatagtatgtggctatagatttatcaaattaatatgtttatatctctattaggaaagataatcagaattagctcacattcattaggaagttataatagtacacagttacagtttttcaatat

SEQ ID NO: 304490 - DNA, 436 bp, Homo sapiens
gtgttcagacatgcactccagagggtggaaaataaagactcagacctgctacaatggcaaaatatttgaggaaaaataccctccacaggaaaaacaaattattttgtctggctcttccatcattaagatwtctttgatttattcctctatcttactttctagtggttgttctagaagaaataatatctattttgccttatcatattttatcttttcaaataacattactgacttatgatggagtcatgtcccaataaaccaattgtcagttgaaaatatcataaatcaaaaatgcatttaatacacctaaactaccaaacatcatagcatagcctgccttgaaggtgttcagaacacttatatcagcctacagttgggcaaaattatccaaaacatagattatattataatgcggtgttgaatatctagtgtaatt

SEQ ID NO: 304491 - DNA, 551 bp, Homo sapiens
tgggcttgctttttagcagggcttagggtctgagcaccataaagcctttgatctttctatactttatgtaagaataaagccttcagtttcctaaatcatattacagttcttcctgctgccagcttgtaagtatcttaatagttctcattgctctcaagcctcaatcctctcaccctagcctccttgctattaggtaatctttttccagtctcctgttcagcatcaaatcttcagcctgtagaatcttaaatgagtttctctaacttttcctggactgtagatttcaacatgttgctaccttttacttggtatggcagaaagattcaatagtgtctctcatgcttctcacctcctgctatttgtacmattgtctaattctgtttgattcaagaactgtaatttcttctaataaatggatgtgtacaatgtgacaaggcatgcatgattacataagaatatagcacctatgtctagagtcagatcctctttcttctttttccgaattgctccttctccctttctctaccacttcccaaagacagctcctatta

SEQ ID NO: 304492 - DNA, 551 bp, Homo sapiens
tgggcttgctttttagcagggcttagggtctgagcaccataaagcctttgatctttctatactttatgtaagaataaagccttcagtttcctaaatcatattacagttcttcctgctgccagcttgtaagtatcttaatagttctcattgctctcaagcctcaatcctctcaccctagcctccttgctattaggtaatctttttccagtctcctgttcagcatcaaatcttcagcctgtagaatcttaaatgagtttctctaacttttcctggactgtagatttcaacatgttgctaccttttacttggtatggcagaaagattcaatagtgtctctcatgcttctcacctcctgctatttgtacawttgtctaattctgtttgattcaagaactgtaatttcttctaataaatggatgtgtacaatgtgacaaggcatgcatgattacataagaatatagcacctatgtctagagtcagatcctctttcttctttttccgaattgctccttctccctttctctaccacttcccaaagacagctcctatta

SEQ ID NO: 304493 - DNA, 528 bp, Homo sapiens
tgtaatttcttctaataaatggatgtgtacaatgtgacaaggcatgcatgattacataagaatatagcacctatgtctagagtcagatcctctttcttctttttccgaattgctccttctccctttctctaccacttcccaaagacagctcctattaatctcacaggtgtaagaaaatgaaatatgccaatgtctggagggagcatggatgtagattatttctctgtcaagactyggatgagataccagaactggggaaccttaattataatctgtgtggtgctctacagaggaatcacataagccattcctgttttgtaaaaccacagaatccatgagaatccctggttctcgtcagttctcttgtcccattctcaccgttctatgtatttccttcacacatttgatgaagatttgtaaagaggagttgttgggcagaggaggacttgcttgtgttttggttgtgccttaaatttcaagacttaagtttaaaatcatcataagttatgctggccaaaacatgactga

SEQ ID NO: 304494 - DNA, 528 bp, Homo sapiens
tgtaatttcttctaataaatggatgtgtacaatgtgacaaggcatgcatgattacataagaatatagcacctatgtctagagtcagatcctctttcttctttttccgaattgctccttctccctttctctaccacttcccaaagacagctcctattaatctcacaggtgtaagaaaatgaaatatgccaatgtctggagggagcatggatgtagattatttctctgtcaagactcggatgagataccagaactggggaaccttaattataatctgtgtggtgctctacagaggaatcacataagccattcctgttttgtaaaaccacagaatccatgagaatccctggttctcgtcagttctctygtcccattctcaccgttctatgtatttccttcacacatttgatgaagatttgtaaagaggagttgttgggcagaggaggacttgcttgtgttttggttgtgccttaaatttcaagacttaagtttaaaatcatcataagttatgctggccaaaacatgactga

SEQ ID NO: 304495 - DNA, 556 bp, Homo sapiens
tctccattctgttataacagaggattcaacagatatcaatgtcaagtcaaaccttgtgttcaatagttttcaacatgtctgaatatattctcctttccccagtgtattgtcacctgagcaggatgggaatagacttgtgaaagactggtaaaatccatatggtatatacttttcatggagtttcatgattcttctactaaagtcctggtcacctctcttatcaatggattccagaacagaaaataggttcaaaactcagtaatgaccttttctttctatgacatcccttagtttccttctcctttattttcaccttcatctataattcttccatagcagaacccttgtttgttccttgtctgttacaatgcagtgtttataatcatcttcacaatggccaacaaatcaagccctcttgccagctcttctaactgggcrtgatattttggtatgtttttcacactggctccattgattaagtgccatagtttggcatgatttactttggtgtcttatcatcataaggctaataataaggtcagcttaatgaccactt

SEQ ID NO: 304496 - DNA, 587 bp, Homo sapiens
aatgagccagttaagaactcccagatggcaggagaagagggaatgaaacttacgtatttatagttacccttacaatagaagagagccaactcttcattgggagggagatatagaagggaaagaacaaaccttggtgaaaataaactcatgagagaaragtgagttgagagaacacatgtcaagaagtttgaaaatagtttgagctcatttcagccctctcaaattaccaatatatcactgcctaaaatgatcagtagtccttaatctttctaactttagatacaatttatttttgtttctttgtttttcatactgatgggcatgtaagtatgttaaggaaattaaaatgctgcaaactgcacaaagaggtaatatttacatgtgatcagagtgaaaaattattccagacttgtgagaaatatgtcacaaggccaaaaatagcagaaagattggagacttaaatatctatttcgtgttcacatctctataatgggggaaggaagggagaggagtgttttgataacctactccagcatctatcacttggatattctaacaagccacaagtcacagaatcatcaataaag

SEQ ID NO: 304497 - DNA, 518 bp, Homo sapiens
ggactctttatagctattaagatgtgcaaattatatgtgaacatgtacaggtattcaaaatatttgtataagatataaaactaggttatggaatartgcgtaacaaaagtaaaatatattatttgcacaaatagagcaattgaaaaatagatggtgaagcacatttaaaaaattttccaatcagagaacagaaaattgttgaatatatgtagaacctaacagtatgcaacctgacattcatctaattgtttattcctaagtgtcattcatcaatgtgcattatgaaatgcaatttataaaagacttcctgaatcaacagggactcacatctttttcaaaagtcacttacttctacaatgtcaaaaaagattcatcattctacgctcatatttctaaactaatgtaacatgtttagtttctttgtgtggtggaatgtcttgttaacttatttatccagagagcccttttatctcaagatgtagtaaagagttatccataaaatttctgccttaagattt

SEQ ID NO: 304498 - DNA, 518 bp, Homo sapiens
ggactctttatagctattaagatgtgcaaattatatgtgaacatgtacaggtattcaaaatatttgtataagatataaaactaggttatggaataatgcgtaacaaaagtaaaatatattatttgcacaaatagagcaattgaaaaatagatggtgaagcacatttaaaaaattttccaatcagagaacagaaaattgttgaatatatgtagaacctaacagtatgcaacctgacattcatctaattgtttattcctaagtgtcattcatcaatgtgcattatgaaatgcaatwtataaaagacttcctgaatcaacagggactcacatctttttcaaaagtcacttacttctacaatgtcaaaaaagattcatcattctacgctcatatttctaaactaatgtaacatgtttagtttctttgtgtggtggaatgtcttgttaacttatttatccagagagcccttttatctcaagatgtagtaaagagttatccataaaatttctgccttaagattt

SEQ ID NO: 304499 - DNA, 557 bp, Homo sapiens
ctgcatggtactattacatacatagtttatatggtttagaagaaccatataaaccaccattaactattccttttatcataataataaaaataataggtggagttgctgatatataaaatatgaattgatccattagaagtaattttctattataatttttcaactttcttagtcaatttcagattatgattagaaatgttaatgttaatcttgtttctctaccatttaacccctctcttaaaaayataatgaccacttcttagacccttttctactctccttccatgtatatttcaagttttctacttataatttgtaattatttaaattgttttatttttatcttagttgtttgaaatcaacctctacattattaccatcttttctttctccccaagcttataagcattggtctagcatttaatgataacttttaatttgggatgattatatccaagatgctgccccagaatgagagttttatgaatgcttaatgcaaggaatcataaagcttataccagtgctgccctgaaaaattaaccaaagaaaaccccaaa

SEQ ID NO: 304500 - DNA, 557 bp, Homo sapiens
ctgcatggtactattacatacatagtttatatggtttagaagaaccatataaaccaccattaactattccttttatcataataataaaaataataggtggagttgctgatatataaaatatgaattgatccattagaagtaattttctattataatttttcaactttcttagtcaatttcagattatgattagaaatgttaatgttaatcttgtttctctaccatttaacccctctcttaaaaacataatgaccacttcttagacccttttctactctccttccatgtatatttcaagttttctacttataatttgtaattatttaaattgttttatttttatcttagttgtttgaaatcaacctctacattattaccatcttttctttctccccaagcttataagcattggtctagmatttaatgataacttttaatttgggatgattatatccaagatgctgccccagaatgagagttttatgaatgcttaatgcaaggaatcataaagcttataccagtgctgccctgaaaaattaaccaaagaaaaccccaaa

SEQ ID NO: 304501 - DNA, 567 bp, Homo sapiens
tatcttggcctagatagtttatgtctcagttaataataatgttgatagtaatactaataagttctaattatcaatgaccatttgctatgttcccaatttagtcttttaaatatacctctgaacagtatttggctcataatggtcacaaaacaagtgtttgctaaatattgactaaattcttatattaactctgtgtgagacagatgccattattaccttcacttaataggtaaggaaactgagtcataaaaatgtcacttgctcacagtcactccactaacatttgaaggatcaggatttgaatccagatctgtctatctccaaagtakgtgttcttaaccactactgttttatgttgcctttggaaaaatatccaagaactagataattaccagtgatgaaatctgtttcagaatatagaaaagtataactcccctctaactccataaaattaaaacaaaattacaatccctcctaaatgtataaaattagaacttccttatacaaaagccaattaaatgtagcacacacacacaaatccattgaccaatgtatattttaatcata

SEQ ID NO: 304502 - DNA, 567 bp, Homo sapiens
tatcttggcctagatagtttatgtctcagttaataataatgttgatagtaatactaataagttctaattatcaatgaccatttgctatgttcccaatttagtcttttaaatatacctctgaacagtatttggctcataatggtcacaaaacaagtgtttgctaaatattgactaaattcttatattaactctgtgtgagacagatgccattattaccttcacttaataggtaaggaaactgagtcataaaaatgtcacttgctcacagtcactccactaacatttgaaggatcaggatttgaatccagatctgtctatctccaaagtaggtgttcttaaccactactgttttatgttgyctttggaaaaatatccaagaactagataattaccagtgatgaaatctgtttcagaatatagaaaagtataactcccctctaactccataaaattaaaacaaaattacaatccctcctaaatgtataaaattagaacttccttatacaaaagccaattaaatgtagcacacacacacaaatccattgaccaatgtatattttaatcata

SEQ ID NO: 304503 - DNA, 567 bp, Homo sapiens
tatcttggcctagatagtttatgtctcagttaataataatgttgatagtaatactaataagttctaattatcaatgaccatttgctatgttcccaatttagtcttttaaatatacctctgaacagtatttggctcataatggtcacaaaacaagtgtttgctaaatattgactaaattcttatattaactctgtgtgagacagatgccattattaccttcacttaataggtaaggaaactgagtcataaaaatgtcacttgctcacagtcactccactaacatttgaaggatcaggatttgaatccagatctgtctatctccaaagtaggtgttcttaaccactactgttttatgttgcctttggaaaaatatycaagaactagataattaccagtgatgaaatctgtttcagaatatagaaaagtataactcccctctaactccataaaattaaaacaaaattacaatccctcctaaatgtataaaattagaacttccttatacaaaagccaattaaatgtagcacacacacacaaatccattgaccaatgtatattttaatcata

SEQ ID NO: 304504 - DNA, 505 bp, Homo sapiens
tgagtaagttacttactgatcatttgatgagatctgttgactaaatgtggctttaattgctgatacttgaacttagagtgcgatactaacaggatttattattcactaagcacttacaatatgccagacaatgttttaagcactttagttatctcgtctgtttttttgtttattttttgagaccgactcctactctgtcactgaggctggagtgcagtggcacgatgtcagctsactgcaacctctgcctccgggttcaagcgattctcctgcctcagcctcccaagtagctgggattagaggtgtgccaccaaacctagctaattttttgtatttttagtggagaccgggtttcgccatgttggccaggctggtctcgaactcctgaccttaagatccgcctgcctcagcctcccaaagtgctgggattataggcatgagccactgcccactgcgcccagccttatttcacctcatttaatccttacaattactttaaaaagta

SEQ ID NO: 304505 - DNA, 567 bp, Homo sapiens
cattagttttttattctagtaggagaacaaagaatttagagaataaagtaggyatatattgaattgaataagcaccatctgattttccattcattacccatacaagaataaagtctgtcctgtaattaaaaagttcttcagtttaaaacagtgctcactgaattagtaggcatctgatattctggggtagtaggaagatatgacccccttgtgtggctacctttcttatatattatcacatattttcataacttgtgtctactgcctattcgattttctaaattgttttattgttgttgttaggtgacctctgttaatcattgggaattcagtgtttatgttcttgctttagctgagtctcagcaaggatctccaaagcttctgttgacttacatcatactgtcatactatatcaatcacacaattattttattagtactagtcaaatgtttgaggacaaattctatgtatgtatgtgtgaatgtatttatgtgtttatgtgatctttttaaaagtcattaaaataatctataaagctttgatttttctctacctgtcttgtttaga

SEQ ID NO: 304506 - DNA, 621 bp, Homo sapiens
gagctattattatgttacagtgatacgtttgcttctgcttctaatgagcattccgtgtgtgaaaactcrtattctgtttgaagatgtttctggcaaacaatattttcatctacttttaactgaatgccttagagtttttgaacgagtgaactgttggtgttggggaggaaagaaaaggatacagcattctttttataagaataaagaagttgtaaatggaagacgaaatcaccatcagctgccttgaatttcaagcaagagtcttggatggctattgaagaggcacttgcaagtttttcttctggggttgcattcatgtaagtcctgggcttgtcaaccacctggtccagagggcttttataaagtgttggttggcctctggccatgaaatttctattattcggtcaacctgccagtaaaaaaccttatttaggctccagaatcagaagattctggcaacctcaaaaatgttccaattgattcgttatcaacaaaagaaaatgtaagatgaaaaaaactaagttctgttaattctattccttctctagtaaatatacttcctaatagcttttctcactcaaatttccactcttctctctacatttatgtgacgtcaaatga

SEQ ID NO: 304507 - DNA, 621 bp, Homo sapiens
gagctattattatgttacagtgatacgtttgcttctgcttctaatgagcattccgtgtgtgaaaactcatattctgtttgaagatgtttctggcaaacaatattttcatctacttttaactgaatgccttagagtttttgaacgagtgaactgttggtgttggggaggaaagaaaaggatacagcattctttttataagaataaagaagttgtaaatggaagacgaaatcaccatcagctgccttgaatttcaagcaagagtcttggatggctattgaagaggcacttgcaagtttttcttctggggttgcattcatgtaagtcctgggcttgtcaaccacctggtccagaggscttttataaagtgttggttggcctctggccatgaaatttctattattcggtcaacctgccagtaaaaaaccttatttaggctccagaatcagaagattctggcaacctcaaaaatgttccaattgattcgttatcaacaaaagaaaatgtaagatgaaaaaaactaagttctgttaattctattccttctctagtaaatatacttcctaatagcttttctcactcaaatttccactcttctctctacatttatgtgacgtcaaatga

SEQ ID NO: 304508 - DNA, 621 bp, Homo sapiens
gagctattattatgttacagtgatacgtttgcttctgcttctaatgagcattccgtgtgtgaaaactcatattctgtttgaagatgtttctggcaaacaatattttcatctacttttaactgaatgccttagagtttttgaacgagtgaactgttggtgttggggaggaaagaaaaggatacagcattctttttataagaataaagaagttgtaaatggaagacgaaatcaccatcagctgccttgaatttcaagcaagagtcttggatggctattgaagaggcacttgcaagtttttcttctggggttgcattcatgtaagtcctgggcttgtcaaccacctggtccagagggcttttataaagtgttggttggcctctggccatgaaatttctattattcggtcaacctgccagtaaaaaaccttatttaggctccagaatcagaagattctggcaacctcaaaaatgttccaattgattcgttrtcaacaaaagaaaatgtaagatgaaaaaaactaagttctgttaattctattccttctctagtaaatatacttcctaatagcttttctcactcaaatttccactcttctctctacatttatgtgacgtcaaatga

SEQ ID NO: 304509 - DNA, 564 bp, Homo sapiens
tatcagcattggttttatgtattttgtcaattagtaacatatattaagaaatattatttttaagtacaaaacagctgtttcatttgaaagctaaatacgtagaaatgcagaaataaagatttatgcattttataatattaaaatgcagaaggtaaagagttaactgctccttaattgccaatgaaaagagcctcttttattataagctattacatgtttgaagacagcagcagtttatagatgtaaatgatctaattarttagtgaatacttggttcatttgaggagatattgacttaaataaaagattattaggttcatttaaaaatagatatttaaaattgttagctttgtaataaaccagtgacagtaattaaagaatttgacttaatatgttacaagtattcagtagtagcaacagtattttaaagttgggctaataggttttaaaagtctcttaagtagtgagatatatatatgaatacagataacaacacatgtatgtatggggaaaaaacattagggaagaaagcaatttatttatatttgagtgacagaataattt

SEQ ID NO: 304510 - DNA, 564 bp, Homo sapiens
tatcagcattggttttatgtattttgtcaattagtaacatatattaagaaatattatttttaagtacaaaacagctgtttcatttgaaagctaaatacgtagaaatgcagaaataaagatttatgcattttataatattaaaatgcagaaggtaaagagttaactgctccttaattgccaatgaaaagagcctcttttattataagctattacatgtttgaagacagcagcagtttatagatgtaaatgatctaattaattagtgaatacttggttcatttgaggagatattgacttaaataaaagattattaggttcatttaaaaatagatatttaaaattgttagctttgtaataaaccagtgacagtaattaaagaatttgacttaatatgttacaagtattcagtagtagcaacagtattttaaagttgggctaataggttttaaaagtctcttaagtagtgagatatatatatgaatacagataacamcacatgtatgtatggggaaaaaacattagggaagaaagcaatttatttatatttgagtgacagaataattt

SEQ ID NO: 304511 - DNA, 578 bp, Homo sapiens
tatttctagtgatctctaaatgcagaacagaatgaagacaagataaaaactacaaagatatcctaycaaatttgagctgatgctccattactaaggacaattggaattgatgcacacacatgttcttctccatcttttttatagcccaatagatctacagttaggctgtgtcatatacaagaagaagcctgaactaactaggccgtataactctggcctgattaacactttatctaatactttttctgaagtcttttaatctaagtcttgttttgacttcattgaaaataagcagtttgttggtaatcgccacacaagaaccctacacatacttaaagactgttatgagctcaattgtttatcccccaaattcatatggtgaagccttaacccctaagacctcagaatgtgatggtttctggaaacagagactttaaggaggtgattaagttaaaatgaggctgttacggtggatcctaatgcaatctgactggtgtccttataagaggaagactggacacacaaagagacacaagggatgcacaggcatagaggaaggactatgtgaaaacccagca

SEQ ID NO: 304512 - DNA, 578 bp, Homo sapiens
tatttctagtgatctctaaatgcagaacagaatgaagacaagataaaaactacaaagatatcctatcaaatttgagctgatgctccattactaaggacaattggaattgatgcacacacatgttcttctccatcttttttatagcccaatagatctayagttaggctgtgtcatatacaagaagaagcctgaactaactaggccgtataactctggcctgattaacactttatctaatactttttctgaagtcttttaatctaagtcttgttttgacttcattgaaaataagcagtttgttggtaatcgccacacaagaaccctacacatacttaaagactgttatgagctcaattgtttatcccccaaattcatatggtgaagccttaacccctaagacctcagaatgtgatggtttctggaaacagagactttaaggaggtgattaagttaaaatgaggctgttacggtggatcctaatgcaatctgactggtgtccttataagaggaagactggacacacaaagagacacaagggatgcacaggcatagaggaaggactatgtgaaaacccagca

SEQ ID NO: 304513 - DNA, 592 bp, Homo sapiens
gcaggattgcaaaactaaactattttgactaataatatagtggaattaacttttactcagcacttactacttaccaggtttttaccaatttctaactgttttgaaattaataactcatttaaacatcaaacaacyttatgaggtaagtactgtcattgtccccactttttagattaggaaaatgagattaaagaacttggcaaaaaatttcacatctcatcaatgtttgaactaggatttgaacccatgcagtctggcttttgaatgttccctctgaaccttcatgctaacctgcacacttaacttgcattaagtttgtagcatatgtctggtttgatcatttgatgtgtggtatatattcctacagcaattttagtcattaagaggagtattcaagttagacttggcactcacttctccatctagacaaagaataaccagcagacaggaagaacactattatgagaatgcttctaatcacaaaggacccctaaacagcccttacagatctgaatagaagaagtaataaccagtggtatcacaaccttagcacaacaaaggtctgagcatcatctgacctggtgaggaccaa

SEQ ID NO: 304514 - DNA, 592 bp, Homo sapiens
gcaggattgcaaaactaaactattttgactaataatatagtggaattaacttttactcagcacttactacttaccaggtttttaccaatttctaactgttttgaaattaataactcatttaaacatcaaacaaccttatgaggtaagtactgtcattgtccccactttttagattaggaaaatgagattaaagaacttggcaaaaaatttcacatctcatcaatgtttgaactaggatttgaacccatgcagtctggcttttgaatgttccctctgaacyttcatgctaacctgcacacttaacttgcattaagtttgtagcatatgtctggtttgatcatttgatgtgtggtatatattcctacagcaattttagtcattaagaggagtattcaagttagacttggcactcacttctccatctagacaaagaataaccagcagacaggaagaacactattatgagaatgcttctaatcacaaaggacccctaaacagcccttacagatctgaatagaagaagtaataaccagtggtatcacaaccttagcacaacaaaggtctgagcatcatctgacctggtgaggaccaa

SEQ ID NO: 304515 - DNA, 592 bp, Homo sapiens
gcaggattgcaaaactaaactattttgactaataatatagtggaattaacttttactcagcacttactacttaccaggtttttaccaatttctaactgttttgaaattaataactcatttaaacatcaaacaaccttatgaggtaagtactgtcattgtccccactttttagattaggaaaatgagattaaagaacttggcaaaaaatttcacatctcatcaatgtttgaactaggatttgaacccatgcagtctggcttttgaatgttccctctgaaccttcatgctaacctgcacacttaacttgcattaagtttgtagcatatgtctggtttgatcatttgatgtgtggtatatattcctacagcaattttagtcattaagaggagtattcaagttagacttggcactcacttctccatctagacaaagaataaccagcagacaggaagaacactattatgagaatgcttctaatcacaaaggacccctaaacagcccttacagatctgaatagaagaagtaataaccagtggtatcacaacyttagcacaacaaaggtctgagcatcatctgacctggtgaggaccaa

SEQ ID NO: 304516 - DNA, 542 bp, Homo sapiens
ataagtagtaataagctctaggtaaagataccagtttggaaattgctgattaagtgttaaaagttactaaataaagacattttcaagaattaactatgaacacaaaaccatrcctcaagaggcaaatgccacactgcaatagtaacaggatttatcattttgcacgttcaggtccactgttcacagctgacaacatcccatgagcaaagcctagaccttaccctactatatattttcatggcatccagtgtgatgactttctctcagcaaataggcagtgattaatccatattttaggaaaattaccaatacacctttctgttattttattaaggttttagctattacttttaaaagcacattttttaggctgggcatggtggctcatgcctgtaatcccagcactttgggaggccgaggcaggaagatcacttaaggtcaggtgttcaagaccagcctgagcaacatagcgagacccccatctctacaaaaaaattttaaaaattagccaggcatggtggtgtgcacctgtagtcctagct

SEQ ID NO: 304517 - DNA, 542 bp, Homo sapiens
ataagtagtaataagctctaggtaaagataccagtttggaaattgctgattaagtgttaaaagttactaaataaagacattttcaagaattaactatgaacacaaaaccatgcctcaagaggcaaatgccacactgcaatagtaacaggatttatcattttgcacgttcaggtccactgttcacagctgacaacatcccatgagcaaagcctagaccttaccctactatatattttcatggcatccagtgtgatgactttctctcagcaaataggcagtgattaatccatattttaggaaaattaccaatacacctttctgtwattttattaaggttttagctattacttttaaaagcacattttttaggctgggcatggtggctcatgcctgtaatcccagcactttgggaggccgaggcaggaagatcacttaaggtcaggtgttcaagaccagcctgagcaacatagcgagacccccatctctacaaaaaaattttaaaaattagccaggcatggtggtgtgcacctgtagtcctagct

SEQ ID NO: 304518 - DNA, 542 bp, Homo sapiens
ataagtagtaataagctctaggtaaagataccagtttggaaattgctgattaagtgttaaaagttactaaataaagacattttcaagaattaactatgaacacaaaaccatgcctcaagaggcaaatgccacactgcaatagtaacaggatttatcattttgcacgttcaggtccactgttcacagctgacaacatcccatgagcaaagcctagaccttaccctactatatattttcatggcatccagtgtgatgactttctctcagcaaataggcagtgattaatccatattttaggaaaattaccaatacacctttctgttattttattaaggttttagctattacttttaaaagcacattttttaggctgggcatggtggctcatgcctgkaatcccagcactttgggaggccgaggcaggaagatcacttaaggtcaggtgttcaagaccagcctgagcaacatagcgagacccccatctctacaaaaaaattttaaaaattagccaggcatggtggtgtgcacctgtagtcctagct

SEQ ID NO: 304519 - DNA, 529 bp, Homo sapiens
acatgataacataataagtcaaaaacacattactgtttccawcttacaaaatgaagcataaagttacttaagccagtcttgcaaaggagaacactgagaactgcttttagggtcctgaattaattacctacttctagtccatcaaaatgcagaaaaaggcaagaggagactgacaattagaagaggatttttggagacagttgagatgtgatgtgatttccacatactgcagggtggaagtctgcttttccctatctcaagtgcaggagaaagggacattagtggaacatctaagaaaatttgatatgtgtcttctgggacttggtgggtggcagcggtcaaggtagtgagcaaactagtatttgactataactgagaaatcttcaagggaagagactgtggcttgctgatgcccagtggccaagcaaagagatattgatgtaccaggagccacttgtgcattagggtttgttaggacaaaggacacttgtggaccctaggttagagtctgtgtagaattgtattgtat

SEQ ID NO: 304520 - DNA, 529 bp, Homo sapiens
acatgataacataataagtcaaaaacacattactgtttccatcttacaaaatgaagyataaagttacttaagccagtcttgcaaaggagaacactgagaactgcttttagggtcctgaattaattacctacttctagtccatcaaaatgcagaaaaaggcaagaggagactgacaattagaagaggatttttggagacagttgagatgtgatgtgatttccacatactgcagggtggaagtctgcttttccctatctcaagtgcaggagaaagggacattagtggaacatctaagaaaatttgatatgtgtcttctgggacttggtgggtggcagcggtcaaggtagtgagcaaactagtatttgactataactgagaaatcttcaagggaagagactgtggcttgctgatgcccagtggccaagcaaagagatattgatgtaccaggagccacttgtgcattagggtttgttaggacaaaggacacttgtggaccctaggttagagtctgtgtagaattgtattgtat

SEQ ID NO: 304521 - DNA, 529 bp, Homo sapiens
acatgataacataataagtcaaaaacacattactgtttccatcttacaaaatgaagcataaagttacttaagccagtcttgcaaaggagaacactgagaactgcttttagggtcctgaattaattacctacttctagtccatcaaaatgcagaaaaaggcaagaggagactgacaattagaagaggatttttggagacagttgagatgtgatgtgatttccacatactgcagggtggaagtctgcttttccctatctcaagtgcaggagaaagggacattagtggaacatctaagaaaatttgatatgtgtcttctgggacttggtgggtggcagyggtcaaggtagtgagcaaactagtatttgactataactgagaaatcttcaagggaagagactgtggcttgctgatgcccagtggccaagcaaagagatattgatgtaccaggagccacttgtgcattagggtttgttaggacaaaggacacttgtggaccctaggttagagtctgtgtagaattgtattgtat

SEQ ID NO: 304522 - DNA, 355 bp, Homo sapiens
ggtgggtggcagcggtcaaggtagtgagcaaactagtatttgactataactgagaaatcttcaagggaagagactgtggcttgctgatgcccagtggccaagcaaagagatattgatgtaccaggagccacttgtgcattagggtttgttaggacaaaggacacttgtggaccctaggttagagtctgtgtagaattgtattgtatcctgtttagcagggttactaaagggattgggctgagtggtgaagaaaactgaraaaagaaaagaaaaaaaaaaaaagaacttggaattgcagtgatagatgaccagatggtgaggtgggaatcctaaatgaccatctgaaggaagtgca

SEQ ID NO: 304523 - DNA, 621 bp, Homo sapiens
gtagtccaagaggtaagtaatcggaactgtcaggacaaactcttgggactgtaaatgtgctatctggagcataactatcctaagaataaaatccaaaagcaaaaactcatcagaaaagatttgaaactcatttcagacaagatgcagactataaacaaataaatacacaatatgaaagcaacttaagtctcatgatggaaagattttgatccaactgattattattgttcctagttcaaaatattttaggccttatcaatggcaatgcataacaggaatgactaaggttagcttttcagtgaatcatcagagtagtgattaaactgatgacatacaagactcctaactggattttgaagattgagtacagtatccaaaactagcactggaacaagacaacaacgttcattcagcccacaagaaaaccagtttaaaactctgaaacaatgacaccatgagtatatttgtgataattatttgccatgccaattatattaaatcatgaggaggtagtacacatctacatgyataacgagcccatttttatgttagcatatctccaaggactttcctgctgtgtattttatactgctactgccttatattttatgttagcattaa

SEQ ID NO: 304524 - DNA, 636 bp, Homo sapiens
gctagtatatttcatattatgtgtaaggccatagcaaaataaatcagtatatcttggtggcaaatgatcaattgacaaagccttctagaatgagtcatctcaaaactggtaagaaggaagtcactcagtataagcagraagggaatatggatttgacagagtattcaaactacaccgaagcttaaacaccactttactgttcattttatatacaatagatctgaactctaagaggcctgcaatcatttaaagttattgaattagtttatcaatagattttaagcattaatttggttgagtctcattctgaactccttcatgctatacagtttgcacatggatgatactcagatgaagtattctgattgacttttctacatttcacaaatcaaactcaaacaatatacaatcatcttgaatgaagtggtatgagattagtagcaaaaggctgaaagaatcagaaatgagttctaatactatgtcattgataaacaatggacattttaacttcaggatactaattttgaaaatggagacactacattctgttcaactattgggactataaagaaactagagtaagatcatgaaaatggtaaatatcataagttattatctccaattatcacaggaaag

SEQ ID NO: 304525 - DNA, 663 bp, Homo sapiens
aagtagttgcttgagcgacacatttctaaccaaggagatgagagaagatgagagtaaaataacacacactttcttcctttgtctacacatttggtctaaagttacggggaacatctttatcccattacttttgagagtgtgaaaatgtgatgattgctcttttacccctttctgttcttccactgtgggaatattaacrgaaatgtttctcttcttctctgttctgagcctaattcacagcccagaaccataactcaaagacataatttgaagctatctactttctttcaaagtgccattgtcattttatcctggacacaggctagatttttgtgaaagtaataatatggatttataactcagcaatgttttcatctgtggaattattttgtcaacccaaagtttggggcagataaaggtagaaatttcatttcaaacaacaggtaatatctataacttaagcagggtaaatatttttccaggcaaaacaaaacaaaacaaaaactagattaaaataaaccaataatcagacttgatcctgatgaaaatcgtatttattcagtaatacttgttctcctggtgacaactgaatgacaattgaaatgatggagaatatttctctattgtaatgattatattaaattaattcataatatttgctca

SEQ ID NO: 304526 - DNA, 589 bp, Homo sapiens
acattgatatctgtcataaattggaagggtagtttatttggatacaaaggcgggaaaaataatggatatggttgacatcattacaacattagacacatttttaaaaatgctatctaccctaaagatcacagatagcatttcgtgcgaagcctcaatatcacactgtttgcctatataatcttgcaaaaatgagctgtctgatgtgtgtgtgtgtgtgtgtgtgtgtgtgtgtgtgtgtatagaactcaggactttgagctagacaaacctgaggttaaaacctaatttcattattggctgccttaagatccagttgtttaacatctgtctctgtttcctcagctatgaatacaggatagtagtaatccttgcatctcaytaggttcttgttaggatttaaaaaatacaacaggtataaggtacacagcacacctctctaacacactgagaagcactgtgacatgctcacccacactattattttacccaacatcatgcaaaacagtcacagggaagaccaggcaaaagagaatgatcaataatccaaaattcagctccaaacctaaaaaagttttcagaaggcacatgc

SEQ ID NO: 304527 - DNA, 603 bp, Homo sapiens
aatgaaattcctgagaaattggcagaaactaacagaaaaccactttgtaagaactgtcccataacccagagcacaaacttccaaaggagacaaacatcccagatgaagatgagctcacaatcaaaaattagaaacacacacaaacttatccactgtggacaagtcagtagacacacaaaggaggattagtgcccccaagatcttgacaaatagagtaatttgaaagagattttttaaatgatcatatttagagtgttaacacagacaaaaatagtgtacatcataatgaaaagataagtttgaatgggaatcaaatagcaccccwataaattaaaaatacagccattgaaacagagcttgaattatacaatacacgagaccaatgaaagctaggtaaagtgaaaaacagatcagaataaattacacagaaatcgttcatttattcaaaaaatgcttccacttgcgcaccggacatccattctgagtcactctttcaaatgctcaatatacgttattgaacaaaacagactatggtcctcagagagcttatattctagtgaatgaaacagagatgcaaaaaaaaaagtagactatattaaatag

SEQ ID NO: 304528 - DNA, 603 bp, Homo sapiens
aatgaaattcctgagaaattggcagaaactaacagaaaaccactttgtaagaactgtcccataacccagagcacaaacttccaaaggagacaaacatcccagatgaagatgagctcacaatcaaaaattagaaacacacacaaacttatccactgtggacaagtcagtagacacacaaaggaggattagtgcccccaagatcttgacaaatagagtaatttgaaagagattttttaaatgatcatatttagagtgttaacacagacaaaaatagtgtacatcataatgaaaagataagtttgaatgggaatcaaatagcacccctataaattaaaaatacagccattgaaacagagcttgaattatacaatacacgagaccaatgaaagctaggtaaagtgaaaaacagatcagaataaattacacagaaatcgttcatttattcaaaaaatgcttccacttgcgcaccggacatccattctgagtcactctttcaaatgctcartatacgttattgaacaaaacagactatggtcctcagagagcttatattctagtgaatgaaacagagatgcaaaaaaaaaagtagactatattaaatag

SEQ ID NO: 304529 - DNA, 638 bp, Homo sapiens
atgttgcctctgtattggattattctctcattccccttactcttaagagtttttgaatccgaaggaaacatgttttgttttgagtaaaaggaggtgttcagtggatctcattttcttttcttttgcggaatatgaggcctaggaactaacaattgcaaaatatatggagcataggttgagattaaattaaatttatttctaagtggttaatagacacagctcgaacatttttcatcttcttgatgattgcttattaatcactccttaattccttgacacatttattaataggaaaaattgcaaggaagcatcatttgaaagtagtataaaatacagctggttatattgtttatgtttaagataaaacatttaaagctttcacgtaggttgaaaatgccacaagagaactaacatgggggaagtggtggatggtggacctagcagagcactgtggtcagctgggcattgctgtgagcaccagctcaccactctccagttctgtgaccttgggcaagtttctttagcactgtgatgaaatttctcayctaagtagttgccctgtgtttaaaagaaataacgtaaagccacctggccctaaaattcagttaatgcaaattattattacacctactattatg

SEQ ID NO: 304530 - DNA, 485 bp, Homo sapiens
cagctgagctgatactagtttaagagtggaattgagttcacacctgctctggcataaaaagcctctatgtgacttctttgaaatattcacagagcagaataagagagagtactcactatctctacaactgtagtaactacacggtaatgttgcttgcaagcactttagagaagctgctctataaactgwctctaatctgctgatattgtccacagatagatgcctcccctaagtcacctgtgttcctcaaggtggaatgtggttgtggaaatgcagttggtttgtgtaggcagtgggtctacattaacactgtaaagtgtacatatgggaaaatctttgcatttgctaggccatttagccgttcaagacatggtccgttagtcaggcaacgtacaatggattttctgagtgttctagttaaagagcaggatgtgtaaagtagtatacatttaggcggataattaataattggtgtaggcttgtaa

SEQ ID NO: 304531 - DNA, 571 bp, Homo sapiens
tgtgcccacactgcctctaatttgtgttgtctgttggcaaaatggactgtagtaccaactttaaaaaccaatcgaagtattaaaacaaaacagacaacctctcccatatttggcagaaaaaccgtaattcaaatgttccaascctcccccaagaacaagcaattataaggtgcagaaaggcaatggctttaaaacaacatgctaatcctaatattagtaccttgaaaaaaggaaaactgccaagatgctggaatagtgcccagttatccgtcttacctacagcaataaaactgtcctataaatgtgaacaagacagttaggatacattttggggttaggttattggcatttttttccacctcaccattccctaggagaataagcctgacctatggaagcaaaacacagcagatggtaactcagcccagtaccaagagtacttagtcaatccaaataattcacacacaactgaagcaagatgttcaatgatttatggcgctcatttcacaagaaaattatggaatccttctcttcaatagagccacctttttattgtcatatgctggatagc

SEQ ID NO: 304532 - DNA, 618 bp, Homo sapiens
actgtgttgaaaactactcagaaaatatttgatgtctctcttgacagtacagcatgtagaggcagcccccagaattataaaccaaattgcgtttaaaaaagaatggactgttgaaagaatgatccccactaaaaatacagtttaaaggcaactaaggtcatcaagagtaaaatggctagtggcttaatgtgacatccaaaatgattcccccaaatctcatcccctttatactaaaacaatagagggttgcctctaataagttaatatcattcctcaaaatctttattgagaagcacctttagaccctcaaatctgcctcccagaggaattccatcaatccagacattactgaagttctgagccaaaaataaagggaaaggggcggggggaaatcacaggaagttaaactgttaggactgcagccagggaaattcctttgataatcaagccctaccttcaccctgaagcgtrgctttcaagagttgaaataataactttctttggaattcttcatccatgaaaatgcctgggaaaatgatctaaagcaataatcctaagaaataaccaagagaaatgaaagcaaaaccaaagatttttaacactggtcttccattttct

SEQ ID NO: 304533 - DNA, 473 bp, Homo sapiens
tctgcatttttccctttcctaggtttgggcatcaggaggtatcttcaggttctctcttcgtctgcttcctagtgtatagccacaagcctactatactgtgatacataaaacccagagatgtggcaaatgaaagtgggagcaacaaaactactacagcgtaakcctgtaatgcaaggcggaggaaggaaagtaaatgcttaaagttttcatacagctaactctgttgatagctgccaagtaaagaacctaaattcaagtgctttataattgttacaaattgtgccaaagtacagcgtgttacaataaattatgaagcttatctaaattataaaagtaattaaactttcctcagatactcataactctgccctccataaattttctgttcattgcatattcaatacctatgtgttccagtaaaacaaaaaaactaaaaaaaaaaaaaaccagaagaaagaacaatctcctaagaa

SEQ ID NO: 304534 - DNA, 390 bp, Homo sapiens
agtagaggcaatacgtttaagctctgtgtgtgtggctagggaggcacagtaacagaggagttttagcacagggtaaagcatattctaaaagaaaactagactttttcagctaaacctagctccatctgtttatgtaggacagaagtactctaacttgrctgtacattagaatcaactggggaggttttaactactccccccaccaacaatttaattgggggtggggtcaaacatcagtatttattctccaagctccccaagtgattctaatttgcagccaggtctgcaaaccactgatatccaggccagatggccatatatcctgtacctggggaaagagcatttttactgtgaggggacacaaatcagtgaatagtttccaagcccggc

SEQ ID NO: 304535 - DNA, 656 bp, Homo sapiens
tacctaatttcgctgcatttaaaaagtgaactaaaatttctagagctgacatctatattcacagttccgttcttatgaagttactaaagattatttgacctttggaactttcaaacatcaaatgattgccattattgtacaggttttactattttctaatactcacacttctgcaaagaacaaaatatctaaccaggaagtcaggtaacatctcattcgtgctttgaaaaattatgtttctttgtagtcatgcttttcctttgtacattaaggcttccaaaaacacttttcctagtaaaagctgattcattggttattctctgttttacaatgaagrgtaaaactccctgtattagcatgtactcacatttgctgttttacaagaagactgtggcacctgcttctgccactgggatttgaaaacactcacaacacttcacctttatgctgggctaaactcagggtagccataaacactctgaagtaatacaaacctaaatattcctgctaggcaaacggagcggtggaaccgaattataatgagctagcagctgtcacaatatgaccacagtaaccaaatcaaaatatcaaccgctaacccagatgagattcaaaggtcatcctgtaagccagcagctttcttcagttctgcctga

SEQ ID NO: 304536 - DNA, 519 bp, Homo sapiens
caccaagttaaaatcaaacagtactaattcataatctcacatgcagtctgccatattcccaaggaacaaattagagttaatgtagtaagaactattcttatctccaactacaacctctaggctctacgtattgaaaggctgagttacataaagtatagcaattaagacagtcttatctttatgctctttcttccctgaaagtccatcttcatgctctttcttccctgaaaatccaagatgtcatagtcaaaggacagcatgaattgctttactgtttcttatttcttagtaacattttattataattagtaggtcttctgttgttttcctctttcaagaaatgtggggttaagtccatgcaattagagttcctcagaactcttggttaatccaycatgatgcaatatatagatatttatatctggctatggttttagactatatgtgtaggtcttttgatttttacactcttgccttttttggggggaactatctggtttattcacaattccgcgtatg

SEQ ID NO: 304537 - DNA, 514 bp, Homo sapiens
atctctacagaggaatacatatgtatcttatacagagagctaacacaccaatatgtgtcaggggaatgatttatttaagaaaagctttctttccatatttattttaatacataatattattcaaatattggccatggctgggtagaattaggtcctaaaactctaggtagggcagagattcctcatcagagtgaataaaatctgtggcactgttttattgaattgtagccaaaatctttgaaaaggaacaaggagagaagaaaaagtaggaacaaaagaacaaagtgtagaagaggaatttcagattaaaaatagatgcaagcatcaaaaacatttaggaactagatcagagcagaascatctctgcaaaaatagctaagtatttggggtaattgccaaacatacctttatatgttgtgcactttaaaatctggtgggacaagggtgggtgaaatttaaaaaggcttttgtatagatgcacagaatttactaggactgtctcttccattatatg

SEQ ID NO: 304538 - DNA, 600 bp, Homo sapiens
ttatttttctcctcacttacctaaatgccacctgccatattttaaggtgttttcttaacaacctaacaaaagattttaaattaagtagatttgagagctttgaaagtaagagctttgcaagatcgagtccaagaaagtaaactgatataatcgtttgttttcaaaggcaattgaacttgtctcaaatccccatggaagcatttgcaagtgaagtgctctcgcacaaaggttcttattcaaatgatgttctggcacgttytcttacttcagtcctcgccaaattacatttttgcacgaccaggacaagatcagaatacgccccttctactgttttcgtgataccatacagcagtaataaatgaaagagcagtgatatttagatggatgagtcctatgccaggaagagaaaactaccaaacaaggacctaaagcgatcccctgtcttcacatgcttgatttcattccttaattagagccattaatcaataggtatgagatatgaggctttagaaaggcttggtgacacgacaccttgccacctgtcaaaattacagctttctgttcatgcaccatccctcaaatagttattttctgcaagcc

SEQ ID NO: 304539 - DNA, 603 bp, Homo sapiens
tatagtaataaatattatgccaactatgtattttttattcgttcactcatcccgttaaaaatgttgtgggcatccatgtattatactcattactagggayagagagataaataaactatatgtatttgcctcaatagactcacaattcagaaacataaatatataaccaaaaactaagattacaatcagataaggctatggctttaacaaattgttttctgttgcacatgggctgaaactcaaagcacaataatcaaaatattgtttctgtttcaagtgtttaaattattattgtaaaattctcttttgcaaaatctgattaacttcagcattcaagtaagatgtatataataaatacgctttttaaaaaataataactcattttattatcatagttattattattaggacacggaaaatattctaactccaaatgcacatttaatttagtcttttaatacaatcagttacagttggaaatcttcaaagtcttttatattgctccaaataaaacataaagttgctctccccaattcaacaggaaaaggcctgtttctgagaaagcatttgagtatatattttatttgcacaacatacttattc

SEQ ID NO: 304540 - DNA, 603 bp, Homo sapiens
tatagtaataaatattatgccaactatgtattttttattcgttcactcatcccgttaaaaatgttgtgggcatccatgtattatactcattactagggatagagagataaataaactatatgtatttgcctcaatagactcacaattcagaaayataaatatataaccaaaaactaagattacaatcagataaggctatggctttaacaaattgttttctgttgcacatgggctgaaactcaaagcacaataatcaaaatattgtttctgtttcaagtgtttaaattattattgtaaaattctcttttgcaaaatctgattaacttcagcattcaagtaagatgtatataataaatacgctttttaaaaaataataactcattttattatcatagttattattattaggacacggaaaatattctaactccaaatgcacatttaatttagtcttttaatacaatcagttacagttggaaatcttcaaagtcttttatattgctccaaataaaacataaagttgctctccccaattcaacaggaaaaggcctgtttctgagaaagcatttgagtatatattttatttgcacaacatacttattc

SEQ ID NO: 304541 - DNA, 603 bp, Homo sapiens
tatagtaataaatattatgccaactatgtattttttattcgttcactcatcccgttaaaaatgttgtgggcatccatgtattatactcattactagggatagagagataaataaactatatgtatttgcctcaatagactcacaattcagaaacataaatatataaccaaaaactaagattacaatcagataaggctatggctttaacaaattgttttctgttgcacatgggctgaaactcaaagcacaataatcaaaatattgtttctgtttcaagtrtttaaattattattgtaaaattctcttttgcaaaatctgattaacttcagcattcaagtaagatgtatataataaatacgctttttaaaaaataataactcattttattatcatagttattattattaggacacggaaaatattctaactccaaatgcacatttaatttagtcttttaatacaatcagttacagttggaaatcttcaaagtcttttatattgctccaaataaaacataaagttgctctccccaattcaacaggaaaaggcctgtttctgagaaagcatttgagtatatattttatttgcacaacatacttattc

SEQ ID NO: 304542 - DNA, 603 bp, Homo sapiens
tatagtaataaatattatgccaactatgtattttttattcgttcactcatcccgttaaaaatgttgtgggcatccatgtattatactcattactagggatagagagataaataaactatatgtatttgcctcaatagactcacaattcagaaacataaatatataaccaaaaactaagattacaatcagataaggctatggctttaacaaattgttttctgttgcacatgggctgaaactcaaagcacaataatcaaaatattgtttctgtttcaagtgtttaaattattattgtaaaattctcttttgcaaaatctgattaacttcagcattcaagtaagatgtatataataaatacgctttttaaaaaataataactcattttattatcatagttattattattaggacacrgaaaatattctaactccaaatgcacatttaatttagtcttttaatacaatcagttacagttggaaatcttcaaagtcttttatattgctccaaataaaacataaagttgctctccccaattcaacaggaaaaggcctgtttctgagaaagcatttgagtatatattttatttgcacaacatacttattc

SEQ ID NO: 304543 - DNA, 558 bp, Homo sapiens
taagtactttaagataatattttgaaagttgaagttataaaaagactttttcagaggtgaaaataaagttatttaaaagcaaagtgtaccttaaagcataaaggacaatcatcatatcagaaacaataataggaatcattgagaaatgctcaattgttagtgctgagaccttattccttaatccattcattacatttttattgtcttctttccaagaaaggtgctgacctctgagggattccwtaatgaacaacaatccccccaaaagatttcttcttttaaaagaggcttgtacagtgaggatttttctctttgtaaaatttgtaacattttactatatttgttatttgtaaaataaattcaagaaatttttcctcttcacatgaaatttaaagaggaataacactgataacagcttgtattatttagtaacttccccataattttagctgtctgaaactctttaattatatatatatatataatgcattttgtatataaagatgctcttcaatttataatagagctgcaaacttataaacccatcataagttgaaa

SEQ ID NO: 304544 - DNA, 647 bp, Homo sapiens
gttctgggactcagtccttgaactcatcctctcttcagtcattgtactgatagtgtcatctgctttacggcttctgataacatatatttatactgacaacttgtaaatttataccttttacctggactccccatgaatgataagctcataatttcaagaactttgacatctttacttagttgtttaattatacttcaagcttaacacatttaaaactcatctatgatagtctcctagaactgttcctcctactgttttcccatcttagttaatggcaactacactcttccagttaaaaatcttgttgtcattcttgacaaatctttctctcaactccatatatagtctgacaacaaatccgatggtcctgaattccaaaaatgttcagaattttatcacatctcaacttcatcactgttaacttacttcaaaccaccagtatcactcgacagtgttatgtcagttagacttctacaagtcttcctgtttcagtgatatcatccttcagtagattctcatttagcaccacagtagtcyttttaaaacctaatccatatcatgtcactcccctgccaaaactctccaatgaactttcatctcagaataaaagctagtccttaaaatggtcttcaggccctaaataatct

SEQ ID NO: 304545 - DNA, 647 bp, Homo sapiens
gttctgggactcagtccttgaactcatcctctcttcagtcattgtactgatagtgtcatctgctttacggcttctgataacatatatttatactgacaacttgtaaatttataccttttacctggactccccatgaatgataagctcataatttcaagaactttgacatctttacttagttgtttaattatacttcaagcttaacacatttaaaactcatctatgatagtctcctagaactgttcctcctactgttttcccatcttagttaatggcaactacactcttccagttaaaaatcttgttgtcattcttgacaaatctttctctcaactccatatatagtctgacaacaaatccgatggtcctgaattccaaaaatgttcagaattttatcacatctcaacttcatcactgttaacttacttcaaaccaccagtatcactcgacagtgttatgtcagttagacttctacaagtcttcctgtttcagtgatatcatccttcagtagattctcatttagcaccacagtagtctttttaaaacctaatccatatcatgtcactcccctgccaaaactctccaatgaactttcatctcagaataaaagcyagtccttaaaatggtcttcaggccctaaataatct

SEQ ID NO: 304546 - DNA, 395 bp, Homo sapiens
ccttgtctcaaataataataataataataataataataataataatagcaacaatgtctgtttgttttgatgcactctttcktttatttttgagtttcagcaccaatcttttcttactggagcactataatctgcaaaatggacctcagatactctaagtatgataatcatgctaaaacacactgttactcttctttttaatatcctttactggctcctcatggccttcattcctgaaagtaggaagacctttcagtttttgaggttggttttgaaactctcataaccttctggagagctaagaggactcatagtgagtccttacacaaaggaatatgtgtgattagttagtatttattctaaactccagactctagaatcaaggcattaagaaa

SEQ ID NO: 304547 - DNA, 413 bp, Homo sapiens
gaaaaaaaattcaaactatagcagtgagtaaaaggaagtaaacattgaatttaaaagaacataattactgcagtaaatcagtgaggagtaaaaytttcaattggaccttcaagatgaagtaaaaatgagccatgtgaaaaaacaatttaaaaattattccaaacagaattactttaatattctactttatttggcttttatgctagccaagttacattttaatgtttctgacaaatggttagagacactgagcatgattgaaaatgtaataatcttatttgtctgttccccctagattaacaaaaattattaatagattatgagtatttgttttaaatatacgggtatagctccaaatgtagatatatacaagtttcactaaattttaagaacgcttcttaacatattctcta

SEQ ID NO: 304548 - DNA, 413 bp, Homo sapiens
gaaaaaaaattcaaactatagcagtgagtaaaaggaagtaaacattgaatttaaaagaacataattactgcagtaaatcagtgaggagtaaaactttcaaytggaccttcaagatgaagtaaaaatgagccatgtgaaaaaacaatttaaaaattattccaaacagaattactttaatattctactttatttggcttttatgctagccaagttacattttaatgtttctgacaaatggttagagacactgagcatgattgaaaatgtaataatcttatttgtctgttccccctagattaacaaaaattattaatagattatgagtatttgttttaaatatacgggtatagctccaaatgtagatatatacaagtttcactaaattttaagaacgcttcttaacatattctcta

SEQ ID NO: 304549 - DNA, 413 bp, Homo sapiens
gaaaaaaaattcaaactatagcagtgagtaaaaggaagtaaacattgaatttaaaagaacataattactgcagtaaatcagtgaggagtaaaactttcaattggaccttcaagatgaagtaaaaatgrgccatgtgaaaaaacaatttaaaaattattccaaacagaattactttaatattctactttatttggcttttatgctagccaagttacattttaatgtttctgacaaatggttagagacactgagcatgattgaaaatgtaataatcttatttgtctgttccccctagattaacaaaaattattaatagattatgagtatttgttttaaatatacgggtatagctccaaatgtagatatatacaagtttcactaaattttaagaacgcttcttaacatattctcta

SEQ ID NO: 304550 - DNA, 583 bp, Homo sapiens
ataaaaccataaatatggcacccctaacctccacattgagcaaacagagggtggatatcttggaacagcagaacacacaaatagaaggtctgattcgggcaatggaacctttagcatggaagcagaagaagtaaagacgcttctatatcatttggarggattcatatggctgcctatatggctggccttgtaagccttgtggacatcacaaataatactggtcccagaatctgccaaagtttccttcaacattaatatattaattggtttgattagatgaggggcattgaattaacataaaattccatcagttcaacataggaaaaaaaaaacactccaagcatatgctccaccaatagtagatcagttacttactagagactgattaataaagtaataaaggggaagaaaaacaattattttgatggatagatgaactccagagtatatatactaatttagttatttaattttcattacacttatgaaaaactagaatttaatactatgcatatttctttagggagtttcatttttaattagatatgacttgagctcactcttttcccactgctgaaataat

SEQ ID NO: 304551 - DNA, 583 bp, Homo sapiens
ataaaaccataaatatggcacccctaacctccacattgagcaaacagagggtggatatcttggaacagcagaacacacaaatagaaggtctgattcgggcaatggaacctttagcatggaagcagaagaagtaaagacgcttctatatcatttggagggattcatatggctgcctatatsgctggccttgtaagccttgtggacatcacaaataatactggtcccagaatctgccaaagtttccttcaacattaatatattaattggtttgattagatgaggggcattgaattaacataaaattccatcagttcaacataggaaaaaaaaaacactccaagcatatgctccaccaatagtagatcagttacttactagagactgattaataaagtaataaaggggaagaaaaacaattattttgatggatagatgaactccagagtatatatactaatttagttatttaattttcattacacttatgaaaaactagaatttaatactatgcatatttctttagggagtttcatttttaattagatatgacttgagctcactcttttcccactgctgaaataat

SEQ ID NO: 304552 - DNA, 603 bp, Homo sapiens
cccatagcaacaaagagtaatgcagaggaagctatcaatttctcatatacagattttgtgctgtgatgctgaaaattctacagtgatctttaaaaacattcaccttttattatttgttataatttccaaactccttagaagacttttattaaataataaaattttattttacaattgtagacttgctttcaaattaaaatcatttctcataatatgttgttaatgttattagccaatttcagaaagttttaaaaaaatgtttgataaagaagtaaaattacccagtaagttagtagtacatctaaagaaggactggagatgacctaaaataacattgagatgagaaaaaaaaattttgaacttaaccaatggtacattagttaatagaagttctctgatttataaaattcaattacttaaaaatccataaaacattattacaaaataatttaattttttaatttagaaaagaatatcaaagatttccttgaaataaagcaaggyggtaaaatattattcaatatgaaaaaattacttcactgattttagaaattcacacttacttggcattgcgaaacagggtatacctgcactgtactgtat

SEQ ID NO: 304553 - DNA, 572 bp, Homo sapiens
agaattttacatctttgggaacaattattcagcactacattaccaatgtataaatgtaatgccaagggacatgtggctaaaagataaattccatcttggaattttttcaagtaaggaattttttggatctgtttcacagtcagtgtttcttcagcagtttgtaccatgacttctgtgcctgcatttgctcatcctatactasgcctgatcctgtactaggcctaatcctataccaagcctgagcctctactctactaggcctgattccatcctaggcctacaataacttatgctcatttcaatcaacaatcattcagagaataacaaacagcaaccatttttttccatgatactatggaagtaaagagtgagacttctaggtaaaattgtgaaataaaaaccagaccatttactgtacagcttcctactatccctgtcttgggttacatgagcatgaaagttgttagtatcattttggcatttggatatagtgaccacatagtgaaaggaaagaaaatgtagaaattggtagatataaagagttggactaaattaaatgtataccctgagca

SEQ ID NO: 304554 - DNA, 634 bp, Homo sapiens
atcattttggcatttggatatagtgaccacatagtgaaaggaaagaaaatgtagaaattggtagatataaagagttggactaaattaaatgtataccctgagcataacatattctcattgaaggagtaatgtgggaaaaaaacatctgcttagaagcacaggaatataacaagaaccttgattctaataatagtcatcatgggcttgctccttagattattttggggttcaaattcacataaatggcatggcatgagagctgtcacacaagctattgatatttctgagacrtgtgacagaaacaaaataaactctcgggataaccacacaacaagccttgaagacaagcaaggtaaaatagcaaaacaccataagaaacactcaatatgaccaatagttatcaaatgcaaaagacagcaagttgggctctagaaattacagaaaagttaataattatcataggggttgtataaagtgaaaaagatttaaagtgattaaagcataaagaggaagtgctacatgattccatgttttaaaagcaaacattaaaaaaagtgaaatacaatggttctaatttttaagaactgaaatatggagtaattttaataaaaaatattggtcagtaggtaaaaca

SEQ ID NO: 304555 - DNA, 634 bp, Homo sapiens
atcattttggcatttggatatagtgaccacatagtgaaaggaaagaaaatgtagaaattggtagatataaagagttggactaaattaaatgtataccctgagcataacatattctcattgaaggagtaatgtgggaaaaaaacatctgcttagaagcacaggaatataacaagaaccttgattctaataatagtcatcatgggcttgctccttagattattttggggttcaaattcacataaatggcatggcatgagagctgtcacacaagctattgatatttctgagacatgtgacagaaacaaaataaactctcgggataaccacacaacaagccttgaagacaagcaaggtaaaatagcaaaacaccataagaaacactcaatatgaccaatagttatcaaatgcaaaagacagcaagttgggctctagaaattacagaaaagttaataattatcataggggttgtataaagtgaaaaagatttaaagtgattaaagcataaagaggaagtgctacatgattccatgttttaaaagcaaacattaaaaaaagtgaaatacaatggttctaatttttaagaactgaaatatggagtaattttaataaaaaawattggtcagtaggtaaaaca

SEQ ID NO: 304556 - DNA, 597 bp, Homo sapiens
aaaagaatagagaaaatggaaagatgcatattaaataaaaccttaaaattttatgaatagttgaaaaaaagcacaactttcctttaagctaaataaataaacccacattgagacctattgcagtaaaactgtaaaacaaagaataaaaagaaaaaaaaatctcaaaagaaatcatagagaaaacacgttacctatgaaggagcatgtgaatgtattttgttctcacttttgcatgatttacaaataagactgccagtaagcagcaataaaaatcaaaaatcaacagaattatatctttgatgtgctgagataaacctcaaggcaaacgtcaatatccaatctatcatccaaaagtgagaacaaaatacatgtaattttagaaatgcaaacatgaaaattatattgttagcagacttttaatacaggtatttatgttaaaatttcatgcatagtcaataaaaaatgtcaataatatttcacttttaagtcagtagacaggtagcaaggagaaaatgatattttcagtctacttggtggcaattaacgrtaataaaaagtagcaaattcataaccttaaaattagaataaattaaaaat

SEQ ID NO: 304557 - DNA, 609 bp, Homo sapiens
aaactttcaagagatgatgccatgtagagatttgatatatagatctggaaattaagaaagtgggccagaatggatatttaaacttgggagtcattagcatgtgtatggcatttaaagccaagagaatgcatgaggtcaactagggagagatttctgaatgagaagtaataagagctgtctgtgacttaaggattttcagttatactgtagaaacatttttctcaaagtgtggtctacagaataacaacgtctgcattacttggaagttgtagagatgcactgtctcatggcccactccaatttgagatgctcttwaataaaagaaaaaagtttggcaaacaaaatactaagaagatgtagtaaagaaaaaataccgtgtcatagaagccacaagagaagggtgcataaaaatttaaggagtggagtaatcaacagtgtgcaatgcagtgtcagaacatataaaatgacagaaatagtatgcatgaaatttaacagcatggaacttggtaagtgatattagccagagtcgttttgatggagaagtgcaactggaagccaagcttttaattgaataaagaacgaatgaaaactgataaaatagcagcaatc

SEQ ID NO: 304558 - DNA, 567 bp, Homo sapiens
tgaagttactaggataggttatctctcatagcattgttgcatggtcaaattaaatactatatgaaagtatgttactcaaaagaaaactttaagaaaacattaagaagaataataaaacccacgaagatgtccaagaagtaattgacattgcaattttaaaactataagtagtcttgacttattatttttgccgtcaatggatttttatgaaaactgtcttttctgctttatagaaactattaggtatgaccataaataagcagtaaaatataagtgcattggttataagcatgcttttgaaataactgagatagtttgactctcataaaatcctatgaaataagaaacttccgtaagaaactattcattgtactagaaaaacaatatgtactgagaaaccttaaaaaaattcagaggatcactatacacagcactttgaaaatactgccaggacagtagaagatttgagggataccaccaaagggtttagtaacaaccaaagtataactgagwaaagatctgcatgccaagatgtaagaggagatcacaacagccaggagcgatgac

SEQ ID NO: 304559 - DNA, 567 bp, Homo sapiens
tgaagttactaggataggttatctctcatagcattgttgcatggtcaaattaaatactatatgaaagtatgttactcaaaagaaaactttaagaaaacattaagaagaataataaaacccacgaagatgtccaagaagtaattgacattgcaattttaaaactataagtagtcttgacttattatttttgccgtcaatggatttttatgaaaactgtcttttctgctttatagaaactattaggtatgaccataaataagcagtaaaatataagtgcattggttataagcatgcttttgaaataactgagatagtttgactctcataaaatcctatgaaataagaaacttccgtaagaaactattcattgtactagaaaaacaatatgtactgagaaaccttaaaaaaattcagaggatcactatacacagcactttgaaaatactgccaggacagtagaagatttgagggataccaccaaagggtttagtaacaaccaaagtataactgagaaaagatctkcatgccaagatgtaagaggagatcacaacagccaggagcgatgac

SEQ ID NO: 304560 - DNA, 573 bp, Homo sapiens
atattactcagtgtcctcccaaaagcctacaaactttaaaattacatattattayatttgtatactacatacattcaatattgttggagaagttatgtgcccaagccatatgcactttaatacagtgatgttatattaattaacacatttaaagatgtcctataagggcaggagggcttttttacatctgacctaattttgctagtttataaaatgtaaagattagattacatgaattttaaggtcccttcccacgttagaactataggatattgaataccaaatggctaaattgtatcattaagatatgtaaaactttcaaaaattttgccatttggatatatcatatatatgatatatatatatatcatatttacatgtttacagcagaattctcataaatatctatagagtatgttagaactctatgaaaataagtgtctagacatacactcatttttaaaatgaagaaaacaggaattttacaaatggctgtagtaaatgttttctgattagatgaaatatgaaaattgataataaatatgatatttatcacctgatcaaaaatacaca

SEQ ID NO: 304561 - DNA, 573 bp, Homo sapiens
atattactcagtgtcctcccaaaagcctacaaactttaaaattacatattattatatttgtatactacatacattcaatattgttggagaagttatgtgcccaagccatatgcactttaatacagtgatgttatattaattaacacatttaaagatgtcctataagggcaggagggcttttttacatctgacctaattttgctagtttataaaatgtaaagattagattacatgaattttaaggtcccttcccacgttagaactataggatattgaataccaaatggctaaattgtatcattaagatatgtaaaactttcaaaaattttgccatttggatatatcatatatatgatatatatatatatcatatttacatgtttacagcagaattctcataaatatctatagagtatgttagaactctatgaaaataagtgtctagacatacactcrtttttaaaatgaagaaaacaggaattttacaaatggctgtagtaaatgttttctgattagatgaaatatgaaaattgataataaatatgatatttatcacctgatcaaaaatacaca

SEQ ID NO: 304562 - DNA, 534 bp, Homo sapiens
tctcctggatttcttttgacctcactgttccattctttccttgtttttcacatccttgatctcttaaaattggagtgccaacaaggatttttccttgtttctctttgttctcaacattcacttcttggtctctcatcccttcttttgcctttaatacaatctatatgctgacaattttcaaattcatatctttaattcaaaactttcccccgaacccttcaattgaatgtgtaaacacacacacacaaacacacacacatacaaaggctcatctatagcacctccactttggtgtccaatagatagataatataaaagaaaactraaattgggctttggatagtcttcctaaaacatatatatcttaccacttaatgctttaccatgtaaacttacatttgtttttcaaggaacagtagtcattagatattttcaaaggacattccaagtcgtctgtgtatcccttaattcacaaattatgtgatagcatataacttctctcttaaaattcagaagaatatggctgaaagttta

SEQ ID NO: 304563 - DNA, 561 bp, Homo sapiens
aatacgtgagttcttattttatagtgcatgtcatgtgtagtttatttttagaatttgtgagatctgaatgaatcacattcaaataaattaatattaaattattcaaaatgcacagtgacacattggacaaaattataaaataatttaatagtaaatgtagactctgtatcaggtttttgtttcatttgctgaaatatttgtattttttaagtatttggttattctatggtgggtgtgttaatttctcattatatattaaatggttcatctcttcagatgtttgtatctcaactcagaaattcttgagcagcttaaattttaactcaataagcatatgatacagaataaaaatacataaatcaataacaattttcaaaaataaagattaatattatctatgcaatgatcaaatgaagggaggccatttatgccaaygacagttgtattttgaactagtttatctctaattcctttgtttgcctcttacttgtaagattattcctgaaacaagtacagtggcaagctaattttgtacattcatttacataattgccatcataa

SEQ ID NO: 304564 - DNA, 541 bp, Homo sapiens
aacattaattaacaatggatgaaaggatattacaccctttatgggaagaaggttagcttgctttgtgtttgtatgcaggataggggcataatactaggttgaagcatgactttgctaatgtctttcttgggaagttaactatggtaagaagaggcatgtttggatgactagctgacaaaaagtagtttatggtggctttagaatgtgttaacttggctaagctgaactacattttccccaatttttttcttgttagtttttgcttagatttagccacaaaaggtrtctgtaagattgagaaagtaaaataaaacagtaggtgtgtttactctaggaaggttgatgaagactggatgttttgagactcatgaaagtttctgcagattgcttcgttcacatcggcacagacagtggaccagtccaggttttcagcttctgctcaagatcttctgtcaacatctcagttctgagcgaggtttaagtttggctctttggctacagtgacagtgtcttccacaagtcatccgtggcactgaggttg

SEQ ID NO: 304565 - DNA, 541 bp, Homo sapiens
aacattaattaacaatggatgaaaggatattacaccctttatgggaagaaggttagcttgctttgtgtttgtatgcaggataggggcataatactaggttgaagcatgactttgctaatgtctttcttgggaagttaactatggtaagaagaggcatgtttggatgactagctgacaaaaagtagtttatggtggctttagaatgtgttaacttggctaagctgaactacattttccccaatttttttcttgttagtttttgcttagatttagccacaaaaggtatctgtaagattgagaaagtaaaataaaacagtaggtgtgtttactctaggaaggttgatgaagactggatgttttgagactcatgaaagtttctgcagattgcttcgttcacatcggcacagacagtggaccagtccaggttttcagcttctgctcaagatcttctgtcaacatctcagttctgagcgaggtttaagtttggctctttggctacagtgacagtgtcttccacaaktcatccgtggcactgaggttg

SEQ ID NO: 304566 - DNA, 565 bp, Homo sapiens
ttccccaatttttttcttgttagtttttgcttagatttagccacaaaaggtatctgtaagattgagaaagtaaaataaaacagtaggtgtgtttactctaggaaggttgatgaagactggatgttttgagactcatgaaagtttctgcagattgcttcgttcacatcggcacagacagtggaccagtccaggttttcagcttctgctcaagatcttctgtcaacatctcagttctgagcgaggtttaagtttggctctttggctacagtgacagtgtcttccacaagtcatccgtggcactgaggttggaggcttagaaagaagaggccactrtgggtttccatgggaaacagacacaagtttcagttattacttttctccacttgcccatttttcaaacatcaccaccactcctgtgtcatcaagctcagtagcagatggagtagaaacagcagaccaggactattttagcagctactaaaatcacatgaagtcaaagccctagagtaaatcgcttattctgcgtgatccctaatggttttatttctctaatttaattctgata

SEQ ID NO: 304567 - DNA, 563 bp, Homo sapiens
tatctcattcaggtacgccagtcagttgtagatttggtctctttatattataccatatttcttggaggttttgttcactaattttcattttttcctctattcttgtcatcctgtcttttttcaaaaaggcagatccttgggctctgagattctttcctctgtttattctattctgctattaatacttgtgattgcattatgaagtttttgaagtgtgtttctcatctctcccagattggttacattcttctctgtactgtcagcttctgcaatgttttatcatgatttctagcttcctttcattgggttacaatgtattcttttagctcagttaacttaattcctatgcatattctaaattctacttctgacattcagccatctcagcctyagcatgattctgaacttttgctggagaagtgatgcagtcatttggtgaaaactgggcattctggctttttgagttttcatcattcttgtgctgattctttctcgtttttgtgggattatctacctacaatctttgaagttgctgacctttggattttttttttcttttaaca

SEQ ID NO: 304568 - DNA, 529 bp, Homo sapiens
tcccttggctctgtgtttctcctggtgggccatcattctgccttgcttttcgatcttcatggatcaagttgtttccttgattagtcccaatgcaagaacctggaatgaggaagtctttgctcttgtgctgtaaaatggactgttaagacgtgaaaatagtatatcagaattaacaggaaggcaatttgttctcagaatctcawgtgctaatgtgggtctgaaagaacaaaggaaggaaatagtgtcactagcacagtagaagaaggaccataggtggaggtcagcaatggaagagctcttatctttattttgttttggaatattaattgcaaagtttctaataaaatataaaacacaagcatttactgcttacagatggtgtatttgatactattaagtaattagcagtaataatatatacccattcacattaataaaactagttccacttacatatttgagtttagataaaactaccattttctaacagtttcgtatatcaatatttcaaatgggttaaaagcacatg

SEQ ID NO: 304569 - DNA, 559 bp, Homo sapiens
tagtgagaaaagtcctcatggaaatggaaaaccaataaccattacgttttcatttataagtgggagctaagctatggatatgcaaaagcatacggagtggtataatgcacattggagactctgcagcagtgaggatggaagggagttttgggataaaagggtacataytgggtacagtgtgcactatgcaggtaatgagtgcactacaatctcaggcttcaccactatacaaattgtgcatgtaaccaaaaccacttgtaccccaaaagctattgaaatttaaaagtatattaaaaataaataaatgaaaagtattcacattagctgaatgcttatccagtcagaattgaaactttagaatttttagttatgggacaatgtattgtttattgtttttctgtgatacatagatttattggtacataaatctataaaactttaacttgtatatgcaaatcagttaattataggtacaatgtgaatcactgtccaaacacattttgactagaatttataattgtcccactggactgagagatgtcagccagtaccatgcaaa

SEQ ID NO: 304570 - DNA, 559 bp, Homo sapiens
tagtgagaaaagtcctcatggaaatggaaaaccaataaccattacgttttcatttataagtgggagctaagctatggatatgcaaaagcatacggagtggtataatgcacattggagactctgcagcagtgaggatggaagggagttttgggataaaagggtacatattgggtacagtgtgcactatgcaggtaatgagtgcactacaatctcaggcttcaccactatacaaattgtgcatgtaaccaaaaccacttgtaccccaaaagctattgaaatttaaaagtatattaaaaataaataaatgaaaagtattcacattagctgaatgcttatccagtcagaattgaaactttagaatttttagttatgggacaatgtattgtttattgtttttctgtgatacatagatttattggtacataaatctataaaactttaacttgtatatgcaaatcagttaatyataggtacaatgtgaatcactgtccaaacacattttgactagaatttataattgtcccactggactgagagatgtcagccagtaccatgcaaa

SEQ ID NO: 304571 - DNA, 575 bp, Homo sapiens
tggtacataaatctataaaactttaacttgtatatgcaaatcagttaattataggtacaatgtgaatcactgtccaaacacattttgactagaatttataattgtcccactggactgagagatgtcagccagtaccatgcaaaaggtgatgtgaaaactctttccagataacaacaagagaacattgagtacatcctcctaaactggtgctgtagaattacagcaagagccttatactggaaataawgcagtattacaaataattttactttctctctagatttgggtctggattacagaagtcacttgatttcacctggatctgttacttcatgagtgtaaagataaagctggattatgacttctgaaggtgtttttgttcaacacttgagatgaatgatatttgaagagcacataaaaggagtcgtgcttaatcttgggagatgtggattaagaaacctgggtcagaaagccgaagtagagtacatatggtatgagcacaaaatgtgcaggttgtagaaattatggtaaaatctctgccacataaaagaaagagaaatctgcgattcaatccc

SEQ ID NO: 304572 - DNA, 575 bp, Homo sapiens
tggtacataaatctataaaactttaacttgtatatgcaaatcagttaattataggtacaatgtgaatcactgtccaaacacattttgactagaatttataattgtcccactggactgagagatgtcagccagtaccatgcaaaaggtgatgtgaaaactctttccagataacaacaagagaacattgagtacatcctcctaaactggtgctgtagaattacagcaagagccttatactggaaataatgcagtattacaaataattttactttctctctagatttgggtctggattacagaagtcacttgatttcacctggatctgttacttcatgagtgtaaagataaagctggattatgacttctgaaggtgtttttgttcaacacttgagatgaatgatatttgaagagcacataaaaggagtcgtgcttaatcttgggagatgtggattaagaaacctgggtcagaaagccraagtagagtacatatggtatgagcacaaaatgtgcaggttgtagaaattatggtaaaatctctgccacataaaagaaagagaaatctgcgattcaatccc

SEQ ID NO: 304573 - DNA, 570 bp, Homo sapiens
gtcgtaagttctaaaattagtttactactaatataaatcagtcagatatctacatataacttccataatacatcgttaaaagtaaaactatttaagaaggtaataaaccctaaaattgtcagttttgatagtaattagatatagtactatactttttaatttgaatgcaattaggtatggaattatatcaatagtccatgtattaatgattgataccwgtatcttaaaatgattaaactaacaacatatcctagactaaagacctagataaaagccaatttgaaataaatttttaacaaacagcccccaattccataaatatgataaaatctatgtttaggaatgtccattacagtgactttttttaataacaaaaatttgcagaaataatgtatcccaaaatatggtactatttgaaaaaaaaatggattgtgcattcttatacaagccatgtgtagccatttaatatcatgtacacctataagttttgatataggaggcatcaacaatatatagctaagaaaatttgttctggaatagcaatgataaaaaaattttaataataaaaat

SEQ ID NO: 304574 - DNA, 618 bp, Homo sapiens
aggcatcaacaatatatagctaagaaaatttgttctggaatagcaatgataaaaaaattktaataataaaaatacatacaacacttactaaatgtttactatgaagcaggcccttgtttccattgttttagacactgacacatactgccacatttcatcttcaaaaaaaatttttttttttcttttgagagattgtctccctctgttgcccaggctggagtgtagtggcacgatctcggctcactgcagcctctgcatcccaggttaaagcaattcttgtgtctcatcctcccgagtagctgggattacaggtgtgtgccaccatatccagctaagttttgcatttttagtagagatggggtttcgccatatcgcccaggctagtctcgaactcctgacctcaaagggatccactcgcctaggcctcccaaagtgctgagattacagtcgtgagccaccacacccagccaatattcacaattgttaattggatactagtattattttctttgtacaaagtaggaaattgaagttccaataaatggagtttaataatttgcctgaggacacagagagtaaatgatcaataatcatttactgtgtctataatcttgtgtc

SEQ ID NO: 304575 - DNA, 618 bp, Homo sapiens
aggcatcaacaatatatagctaagaaaatttgttctggaatagcaatgataaaaaaattttaataataaaaatacatacaacacttactaaatgtttactatgaagcaggcccttgtttccattgttttagacactgacacatactgccacatttcatcttcaaaaaaaatttttttttttcttttgagagattgtctccctctgttgcccaggctggagtgtagtggcacgatctcggctcactgcagcctctgcatcccaggttaaagcaattcttgtgtctcatcctcccgagtagctgggattacaggtgtgtgccaccatrtccagctaagttttgcatttttagtagagatggggtttcgccatatcgcccaggctagtctcgaactcctgacctcaaagggatccactcgcctaggcctcccaaagtgctgagattacagtcgtgagccaccacacccagccaatattcacaattgttaattggatactagtattattttctttgtacaaagtaggaaattgaagttccaataaatggagtttaataatttgcctgaggacacagagagtaaatgatcaataatcatttactgtgtctataatcttgtgtc

SEQ ID NO: 304576 - DNA, 618 bp, Homo sapiens
aggcatcaacaatatatagctaagaaaatttgttctggaatagcaatgataaaaaaattttaataataaaaatacatacaacacttactaaatgtttactatgaagcaggcccttgtttccattgttttagacactgacacatactgccacatttcatcttcaaaaaaaatttttttttttcttttgagagattgtctccctctgttgcccaggctggagtgtagtggcacgatctcggctcactgcagcctctgcatcccaggttaaagcaattcttgtgtctcatcctcccgagtagctgggattacaggtgtgtgccaccatatccagctaagttttgcatttttagtagagatggggtttcgccatatcgcccaggctagtctcgaactcctgacctcaaagggatccactcgcctaggcctcccawagtgctgagattacagtcgtgagccaccacacccagccaatattcacaattgttaattggatactagtattattttctttgtacaaagtaggaaattgaagttccaataaatggagtttaataatttgcctgaggacacagagagtaaatgatcaataatcatttactgtgtctataatcttgtgtc

SEQ ID NO: 304577 - DNA, 618 bp, Homo sapiens
aggcatcaacaatatatagctaagaaaatttgttctggaatagcaatgataaaaaaattttaataataaaaatacatacaacacttactaaatgtttactatgaagcaggcccttgtttccattgttttagacactgacacatactgccacatttcatcttcaaaaaaaatttttttttttcttttgagagattgtctccctctgttgcccaggctggagtgtagtggcacgatctcggctcactgcagcctctgcatcccaggttaaagcaattcttgtgtctcatcctcccgagtagctgggattacaggtgtgtgccaccatatccagctaagttttgcatttttagtagagatggggtttcgccatatcgcccaggctagtctcgaactcctgacctcaaagggatccactcgcctaggcctcccaaagtgctgagattacagtcgtgagccaccacacccagccaatattcacaattgttaattggatactagtattattttctttgtacaaagtaggaaattgaagttccaataaatggagwttaataatttgcctgaggacacagagagtaaatgatcaataatcatttactgtgtctataatcttgtgtc

SEQ ID NO: 304578 - DNA, 613 bp, Homo sapiens
tgtggtttcctttttacatgaaagataaaatattcaaagagtcatattaagctttctttgctttttaaaaatattgggaaacatttgagttttttttatcagataaaactactacaatcaatctgttttctaacaatttttgttctatttttttttttwaaaacaggttgaccatctcccatctgaaaatccaaaatctgaaatgctctaaaatctaaaactcgttgagcactgatgtgacactacaagtggacaatttcacacctcaccacatgtgatgggttgcagtccaaacatagcaaaaactttgtttcatgaaaaaatatataaaaattgtattaaattatcttcagtctacgtatataaagtatatgtaaagcataaataaatgttgtgtttagactttgagttgcatccccatgatatatcattgtggatatgcaaatattccaaaatttgaaaacatccaaaatttaaaaacacttctctttccaaccatttcagataagggatactcagcctttaatagcatttatagtacttttagtaaaattgacatagtttactaatgttatgtagacattcttgggccacatgatgaaaagatatttca

SEQ ID NO: 304579 - DNA, 496 bp, Homo sapiens
catcattatttggagacttgtaaattcctttatacttgtaatgcaaatagatttaaaaagattctgacataaagaaatcttatgcatgagggaaagttggtagatgacatcattcacaaattgcagtgctgtctcctgcattttcttctgccttccacgtggcttcaacgctggtaagtctagtaatttcttaacttccttcactgtgcagcctagaattcttccttgaagaccagtgtaaatattctatcaagatttgtgtgttttgctttcttcagattgtgcagttactaaggtgattgccgtcaagtttacacatgagattgtttagtctgaatcttgctgcagccaatgatagatgaatgattaaaatttgggatttgaaatttttaattaaaaattaatttatactaatgytcaatgttgagctaaaatggttcaaaaataaaattatgcacaataattattttgattcacaaattatatattttatgta

SEQ ID NO: 304580 - DNA, 563 bp, Homo sapiens
ggattacagactgagccaccatgcctggcctagtgaattatctttatctccattttataactgagtcttccaagtgaamatgcatggaaccatttaattaaagaaagaaaattactcatctaaaaacaataaatgcacctcttcttgatgtttgaaccaaatttttgatctagtcctcaagtgtacttcatcatcatatttatcattattgtcaatttccagaacttctattacttgcttcccttcccgattttacctgccggctactgtgcaagcaaacactcaacggatattgttcccatatctcaactttcaaggacattacaatgacataaaaatatttgctgaatgattatcacgtttcagaaatgcttctaaaatttgcatgtgttacttcatttaacccttacaacaattaaataaagtatttgtctttactatctgcatttctcacaggtggaaactgagacttagagagcaacagtgacttgcctgttatcattcagttagttaatgaggagccagaagtgcatctggagctagttctttaatcaaagtaatag

SEQ ID NO: 304581 - DNA, 563 bp, Homo sapiens
ggattacagactgagccaccatgcctggcctagtgaattatctttatctccattttataactgagtcttccaagtgaaaatgcatggaaccatttaattaaagaaagaaaattactcatctaaaaacaataaatgcacctcttyttgatgtttgaaccaaatttttgatctagtcctcaagtgtacttcatcatcatatttatcattattgtcaatttccagaacttctattacttgcttcccttcccgattttacctgccggctactgtgcaagcaaacactcaacggatattgttcccatatctcaactttcaaggacattacaatgacataaaaatatttgctgaatgattatcacgtttcagaaatgcttctaaaatttgcatgtgttacttcatttaacccttacaacaattaaataaagtatttgtctttactatctgcatttctcacaggtggaaactgagacttagagagcaacagtgacttgcctgttatcattcagttagttaatgaggagccagaagtgcatctggagctagttctttaatcaaagtaatag

SEQ ID NO: 304582 - DNA, 563 bp, Homo sapiens
ggattacagactgagccaccatgcctggcctagtgaattatctttatctccattttataactgagtcttccaagtgaaaatgcatggaaccatttaattaaagaaagaaaattactcatctaaaaacaataaatgcacctcttcttgatgtttgaaccaaatttttgatctagtcctcaagtgtacttcatcatcatatttatcattattgtcaatttccagaacttctattacttgcttcccttcccgattttacctgccggctactgtgcaagcaaacactcaacggatattgttcccatatctcaactttcaaggacattacaatgacataaaaatatttgctgaatgattatcacgtttcagaaatgcttctaaaatttgcatgtgttayttcatttaacccttacaacaattaaataaagtatttgtctttactatctgcatttctcacaggtggaaactgagacttagagagcaacagtgacttgcctgttatcattcagttagttaatgaggagccagaagtgcatctggagctagttctttaatcaaagtaatag

SEQ ID NO: 304583 - DNA, 590 bp, Homo sapiens
gactgagaatgactaaataataactccagtgtcctgtgctctaagtagtaagtgggagaagagaggatttgaatctasatctgtcttactccacagagaaattcctgtatattctctaggctcaggacaccacataaaagaaaacaaaaagctgaaatcaatgattagtatatgatgactagcccagggtaaagatgctcttttacagtgaaaggtaggtaagtaacaagatgtctgatgtgtttattaaaaatagccactgataatgatgatactgctcttttaaaggacaacactggaaagtaacctggatattccagagttcaaactcccttctatcattattgtcttcactattccttcatttgcatagagtgtactcttctttgtctcgagagttttcagctaaagttgtctagaattaactcttgtaaattctatctaaaaatctgaaggaggagcctcttttaggcaaaagttatctgaaattttttaaaaatatgaactttattataaagtaaatcatattcctgtagcatagtaaaaagagagagagctggtcgctgacagatctgcactggaatttcagt

SEQ ID NO: 304584 - DNA, 605 bp, Homo sapiens
gagagaaggcaatcaggaaccatgacaatgtcatcactgttcttacagtggtggaatcttacaagtgtaacaaagtcctctgattttctcccaagactacatttctggatgggtaaccagccatggttcttgatgaaagccagtcttatcctatttttgcctttacgtattgcttacacacaattaaatccaagagtgcagtaagaatatttcctggatcaagagctcctgggaggttcatgtttctagaaccaagattcatagataaaattagaaatctgatcactaaaatactttgtggttatccaggaatctaaagggtagctgtatttctcaaagtgcattctgttgcaaacatatcctgtgagatttttgcaaattttaaacagattaaaagtacatttggaaaaaggttaaacaaatagatctttttttttagtattttttttgctattgttgattttattaattgttttactgtaaaattgccagttttgaagatgtcaatgtacattgcatatctccattaatgagataagcaatatttaatgtktcctaattatcctgattatattactataagtatcttgagcattttagagttg

SEQ ID NO: 304585 - DNA, 487 bp, Homo sapiens
tatctattactgaacctagtgacctatgaagagatagtggaattcatatctactactactgagccattttttttcttgctaagaacttatatgtcataaaagtagccaagaataaaaaaattagaaatattgatattaataactaatatggtcatatagcagaaacagggcaacagatacattgataagtaaaaatctgtaccrtcacttttgtgctcagaacctaaaagttatcctaacatgtattaatatacttaaaattgcattttctttgaacacgttaaatatgtgcaggctactggtactgatgcaacatgagattaaaaggacattttttttttactagacttgaaagcactgatagtatgattgttttaaaggtttctggtcgtggcgaaatatgtaaaaaaatgtacaactttgccaggaataaaacagctctatttcacttcatgttttgtatttctatgacagtctccctttgcgg

SEQ ID NO: 304586 - DNA, 606 bp, Homo sapiens
tatatttttttattcttgctcagaagacccccatttgagtgacacgtgggcaaacaaaaatttagctttgtctcagaccactctttgggagtcwttattttttttttttcaagaacagctatgaacactagggttcagttatatatgggcacccaaaacttagtgaaatagctgaataattttcaacaatatgcctagcaatcagatgtgtaaacatatcctgacatcaatacctgtccagtttacctccaatctactcttttcctacctttctttgccactgaattccaaatcaacattttagtcgtgttagaccaggggtttctctttacctacaaatgttttgtatcacctgcttcaggatctttgctcaagcttggccccttcagagggtccgcccccttcctcactatttctcctggactgcataacttttagccgaagttcacttcctaattattctataatgaatttttctgaccatccttattcagatatccttccttactttccacccaacagtacgttgctatgccatgtatggaggattttgaattgtataaaatgtgagtattaaaattccttcaactagaggggacaatagaa

SEQ ID NO: 304587 - DNA, 690 bp, Homo sapiens
tcctttgtgctataagaaaattgcctgcaagagcatggcgatgtgtaccaaaygtaaagcatgtgattgagaactcaaatggcgaagtggggaagaaagacccagagctagattcagagactaggggcatccagtattccatcaatatgtcaacctgggattttagcttcttgaccaagcaaaagaaaaatagtaaaattccagatacatgaatgaaattcttagtaatgcagatttaaatcaaatgcccacttcgggcaattctatattcttttaaaatactgcaaatgcaaattcttcagactgagatgttaaatgttttctttaataatctactatgctgctttcagaaagagggaaggataactactgggagtctattattttgggagggcttattctgaagttctggagaaaaatctcgattttaatctttctgtcatgtattttattaacttgaatagctttcttatctttttgaaccaatttcctcattggaaattttgggataataagaatgaagtcttctttacatatctcacaagattgttgtgaggatcaaattaaatggagagaatgctttaaatataagttatgagaatcacatatcttggaaatcttgtttcctcatgcacacaattttctatacttaaggcataaggaatgatcttcacgcttattgcttggctt

SEQ ID NO: 304588 - DNA, 634 bp, Homo sapiens
tgtttgttgttttacttagtatactttgggtatgtcagagctagagccagggcccagatctgttgaggctcttatgatactctgtcattcatcacattttaagagaatagggattatagagaaaggaacaatgtctaaaggacaaggtagatgaaaaatgtaattctggcttttgcaggtgaaaagctccatattgctgggcttaaggtccaaaattctaggaagatgctttgaacacttagggaaagtastgagaatatacttaagctcagcattgtttaatgaaaagcttgtaatgtcagactcaaaccaatttatttcttagagtaactggaaggatagatagagtgaattcctttgggattcttgaagactagatagaggaataagaactgcgtgccaggtggattaaaatatggtcttaccgaaaggaatgctaatgtgataaatctgtacaataagctgatcgaaagaacatagggggaggggagaggaaaggcatgtgtctctattacacatatatcagcttcggacatatttccagaaaaccttgttggaaagtaggaaaataaggctgcaaagggaaggaagtcaagcaaaggtaagacatcaagcaaagtaccttagagaacat

SEQ ID NO: 304589 - DNA, 558 bp, Homo sapiens
gagctgcacatagtggtttactaaataatttttcatcgctacgtcctcctctttctcctcctctctactctctatttctcttctttcaggatagaagtctgtaggtcctctagccaattaatttgctttatttaatagctttttaggtcatggggtttgttatctcagctttagtgttcctaactcttgacatcaattcactctacttactgcttccatttcacttatctaaatacaaaccaatgagcattagctgaacgcctcatcccagcgtccttttattcgttgtggtactgcctaagtcgatgtaaaccagaggcacacaaaggcagtggctctattatagaagttttgtttatctctcctgtagcaatctggagataggtgggtgattaggaagttgcagttctgcgagagcattcacccggggatctgagtgactcccatctgcctgtaccattacctcctaggatgctgtcatttctcayggttaaaccagcttattagcaacatgtccacattccagccttttggatggagaaaaagaggaggtggagg

SEQ ID NO: 304590 - DNA, 575 bp, Homo sapiens
ttcctgttttcttttttcttccactttctaggatttctattctcagatattggtatttttattttccaaaatttccagctactgaatcctttatgtcttccacctttmttttgttcttgctgccttctgcaatagttcattcatctaatcttctacttttaatctctacatattctaatatttgttctaactactgagttatttctgacattttgcattcttgttgtaccatttggctctttttatgatatttttgtgcattctttactttgcaaacatcttcctttacttgtaaatacatttattatgctcattttaaatacttttttgtatcttccaattattctacatcagatgatatacatttcacctttgtggcctctgtttgctaataactgtcctcctcaaatgtcttgctattttagcctgtgaattcacatcatggggaacctgctactctgtctggagtctgtaacacgagggctgaaagctgtggttggtgtgcatccacaagaatatataaatatctaaggggaaaagcccttgggcacacagctctgaaaacaataaaaaga

SEQ ID NO: 304591 - DNA, 575 bp, Homo sapiens
ttcctgttttcttttttcttccactttctaggatttctattctcagatattggtatttttattttccaaaatttccagctactgaatcctttatgtcttccacctttcttttgttcttgctgccttctgcaatagttcattcatctaatcttctacttttaatctctacatattctaatatttgttctaactactgagttatttctgacattttgcattcttgttgtaccatttggctctttttatgatatttttgtkcattctttactttgcaaacatcttcctttacttgtaaatacatttattatgctcattttaaatacttttttgtatcttccaattattctacatcagatgatatacatttcacctttgtggcctctgtttgctaataactgtcctcctcaaatgtcttgctattttagcctgtgaattcacatcatggggaacctgctactctgtctggagtctgtaacacgagggctgaaagctgtggttggtgtgcatccacaagaatatataaatatctaaggggaaaagcccttgggcacacagctctgaaaacaataaaaaga

SEQ ID NO: 304592 - DNA, 575 bp, Homo sapiens
ttcctgttttcttttttcttccactttctaggatttctattctcagatattggtatttttattttccaaaatttccagctactgaatcctttatgtcttccacctttcttttgttcttgctgccttctgcaatagttcattcatctaatcttctacttttaatctctacatattctaatatttgttctaactactgagttatttctgacattttgcattcttgttgtaccatttggctctttttatgatatttttgtgcattctttactttgcaaacatcttcctttacttgtaaatacatttattatgctcattttaaatwcttttttgtatcttccaattattctacatcagatgatatacatttcacctttgtggcctctgtttgctaataactgtcctcctcaaatgtcttgctattttagcctgtgaattcacatcatggggaacctgctactctgtctggagtctgtaacacgagggctgaaagctgtggttggtgtgcatccacaagaatatataaatatctaaggggaaaagcccttgggcacacagctctgaaaacaataaaaaga

SEQ ID NO: 304593 - DNA, 529 bp, Homo sapiens
atagctaagtgcacaaggtttctctaggaaatttcaytcacattgtcatgaactaattcttagggaaatggctttggaatttaacatgtaaaaaatgagaaagaatgcaaaatcacagtgttggtgaagaggaatagaaatggtgttctcaaaagtggctggaaatggctttaattactgtacaacttttggaggacaaatcttcagtaaacaccacaaacattaaaaataagccatatttgaccaaataatctcacttgtatgaatttttcctaaagaaagaaatcagaagtgtccagacacatatctatttccatccaatggaataatatacaagagtgaagatgaaccaactattgctacatgtatgaacatggataaatccatgtatgaacatagacgtacggctctatgaaagaagcaagtcatagaagaatacaaacagtgagatacatcttcataaaatccaaaagcaagcacaaccaaacaatatcttatttataaataactacacagcaaaattataaat

SEQ ID NO: 304594 - DNA, 529 bp, Homo sapiens
atagctaagtgcacaaggtttctctaggaaatttcactcacattgtcatgaactaattcttagggaaatggctttggaatttaacatgtaaaaaatgagaaagaatgcaaaatcacagtgttggtgaagaggaatagaaatggtgttctcaaaagtggctggaaatggctttaattactgtacaacttttggaggacaaatcttcagtaaayaccacaaacattaaaaataagccatatttgaccaaataatctcacttgtatgaatttttcctaaagaaagaaatcagaagtgtccagacacatatctatttccatccaatggaataatatacaagagtgaagatgaaccaactattgctacatgtatgaacatggataaatccatgtatgaacatagacgtacggctctatgaaagaagcaagtcatagaagaatacaaacagtgagatacatcttcataaaatccaaaagcaagcacaaccaaacaatatcttatttataaataactacacagcaaaattataaat

SEQ ID NO: 304595 - DNA, 511 bp, Homo sapiens
ttgggactcacacacaatccagcagggcccaawgcccccatggcgcctgctaattgaatatccctccttcctggctccttctgtgtccctggggggtgggagttactgcccaccctacttcctcctctgcttctcagggaacccccagagtctttctgccctgcctgagtccccacagagagcatttgggattccaggacctgagaccctcacactcgtggatctcatggacagaccagccagcattccaagagctgcagttgcatagagcttccccacatcatggcttccagtctccctcaccctgaggcagattactctcctcttggatacctgaggcacctgaggctcagaacagttaagaggctttcccagcatccatgcaagcagcaatgccaggaatcagatcaggtctgtttgagtgttcacccgttattcacctccgcataaccagagacccaaacaccggccagccctgggagaaaactgggaagccagctccctcctcttc

SEQ ID NO: 304596 - DNA, 511 bp, Homo sapiens
ttgggactcacacacaatccagcagggcccaaagcccccatggcgcctgctaattgaatatccctccttcctggctccttctgtgtccctggggggtgggagttactgcccaccctacttcctcctctgcttctcagggaacccccagagtctttctgccctgcctgagtccccacagagagcatttgggattccaggacctgagaccctcacactcgtggatctcatggacagaccagccagcattccaagagcygcagttgcatagagcttccccacatcatggcttccagtctccctcaccctgaggcagattactctcctcttggatacctgaggcacctgaggctcagaacagttaagaggctttcccagcatccatgcaagcagcaatgccaggaatcagatcaggtctgtttgagtgttcacccgttattcacctccgcataaccagagacccaaacaccggccagccctgggagaaaactgggaagccagctccctcctcttc

SEQ ID NO: 304597 - DNA, 571 bp, Homo sapiens
atcgtttttctaattctaccattatgtccatatttattgactagtgtttttcacaaagtggagttttctgttatcaacaggaattaactacattgcctcctgaaaaggacaggcaaatgcctggttctttctttttaattactaatttcctgaataaggaattggttcaataatcaccttcaatgatggtaagtgagtttccctytctcttctcatccggtttttatctatctatatcttatagtcatactctgctggatatttgttcaatgacttacaataaattctacttcatattctttttaatgctcagatagttccagcttttgccagtggaagcccctccaagatggagaagctctactttaaattccaggcccctaaggaaaggtttgcaagagggctctctccagccatccacccccaccacccttagaaactcctgctacacaccatggatggggaagtgaagggaaagggtaatgagacacaatgggggaggagtcacttgagtagttatactatttcgggaatgaggtatactggaaaaagcaagtgaacatccaaactc

SEQ ID NO: 304598 - DNA, 545 bp, Homo sapiens
tcacttggttaaggtggcccctgccgtatctggcccttgaaaaggtcattttccctttgacaatctgcaagtaatctgtgaaacaatacattggaccctagaatatcttattctccaaaaacttttcacttgatgcattgaacatttattgatgatctttgccttaatcaattatttctttcaatataacaaaatgatcgtttttctaattctaccattatgtccatatttattgactagtgtttttcacaaagtggagttttctgttatcaacaggaattaactacattgcctcctgaaaaggacaggcaaatgcctggttctttctttttaattactaatttcctgaataaggaattggttcaataatcaccttcaatgatggtaagtgagtttccctctctcttctcatccggtttttatctatctatatcttatagtcatactctgctggatatttgttcaatgacttacaataaattctacttcatattctttttartgctcagatagttccagcttttgccagtggaagcccctccaag

SEQ ID NO: 304599 - DNA, 599 bp, Homo sapiens
gcctcacagctgagggcaagcactcctgccctctattcagttcaacagacattacccagtgttatagactgaactgtgcctgctccctgcccggccccaaattcatatgttgaagccctaacccccagtgtgactatatttggaaacagggactttagagaggtcatgaaggtaaaatgagatcacarggtgtggctctagtccaataggactggtgttcttatgagaagaggtagaaacaccaggagtaagtgtacacagaagaaaggccatgtgaagacacagcagaaggtgcccatctccaagcccaagagagaggcttcaggagaaaccaacattgctaacaccttgatcttggacttccagcctccaaaactatgagaaaataaatttatgtttttaagccactcattctgtgctattttgttgtggcagccccagccaactaatacacctagacttacctacctttacccagacccttaagagatgagagatatgaagatgaatatggcatgacttctgtcctcagcggtttaaaatataataagagcataatgatcaatggaatagaattgagaatccagaaataaaccctc

SEQ ID NO: 304600 - DNA, 569 bp, Homo sapiens
acaactctgaaatctagtggggatctgccaagcctccttcatacttgcattctgtgcaactgcagatttaacaccatgtggaagctgccgaggcttatgacttgtgccctctggagcagtgacctgagctgtacctggggtcctttgagccacagctgtagctacagtggctgggattcagggagtggtgtgttgaggctgcacaggacagcagggccctgggcctggcccacaaaaccatcctttcctcctagcctctggtgatgggaggggctgcctcaaagatttctgaaatgctctcaaggcctttttcccattgtcttggatattaacacttggctctcttttagtcacacaactctctctagcaagtgttgctctgcaacccacctgtatttctctcctgaaarcactctttctttctctgccacttggccggcctgcaaattttccaaagttttatgctttgcttcccttttaagtataagttccaactctgagtcatttctttgttcccacatctggtcataggctgtaagaaacagctgggacacttcttgaatgctttg

SEQ ID NO: 304601 - DNA, 581 bp, Homo sapiens
gaaaaaaaaagtaaacaatcaaattaaatgtcaccttgactaaattgggttcttgattacattgtggtttaaaaaaaaaaaaaagcaaacaattcaattagaacatgagcaaagacacgaagagacatttcaccaaagaagatgtactaatggcaaataagcacatgaaaagatgatcaacatcattagccattagggaaatacaaattagaaccaataacaataagatgctacaacatacctatcggaatgggtaaaataaacaatagtgccaataccaaatgcttacaaagatacagaaaaactgcactcatacatcgctggtgggattgtaaaatgatatagccactctggtaaacagtttggcagtttcattaaaggagaaaaaaataaactaaactaaaactgcaactatcayataacctataattgaactcctgggcatttatcccagagaaataaaaactctgttcacacaaaaacctgtaagtgaatgctatagcagcttcattcataatagccaaaacctagcaacaatgcagatgtccctcaatcagtgaatagttaaacaaactgtggta

SEQ ID NO: 304602 - DNA, 640 bp, Homo sapiens
gatgggacttgttttaatagaaatgtagcagagtggtttaccaagaatgtaatgtggccaaatggcctattgagagagactagctgtatcttgctttctccattgtaggctcttgctaaagaatgaaaggtatttcagctcttctcctcctcactcccaccccaggaagggagccaggcttttatgtctttgagacttgggctttccttgccacagggggagctgacaatgtttttgtgtgtcttgaagaaaaaaaaaaaaagaagttgccaggcctttctgcctctttgtattwgaaggcctgggcctagccagagagtgttgaggttaagaattaaagagaggaatgaccgaattcagagagtttatgagatgtccgggggttcaagggaggctgaggtccccaggacttggtgagtgattggttatggaggtgaagagaggaaggagtggagaatggcttgtgggtttccacttggactgatggggaaatgggtggtgctactagtcacaatagaggagaggatgcgttctctctttctttcatgggagagaaagtccccatagatctgagccacaaacagctgtgactcccaccccagccaggaactggcaccttgacaacccttgggggagagaa

SEQ ID NO: 304603 - DNA, 576 bp, Homo sapiens
gaaaaatcccagagagtattctgccagttgccacgtcatattcccataaaaccttcagttatttacccatatgggtgctttacctggttgttacttaagatagatttctgtatgtgttgcaaggaaaggcattgcagaaatggacaggaccatttttttcgttccacattgtgactcttcctttcctgtatttgaaagattaaaagatagcaccccctagatgggtgagggttgggttaaatagtagtgttgggacagaaaggtccatttgtgagctcgctgcaggcaggtttgatggtyctggtggaagtagccttggcggctgctggttttcaaagcctctgacaaagctgtgcatatcacccgtgactgcaccctgaggaaagacgaaaagtcagcctctcccttacgtaggacgcttgtaaactttcccagacgcactgttggtcttaaggattgttctgaccctggacatttgcaggacttgtccaaggtggatctgagcctcctcatgtgctccaggcagagatcaggattcggatgcatcaccaactggtggaagatggggactaggca

SEQ ID NO: 304604 - DNA, 568 bp, Homo sapiens
aataatattccattatacagattcacctcatttttttatccattcatcagtagatgggcatttgggttgcttccagttttgggctattatgaataatactgctgtgaacattcatgtacaattttttgtacagacatatgtttttatttctcttgggtataaggctataagtggaattgctgaatcatatggtaactctrtatttaactttccaaggaactactatgctattttccaaagcagcctcactattttacattcccaccaacaatttatgaaagttccaatatctccacatcctcaccaacacttcttactatctgtcttttttaatttcagtcattgtagtaagtatgaagtgatatctcattgtggctttttatttgaatttccctaatgactaatgatgtagcacatcttttcataggcttattggccatttatatatcttcatgggagaaatggctattgaaaatctttgcacatttttaatagggttatttgtctttttattgttgactgataatagttatttacatattctggatactggatactagagccttat

SEQ ID NO: 304605 - DNA, 629 bp, Homo sapiens
ttatacacattttctcctaaatttattccatttttttatttttcatttagggttaattcattcataatgattttattcatggctggaggtgttattttccagatcaataaccaattatgttagcagtattaattaaataaatcatcttctctcccactgaactaaaatgccatctttatcatgtattaaatttgaatatatactcagattttttttgactttctggtcttctgatctgtacacttatttataagctaaagtcatacagttttaaaattattatattagctttctagaaagttttaatagctggtaagggaatcccacccactgtcttttcacaattaaatatttttgttgtcagttctaaaacatttagaatttctccaatataaatgctaagtactttttgtatagccccaggaaaacaccaytgatattctgattggaattaatttaaggtacatatttatttggaaatcactgacatttatgatgattaattcttcccattcaaggacatcctgtgtctcacaattagttgaaatattgtttttacaccctgtaacaaaatgtatagctttcttcatggaggtctcataatttttggtaaattttaacagttaatt

SEQ ID NO: 304606 - DNA, 536 bp, Homo sapiens
tggctaatttttgtatttttagtagagatggggtttcaccatgttggccaggctggtcttgaactcctggcctcaagtgatcctcctgccttggcctcccaaagtgctgggattacaggcatgagccatcgcaccaggttgaacagacatttcttcaaagaagatatacaaattgccaataagtagatgaaaagatgctgaacatcattaatcaggaaaatgcaaatcaaaaccacaattaaataccactttctattctctaggatagctataataaaaaagatagacaatagcaagtgctgtcaaggatgtagagaaattgaacsctcataccttgctgatgggaatgtaaaatgatgaggttgcttttaagaacagtttggtcattcctcaaaaggttaaacagagttacatatgacccaacaatttcactcccagcaataaattcaaaagaattgacatcatatgttcacaaaaaattttgtacaccagtgttcatagcagcatgatttataatggccaaaaagcaaaaaaaa

SEQ ID NO: 304607 - DNA, 484 bp, Homo sapiens
aaactactatgaccacaatagaaagtataaaactggcaaagactaaaatgaataaacgatatgtagacaagatactgatctatgaatcaaaacttgactgcaaaatttatttgggagaaaactgatcttgatgaaaatagttttggtgaaataattcattgaccaaytttctatatggcagctaaatatttcaagtgtttctatttttatttgaaatgggtttaactggatttgctccagaaaatactttattcacaaaaacccaatgttgataaatttttttcaaatacttacattcataaactgttgtcaaagaattcccagaatgaaaaatatgtggaaaaaacagcagaatcaaaatgctatggaccaacttctggttccagacaagatggagtagacaaatttctccctaactccctgactaagagtagctaacaatcccagacctcatatgtgaaataaacatacaattctgaatggt

SEQ ID NO: 304608 - DNA, 542 bp, Homo sapiens
ggctgctccccggcccaggcctgaaggaggaggtggcagggttcgccggaaaaagagtcagaaagagtcaggagagcagggtcatcagcctgtgcaggggccttcccggcaggagctgagatctttcctcaaagtattcaaatggcgctgggagctgcaggggggatgtggtggcctcacacccactctccagctggtgctccccactgccggaagccaaccagtattaaagaaacaattactcaatgtcacttgttaaagaacaggagactctcttcaggaccatctccataggtacagggaccaaggcaatgggattttgcagtgactgggctcagctctgaatagagcatgggccagtaagcatctatagccaaggacaggatgagggtcagtgtacggaaaatgactaaagaggagacatcagggctacgggagattctgactagagattcagatatcaccgagagtkatcagatgcctgtggattggggtttcttgacaaactgacttagcagtgttcttcccaaaaactaaattgt

SEQ ID NO: 304609 - DNA, 565 bp, Homo sapiens
tgtgcacccattcataccattcacacgctgcacagaggatccattacacatcaatgcatccattatctctccatgtrtactaatggtatactaccctttataaaacaaatggaaaaacacaaattaaaacaaatgaccccaaacaacaactatgccaaagggaaacaggcatgaacgaaagagctctcaaaggccaaagctacaaaagaaataaagtggtatccgatcataattgaagtataaatatccatgggagtccatattgatgtaaataaataatgaaagaataaacaaagagggtagaacagacaaaatttccaatgagaacaactccaaatgatctatgtagcttctccaccttcaagtataactcatccttcagcctggcctactacacacagtgacttccaaaaattacagtatggtgaaggggtagaaagagtaattttagtaattttacagtggagacacctgtcaaacacccctcagcctggccattgaggtcaacatgtaccatgctaagacacgctaatggcacgtagcgttgatatgaagccaggagaag

SEQ ID NO: 304610 - DNA, 565 bp, Homo sapiens
tgtgcacccattcataccattcacacgctgcacagaggatccattacacatcaatgcatccattatctctccatgtgtactaatggtatactaccctttataaaacaaatggaaaaacacaaattaaaacaaatgaccccaaacaacaactatgccaaagggaaacaggcatgaacgaaagagctctcaaaggccaaagctacaaaagaaataaagtrgtatccgatcataattgaagtataaatatccatgggagtccatattgatgtaaataaataatgaaagaataaacaaagagggtagaacagacaaaatttccaatgagaacaactccaaatgatctatgtagcttctccaccttcaagtataactcatccttcagcctggcctactacacacagtgacttccaaaaattacagtatggtgaaggggtagaaagagtaattttagtaattttacagtggagacacctgtcaaacacccctcagcctggccattgaggtcaacatgtaccatgctaagacacgctaatggcacgtagcgttgatatgaagccaggagaag

SEQ ID NO: 304611 - DNA, 565 bp, Homo sapiens
tgtgcacccattcataccattcacacgctgcacagaggatccattacacatcaatgcatccattatctctccatgtgtactaatggtatactaccctttataaaacaaatggaaaaacacaaattaaaacaaatgaccccaaacaacaactatgccaaagggaaacaggcatgaacgaaagagctctcaaaggccaaagctacaaaagaaataaagtggtatccgatcataattgaagtataaatatccatgggagtccatattgatgtaaataaataatgaaagaataaacaaagagggtagaacagacaaaatttccaatgagaacaactccaaatgatctatgtagcttctccaccttcaagtataactcatccttcagcctggcctactacacacagtgacttccaaaaattacagtatggtgaaggggkagaaagagtaattttagtaattttacagtggagacacctgtcaaacacccctcagcctggccattgaggtcaacatgtaccatgctaagacacgctaatggcacgtagcgttgatatgaagccaggagaag

SEQ ID NO: 304612 - DNA, 565 bp, Homo sapiens
tgtgcacccattcataccattcacacgctgcacagaggatccattacacatcaatgcatccattatctctccatgtgtactaatggtatactaccctttataaaacaaatggaaaaacacaaattaaaacaaatgaccccaaacaacaactatgccaaagggaaacaggcatgaacgaaagagctctcaaaggccaaagctacaaaagaaataaagtggtatccgatcataattgaagtataaatatccatgggagtccatattgatgtaaataaataatgaaagaataaacaaagagggtagaacagacaaaatttccaatgagaacaactccaaatgatctatgtagcttctccaccttcaagtataactcatccttcagcctggcctactacacacagtgacttccaaaaattacagtatggtgaaggggtagaaagagtaattttagtaattttacagtggagacacctgtcaaacacccctcagcctggccrttgaggtcaacatgtaccatgctaagacacgctaatggcacgtagcgttgatatgaagccaggagaag

SEQ ID NO: 304613 - DNA, 634 bp, Homo sapiens
gacctttccctccagaacacataactccagtttaatcatgagaagaaatcagacaaatttcaactgagggaccatctacagcatatccagccagctttcctccacactgtcaaggtcatcccaatgagggatgtctgagaaaccgctgcagccgagaggagcctccagagacawaggaactaaatgtgatgtggcccacctgggacagaaaaaggacattcagtcaccactaaggaaatccgaataagctatggactttagttaataataatgggtcaaggacgctggttcatgagctgtaacaaatgcaccatcctattgggaaatgttaataatagaggagtggatgtggggcatatggaaaccatacaatctgcccaatttttctgtgactctaaagctgttctaaaattttaaaaaaatgaataaatgaaaaaaaccccgctccaatggaagtcctaatagttccttcacataaggcagtgaagtgccccacacaccttgtggtatgtgtacaacagcatgaaagcctcttcttcaagcagttaagaaaactagctgttttggggctgggtgcagtcgctcacacctgtaatcccagcacattgggaggccaaggcaggaggaccacttg

SEQ ID NO: 304614 - DNA, 634 bp, Homo sapiens
gacctttccctccagaacacataactccagtttaatcatgagaagaaatcagacaaatttcaactgagggaccatctacagcatatccagccagctttcctccacactgtcaaggtcatcccaatgagggatgtctgagaaaccgctgcagccgagaggagcctccagagacataggaactaaatgtgatgyggcccacctgggacagaaaaaggacattcagtcaccactaaggaaatccgaataagctatggactttagttaataataatgggtcaaggacgctggttcatgagctgtaacaaatgcaccatcctattgggaaatgttaataatagaggagtggatgtggggcatatggaaaccatacaatctgcccaatttttctgtgactctaaagctgttctaaaattttaaaaaaatgaataaatgaaaaaaaccccgctccaatggaagtcctaatagttccttcacataaggcagtgaagtgccccacacaccttgtggtatgtgtacaacagcatgaaagcctcttcttcaagcagttaagaaaactagctgttttggggctgggtgcagtcgctcacacctgtaatcccagcacattgggaggccaaggcaggaggaccacttg

SEQ ID NO: 304615 - DNA, 634 bp, Homo sapiens
gacctttccctccagaacacataactccagtttaatcatgagaagaaatcagacaaatttcaactgagggaccatctacagcatatccagccagctttcctccacactgtcaaggtcatcccaatgagggatgtctgagaaaccgctgcagccgagaggagcctccagagacataggaactaaatgtgatgtggcccacctgggacagaaaaaggacattcagtcaccactaaggaaatccgaataagctatggactttagttaataataatgggtcaaggacgctggttcatgagctgtaacaaatgcaccatcctattgggaaatgttaataatagaggagtggatgtggggcatatggaaaccatacaatctgccyaatttttctgtgactctaaagctgttctaaaattttaaaaaaatgaataaatgaaaaaaaccccgctccaatggaagtcctaatagttccttcacataaggcagtgaagtgccccacacaccttgtggtatgtgtacaacagcatgaaagcctcttcttcaagcagttaagaaaactagctgttttggggctgggtgcagtcgctcacacctgtaatcccagcacattgggaggccaaggcaggaggaccacttg

SEQ ID NO: 304616 - DNA, 634 bp, Homo sapiens
gacctttccctccagaacacataactccagtttaatcatgagaagaaatcagacaaatttcaactgagggaccatctacagcatatccagccagctttcctccacactgtcaaggtcatcccaatgagggatgtctgagaaaccgctgcagccgagaggagcctccagagacataggaactaaatgtgatgtggcccacctgggacagaaaaaggacattcagtcaccactaaggaaatccgaataagctatggactttagttaataataatgggtcaaggacgctggttcatgagctgtaacaaatgcaccatcctattgggaaatgttaataatagaggagtggatgtggggcatatggaaaccatacaatctgcccaatttttctgtgactctaaagctgttctaaaattttaaaaaaatgaataaatgaaaaaaaccccgctccaatggaagtcctaatagttccttcacataaggcagtgaagtgccccacacaccttgtggtatgtgtacaacagcatgaaagcctcttcttcaagcagttaagaaaactagctsttttggggctgggtgcagtcgctcacacctgtaatcccagcacattgggaggccaaggcaggaggaccacttg

SEQ ID NO: 304617 - DNA, 572 bp, Homo sapiens
caagagtagaggaggttttctcattaatcggcctggagagttgttgcccacagtgaagcgtggataattgccatttttaatggggttgatttagcagcaacaattttgcaattttctcttttccctggggctgtcacctgggcccctgcacacctgggaaagatggtgggctgctggggttggtctagctaccccttggggctcagccagcttcagggcagggcacgtgcycctcagaccacctggggacctaattagcccccagcagccgggccctaagtgttgtgaagggcaactgaagtcggctctctcccaggaagccaggttctccttctccacaacgtggcaattcctcactaccatggcctgtgcgcaccgtcctagctctgcggggaagggtaaggccgagccagagggtcccggtgtgctctctgggggaagcgcttagcggatgttgcctgtgtccttgcatggcctcgggaggctttgggaggcagggagcagcacggtgggctgagctgctgggacccgctggatgcctctccactttacatataaaatattttaataat

SEQ ID NO: 304618 - DNA, 577 bp, Homo sapiens
aggctttgggaggcagggagcagcacggtgggctgagctgctgggacccgctggatgcctctccactttacatataaaatattttaataatcatttcagtgttaaagaaagggttactcagtgagaatggaggattgaagccacacaggacgctgtgtgaggattcagtggactgttccggaatggtgtctgagtgagtgggaggagccttctttgctgcagggaagggagctgcccacccaccatgtccttgaggttagggtaaagtggccaagtggggcattgttcctccccaggcccagatgaaggtgtgggctcctcctctcttggtgacactcaggctcagccagtgcacagccgcttccccgtcctccttcttcttcaggacgccacccagtgcccctgggggcccaggtctgcaggtctatgccaagccatgyctgccctcctggtgcctccagggtacctgcaccttctgtggctccagtgggggccttcccatggccctaaggagcttggagtgtccaggacctctgctgcaaacaactgccttaggcctcccaggcctcacctgggg

SEQ ID NO: 304619 - DNA, 607 bp, Homo sapiens
cttctcgtggtccagcttagtaactccgtcatcgtgcagccccgtgacactgcttcccttggaaagattaaacaccctagcgtgtgggtcctacccttcagccatcccaaagtctgatgggaggtaggacacaggagaccaccaggatttctgtggccacttgatgacaacgaacctgtgctctccacattgaggtggtggagaagtttcaggatctaccccagtggcccctggtgtatgttttcccacttgggagacttgagtgaaccctgattcactccacagctgagttgctttaggggaaagagctactacccattagagaaaaagccctctctgttggagggaaattactttaaccattgaagggtaacgtcattcatccaggtaaaccttggagtcgaaaccctaatacctcattactgacagattccaagccagccggagatccggcagagtaaatattgatgtccacagccccagggagatttccaccagaataagcagtgggacctytgttcccgctctttgctcaaataccatcatgcagacattgccaccatccactgccccccatttgtaaaagcacagacttaacatatggaag

SEQ ID NO: 304620 - DNA, 607 bp, Homo sapiens
cttctcgtggtccagcttagtaactccgtcatcgtgcagccccgtgacactgcttcccttggaaagattaaacaccctagcgtgtgggtcctacccttcagccatcccaaagtctgatgggaggtaggacacaggagaccaccaggatttctgtggccacttgatgacaacgaacctgtgctctccacattgaggtggtggagaagtttcaggatctaccccagtggcccctggtgtatgttttcccacttgggagacttgagtgaaccctgattcactccacagctgagttgctttaggggaaagagctactacccattagagaaaaagccctctctgttggagggaaattactttaaccattgaagggtaacgtcattcatccaggtaaaccttggagtcgaaaccctaatacctcattactgacagattccaagccagccggagatccggcagagtaaatattgatgtccacagccccagggagatttccaccagaataagcagtgggacctttgttcccgctctttgctcaaataccatcatgcagacattgccaycatccactgccccccatttgtaaaagcacagacttaacatatggaag

SEQ ID NO: 304621 - DNA, 519 bp, Homo sapiens
tcagtattgaggcttcgaacagagtcattcaatagagaaactttataagaggaagctgaaatggcttgtgatctatttttaaatctgctgcttcctggttgaagagtttggttaactagtttatcgatgctttgttttatattcctcacctatgagatagagatgattagtcgtaacataattataacatacaactcaaaaaacaccaggatacactgccagtcagtgaaaaaagccatggtacataacgggtacataataaatgtttgttgaaataatgaaagttaaatgaaagcagagaaatatctgttttcaatgtgttaccaaaaatatatctgaacctgagagttaagtagctccagtaataacatttttaacatactttttattctttcaatagtcaaacaagtatcaagtacccaatatgtgcctrcatattgagaacatgagaacattgaggaaatacagcctaggacttgggatctagtggggaagacagacaattttttttaagcacta

SEQ ID NO: 304622 - DNA, 595 bp, Homo sapiens
taaaaattctgcaattgcttgaaataaggccgtttaccaaaaaataaccacctatgtaaatataaaagtgaaattatattgaactaaaaataacaaacaaaattatatgagatgtagctaaagcaatgcttagaggaaaatttgtcactttaaatatatacattaaaagaaagaagaaagactgcaaattgaacactaaacatccctctgaagaaataaaaataaaaaacagaaaattatgccaagcactgtggcttatacctgtgatcccagcrctttgggaggccaaggtgggaggattgcttaagcccaggcatccaagaccagcctaggcaacatagggagaccctgtctccacacaaaattttttaaaaatattagctggtcctggtgacacacacctgtggtccaagcatctgggaggctgaggtggatggatcgctcaagcccaggaggttgaggcttcagtgagctatgatcacaccactgcactccaacctgggcatcaaagaaagacatcttctaaaaacaaaaacaaaaacaaaacaaaaaaaacccacagctaattaagtccaaggaaagcagaagaaaggaa

SEQ ID NO: 304623 - DNA, 595 bp, Homo sapiens
taaaaattctgcaattgcttgaaataaggccgtttaccaaaaaataaccacctatgtaaatataaaagtgaaattatattgaactaaaaataacaaacaaaattatatgagatgtagctaaagcaatgcttagaggaaaatttgtcactttaaatatatacattaaaagaaagaagaaagactgcaaattgaacactaaacatccctctgaagaaataaaaataaaaaacagaaaattatgccaagcactgtggcttatacctgtgatcccagcgctttgggaggccaaggtgggaggattgcttaagcccaggcatccaagaccagcctaggcaacatagggagaccctgtctccacacaaaattttttaaaaatattagctggtcctggtgacacacacctgtggtccaagcatctgggaggctgaggtggatggatcgctcaagcccaggaggttgargcttcagtgagctatgatcacaccactgcactccaacctgggcatcaaagaaagacatcttctaaaaacaaaaacaaaaacaaaacaaaaaaaacccacagctaattaagtccaaggaaagcagaagaaaggaa

SEQ ID NO: 304624 - DNA, 549 bp, Homo sapiens
ggaccctctggggagtccaaggggcactgtcagtaaawgtgccccaacaacatggtaaaccagaatggccacactcaggaccgtagacacacacagagactgtcgttgtcattcatctagagtctaggtctccagtcagttgtgggtttatgggtgttcattacattattaatccatgcatatgtaaaatagggctatgcatggtcgaatgatgacagagattaataaactaaggaccagtactaaaacaattctctgcagcagaagtgcattttaaaaaattaacactcttattggtgaatccagctaaagatgggtttatgtcaccttgtacttctttatcatcatccttctgctctttattatataattttgtaatgttcacctctctctctttctctctctctctctctcattttctgtctctctttctcttcatactctaaatacaggcatttaaaccattaatagatctttcagatcgactgtcacattagaacccagactgccaaaccccaaaccacatcttctctttaatacatttacttc

SEQ ID NO: 304625 - DNA, 549 bp, Homo sapiens
ggaccctctggggagtccaaggggcactgtcagtaaatgtgccccaacaacatggtaaaccagaatggccacactcaggaccgtagacacacacagagactgtcgttgtcattcatctagagtctaggtctccagtcagttgtgggtttatgggtgttcattacattattaatccatgcatatgtaaaatagggctatgcatggtcgaatgatgacagagattaataaactaaggaccagtactaaaacaattctctgcascagaagtgcattttaaaaaattaacactcttattggtgaatccagctaaagatgggtttatgtcaccttgtacttctttatcatcatccttctgctctttattatataattttgtaatgttcacctctctctctttctctctctctctctctcattttctgtctctctttctcttcatactctaaatacaggcatttaaaccattaatagatctttcagatcgactgtcacattagaacccagactgccaaaccccaaaccacatcttctctttaatacatttacttc

SEQ ID NO: 304626 - DNA, 549 bp, Homo sapiens
ggaccctctggggagtccaaggggcactgtcagtaaatgtgccccaacaacatggtaaaccagaatggccacactcaggaccgtagacacacacagagactgtcgttgtcattcatctagagtctaggtctccagtcagttgtgggtttatgggtgttcattacattattaatccatgcatatgtaaaatagggctatgcatggtcgaatgatgacagagattaataaactaaggaccagtactaaaacaattctctgcagcagaagtgcattttaaaaaattaacactcttattggtgaatccagctaaagatgggkttatgtcaccttgtacttctttatcatcatccttctgctctttattatataattttgtaatgttcacctctctctctttctctctctctctctctcattttctgtctctctttctcttcatactctaaatacaggcatttaaaccattaatagatctttcagatcgactgtcacattagaacccagactgccaaaccccaaaccacatcttctctttaatacatttacttc

SEQ ID NO: 304627 - DNA, 589 bp, Homo sapiens
gagtcctcaaaaaaggcagtaagtgtaagacagaagcaaatttttttgtggagaacattaagagacacttgacccctgagagttcaagcttcaggctcaatagccagcagcttggctgacatctctactcattatccaatgagaattaaaacctaacacgtctaaaacacagctgcccattccccttccccagctggaccctgcagcactttcttcatctcagcaagtggccaatatacccttccagctgccaaccatgggtggcctctttctcctctttactctcacacttsatgtctgatccaccaaaacactcagttggcctgattcccacaacagacccagaatctgaccccttcttatgcctctacccacccaccccattcaagccaccatcctctcatctggactagtgaaggggtctcctggagctgttaccccgcgccctctaccatctcatctcaacacagcttatgttcaattttctgaccgatgcccacaggccctggacaatcaggcccttccattaactcctgacttcatttcctccttgctcccccttgcccatactgtgtgtccctcctggaga

SEQ ID NO: 304628 - DNA, 595 bp, Homo sapiens
gctcagccccaccagactacagccactccgatatgctgtttccctcttccccaggggacctccttcatcctttcccaggagaaagaccccctggctccaagctggacaatgrcatccatgacaccattgcaaactctaatccaccctaaacccaacaaacttccagatcaaatgcttctgctctgcactcccttcaccccgaaatcatccaggtctttgtggagactctgcattccaggatttcaatgatgtccccaacacaaatccatagtggacaaacagggagtgcactccaatatgctaattttccaagttagtgataagagataagcgtaaacctggatctgtcattatcaccttcttggacttcatcagccaaatgacagcctgaaaacaaagatgctttcagacaggcaaagagtagccccttaagaaggcagacaacaggacttggaacaggcaggccgcacctgcagtgccctgtgacttgtctgaggatcacagtcagtgaatctagaaccctccctccaacctgctcctcctagcccaggtcctgatccccattcaccttcaggaagccgagctaccttgctgt

SEQ ID NO: 304629 - DNA, 574 bp, Homo sapiens
ggctgtttggtacaagaggcccagctttcagcctatcttggcagtggacacgccttcccttccttactcagcttaatcacttctagcttttgatttaaagtgagagatatgtgactcttcctttcatttgaacacttagagaccattgcagggttattaaytggcctaatttcaatattgttttgtctcaggaaaaagggaggcacaaggagaggaagaaggatggggagtggctgattggtggagcagtctgaacacaacacagttattgagtatgtttatgatatcgtttggtttggctctgtgtccccacccaaatctcaccttgacttgtaataatccccacgtgtcaatggcggggccaggtggagatgattgaatcatgggggtggtttccctcatactgttctcatgatagtgagtgagttctcgtgagatctgatggttttataagtgtctggcatttcccctgctggcacttctcctgcctgctgctgctgccatgtaagatgtgtcttccacctcctgccatgattgtgaggcctccccagccgtgtgcaactgtgggtccatt

SEQ ID NO: 304630 - DNA, 605 bp, Homo sapiens
caattttcatctgctccacagaaacttctttctagtcagtgttctttacttaccatttgttttcctgttcattttattccttttcaagtagcaatttaaatatattctgtgcttatttgcttatccatttttaaaaattattactcatcttggaaggaggtgaactattcatgggccagccttttaaagaagtttaatgttggtaaggaccagggcagcatcctggcagacagacttctcctttattatcagcagatttccttaagatgataaatctttttggcaattacctctttccaaccaaagaaagcaacaactgcaagcctgcttctaacaggatctccccgactctgcctctccaaccaacagcttcctgcaaatatggccactgacatgtctcctcattcatccacctctcttctccttctccatrgtattatacagaatacggggagaattctattacaagctggcaggctcgactcttttgattccaaactagggatgtcagattttgtctcccatggtgaattgcctactcagaaaaaaactggggcttgaaagtcttctctgagctctgtggccacagccagtagtgttttgtc

SEQ ID NO: 304631 - DNA, 519 bp, Homo sapiens
tttacctttctcctgatatcttctaacttaaatattgtgaggtaatttcaacaatatttaaatattatgatataaagccaatgcatcttatgttacacaataaagggataagagaggggagaaaaaaagacacacacacatattcttaagaaaataaagaagaaatattcatggtaattacagtctttatttctgtaactggtcatgtgattgtagctggtatttgtaaccacctttttccagtgcccattctgaatttcctctgtcctcagcaagcacctcagctggttatgaatcttttcctggtggggtgacccaaaccttaattcctgaagagtctgggctatgagtcctgcctgcattcagttgctgtagttttccattgactttaatcataargcatgatcatactaagagacaccttggacgatctccagtattccagacatactcttccttatctccgttgtggaatagcagtctaacttcccctttgtaatccagagcaatcacccagcc

SEQ ID NO: 304632 - DNA, 612 bp, Homo sapiens
agtgcccattctgaatttcctctgtcctcagcaagcacctcagctggttatgaatcttttcctggtggggtgacccaaaccttaattcctgaagagtctgggctatgagtcctgcctgcattcagttgctgtagttttccattgactttaatcataaggcatgatcatactaagagacaccttggacgatctccagtattccagacatactcttccttatctccgttgtggaatagcagtctaacttcccctttgtaatccagagcaatcacccagccagcacagtaaatcccttctttgcctgttgatttagagttatgaggagcccaaagtgtccaggttgcagtcttaacttccagttcaatggaatcattatgtcccytggtggaaccactccttccactagaactaaaacctctaggccttcagaacacaagtccatcagcacaggaagaaaaaaattttgctagtggtttactaggggtaataatgaatggtgccactcccatttccacctgtgagttttgaaaatgggagaaacagcctcatatattgggcactaattcagaaaatatacagagaaccttgcctcccagagaaccttgccccagc

SEQ ID NO: 304633 - DNA, 591 bp, Homo sapiens
aaatctgtatctagattaagtastcagtaataacaaaatgctgtctctttcataagggaagcagtccaacgtaatcaacctgccaccaggtaactggcttatcactctggggagtgatgccataccaggggctcagtgttggtctctgctgctgctgcattgggcactcagtagtagtcctagccaggtcagtcttagtgcatggggagtccatgttgctgaacccatgcatagcttccatccctgccgccatgaacacttttctcatgagcccattcagtgataacgaggtggctggagaaagaggctgactcttctccagagaatgggtcatcttatctttttcattattgaaatcttgatcaccctggcaaaaatgtacagatatttgtgtcccaagtgaagggtggtgacttgcatgctcaactttatggcttggtgggtgcatatcattgagaaagaatgagattcacttatgtttgcctgccttgagtagatgggggtgtctgatatgatgtcatagatgggagcttaagaaaaataacttcctaaatggctgccttttagcaagggctggaaagactggcaaga

SEQ ID NO: 304634 - DNA, 591 bp, Homo sapiens
aaatctgtatctagattaagtagtcagtaataacaaaatgctgtctctttcataagggaagcagtccaacgtaatcaacctgccaccaggtaactggcttatcactctggggagtgatgccataycaggggctcagtgttggtctctgctgctgctgcattgggcactcagtagtagtcctagccaggtcagtcttagtgcatggggagtccatgttgctgaacccatgcatagcttccatccctgccgccatgaacacttttctcatgagcccattcagtgataacgaggtggctggagaaagaggctgactcttctccagagaatgggtcatcttatctttttcattattgaaatcttgatcaccctggcaaaaatgtacagatatttgtgtcccaagtgaagggtggtgacttgcatgctcaactttatggcttggtgggtgcatatcattgagaaagaatgagattcacttatgtttgcctgccttgagtagatgggggtgtctgatatgatgtcatagatgggagcttaagaaaaataacttcctaaatggctgccttttagcaagggctggaaagactggcaaga

SEQ ID NO: 304635 - DNA, 591 bp, Homo sapiens
aaatctgtatctagattaagtagtcagtaataacaaaatgctgtctctttcataagggaagcagtccaacgtaatcaacctgccaccaggtaactggcttatcactctggggagtgatgccataccaggggctcagtgttggtctctgctgctgctgsattgggcactcagtagtagtcctagccaggtcagtcttagtgcatggggagtccatgttgctgaacccatgcatagcttccatccctgccgccatgaacacttttctcatgagcccattcagtgataacgaggtggctggagaaagaggctgactcttctccagagaatgggtcatcttatctttttcattattgaaatcttgatcaccctggcaaaaatgtacagatatttgtgtcccaagtgaagggtggtgacttgcatgctcaactttatggcttggtgggtgcatatcattgagaaagaatgagattcacttatgtttgcctgccttgagtagatgggggtgtctgatatgatgtcatagatgggagcttaagaaaaataacttcctaaatggctgccttttagcaagggctggaaagactggcaaga

SEQ ID NO: 304636 - DNA, 523 bp, Homo sapiens
gtgggttctcccctgtgggagcaggggtaactgggtgggggggcagtttggtgagagyttctcccaagttcacaccagaaatgaaggaagcatgaggagaggacgatgctcactgccttgttccacctgcttctcctgccactttcgtgctcagactccaaagtttccctattgtcctgacaatcaaattcacattcttcatgacagtgtctgaggctcttgccaagtttccctggcttgtgccttcagctttgtcccaggctctcacttagtctccccattcccccacagggacattccaggctcaggggacctactgttgcctcatggctcagcaccccctttctgacctgcactattttgcacatgctattcctccttcttggaatacccttctcgcctctgtggatatcagaattattttcatgttcaaaataaaagttattatctctaaaatcttttcaggctattgaactcatatttagtcacttactcctcagggttttcaatagtagtttctcta

SEQ ID NO: 304637 - DNA, 574 bp, Homo sapiens
tgggttctcccctgtgggagcaggggtaactgggtgggggggcagtttggtgagagcttctcccaagttcacaccagaaatgaaggaagcatgaggagaggacgatgctcactgccttgttccacctgcttctcctgccactttcgtgctcagactccaaagkttccctattgtcctgacaatcaaattcacattcttcatgacagtgtctgaggctcttgccaagtttccctggcttgtgccttcagctttgtcccaggctctcacttagtctccccattcccccacagggacattccaggctcaggggacctactgttgcctcatggctcagcaccccctttctgacctgcactattttgcacatgctattcctccttcttggaatacccttctcgcctctgtggatatcagaattattttcatgttcaaaataaaagttattatctctaaaatcttttcaggctattgaactcatatttagtcacttactcctcagggttttcaatagtagtttctctatactcttatatattgttttctgtcatttgacctttcttctagttggtctggt

SEQ ID NO: 304638 - DNA, 574 bp, Homo sapiens
tgggttctcccctgtgggagcaggggtaactgggtgggggggcagtttggtgagagcttctcccaagttcacaccagaaatgaaggaagcatgaggagaggacgatgctcactgccttgttccacctgcttctcctgccactttcgtgctcagactccaaagtttccctattgtcctgacaatcaaattcacattcttcatgacagtgtctgaggctcttgccaagtttccctggcttgtgccttcagctttgtcccaggctctcacttrgtctccccattcccccacagggacattccaggctcaggggacctactgttgcctcatggctcagcaccccctttctgacctgcactattttgcacatgctattcctccttcttggaatacccttctcgcctctgtggatatcagaattattttcatgttcaaaataaaagttattatctctaaaatcttttcaggctattgaactcatatttagtcacttactcctcagggttttcaatagtagtttctctatactcttatatattgttttctgtcatttgacctttcttctagttggtctggt

SEQ ID NO: 304639 - DNA, 605 bp, Homo sapiens
gtaactgactcatgtgtttatggagggtagaaaatcccaaatctgcagggtgggctggcacaggctggcatcccaggaaggagccggtgctgccattcaggtctgagggcaagttcaagtctgttgcagaatcccccttgcttagggaggtcagtctttggttgtattcaggccttccactgattggctgacgcccctcacatcatagaggataactgctttactcaagtccactcatttccatgtgaactttggccaatagcacccacacagaaacatccagaataatgtttgtcacctatcagggcactgaggcccagccaagtcaccacatgcaattaatcatcccctatgcttctaagtccccacactcctgactcaggcattctggcctctttgctgctccttgaacatcccaggcaggctcggcctcaggaccttggcagtggccatgagctctgctagaacacacttcctgcagataatmtcatggctcagccaacgtgtctatcaaatccttgaccagaagtcccattctcatggtggctaccctgaggatctgttgatgggcagcctgccctgacaccctgaatgccaatttgcct

SEQ ID NO: 304640 - DNA, 478 bp, Homo sapiens
gtgcttagcgtggtccccattgacagacagcaagaaagtaggcactgcagtcctacaatcacaaggaactgaattctgccaacagccacatgagcttggaagggaacccacttggaagagtgcagctccactgccaacctctttattgcggcctgtgagcctgagtacaggaccagctaagccacggccactcttggtggtgaaatgatgaatgtgtgttgttktaagtggctacatttgtggtgacttcttagtgagcaacggaacactagctcacgtaggaaagagtggatatttccgtgcttaggaaatctgtgcatttccagggtgactattctgctggacctggaggggtgtgtaggtctgtggatttaatcacctaggagggaccaggaagagtcaaacggccctgagtgcataccttccagggccagtgaagtgaccagcctctgagaagctcatgagaggcacaatgcaa

SEQ ID NO: 304641 - DNA, 573 bp, Homo sapiens
tccccccaccccgatttgtgtaactcttacagtcacacttgttctgtgggctttgtcctatttctcaggccttttacatggggacagcttttaaataaaataaaaattcctcttgcttcttacagattggatttgattaaatattccactgattaagggtaagcaaatgtcagcttcaatatcataaaaagagaaatgagagttcatacagcagcaaagcaaacaatccattttcatactttattagaaacatttattgccataatgactacattatattaagcaagcaggtggaaaggtgttccgtgcatgatatcttcaaatawctttattttgaagatcttatccctccagtatttagacagatgttttattccctctaccagagtgagggcttgagttgctgtgattttagctcctccataagcactcgatgatcatggcctattcttgtgtttcaaacagtgggagctcattcaatgcactgcacaacatgaggtgctgtgggtacaaatagcagaactcactgggcactgctcggtcttcttccaaaatctttggctcacattctaa

SEQ ID NO: 304642 - DNA, 470 bp, Homo sapiens
cacaggcgagccctctgctsaaaccaaccagactctatcgaacataattgtaaatgcattgctgggttcccagaaagtaaagaacatagccagagccccaaaaatgtgagctgaaatcaaagcagtgggagaaggaggcctatgcggagaggaaatctatatgtgtgggccaagggatggccagggtgctaatgtcagcattgcacttctaggactaagctttggttcactgacaggatggaggagctgaaactaacacttatagattcaggctgagactctggggccaggctaaaatttgtccaagtcagtggtggttcatggttcccaacacaagcaaaatctaatgaaaatcttctatagaaaaaaatatacttaattagaccaccagtattttcaatgagtaatatctataaaatatgaattcacaatcaaacgtttctcatgcatacaaggaaacaagtcaccat

SEQ ID NO: 304643 - DNA, 567 bp, Homo sapiens
gaaacaacccaatgagatctgtaacacataaaattgacaatggtttcatatccaaaatgcatcaagaattcctctggatcactaagacaaagacagaaaaatgggcaagaaacttgaaggtgccttttataagagtttatccaaatagccaatgaatatagaaaaacttctcattctcattagtcatcatagaaatttgaattaaaacccaacagatgatctgtacactcaccaaaatggctaaagttagagactgacaacaccaaatgttgrcgaggacgtagagccactagaactctcacacattggtggtagaagagtaaatcaagtaagtcgctttgaaaaacaatttggcattatctactaattggatatatgcatgcactatgaccccaaatttcattctggtatatttccaacagaaatgtttgctcatgtgcaccaaaaaaaaagtgtctaccaatgttcatagtagcaatgtttgtgaaaaccaaaagcttaccaaaggaggaaagtatatgcataaattgtagcatattcatactttggactctatagctttacaaa

SEQ ID NO: 304644 - DNA, 567 bp, Homo sapiens
ggcatggtgatgggtgcctgtaatcccagctactcaggaggctgaggcaggagaattgcttgaacccgggaggcagaggttgcagtgagctgagattgtgtcagtgcactccaacctgggtgacagagtgagaccctgtctcaaaaaaaaagaaaaataaaaaatttactgatwatagatagattcatacaatggattatctatagctttaaagtgagcatattaatgaacagatactttgcaaaaatatgaatgacacaaataaatgaaaaagggatcagtctcattagtagtcaacataactaaggtggcaatgagaagcattttaccaccaaatttgcaaacctaaggaggtctgataacatcaagtctcgggaaagctgggaatcgataaaagatgttatatattgctggtagaggtgaaaattgggacaaccgcttaggaaaaaatttggcagcatcaggcaaatttggggatttgcaggtcctatagcccagcagatctcatgatgggtacacaccccagtgaaatctttgcatattttgcatatgttcacagcagcttta

SEQ ID NO: 304645 - DNA, 567 bp, Homo sapiens
ggcatggtgatgggtgcctgtaatcccagctactcaggaggctgaggcaggagaattgcttgaacccgggaggcagaggttgcagtgagctgagattgtgtcagtgcactccaacctgggtgacagagtgagaccctgtctcaaaaaaaaagaaaaataaaaaatttactgataatagatagattcatacaayggattatctatagctttaaagtgagcatattaatgaacagatactttgcaaaaatatgaatgacacaaataaatgaaaaagggatcagtctcattagtagtcaacataactaaggtggcaatgagaagcattttaccaccaaatttgcaaacctaaggaggtctgataacatcaagtctcgggaaagctgggaatcgataaaagatgttatatattgctggtagaggtgaaaattgggacaaccgcttaggaaaaaatttggcagcatcaggcaaatttggggatttgcaggtcctatagcccagcagatctcatgatgggtacacaccccagtgaaatctttgcatattttgcatatgttcacagcagcttta

SEQ ID NO: 304646 - DNA, 567 bp, Homo sapiens
ggcatggtgatgggtgcctgtaatcccagctactcaggaggctgaggcaggagaattgcttgaacccgggaggcagaggttgcagtgagctgagattgtgtcagtgcactccaacctgggtgacagagtgagaccctgtctcaaaaaaaaagaaaaataaaaaatttactgataatagatagattcatacaatggattatctatagctttaaagtgagcatattaatgaacagatactttgcaaaaatatgaatgacacaaataaatgaaaaagggatcagtctcattagtagtcaacataactaaggtggcaatgagaagcattttaccaccaaatttgcaaacctaaggaggtctgataacatcaagtctcgggaaagytgggaatcgataaaagatgttatatattgctggtagaggtgaaaattgggacaaccgcttaggaaaaaatttggcagcatcaggcaaatttggggatttgcaggtcctatagcccagcagatctcatgatgggtacacaccccagtgaaatctttgcatattttgcatatgttcacagcagcttta

SEQ ID NO: 304647 - DNA, 567 bp, Homo sapiens
ggcatggtgatgggtgcctgtaatcccagctactcaggaggctgaggcaggagaattgcttgaacccgggaggcagaggttgcagtgagctgagattgtgtcagtgcactccaacctgggtgacagagtgagaccctgtctcaaaaaaaaagaaaaataaaaaatttactgataatagatagattcatacaatggattatctatagctttaaagtgagcatattaatgaacagatactttgcaaaaatatgaatgacacaaataaatgaaaaagggatcagtctcattagtagtcaacataactaaggtggcaatgagaagcattttaccaccaaatttgcaaacctaaggaggtctgataacatcaagtctcgggaaagctgggaatcgataaaagatgttatatattgctggtagaggtgaaaattgggacaaccgcttaggaaaaaatttggcagcatcaggcaaatttggggatttgcaggtcctatagcycagcagatctcatgatgggtacacaccccagtgaaatctttgcatattttgcatatgttcacagcagcttta

SEQ ID NO: 304648 - DNA, 524 bp, Homo sapiens
agccacacgggtcattattgtgtttgctgaaagactgcctggttatttcactgaatggatgctgcagctcttgtgtcaggttttatatagctaatttaattgytgccaatggcaacagcagggggtcatgtcagcgactgatgccatttatactgctgaagtaaagtctgtatcagcatttccattagaaatctgtttaaaataatactgattgagcaaagaaacaaagggaaagaaagagggtcgaagagttttgaagataatgtagatgtgaccactcctgttcatatggatacagatggtacataagtttgttcattcattcattcaacaactatttactgaatacttcttagtcccagttactatgcatgatataaatgtttagcaaataatagtcctagatcttcatggagcttacagtctagagtggaagacaaatgataagtaaataatacataaataaataggtaattactaattgtgattaagaactgtgagagaaataaacagctgctgaaaaa

SEQ ID NO: 304649 - DNA, 515 bp, Homo sapiens
tattagccatctgcaattcatgtcaacttaaatacttgtattgaaaaccctctgacatctacaatgccatctgaaataattttttcagtgtttccaataacatttgttcattcattctgcctaaatttatccatgtttccctttaactcttctttattctctcttttaaaacccttattaatgaagagggatttgatagtacgcctagccaaagtaaaaagtgtatatttttccaacatggtagttttatgacattaattttatatgtagaataatatgggacatcttgartttatttatacacataatttttatattcaggccattgaaaatgagcaaattttatatacttctttcaaaccatgtatcaactgtacataaactgccttataaaattaagttactgaaatcaaggctttacataaaaacaaggagatcatgtcctttgcaggaacatggatggagctggaggccattatccttagcaaactaacataggaacagaaaaacaaata

SEQ ID NO: 304650 - DNA, 499 bp, Homo sapiens
cacacactggggcctgttagagggtggagagtgggaggaaggagaagatagggaaaaataactaatggatactaggcttaagacatgggtgatgcaataatctgcacaacaacccccatgatacactcttacctatgtaacaaacctgcacatgtacccatgaacttaaaagtttgaaaaaaattacaaataaamataaaataaaaacctgcttgtgagagaggccaagtggagcactttctaaggcaacttggaaatgtgccctgggcagctatcctcactttgccttaagtaaactatttaaaattatattttgtgcctcagcttctctatttaggtaaatattttggacatctttttgatatgttcattgattactggatttccacttttttgaaatttcatttcctgccccttaccaacttcaagtttgaggcactaatgcatttcttatcagtttttgttacctattggtacttgaattatataaagcctttat

SEQ ID NO: 304651 - DNA, 497 bp, Homo sapiens
taactctgctggcaaggctgtatacacttttacagtcatcataattaaaaagttttagtatgtggttttgtgttgcgacaccatcaatcaaagtccattttctgacatttgtagcagaggcaatatgttccacataggttatttctggaattgtattgcttactgtaatagagtcctgtcatgtagctctattgcaccaacttcacctgctctgctgcagctgcctgtgctttgtccacttgtataatctctcaagcgtgcacaaagtagaccgatggagaaggaagagaatttttttaagaattatattttattgaccaatatgtacaaatctaaatttatttctctggatagaatytgaatactaaaacatcaatcttctagatctcttagtttatttagactatatgcctgatgtaactggccttcagaaaaccttaatagtttttgtatttcctttcattaattacttaataatcaaaaaaaccttatggaca

SEQ ID NO: 304652 - DNA, 638 bp, Homo sapiens
ggtcaagacaaagatatattcattcattctgcatatacttattgagcacttgttatgtagcaggcagtggccaaggccctgactgtgtagcatgtgccaaagctttgaaggcagaaagaaacttagcatgatcaaggaacttagagaaaactactggggccagagctcctaagtgagggggagggtggcataagattaactgggaagatagaccaagttcagattgttttgggcatgaaaagtagtttaggctttattctttgtgtaacagatctttccgttcaagctcagaaattaagtactcatatattcctagttgttcaccttatttattccctcatcttgtcgtcttaataactatttaatagttatgaatagtttatgaacagatacctggttctagtacattaacatttaacttcaaaggcatataactaagaactgctagtctgaggaataaaaaacaaacccactagtcaggagraaaatatctgcaagcgcagaaaccatgtgtaatttttcttattgttgtgtctccagcttattgtgcagggcctggtgcatagtacatactcattaaatatttgaccataaaatcaaactatcggcacatcgttgtataacatttagaaactata

SEQ ID NO: 304653 - DNA, 411 bp, Homo sapiens
aacaggaagcaagaattttgctagtgggctactaggggtaatagcaagtggttccactccatttccaccccttgattcctggacctgtaaatcctggctgtaggagaaacagcaccatatattggttgctgattcattytagtaactactattaaagctttttacctattggtgttcagtccagtatagtttaagaagtatctattgattgcttatgtaaacagtactgatcaggttattgtaaaagcattagaaacttgtctcttctcccatgagcattgagtcattgacatttgaatcatttactctggttgttaagtagactcttactagtgcaaacatagactagactaagccatttgacaaaagtgtatacctctgcttcagttttaagatataaagtgatcactt

SEQ ID NO: 304654 - DNA, 486 bp, Homo sapiens
ttattaatccttcattgatgccttagtgttrttaatcctcattagttattattaatgatgcatatatgtgtctgtgttttctgcccaacttgagatgtaatataacgttgtggtcaacttgcctcagtgtgtgactttactctaatacttactaggattccagatttgggcaagtttccaaacttcttgtgcctcatcttcttaagctgtaaatgagataaaaatattacctttacctttgtcatagggtttttgaaaattaaaggagttactacatgtaaaacactataataatatctgtcacatagaaagtactcagcactggcaaaaaccaaaaccacatctttcctccatatttccccgtctgaaatctgatttgtaagctccttgataacggagatagctatcctttttaatattccccatagtgtaacacagaaggtactgaataaaaacctcttaaatgaatgaaggtattttttattg

SEQ ID NO: 304655 - DNA, 486 bp, Homo sapiens
taattcttcagtcttgcatcttagatctttccctctccattgactccttccccgtagcttgcacacatgatcaaattttaccccatattaaaaaataaaacaaaaaacctcaagaaccaaaatgtccttgcccttsttcctgcctgcacattgtcagttgttgccttctctgctttcttacactgccaaatttattgtaaaagaatcactgccacttaatatattttaagtgcttgataaagccatcttgtttctctctcatttctcaaacatagtgtgcatcagatctcactagtccattgacagatggaaagatattctccccaaatatttaagcctcttttctctataattagcctaccatctaactagctacacatactattttggttcacaattttaattttcccctctttatctcccctgcttcccacaactaacttctgttgattactgtaagttttaggtcttctctccagttgttct

SEQ ID NO: 304656 - DNA, 497 bp, Homo sapiens
aaaaaaaatcagaaaaccaaagagcaaggtaaccaatttcatggtttcctaaatggttttcagtgtagtttggagcagccctgtgagagcttcatgackatagctcctgtcacctaccttgtcccatatttcaagtcaagattatacagtcatgttttcattcatgcccagtgacttttatcctccctatgtgaagatttgtgtatagaatacactgggaatccagacaccttgattccaatcccaaatttgctagtaaaaggaaaaaaaaagaaacacattttttgtactcacagcacttctgacaccaaatgtgtgcgttttttcacaccaacaactaattctccagctctttgaacgccagctgagtgtccaacaattcaattcatttctgatactaaacatccagtgttagcacagacctgactgattaagagctcaatcctgcaagactgctcccactttagatgccaatcacaagtcaaggcctcctacac

SEQ ID NO: 304657 - DNA, 572 bp, Homo sapiens
ctggagggaaaactataaggaagccrtcattgtattccaagcaagaataaagatcttttgctttttattttataaaaaaagttggtgtttcctttgaaagagcaagatcctctgaggcatttctaattttacttataaaagctccctcttcccatttcagaagtattattcttccttcaagaagctgaggagattaaaatctttcacagtgtaatagtctgttcttgccttcagaaagtaaaatatgaaattttcatactctacagtgctaacttactagcataaggaaaatagcaagtgtttgttttaaaataaaatgtcaatgtaataataaaaaaaatgagttcttctgtgaccttcttagcccaataagagactcagatagtacacactgtatccctggatgatatgctcaatattatctattaaaagtatatttagagtatatatttcaagattaaatacatttatagttcatcttaaaaaataaatgtacagtaatcaagaagactgagagaaaggaaaaggtgggttgttctaccaaagagcaaatcttactctaaagccacaaa

SEQ ID NO: 304658 - DNA, 627 bp, Homo sapiens
gaatttatttttaggtaaaacctccttaaaatagtttacattataatgttaatgtcacttctgaaaatgttcagtatatactctttattagyccaaagtaatatttttttaaaaaaatcttgatatatctgagaggtaaattttggggtggttaattcttgatctaaaaaatgataattaaaaaaaaaatcctacaaaggcaaaacactttatattctgaaagggaacttgtacttaagaccatgacagcagttgtactttttcatttctgacttttcctgggcaggcagtaagatatttttggcacaaatgttattaatttttgacaagtgaatcactctgtccttaaacatagttgtttaaatagttttactggtttcttttcactctaataagatcaataatttgttctgctgctatgatgttattgctttttaatttgatacttttaacaataaaagtctttgagtatttttatgtatcaatgggttacaaagacttgaaatggatttgtatgaagcagtgtaattacagttattgtaaatcatttaaaagaaaagtgatacatccattcagcagttttttgcttaaaatatttgacatttggagtataactaacaaataata

SEQ ID NO: 304659 - DNA, 627 bp, Homo sapiens
gaatttatttttaggtaaaacctccttaaaatagtttacattataatgttaatgtcacttctgaaaatgttcagtatatactctttattagcccaaagtaatatttttttaaaaaaatcttgatatatctgagaggtaaattttggggtggttaattcttgatctaaaaaatgataattaaaaaaaaaatcctacaaagscaaaacactttatattctgaaagggaacttgtacttaagaccatgacagcagttgtactttttcatttctgacttttcctgggcaggcagtaagatatttttggcacaaatgttattaatttttgacaagtgaatcactctgtccttaaacatagttgtttaaatagttttactggtttcttttcactctaataagatcaataatttgttctgctgctatgatgttattgctttttaatttgatacttttaacaataaaagtctttgagtatttttatgtatcaatgggttacaaagacttgaaatggatttgtatgaagcagtgtaattacagttattgtaaatcatttaaaagaaaagtgatacatccattcagcagttttttgcttaaaatatttgacatttggagtataactaacaaataata

SEQ ID NO: 304660 - DNA, 231 bp, Homo sapiens
attgaaagagagagtgctattattaatgtggggctttgggatagtttcctcaaaatgtaaacacaagtaactggcttctttttgttctwacagtcttaacatcacatactaaaaatcgtttggtatgtgctttctttgtggagaattctatgtaacatggtaagagctggtagtaataataaaataaatattagtatgtctttcttttccccctaaaacctggaaaaagaa

SEQ ID NO: 304661 - DNA, 512 bp, Homo sapiens
aaattaatgtaaatgtgaatgcacatgacatatatattatatatgcatctggaaaaattaacatgcatatttaagggtgaataaatcagaaaacagggtacacaacgaatgatacctggattttctgtgcatggatgcatgaaagatgtagattttaaatagtttacttaggatatagtattgaattaggggaatatttttaaaccacttcattgaggtatgcttgatagacaaaaggctgtatataattaatgtctacatcttgatgagtttagggatacatatatacttgtgaaactgtcagtaccatcaacatattcatcacctcccaacrttttcttttgcctcattacaattttattgctttttgtacttgtttattggtaagaaccctttaacataagatctactctcttagatataaaagagagtattgttagctgtagatactatgctgtatagtagatacccagaacttacttatcttgcataactgaaactttgcacagttt

SEQ ID NO: 304662 - DNA, 560 bp, Homo sapiens
atatactttcaagtgttagacaaagtttccattgccgattttctcaatattcatgtcataagataattagaaggctgaataagagtgaacttgaacctttaggttaatcaaaagccttaaaaaacaagttaaaggggccaggcgtggtggctcatgcctgtaatcccagcactttgggaggccgaggcgggcagatcatgaggtcaggagatcgagaccatcctggctaacatggtgaamcctcatctctactaaaaatacaaaaaaaaaaaaaaaaaaaaattagctgggtgtggtggcaggcgcctgtagtcccagctactcaggaggctgaggcaggagaatggcatgaagccgggaggcggagcttgcagtgagccgagttcgcaccactgcactccagcctgggcgacagagcgagactccatctcaaaacaaacaaacaaaaaacaagttaaagtaactcttatattcttagctttttaagatatataacttcttcttctccttcttaaatgaggtgtgttttcatttgccttagcagcttttaaaatataaat

SEQ ID NO: 304663 - DNA, 560 bp, Homo sapiens
atatactttcaagtgttagacaaagtttccattgccgattttctcaatattcatgtcataagataattagaaggctgaataagagtgaacttgaacctttaggttaatcaaaagccttaaaaaacaagttaaaggggccaggcgtggtggctcatgcctgtaatcccagcactttgggaggccgaggcgggcagatcatgaggtcaggagatcgagaccatcctggctaacatggtgaaacctcatctctactaaaaatmcaaaaaaaaaaaaaaaaaaaaattagctgggtgtggtggcaggcgcctgtagtcccagctactcaggaggctgaggcaggagaatggcatgaagccgggaggcggagcttgcagtgagccgagttcgcaccactgcactccagcctgggcgacagagcgagactccatctcaaaacaaacaaacaaaaaacaagttaaagtaactcttatattcttagctttttaagatatataacttcttcttctccttcttaaatgaggtgtgttttcatttgccttagcagcttttaaaatataaat

SEQ ID NO: 304664 - DNA, 560 bp, Homo sapiens
atatactttcaagtgttagacaaagtttccattgccgattttctcaatattcatgtcataagataattagaaggctgaataagagtgaacttgaacctttaggttaatcaaaagccttaaaaaacaagttaaaggggccaggcgtggtggctcatgcctgtaatcccagcactttgggaggccgaggcgggcagatcatgaggtcaggagatcgagaccatcctggctaacatggtgaaacctcatctctactaaaaatacaaaaaaaaaaaaaaaaaaaaattagctgggtgtggtggcaggcgcctgtagtcccagctactcaggaggctgaggcaggagaatggcatgaagccgggaggcggagcttgcagtgagccgagttcrcaccactgcactccagcctgggcgacagagcgagactccatctcaaaacaaacaaacaaaaaacaagttaaagtaactcttatattcttagctttttaagatatataacttcttcttctccttcttaaatgaggtgtgttttcatttgccttagcagcttttaaaatataaat

SEQ ID NO: 304665 - DNA, 497 bp, Homo sapiens
ctgctggtttattactgcaggggtaccgcaattctgcatcctactcctaaacacaatgtttctttacctgagtcttcatattttaattcctttaaaaatcaatctgattttagataattctattgactagataatcctatcaataggaaaaatgttttcaataaaatttaatttttttaaattctgagattatttcaaaatgattttctgaagctaacattaaactctcctaacctgatattttgcctttatagtggactctattagaatgctggaactgaaattataccctttcatgsttcagtgtgaaagtgactatttaggccatttgaattgaaatgattctcacccatagttcaaattaatacagtggaatggatttatattatttgactcctttgtacccaaatttagatacactttacataatatcatgtctcttgaaatgtaattgcattcaaataaaagcctgatattatacagttattctacactga

SEQ ID NO: 304666 - DNA, 590 bp, Homo sapiens
gagacacatttgccatgaagcttaagttcaggacccctcgctagcatgggcatctcccctggaatgtatccatatggccatatgtttctacaaaggctgcaaaggtgagattaaggtaagatcgtttgactacaattcctttccactctgattttcttccttacacttcccttcatgttaatacgatgttagcatgatggatataagtggctgaaagcatttttggggtctgaataagaggaagtagagctctgaatatatttagtttgggtttagtgggatatatttatgtggtttctaggctgtccatgtgtagttaagttatcattagccatcccagtagaggatgscttccaggaatactcctgcccactgtctgagtcacctgtggtggtgacgtaaaggtgcagaaccaaaggtcatctcatatatgaatgtgttctatggcatgcagaaccaaaagtatgtggaagtggataagaaacaaggtttgaaattatggaaccagaagctagtctgttgaaaatgttttgagtcataagatatgtgaaattataagcaaaagatttgtttctcactagaaattctct

SEQ ID NO: 304667 - DNA, 585 bp, Homo sapiens
atgtatagaatgatttggcgcaaaaaaataaaagtcctcaaacggtgmactagatcattcttcttgttcacagaccagagcagtaaataagactcgacagaatgaggaagaataccatttcacactattccaaaaatgtctgtattatgaagctttttgttttttacatttacttattttactgttgctaatttttttcaaattagtatatacttcaggtaaaatattaaataaaagtcttttaataaaagctcttcttccctacaaatactcagtttcccattcttgtctctatgatcatatttagctaatttagcaattacatgggtttgaattcatttttttcaaattttggggtgattccttgatcgtctcccaacaatcaatgttgctttgagaaatccaatgacaatgctgagtttttcttcattgaaagcaatctacattttctctttggaaactttctttttccctagcatattacaatgtaatggttatatgcctttttcattcattttaaaagcattcaaggtgcccttttgatctagaaatctgccatagttagctcttatattgttttataaa

SEQ ID NO: 304668 - DNA, 598 bp, Homo sapiens
tctgcaggaagggaggcaaggataaaggcggcatgaaagttggagaaaaaatggatgacagccagggaatccagatagtagtgtctctacctgcaggccccagctccttattctgcctccctcatagcatctagagctattcgggctcttgcatagtgactgcaaatagtcagtctttcaatgtcatctccatgttgggcacagcatagcctgagctgcacagattgccagygcaggtgccccttgcaaagcccaatacagctgatgtcttcagtttggccaccacagccagccaggaatcccttgaggaatggggaggacaatagcgagccatcccagccacctctgctgttgactttgtcttccatgtgccgctgcaggcaatccagctggttctcgagaaatgccaggtccttaagcttaggcagagaatccttgtcatctgtcatcttccccaccaaacttctgaagagcactttctataagtcaaaagtaaggcagtcttagttttattctctatatttgatgtttggtgcactgcaaaagatggcatagcttagtaggatgttattttatttcagttgcaagataggaaggg

SEQ ID NO: 304669 - DNA, 567 bp, Homo sapiens
aacttgcaggtgaatcatgtgatcaattccaccatttaaagtcacctgagagacaattcatttgtgttttggagattctgacctgaccggtgccatgtggtaagcatttagtgccagccccaaacttgaaccagaaggtggtgggcttgggaaaaagagagtcagtattgtatgttctggagtgwttcttcaagcagactgagcaccaggtactgggcaagtgatgctcctgtgccacttggaacacattgaatagtgtggctatcatgttgtttctcatgtttctttagtaagtttcttcatcccatgtggtgttagaggattggcgcctccacccgcccccctcaacttcccgcatttatgctcttgagactgactaataagaatttgatgcctaagtttgttaggaaaacggaaactacagtattttctttcatattgttttatgggttccttgcatttttgcaacatgctgtgggaaaatgtcaagctggtgaaagcaaaatagtaaaacttttgtcttaagattcttggaacccatgatgttaaatcatcattttagtgact

SEQ ID NO: 304670 - DNA, 567 bp, Homo sapiens
aacttgcaggtgaatcatgtgatcaattccaccatttaaagtcacctgagagacaattcatttgtgttttggagattctgacctgaccggtgccatgtggtaagcatttagtgccagccccaaacttgaaccagaaggtggtgggcttgggaaaaagagagtcagtattgtatgttctggagtgtttcttcaagcagactgagcaccaggtactgggcaagtgatgctcctgtgccacttggaacacattgaatagtgtggctatcatgttgtttctcatgtttctttagtaagtttcttcatcccatgtggtgttagaggattggcgcctccacccgcccccctcaacttcccgcatttatgctcttgagactgactaataagaatttgatgcctaagtttsttaggaaaacggaaactacagtattttctttcatattgttttatgggttccttgcatttttgcaacatgctgtgggaaaatgtcaagctggtgaaagcaaaatagtaaaacttttgtcttaagattcttggaacccatgatgttaaatcatcattttagtgact

SEQ ID NO: 304671 - DNA, 615 bp, Homo sapiens
catttttaatttggtgttctcccaattgaccctccccctttttcaccttgctttattggtgggggtgggaggtcttagatttttatagtagctctaggtgatagtataaaayggttgaaatggacaggggttttttggcacatccatggttccagtgattgagaatgaagaaacagacggcctatgttaagacctctaagaagtattcacattttgaggggaatgttttttcccaaggatatgagtccatctcatatttttaattgcatagagaagagtgtatctgaagaaaagcaaactgttatctctattctaaagtagcttcctggcacatttatggcagaagtgaatgcctcagttttaagggtcagaattcaaaaggcaaggagctggaacactttatattattatttacattttcttttatgaaagtagttatttctgttgcttctaggataaacatagaagtttacaatgtttgtaaacattcttggcaaagtcaacttaaaataaaactttgttttttacagttatctgcataaataagatgtactcccaataagtgattattaaagtaactaaggtctgatagttcttgttactttgaaatattcg

SEQ ID NO: 304672 - DNA, 501 bp, Homo sapiens
tagtactcttattctaatgaaatgatatagcctctcatcttatccttggtattactcctgcttgattttgcagagatcattatcatacttatatcatttatatatttatactgataagaaaaagaaggtcctaaacacctctgctttatcaaactttttcattctcctactmtgttttttgaagagagagactaaaataatgaaatggtggcttttgtctttttggaagtcaagacctcaacattttacagacatgaaatcatgacttaaacctatttcttgctagaggatatgatgatcatctactcgtgtactggagaaggtagtatttttttctaaaaaaactggggcctggtagacattttttaattattacaatggtataaaacgtaatttctgagaaggagtgaatgaaaacctatcggatgggaagggaggggccaagttgggactggggctattctgagcgctggatataagtgtccggttgcattttgctga

SEQ ID NO: 304673 - DNA, 501 bp, Homo sapiens
tagtactcttattctaatgaaatgatatagcctctcatcttatccttggtattactcctgcttgattttgcagagatcattatcatacttatatcatttatatatttatactgataagaaaaagaaggtcctaaacacctctgctttatcaaactttttcattctcctactatgttttttgaagagagagactaaaataatgaaatggtggcttttgtctttttggaagtcaagacctcaacattttacagacatgaaatcatgacttaaacctatttcttgctagaggatatgatgatcatctactcgtgtactggagaaggtagtatttttttctaaaaaaactggggcctggtagacattttttaattattacaatggtataaaacgtaatttctgagaaggagtgaatgaaaacctatcggatgggmagggaggggccaagttgggactggggctattctgagcgctggatataagtgtccggttgcattttgctga

SEQ ID NO: 304674 - DNA, 674 bp, Homo sapiens
gcatagtgatgtgaattttttatagtctcaccgttggaactgagcaggtggcttakgaagctagagaagtgcggtgctagaggagaaatacaggtggaccatctaattaaagacagaagcttggaggggagcttgagatggatcatgaaatctaaattaaaagcattgaaataaatttaagacttagaaggaccagaaggcaggagactcaagttatgtacttttcactgaagtactgggggaaagtctgtctgaaagggatcctttacatatcgattaaggtagtggagtctgttttgagaaaaggccttaaaatgcacatacacatggcacagttaatagtctggaggaacaaaagataacattcttttccaaataaatgactaccatttatcttgatttactctgtatccatctgtcaaggcctgagccagtgtcaagtgttctgtccattgtgcatgtgattgtctactctctctctttctctcctctctgtgtcttttataacttgtctttcattcttcagattagaacaagagtgcatcatcactattaatgttaaaaagtaaagaggtgctcacctagacaaataggcccaggaattttgagattaaaattatatatcagcttttgagaagggcagtggaaacagtgccagcagcactcagataggt

SEQ ID NO: 304675 - DNA, 582 bp, Homo sapiens
ttcatgcttggaggtgctaactgcctctcacacacaggtcttgcccgttgtggaatcatagcgctaggtatgtccatacagacactcattcagtcttgtggtattcttttttagctttttggatgtgtaccagaactgatggatttatgctagtgaacattgttctgtgagcctgggacaatggatgctggttggtgatccagttatattcaggaaactgaaacagagaaatgggcagctgcttttgtttggtgcttccgggtaaatgaacagagtagcttttcataagagccaagaatatttggtgttgtgtcatttgacttccccttttcccagtgcacacccctcccaacctgacctcatacttcttggtacatttgtactttttcttgatttttaaaatgttttcaggcaagatccttaattttgataccataaaataaggtttctttaattttctacatgccattggtattctcaaaaatcgatctatatatakgagaaaaggctttggaaatgtatgaaaatgaggtagacctgtcccagtttaaaaaacaaaacacaaacacaataaaactatac

SEQ ID NO: 304676 - DNA, 591 bp, Homo sapiens
tgatctcattgagatacgatctatttgtatgaactgtaagcttgtaagcttgtcatcatccttcatggtcctggggcaggcgcctggctagccactgtaacaggatgaggaaagagatacagcaagatccctgagacttcaattcagtgcagtgcaagtcaattcatttcaattcagctcactttaatccaatctaagaaatatttatggagtactttttaggcatagtcctgggcactggggctrtagaaatgaaaatttcatgaaaactgacattttggtgggggaaataacacaaatcagataaatttaagagaatgtggtaattactaactacatcagtatcagtatcaggaaggatgagatgcctcattcatccatccatttcttcatcaaaaatatttattgaaggtctacaccatgtaccaagtactgtgctagatgttggggtgatgatagtgaacaaaattaaagactttctacccttggggagcttgtagtcagtttggagagacactaactaatcaaatacccatacaaaaaaatgttaagttctacctttggtatgtactgttggagtgtggcccatgg

SEQ ID NO: 304677 - DNA, 458 bp, Homo sapiens
tattggcatcattaggaagattggaagaaaaagttttatctctcctttgccacagcaagtaaagccattagcatttatacacttgttcattttttacagacaggatctccctatgttgcccaggctgaggtgcagtagctattcacaggcacaatttaatagcaattttatgggcacaattttagagcacatgacagcctcgaactcctatgcttaagtgatcctcccaactcagcctccagagtatctgggaccactgcacctggctctcattgtattttcaatgtcttgttagaaatgtcattgcactgctgagactaccaaatgcaataaaagccattgccacagaagtattacgaaagtagttaatatggcttccgacaaaattaaatcagccacctctacaaatgagttgtgtstgtgtgtgtgtgtgtgtgtgtgtgtgtgtgtgtgtgtaa

SEQ ID NO: 304678 - DNA, 563 bp, Homo sapiens
gtattaaaaatttgccattgctgttcagcagtttttcacactgtggattatgtatttcaacatagctggcaatttctcattataatcgtgaagcagccatgaacactcagtgctggtgaataagaaagaaaaagtccaagaaacacatttttcaagcattctgctgcaaaatatatcaaactttccttcacgtaagttaaataggtaactcctgaaggcatttcagtacaaagattggcaagaatttaccctaaaaggagcataaagttggtttgtrgggtgggaggcagggagacaatgagagtactatagaggtgagatttggtatgtgtcttaaattaatgagaaaaagagtctttggcaaagcgttgacaacctctgttatcattttcattacttgatgtttgctatcccacaattaaaagagtgttctatttcctttcctattgattagtgtccagtagttgagatatacgtgttttcctttgaaaggtcattgattaatttttcttataaactctgcatgtgatcactttcgattgcttttccgggtgataacaatg

SEQ ID NO: 304679 - DNA, 618 bp, Homo sapiens
gctggcaattccaaaccatttaaaaaacaaaagttatggttattaatttttgaagccacaaaagcatgaatcaacattatagcagtgtcagtatctcagtaggaactagtttcaactgaactgtggcagcaaaataaatgtttgcagattgttttgacaaaatgtcatcctctgggcttcaatttatttgccaacagccttacttttgaaaaagtcttgctgcgcttgaagtttagaagaaaaccctccctctgaacattctggaccttaacaaataactctatctgcaagcatttgtaatgtggatctgcaaatgttttaataggaatggaatatgttgctaagagatgtgtctgtaaacatctgtttgacatatttcaccatggtggagattagggatccctggtacccctggtggtacaggccrtttttttaaaaacagaattcacatgtggtttttgaaaattacttatttatttattatgatttttaaaaatttaatttaaagttccagatacatgtgccaaatgcgcaagtttgttacacaagtaaatgtgtgccatagtagtttgctgcacctatcaacccatcacgtaggtattaagccctgcatgtatt

SEQ ID NO: 304680 - DNA, 618 bp, Homo sapiens
gctggcaattccaaaccatttaaaaaacaaaagttatggttattaatttttgaagccacaaaagcatgaatcaacattatagcagtgtcagtatctcagtaggaactagtttcaactgaactgtggcagcaaaataaatgtttgcagattgttttgacaaaatgtcatcctctgggcttcaatttatttgccaacagccttacttttgaaaaagtcttgctgcgcttgaagtttagaagaaaaccctccctctgaacattctggaccttaacaaataactctatctgcaagcatttgtaatgtggatctgcaaatgttttaataggaatggaatatgttgctaagagatgtgtctgtaaacatctgtttgacatatttcaccatggtggagattagggatccctggtacccctggtggtacaggccgtttttttaaaaacagaattcacatgtggtttttgaaaattacttatttatttattatgatttttaaaaatttaatttaaagttccagatacatgtgccaaatgygcaagtttgttacacaagtaaatgtgtgccatagtagtttgctgcacctatcaacccatcacgtaggtattaagccctgcatgtatt

SEQ ID NO: 304681 - DNA, 606 bp, Homo sapiens
aagaaactttttcaatcaaggaaggaagcaaaacatcctakgcctatgaatgagctgaggacatttctccaaaggaatcaatgaaagacaagaaggggtcatttggcctcaaatggacattttagaaaaaaaaaacagaatcttcagcaaactacttttgagtttttgttttattttgcatttatttcctctctgttttgtttgagactatttggagaaggtctggcaacttttttcactgactaatttatctagttttgtatgacctaaactaatttagaataaaagaatatgagagctggtaggaaatgtagagattatccacactgactcttcattccactgctcagtaacttgaagccccaaacattaaacgaagtgtccaaaagtcaaagagctagtaaaaggcacagctaggctagaactccacctcttgagtgttttctctgctctatcatgggatcaccctcatctctctcaggatgaaaaaaaattctacagagcctgataatcagaacttctaactcctctaaagatactaactgcatttgggaactgcacttctgacaactgaattacttaggaatgttgtgtttagtgaccccc

SEQ ID NO: 304682 - DNA, 606 bp, Homo sapiens
aagaaactttttcaatcaaggaaggaagcaaaacatcctatgcctatgaatgagctgaggacatttctccaaaggaatcaatgaaagacaagaaggggtcatttggcctcaaatggacattttagaaaaaaaaaacagaatcttcagcaaactacttttgagtttttgttttattttgcatttatttcctctctgttttgtttgagactatttggagaaggtctggcaacttttttcactgactaatttatctagttttktatgacctaaactaatttagaataaaagaatatgagagctggtaggaaatgtagagattatccacactgactcttcattccactgctcagtaacttgaagccccaaacattaaacgaagtgtccaaaagtcaaagagctagtaaaaggcacagctaggctagaactccacctcttgagtgttttctctgctctatcatgggatcaccctcatctctctcaggatgaaaaaaaattctacagagcctgataatcagaacttctaactcctctaaagatactaactgcatttgggaactgcacttctgacaactgaattacttaggaatgttgtgtttagtgaccccc

SEQ ID NO: 304683 - DNA, 555 bp, Homo sapiens
tccagtctttttacatttstcccactgcaagaattagggtggtcgggaatggtctcctcataactaagcaagcaatattatgcttcttctgaattcctgccccaattatttttaagttctgcttttaatgatttaaaagtacttgcatatgaactggtttcatgctcccccacagtgaagaagaggggcatgtatatctttatctgattcactatatatgtagagacagactagtgcagtgagccagccatttaccagctgaatgcccttgggtgcattactcacttctctacatttcatctataaaatggagttaataattatatctacctcatagggttgttatgaggcttaactaagctatttcttatcaagcattcagaacaaaactcagtgagcattacctattcttattgtagtgatggtagacgtggcagttattattatgagaacaatcacaaaattggagtgacatctttcacataatttattctggtatttaatgactgtcaaaaagaaccattctaaattaaccattctaaactaaaattatta

SEQ ID NO: 304684 - DNA, 555 bp, Homo sapiens
tccagtctttttacatttgtcccactgcaagaattagggtggtcgggaatggtctcctcataactaagcaagcaatattatgcttcttctgaattcctgccccaattatttttaagttctgcttttaatgatttaaaagtacttgcatatgaactggtttcatgctcccccacagtgaagaagaggggcatgtatatctttatctgatycactatatatgtagagacagactagtgcagtgagccagccatttaccagctgaatgcccttgggtgcattactcacttctctacatttcatctataaaatggagttaataattatatctacctcatagggttgttatgaggcttaactaagctatttcttatcaagcattcagaacaaaactcagtgagcattacctattcttattgtagtgatggtagacgtggcagttattattatgagaacaatcacaaaattggagtgacatctttcacataatttattctggtatttaatgactgtcaaaaagaaccattctaaattaaccattctaaactaaaattatta

SEQ ID NO: 304685 - DNA, 543 bp, Homo sapiens
ttgccagtgccctttgaaagctttatactcaggtaaccttcacagccacctggtgaggtatatttctttatcatcttacctcacagatcacgagaatggagacttagagcagtcaaattacttgcccaccatcaaaaagctcgtaagtaaagtatactgggatctaaacacaaactacgattccaaacctatggtcttaaccactgtataatagttttttaacaaattttgctttcttcatttgtaaaatatgggaacaataacactggcattatatttctcacaaggttcttacgaggattaaacataatcatggacatgacagcctttattaagtctatagtacatgacaaaygttatgtgttcccacttaagtccatgcacatttcctaacaccaactacttgctaggcaaagacacgcaatgcaatatgccaaaaagaagttacttctacatgttctgaactcagaaaagaaaaacaaaaaaaaatttttaaagacatctgtgaaaatgagtgactgctgtaataagagcagccatggc

SEQ ID NO: 304686 - DNA, 615 bp, Homo sapiens
ccatttgacaagggattaataaccagaatatataaggagctcaaacaactctataaggaaaaaactcaagtaatccaatttaaaaatgggcaaaagatctaaatacacwtttctcaaaagaagacacacagatggcaaacaggtatatgaaaaggtgctcgacatcatcgatcatcagagaaatgcaaatcagaaccacagtgagatatcggctcaccccaattaaaatggcttttatgtaatataaattagtataaccactatggagaacagtttagaggttcctcaaaaaaataaaaatagaggctggcatgatggctcacacctgtaatcccaacactttgagaggccaaggcaggtggatcacctgaggtcaggagttcaagaacagcctgaccaacatggtgaaaccccatccctactaaattaaaaaaaaaaaaaaatagccaggtatggtggcacatgcctgtaatcccagctacttgggaggctgaggcaggagaatctgggaggcggaggttgcagtgagtcaagattgtgccattgcactccagccggggcaacaagagcgaaaccccatctcaaaaaataaatataaataaataaataaaaata

SEQ ID NO: 304687 - DNA, 615 bp, Homo sapiens
ccatttgacaagggattaataaccagaatatataaggagctcaaacaactctataaggaaaaaactcaagtaatccaatttaaaaatgggcaaaagatctaaatacacttttctcaaaagaagacacacagatggcaaacaggtatatgaaaaggtgctcgacatcatcgatcatcagagaaatgcaaatcagaaccacartgagatatcggctcaccccaattaaaatggcttttatgtaatataaattagtataaccactatggagaacagtttagaggttcctcaaaaaaataaaaatagaggctggcatgatggctcacacctgtaatcccaacactttgagaggccaaggcaggtggatcacctgaggtcaggagttcaagaacagcctgaccaacatggtgaaaccccatccctactaaattaaaaaaaaaaaaaaatagccaggtatggtggcacatgcctgtaatcccagctacttgggaggctgaggcaggagaatctgggaggcggaggttgcagtgagtcaagattgtgccattgcactccagccggggcaacaagagcgaaaccccatctcaaaaaataaatataaataaataaataaaaata

SEQ ID NO: 304688 - DNA, 581 bp, Homo sapiens
aaactgctatagaaatgaaagcgttccacatgagaatagctcaatgtataatagaagaattacaattttatcaagtacccaaatggcgctgaacaaaatttggcatttataatggctgtccttgtgttcttgaaaagaaaaaaaaaaagcctggagttaacactcacccagacacatgaataagataaaacaatagggaatgtatttagttcctcctaaacagagattgtcaaccaggaagagagagtattgggtcatgagtaagattagtaactatagaatcagactacatgggttttaatcctggcacattcatttaccagctgcatatctttggttgatgttacctagtttctctaacgctgagttttcacattagcaaatagcctctacttcatcagggtgatgtaaaaagtacatgaattaaatagatgtraagtgcttagaaagtctggcatagtaagcattcaataaatgttaggtattattatgacagattccaaattgcagaaatacacatctttcttttctgaactatactatagaaaaatactatagaaaaatcaaactatagaatacta

SEQ ID NO: 304689 - DNA, 434 bp, Homo sapiens
tccattccattccattccattccattccattccgttccgttccattccattccattccattctattcggtttaattccattccattccattcsattgcaatcgagttgattccattccattccattccattccattccattccattccattcctttccattccattacggattattccattccattgattccattccattccattcccctgtactcgggttgattccattccattctttccaatccatgccattccactcgtgttgattccattctttccattccattcaagttgaatccattccattgcattccattccattcgattccattcgattgcactcgggttgattccattccattgcattccattccattccattccattccattccattccgttccattccattccattacattcggattgattc

SEQ ID NO: 304690 - DNA, 421 bp, Homo sapiens
ggtaaaagaaactacagagatcactagccagacctttcattttctatgtgaagaaaccaacccaatgcagccaagctaaccaacaacctgccagtgattttgtctaatcaactgcagagccaagaccagaactttcttttctgattaccagtggaaaatatcttctcctaatgctttatataggaattctattaaaagaacttgaaattatagactagttaaatataccagaaattccaaaggactattaaaaacatcacactttattctaaaactgtcctaaaataaatatgctagcaaaaayatgaatatgatttaattacttggttttattattgatttattcgtttacttttgtactctgagaaatgtgctctacaactgatttagatggttcaggtcatttttctctaagctgttg

SEQ ID NO: 304691 - DNA, 603 bp, Homo sapiens
ttaatcattgatgctgaaagtttctcacaccgtatataacacctcacttctctgaaacccatgacactaaactaatgacatttttctgatacaattacccaagagaaacaccatcacaacaatttttattacagactgtgatggttaattttataggtcaacttggctaggctatggcatccagttgtttggtcaaacaccagtctggatgttgttaagatatttttttagttgggatgaacatttaaattcattgactttgagtaaagcaggttaccctccataatgtgggtaggccatatccaatcagctgaaggccttaagagaaaaagacttgaggtcctccaragaggaaagaattctccctccagactgtctttggactcaagatttaaatattaactattgccagaatttctagccttacagcctaccctgcagatttcgggtttgacagcccccacaatcacatgaaccaattctttaaaataaatccctccttgcccccacccccctcggcttcacaccctgttggttctgtttctctggagaacactgacatatagatttcggtactaagaagtacagtactacaacagcaaa

SEQ ID NO: 304692 - DNA, 612 bp, Homo sapiens
tctctgttcattataaattatccagcccatggtattctgttttagtggcacaaaatggactaagacaatctcttacctccatatttgatcaattaccaaattgtacggattatgtctcaaaaaaaggatgtgtctcttgagtcagatctctcctttccatttccactgtattagtctttcacaggggcaatactatttccttgttttccacactagttcgtccttagcctctcctacttccccactgcatttgggataaaaatccaaatgcctaaatctggcacatgaagtccctcccaattgcaacccaacatatctctacaaacctcaktgcacttttgcaactctttccatttgtacatgttgttctttctaccttaaatcctttctccacctctctctgcctggtaaatacttcatctctcagttcaagtgtcatctaatctgggaagccatctctagcaccctggagagggagttgcttcttcctccaggcttcaagacactttgttcatagctataaccgagtgcttagcacataacactgaaattcatgagctcagaggcttgtctcatttccagatttgttgttatctttgtaacaacagcacc

SEQ ID NO: 304693 - DNA, 633 bp, Homo sapiens
tagactggcatttattttggatccacattggtatstgtttggatgcagacacatggataatgaaagaataagcagcttgataaaactgctgcaatatcctccctgaaacacaattttgacaaggctactctcttcttcctcgcaagtacatttctaatgttttcaccaaaagtctctaggaaaaaaaaccaatctaaagcactcactgtattacaagctttcagtaagatgcatgtattcagtgttctttttgataagcaaatcccttaaatttgttaacctgaaaaaaaaatctatccataaaaacgaacatagaaacaaagcaaaccaaaacgggaaggagatttcatgaaagaggcaggcgactggcatgcagcagtgggaggatcgcgccacagaaggtagaaatcctaaaagcacaccggttccctattactctgcttggtactatgagggggaaaagacatacacatatcagcactcccggtgagtcacaaaggaaaaaaaaaggcctgcaaggtgacactatgataaagggcaagcatgttttctttcttagattgcaactgccctcagcaacatttaccctgaggtattcctatgacaggtcaaggattttcggtcatttggaaa

SEQ ID NO: 304694 - DNA, 633 bp, Homo sapiens
tagactggcatttattttggatccacattggtatgtgtttggatgcagacacatggataatgaaagaataagcagcttgataaaactgctgcaatatcctccctgaaacacaattttgacaaggctactctcttcttcctcgcaagtacatttctaatgttttcaccaaaagtctctaggaaaaaaaaccaatctaaagcactcactgtattacaagctttcagtaagatgcatgtattcagtgttctttttgataagcaaatcccttaaatttgttaacctgaaaaaaaaatctatccataaaaacgaacatagaaacaaagcaaaccaaaacgggaaggagatttcatgaaagaggcaggcgactggcatgcagcagtgggaggatcrcgccacagaaggtagaaatcctaaaagcacaccggttccctattactctgcttggtactatgagggggaaaagacatacacatatcagcactcccggtgagtcacaaaggaaaaaaaaaggcctgcaaggtgacactatgataaagggcaagcatgttttctttcttagattgcaactgccctcagcaacatttaccctgaggtattcctatgacaggtcaaggattttcggtcatttggaaa

SEQ ID NO: 304695 - DNA, 633 bp, Homo sapiens
tagactggcatttattttggatccacattggtatgtgtttggatgcagacacatggataatgaaagaataagcagcttgataaaactgctgcaatatcctccctgaaacacaattttgacaaggctactctcttcttcctcgcaagtacatttctaatgttttcaccaaaagtctctaggaaaaaaaaccaatctaaagcactcactgtattacaagctttcagtaagatgcatgtattcagtgttctttttgataagcaaatcccttaaatttgttaacctgaaaaaaaaatctatccataaaaacgaacatagaaacaaagcaaaccaaaacgggaaggagatttcatgaaagaggcaggcgactggcatgcagcagtgggaggatcgygccacagaaggtagaaatcctaaaagcacaccggttccctattactctgcttggtactatgagggggaaaagacatacacatatcagcactcccggtgagtcacaaaggaaaaaaaaaggcctgcaaggtgacactatgataaagggcaagcatgttttctttcttagattgcaactgccctcagcaacatttaccctgaggtattcctatgacaggtcaaggattttcggtcatttggaaa

SEQ ID NO: 304696 - DNA, 633 bp, Homo sapiens
tagactggcatttattttggatccacattggtatgtgtttggatgcagacacatggataatgaaagaataagcagcttgataaaactgctgcaatatcctccctgaaacacaattttgacaaggctactctcttcttcctcgcaagtacatttctaatgttttcaccaaaagtctctaggaaaaaaaaccaatctaaagcactcactgtattacaagctttcagtaagatgcatgtattcagtgttctttttgataagcaaatcccttaaatttgttaacctgaaaaaaaaatctatccataaaaacgaacatagaaacaaagcaaaccaaaacgggaaggagatttcatgaaagaggcaggcgactggcatgcagcagtgggaggatcgcgccacagaaggtagaaatcctaaaagcacaccggttccctattactctgcttggtactatgagggggaaaagacatacacatatcagcactcccggtgagtcacaaagraaaaaaaaaggcctgcaaggtgacactatgataaagggcaagcatgttttctttcttagattgcaactgccctcagcaacatttaccctgaggtattcctatgacaggtcaaggattttcggtcatttggaaa

SEQ ID NO: 304697 - DNA, 546 bp, Homo sapiens
atattgtaatatttctaattttgttttccgttaagacagacttcatccttattgatattttcatttaaaattctccttgtaaactctcasattcacataagataacatagcaaacaacagctcttggggaaaggtgatttttttttgggaggactactattcccgttagaatgaggaacatttgttttcagcctcagaaatgctctttagagacaggcagagagaggcttctcttagatctgctgctcaaaggcaaatgaagttacaactgtgaccccagtttttaaataatcagcttgcagcctttaatgtgttttgtttgaaggtatgtgtggaaagtgaacatgggcttatccctttgtttcatatctttttaatttattttaattatgcaactaatattgtccaaaacgagattctcctgagatctcagatgggcattggtcaataatagttacccatttctatttcatgagagttccttatgtggtttggattaaaatttgtttagtgacacactggcaatgagaaaaaaagtcaagagtc

SEQ ID NO: 304698 - DNA, 586 bp, Homo sapiens
ttcaatgagattgaaatacacatttctttttttttaattttttaattttttttattttattatcattatactttaagttttagggwacatgtgcacaatgtgcaggtttgttacatatgtatacatgtgccatgttggtgtgctgcacccattaactcgtcatttagcattaggtatatctcctaatgctatccctccccgctccccccaccccacaacagtctccggactgtgatgttccccttcctgtgtccatgtgttctcattgttcaatacacatttctacactactaaaatggaagatacaattcctttttagatttttctccatacactgtatgaatttataaattttaaatatatatatatttaaacatctactgtgaataataggaaatttctgtataaacttgcactgttctccctttttgaatacaaattacttttggtaaaatacaaaagctgtccattggtagaaacagcccttgccaatttgcctctaggaattatttctctttcaatgtgatttatttggcaccaagcagtcccaggagtggcactctgctcagattttgatcagagatgc

SEQ ID NO: 304699 - DNA, 593 bp, Homo sapiens
taagctggccctggggcagccacggggcacaggcatggagtgcagggagtagagcccctgatataaggctgctctgggcagcgatggccttcctttgatattgttctgcactccaggacctatgatgggaagggcagccccagtgatctccacaatgctttctgagtcattcttaatccattgtctcgaacaataggtcctggatttcatttaaattaaattacagaaatacatagtccacccttccttggcawcacgaatcttactgctgttttctggaactttgaacaactccctctagggttggcgaaacagaattctttcacactgtcagaatgagcacctgggttcctggctccatgtgcatcttgaccttagtatgaaacatcctctgaggctggatcattccacatctgcactttatctcactcttctggcttgctttctcaaagacctattccttgctctgcatccttgagtcacttcttctatctttggttccagggctgagatgataaatgtcccaattatcttgattaatagcacctggcttccattgagatgacaatctatactaaccttcttatcaaata

SEQ ID NO: 304700 - DNA, 593 bp, Homo sapiens
taagctggccctggggcagccacggggcacaggcatggagtgcagggagtagagcccctgatataaggctgctctgggcagcgatggccttcctttgatattgttctgcactccaggacctatgatgggaagggcagccccagtgatctccacaatgctttctgagtcattcttaatccattgtctcgaacaataggtcctggatttcatttaaattaaattacagaaatacatagtccacccttccttggcatmacgaatcttactgctgttttctggaactttgaacaactccctctagggttggcgaaacagaattctttcacactgtcagaatgagcacctgggttcctggctccatgtgcatcttgaccttagtatgaaacatcctctgaggctggatcattccacatctgcactttatctcactcttctggcttgctttctcaaagacctattccttgctctgcatccttgagtcacttcttctatctttggttccagggctgagatgataaatgtcccaattatcttgattaatagcacctggcttccattgagatgacaatctatactaaccttcttatcaaata

SEQ ID NO: 304701 - DNA, 593 bp, Homo sapiens
taagctggccctggggcagccacggggcacaggcatggagtgcagggagtagagcccctgatataaggctgctctgggcagcgatggccttcctttgatattgttctgcactccaggacctatgatgggaagggcagccccagtgatctccacaatgctttctgagtcattcttaatccattgtctcgaacaataggtcctggatttcatttaaattaaattacagaaatacatagtccacccttccttggcatcacgaatcttmctgctgttttctggaactttgaacaactccctctagggttggcgaaacagaattctttcacactgtcagaatgagcacctgggttcctggctccatgtgcatcttgaccttagtatgaaacatcctctgaggctggatcattccacatctgcactttatctcactcttctggcttgctttctcaaagacctattccttgctctgcatccttgagtcacttcttctatctttggttccagggctgagatgataaatgtcccaattatcttgattaatagcacctggcttccattgagatgacaatctatactaaccttcttatcaaata

SEQ ID NO: 304702 - DNA, 568 bp, Homo sapiens
agactagaatacctgacagccagtcagctagcataaggcagcagggttagaagtgtgaaaattcctttgaaacacagcacatgaccagcatgaaacctgcaactctacatatagttaatatagaagtgaatccagtgtaatcacccaggcacttcaacatgataaacgtacgtcatgcgcattaccctttatactttcgatgacattttttctgtatcttgcttaattttctcagccaccctgagaagtgttagttctctcttatagataaggaagccctgatctgctgaacttttatccagtgtcttttcttttatccttgatttaaaagccagtctcttcagcaggagttagaggacatttagctctaatgtgataataaattgagagtggggcctcacaygatgcaaagaaaaaaagtgccagagttggagaaaatgacaaggtttccagatttgaccctgccactgactgtgtgctcttggacatgttgctctacaagcctgggtccaatgatttgggcttccaaccccctttcagagaacgtaggaaagagagtgtatgttaa

SEQ ID NO: 304703 - DNA, 579 bp, Homo sapiens
ctcaggacagctcggatgcagtgaataaatgccagtcctaagcacatgcaagccagcatggcacaaagccttcaattagcttgcaaaatagtctttgaaaaggtctgtttctgaagaataaaatgtgtaaaaattcgctttattttaatctgtggttataacaccgggtaaaagtacaagttttaaattatttatcatttcaaagtaaaactgcatctggcaatcagactcaatactaattaaataaaaataacagggtatttttatttgaaaagcttttatgggtaaggaaagtcaatggactttctcttctctgtagtataccccatcccccacactgtctgcaggggtcaggtgtacaaaggctgtgggtcatctctaataagtatgaacccatacggggtrcatgttatgtttgaggatacaaaagtataatttcttgatctttttttcattttagataggttgtaaagcactaagcacacacttcccaacactgttactctgtgggtctattctcagtacccaaaatagagcttgtagtggaatagatgcccagtaaaaatgtgttgagagtaa

SEQ ID NO: 304704 - DNA, 579 bp, Homo sapiens
ttgacctcatagccaccactgtagaggcctcacacgacattaacagcttccagttacacccagaatctcctcggtaacatagcccgttattaacctgtactatgcagatccctagagttggatacttttctaataagaatgaaaatttttcacaagattcatccagggctttttgcctttatattttttagattgaagactctcatgtcctaagtggttccaatattcaatacttgacatttttttgtcatttcttattatataagctttttaaaccttcattcacacattacttttgtcatttaaaacattccaatgtgaaaggtattgattaaatgcaattatcaatatgcagttatcaattgattcctctcaaatctctctttttcttgattcttgtttgttttccttttttaaatgcttaatttagagtcttagcagaaaaattttccataactacttttgcgaacagtttggtgtgcgatatgaccacatttggcctytcaaaaggatggtctttgaggcctgaaaccaaggttgttaataagggaatacaagtatttttcaccctagatcctt

SEQ ID NO: 304705 - DNA, 575 bp, Homo sapiens
gggcaattcatattcaatcaaccagacatgtggatgacatgatacccaatgtttggctyttcacaaccagtcatctaacaggctgaattctttacttttcacgcagatgtttgctgccctgtgggtacggtcaaaatgaaccatgtaaatatcgagatattttattcatcccattcagtgcttcgggccttagctacttgtttggctttgttctcataggcatcttttagatgaaaattacagaaattttccttttgagatgatatgtacgtacatatagaggcatacatcttccccaagcttccagcaattttgcattttaagggggcatgtggagggacaggtggggtgggcagggtgacccacggagaagtcatttttctacagacctattcaccaatttcatcttaaggcaattccacattgttgacttgagtacagagcttctacatgtaaagtactaaactagttacagtggagaggcagggataaattaaagcatagtttctgctttcaaggaacacatgatctagccagggagatagaggcaactaactatatcgccaaatagaaca

SEQ ID NO: 304706 - DNA, 575 bp, Homo sapiens
gggcaattcatattcaatcaaccagacatgtggatgacatgatacccaatgtttggctcttcacaaccagtcatctaacrggctgaattctttacttttcacgcagatgtttgctgccctgtgggtacggtcaaaatgaaccatgtaaatatcgagatattttattcatcccattcagtgcttcgggccttagctacttgtttggctttgttctcataggcatcttttagatgaaaattacagaaattttccttttgagatgatatgtacgtacatatagaggcatacatcttccccaagcttccagcaattttgcattttaagggggcatgtggagggacaggtggggtgggcagggtgacccacggagaagtcatttttctacagacctattcaccaatttcatcttaaggcaattccacattgttgacttgagtacagagcttctacatgtaaagtactaaactagttacagtggagaggcagggataaattaaagcatagtttctgctttcaaggaacacatgatctagccagggagatagaggcaactaactatatcgccaaatagaaca

SEQ ID NO: 304707 - DNA, 587 bp, Homo sapiens
aactgcttatttaacaattccaatcaaatgcctaattgttgtgacaaatataaaatgttcaaagctgaactactgacttgcactcccatagttcctccttgtatgttcttcctaagtttggtaaatgaaaacaccattattccagtcttttagaccaaaaaccttgagctcattttttttttttttttaactattctttccagtggtgcgctggtaaatggataatagcagtctctcatctctgaagggtgggaagtaggagaaggcctacttccttgtgtaaacactcccratattgtcgatttctagctataagaatgggcccactaagtggtccttggaaacagcacacacaaaatcaattaaaccccaattttgcattctgcttattcagtcattctgtgtagttccaactttgggagaagtagttacaagaactcgaaccacattcttctttctttatagaaaataataactttctaccacatgaagctaggtggctaaagagattatcataagaagcaggagagtaatggtagcatgcagcttatagggaacatttcctatgacattctcagtaacaattt

SEQ ID NO: 304708 - DNA, 587 bp, Homo sapiens
aactgcttatttaacaattccaatcaaatgcctaattgttgtgacaaatataaaatgttcaaagctgaactactgacttgcactcccatagttcctccttgtatgttcttcctaagtttggtaaatgaaaacaccattattccagtcttttagaccaaaaaccttgagctcattttttttttttttttaactattctttccagtggtgcgctggtaaatggataatagcagtctctcatctctgaagggtgggaagtaggagaaggcctacttccttgtgtaaacactcccgatattgtcgatttctagctataagaatgggsccactaagtggtccttggaaacagcacacacaaaatcaattaaaccccaattttgcattctgcttattcagtcattctgtgtagttccaactttgggagaagtagttacaagaactcgaaccacattcttctttctttatagaaaataataactttctaccacatgaagctaggtggctaaagagattatcataagaagcaggagagtaatggtagcatgcagcttatagggaacatttcctatgacattctcagtaacaattt

SEQ ID NO: 304709 - DNA, 597 bp, Homo sapiens
ttatctgggaggaaatggtgcctacatctaaaaattggagataatcggccgggcacggtggcttacgcttgtaatcccagcactttgggaggccgaggcaggtggatcacctgaggtcaggagttcaagaccagcctggccaacatggtgaaaccccgtctmtaataaaagtacaaaaattagctgggcatggtggcgggcacctgtaatcccagctactcaggaggctgaggcaggagaattgcttgaactagggaggcggaggttgcagtgagctgagatcgctccactccagacaactgtgaagaggcagattggcttaggtcatttcataacaccagttattatgagaagtctagtacagacctcttcttcctccaccctcttcatgctcccccatattccagggttattcactggaatgaaggaaaataagctgtttaagagccagaaccctacaattctaagccactagactctagcctgggggagtggggtgagggtaggagcaatttatccttcttgagtttagaaactggtcggagatgtaattaaaggccccctgtagctagtaataaaaggaagtttgacacagaa

SEQ ID NO: 304710 - DNA, 597 bp, Homo sapiens
ttatctgggaggaaatggtgcctacatctaaaaattggagataatcggccgggcacggtggcttacgcttgtaatcccagcactttgggaggccgaggcaggtggatcacctgaggtcaggagttcaagaccagcctggccaacatggtgaaaccccgtctctaataaaagtacaaaaattagctgggcatggtggcgggcacctgtaatcccagctactcaggaggctgaggcaggagaattgcttgaactagggaggcggaggttgcagtgagctgagatcgctccactccagacaactgtgaagaggcagattggcttaggtcatttcataacaccagttattatgagaagtctagtacagacctcttcttcctccaccctcttcatgctcccccatattccagggttattcactggaatgaaggaaaakaagctgtttaagagccagaaccctacaattctaagccactagactctagcctgggggagtggggtgagggtaggagcaatttatccttcttgagtttagaaactggtcggagatgtaattaaaggccccctgtagctagtaataaaaggaagtttgacacagaa

SEQ ID NO: 304711 - DNA, 632 bp, Homo sapiens
acatgtgcagtttacaaattctgcagctgattaactctggacagaagctcactggcatcattgtctttaagttgggtgaaagccttagggtctcaaaaactcagacacttacattacagtacaaaaatctccattaatgtaaggggttgggctttagagttgccaggcgtttgttttcttttgggaaacaaatatgaacaagacttcattttctatgaaacaggtgatttaggaaatactaaaaattagaaaaaagaattcgatgagcaagcctgataataagggttaatcatgtatttttttgccttaaaatatatatttttggcactcaagaaatattgttcaaaaaatgagtgctaaagtttagttttgaaacaatcaaaactgaaaatcaaagattaatacatttgtggggtgagggatatgacctgaaatacaatataatttaagtgaggcttttatactgattgaaccattttaatgatttttatggagagatgctaaatcaaactaaaatatatagcttaactttcatgtaaattcccaacatgctaaattaaaggttgttttggttaattcacyggtcaattcagttgaaaaagagattgaacactcttactctgcctactttt

SEQ ID NO: 304712 - DNA, 700 bp, Homo sapiens
taattggtgttcagtgttagctattattatgatctatgtacatctttgtttccctattagtttgaattaaattcactgaaggcaagattaagttttgctcacctttgtatgcgctgaaatatataatatgctatttctacatagaagtaacttattgaacatcagctgaatttaactgtatatctatgccactactgatgggccagtttgctagaacttgttgcattaggaatacrgcaggccagccatggtggcccatgcctatagtctcagcactttgggagacagaggtgggaagatcgcctgagaccaggagttcaaggttgcagtgagctacgagtgcccacttcattctagcctggctgacaaagtgaagccttgtctctaaaataaaaaataaataaaagaaatatgaagtagtaaaaaatacttcacattaaaccaatgaaaggtaattagggctcatcaaatattttaatctagtgttgagttcaatatggctttatatacctgccattagcacacaaccaatgacttcacttttaataccttcttaatcaatatggagtactcttaaaatactgcagctggttatcaaagatgactaaaatagcctcctatttatatgagttgatgaatcctaaaaaaaaatcctctttactaaataaaaaaaattggctttagtttttaacttatgatc

SEQ ID NO: 304713 - DNA, 700 bp, Homo sapiens
taattggtgttcagtgttagctattattatgatctatgtacatctttgtttccctattagtttgaattaaattcactgaaggcaagattaagttttgctcacctttgtatgcgctgaaatatataatatgctatttctacatagaagtaacttattgaacatcagctgaatttaactgtatatctatgccactactgatgggccagtttgctagaacttgttgcattaggaatacagcaggccagccatggtggcccatgcctatagtctcagcactttgggagacagaggtgggaagatcgcctgagaccaggagttcaaggttgcagtgagctacgagtgcccacttcmttctagcctggctgacaaagtgaagccttgtctctaaaataaaaaataaataaaagaaatatgaagtagtaaaaaatacttcacattaaaccaatgaaaggtaattagggctcatcaaatattttaatctagtgttgagttcaatatggctttatatacctgccattagcacacaaccaatgacttcacttttaataccttcttaatcaatatggagtactcttaaaatactgcagctggttatcaaagatgactaaaatagcctcctatttatatgagttgatgaatcctaaaaaaaaatcctctttactaaataaaaaaaattggctttagtttttaacttatgatc

SEQ ID NO: 304714 - DNA, 583 bp, Homo sapiens
cttcttaatcaatatggagtactcttaaaatactgcagctggttatcaaagatgactaaaatagcctcctatttatatgagttgatgaatcctaaaaaaaaatcctctttactaaataaaaaaaattggctttagtttttaacttatgatcacttggaatgaaataccagctataagattaaatttaaaatggtggtaatggttagcaagctgccagcaacaaatgggaaggaaacagcaaaagggaatatataaagagaagcaagaaagggttaacaagacaatttgctagtacaatcctgtgtgagaaaaggtgaccaaaacacaagaaatatctcaatgtcagggattcagatagaaaaggaagaaaattaagagaatagaattcacacagatcttaagagtagattggaagaatgtaagggagagagaaamacacacacacacacacacacacacacacaagtgaatgtaattgacttgtgttaatgaataaagggaattcataggagaaatttaatttttataagaatttgacttccagagtcaattagaaattagaatgaaagaatgttcaccattg

SEQ ID NO: 304715 - DNA, 629 bp, Homo sapiens
cagcttcttcacctccccttttttttctataaggcacttcarttttcactagtattatcccctaaagacataagcaaaggacaaggtcagagcagtcagttgtattccttgttagtggctttgataagaggctttgggggaagaggttgaaactaacggctataatgaagttttgggttctctaaagatttcatttatcggtgctattggtctccccattaaatgcatgcctgttctgtgtacctttgcacacagtttgcataacatataatatttattactgaaaccttgcaaacttcttaaattgtatagaaaaggctgtgaaacttactcttagagaacataaaaatatagagaatgaaggtcataactccaaatattgagtgatacagtgttttgaaaaaaaaaaaaccagaataaaacaaaattagttactagagtagaaaaaatatagttttaatatgtattgatacatgtctttttgccctcccccaatttagtaaagatgcactaggtgttaataatattcttcttatcatacagtgtattttaatctagcattttagaaaactttttacaagttcatagataaaagccctgtcagaatgtgacttttcattttcagatgt

SEQ ID NO: 304716 - DNA, 486 bp, Homo sapiens
tctgcaaatgcattgtgttgccgtaatgaaaatgcctctgtttgaaactccagacccagtcacctgagcacttcacttcttcctgagcaggatccagagcctagaaaagaattatgtgttggttcgcggtggtggtgtggtgggggcacaggagaggggaagaagaaacaaatccaaaccaaaaaacctatgtgggtatgactgtcatcttaaaattcttagggaactacatttttgtatgttccttatggcaaaaaaaactgttgagaccattaggaacctccctcattcgtcccatgaaacagtgcaattttactctataaatccaaatgctaattattaacaacagctgtagtaatccattgcatttattcagcacctccatatacattatttygtttgagctaaccactcctctaggaaactgaaagcattttaatggataggaaagcaaaggctcagaaagataaagtgacttgtccaata

SEQ ID NO: 304717 - DNA, 498 bp, Homo sapiens
agagacccttccctggaatgtgaaatgagattggttaatgtttaaattggtccatttacatctcctctgtaaaatgttaatttagaagcattccacttctcatctatttaggcttatttctccagaaccataataaaagggaaccaggagataaatttgatagaattgttaaatttccagtttagagtttttcaagtaaaatgttggttcaccatttcaaattgtttttggaggtagagatcatacaatttttacatattagtagatattagtagatataaagttattggactgagaatttgtctttttagtcatattcgttgtagtatagtaattcctcatctccaagtttctttttttttttttttgtattcagattctttagcagcttacctagaccagtcgtcagaagtattatataaaaccygtgccttgatcttgggagttatctgcaggttttgcagtaatcaactgggcttattttcagatataacaaaa

SEQ ID NO: 304718 - DNA, 621 bp, Homo sapiens
aaaatcagtgtgtaactttggactcccccaaaacttaactactgatagcctrttgttgactggaagccttacctataacataaacagctgattaatacatattttgtatgttacatatagtatgtactgtatttttactataaagagaaaaaaatgttaaagtcatagggaaaatatatttactattcctgaaatagaagcggatcatcataaagatcttcttcttcattgtcctcactttgtgcaggctgaggagaaggaggaagagaaggggttggtcttgttgtcccaggtggcggaggtggaagaaacttctgtgtatgcgtggacccacgtacttcaaacctgtgtagttcatgggtcaactgtatactctaaaactgctatttaaaatttaaaaatcaagttgtgaccataaagtattctcttttgggaactgagtgaatgaattctgaatctggcagtggaaatgaatatgatgcattgcattacgtggcttcagcactaaataatttttcccacttttcccttccgcacagatcgaaagctgctttgcgtcgcagttggagcagcacccccaccgcaggtggcattgaagggagcgtgaagctgcacgagggg

SEQ ID NO: 304719 - DNA, 621 bp, Homo sapiens
aaaatcagtgtgtaactttggactcccccaaaacttaactactgatagcctattgttgactggaagccttacctataacataaacagctgattaatacatattttgtatgttacatatagtatgtactgtatttttactataaagagaaaaaaatgttaaagtcatagggaaaatatatttactattcctgaaatagaagcggatcatcataaagatcttcttcttcattgtcctcactttgtgcaggctgaggagaaggaggaagagaaggggttggtcttgttgtcccaggtggcggaggtggaagaaacttctgtgtrtgcgtggacccacgtacttcaaacctgtgtagttcatgggtcaactgtatactctaaaactgctatttaaaatttaaaaatcaagttgtgaccataaagtattctcttttgggaactgagtgaatgaattctgaatctggcagtggaaatgaatatgatgcattgcattacgtggcttcagcactaaataatttttcccacttttcccttccgcacagatcgaaagctgctttgcgtcgcagttggagcagcacccccaccgcaggtggcattgaagggagcgtgaagctgcacgagggg

SEQ ID NO: 304720 - DNA, 546 bp, Homo sapiens
tggtttttttccttcattttctttttcagcaaaaaacatatcttcctacttcacattttttcttgactgtcacgctagcattctgtagattgagaaatctatgtaaatacaccataatttctagaagcacgtttccttatattataatttttcagtgtagcacaggacatgtttactaacacacccaggtatctttagtttctctgtccaaaagtagataagcttatgttcagcaattaatgtttcagtatttatcttatgtggacttacattgatttaattcacttgttttgaacaattatgcttggattacttacgaaaatttcatgagacattaaatagctaagcatcatcttgtttttcttgctgagaaattttgtaacttagagatagcagaggcttatttgtaattcacttgtctaacatgagcttatttgactagtagacctacatagaatcaaagttgtacgtctgccttatgtctaatrctgacaactctgaaggcatattggttttttaaactaaaccaacaatgtttttgtttat

SEQ ID NO: 304721 - DNA, 580 bp, Homo sapiens
gctgggattacaggtgtgagccaccgtgcccagccagattgctttcttttgtgttgtcaatgattataattttaaacagaagtyggttgaacaaaaccaagtttgtatgtttagatagcaatatgctattttaacacatggtggcattgcagcattttaggaaaaggttatctagaacattgattaaaaaaaaaaaagtttgtagcatttagccaagaactatgagggatctgagattttaccctatttgcaagctaacaaattcgcctgccacagtttcatagatgttggtggaagatactgtgagtactagagtcatcacaggtttgagacaaagcactctagtactcacagtcatagcagtagccagagtatcagcattttcttgaactattattcccttagtgccaattcccacagggtgagagcgagcgagccaggtgtcacctgcacagccagtgttttttgttccaggagaggaccctagagcttagggaatctgaatctttgaacttatggtacacatccctgccatttgctctggtgggagatgctagctctatcctccaaggctgtcccc

SEQ ID NO: 304722 - DNA, 449 bp, Homo sapiens
attgcttctaattaatattaccttgccaaaacgaaatatatctttacgaagaacttggagggtttaaatagccttcatgggtataatagcagtgcagtagcagtgatactayaagatataaaaagagacagactcctttgggatgtggcaactgattagattttattgacactggtgagaagatacttatgaaaataagtgcctctttattgctggattttatattccaagtttctgcttcatcagcctatctgattcactgtcactaaagcaatatatcaagcatggtactctgactcttaaccttattttactcatctaaaaatacaaaggaaaaggcatgtcaatttcatagagttgttgtgaggattaaacagggcatcagagagatttgagcaggggagtggcataaaaaaggctgtgtattttaaaagctcactatgggcttc

SEQ ID NO: 304723 - DNA, 449 bp, Homo sapiens
attgcttctaattaatattaccttgccaaaacgaaatatatctttacgaagaacttggagggtttaaatagccttcatgggtataatagcagtgcagtagcagtgatactacaagatataaaaagagacagactcctttgggatgtggcaactgattagattttattgacactggtgagaagatacttatgaaaataagtgcctctttattgctggattttatattccaagtttctgcttcatcagcctatctgattcactgtcactaaagcaatatatcaagcatggtactctgactcttaaccttattttactcatctaaaaawacaaaggaaaaggcatgtcaatttcatagagttgttgtgaggattaaacagggcatcagagagatttgagcaggggagtggcataaaaaaggctgtgtattttaaaagctcactatgggcttc

SEQ ID NO: 304724 - DNA, 629 bp, Homo sapiens
ttgtgtgttttacaggatcagatctgggtccttccatgtccacttcctggtaggattcatttatcccacaccctgctgtccatttagtcttgtgaagaagagataaagggaaaggctgaactcagctctctgtatagcataaaatcattctttctcctcagtcctgggattctgaggtccagaattgaggagtttcttgacaaggccaataatgtctttactttgcactatcagatggtcttttgagttacctttagcctgtaacgccctcttcttacaccttcgcctccttaaaactgtgttggaaacctgaagtgtctcttcaaaaagacatttctgaattacccagccagagttaaatactcccaccttttgcctcaattcctctgtataatattcccttacgcgtgttcatttcttactcctgccccaagaatgagtgcagtgaatatttttgatctgtcatgaaatggttaattwatcccatatcagtaatattgctttataactgcagctttattagtttatctttctccttagaataagtacttttttaggcagatactgactcttgatatatccttattcctaatgcaatagctggcacttagtaattgctcaataaatgc

SEQ ID NO: 304725 - DNA, 585 bp, Homo sapiens
taaccaaggaagatgagaggtttggagacatcaacctgtctgtttttaaaagactaagacccattgatagttttgtctcttaagaggacatgtttttaacggtcagcattgcaaatcccsgaatcctggtctagtcacatatcactaatctacaggtataaacatcctggatagatgaatgagacagaaggaaggtgggaaagctttaccttttgtcaccaacttctatcttaaatctttgcttagagagctaggttctcccttgagggaattctaatgttctcccttgatttttggcttaagaattaactaagagttagacatgatagtgtcctttcccctagtgtttattctggttctagctgggcttctaaggagctgacctcctactcttttgagtaggaggtaggcccaaactctgttatgccacagtgtacacattaaatgttaaaaacaaaagatactgaagaaggagaatgaagacttcgaggaaaaagaattttaaatccctttccttctccacctgctgtggtaggttccttgatccatgttagatcttgccttctttagaagtagagcgaagtg

SEQ ID NO: 304726 - DNA, 506 bp, Homo sapiens
tgcctggaaaatggtttagaatgtcaaatttctgactccttgagaaaattgttttatttctctgcacttcagtttttcatgtgataagaargcctctaagatctatccctttcaacccaacattctggagttctatgaaacactctagagagaatcaccatcactagcttatagtctggaaacagagacaaataaacagccattctataccttgactcatgtgatcttacaggagtacagcatgtttcagggttgattaggagcctggaagagaacagtcagcctatgggttataagagttctcaggtggttggtattgaagcctggaaggccagatgctgagacagcctggtgccagaaacctagtccttagagtaacaaaaaaggaaaaggataatttcttatgctttgataagagtagaaattatgtacctagttttctgcagcattgcaccaacaaagcattctctctctatgattataaataaggtaataaacatattgat

SEQ ID NO: 304727 - DNA, 591 bp, Homo sapiens
ctatgggttataagagttctcaggtggttggtattgaagcctggaaggccagatgctgagacagcctggtgccagaaacctagtccttagagtaacaaaaaaggaaaaggataatttcttatgctttgataagagtagaaattatgtacctagttttctgcagcattgcaccaacaaagcattctctctctatgattataaataaggtaataaacatattgataataaacatgtcagctagcatatatacatactggcccataataaatagcatataatatcatttttacttatttgcagcaaaaccaaggcagatgcccagcccaraattgttcagtggaagcccctgcttggatgcctgtccaccactgtactgtaagtttgattattccaagattagcagattgaaggataaatgtttttatattttggaataatcttagtggaatgagccagaatgctctctgaaattctggagtaaagcaaatattttgcaaggagaaagaataatctttcagaaagctttgcattataaaaaatatcagtgattagggattccatgcattttgttggagtcaggataacttggaa

SEQ ID NO: 304728 - DNA, 556 bp, Homo sapiens
ttttgttggagtcaggataacttggaaaggattgctttaaatgggttattgatgagttagagttggaaggtcattaaaacgaatatatttgcacatatgtttttcagaatagctgcatattcagcaatacttgattttagatgccttgaagaaagatgctctctcttttgtcactgtgtcaactgcttaatagtsatgagcacaccaacttgcaattttcaagtcttcctggtgtaataatagtctctgcatttgcatagtatcttctaccagagaattttccagtgccttagaaacaaacaggtactatgtcattatccttgtgctacagatgggagatttcaatgcaaagggagtaagaatagtgcatcaattgtagcactgggaacagatcccagacatcctacttctcctttcatgtactcatgctactacttctgtactctgaagtgtgtgaagaaagtggctgaatgtatgatactctgtaatacatggattgcctaatagaaatgacagtggtgtctcttggaattatgtgtactgtaaatgagtttag

SEQ ID NO: 304729 - DNA, 589 bp, Homo sapiens
ttgtttgttcaccaaatgcaatatcatctgctagaaaactgctggaaatgcaggatcttagtccccgtgtgaaactactgaatcagaatctgcgttttcataagatcgataattgatttgtatccttagatgattttgcacattaaggtgtgagaarcactgcccttcaagataaagtctgcattgtttcccctgcagcacatggccctcgatgttgtatcccttgcctaactgcctatctcagatcccactacctttcatgccttagtcaactataatcaataacatttggtttccccaaataatttgaatttcatcctcttgtttcttcgttgtgcctgttttttcttatgcctggaatacctctcaacttcctagcttgatacttccctaatacatttcttaacctttaagattcagctaaatgcggatttctctttaagtactttccttggtattgtcctactagactgagcccatcagcctccatgttctccgcacattgtctgcatctttgttatagtctttatctggttgtgtagttagcttttccatgtgcctatttcttgctagaatgtgaattccttga

SEQ ID NO: 304730 - DNA, 583 bp, Homo sapiens
actggcgcaatctcggctcactgcaacctccgcctcctgggttcaagctgttctcctgcctcagcctcccgagtagctgggactacaggcacacaccaccatgcctggctaatttcttttgtatttttaggagagatggggtatcaccgtattgcccaggttggtctcraactcctgagctcaggcaatccacccgccttggcttcccaattaaaatttctttaaaggacataagctttatttcttcatccattatcttttcttttcactccgagaaaagaagttcttatagtaaatactgatttttgatgatgatgatgatggtgatgatgacaatgacaatagttaaataggacaatgaaaacaatttcaagtttttcattgttcaccaaactttgcacagcccctgatgcataatacactggagctctgggctgataaatacagtcctctaacaagttgaggttcttctcaggtcagatataactagcacattcaatatttataaagcaatgtttcccctgttgagaatctgctctgtagttatatattgaaatgtaaatatattgaaatggaactttgc

SEQ ID NO: 304731 - DNA, 582 bp, Homo sapiens
tcaacagattataaaccaactgcttgtaattccagctcaatgtttttaagaaggcaagccatactttcttactgtagtatagaaattacaaaatcttgagccatacttggttttttgaagaatgaggcaactatcgggaacacatctttaaaactttaaaaaacaggaattggaaaggtcatttcataaatgaaatatgctggttgccagtgaaaaattactcactaagaaatggataatccacaagccctagaaaggtcaaaaaggctgccaaggtagccctgatagaagagactacaaaacaaacacaaaatgaatgcaagytgttctttggggcaggggctgacaaatattctcaagcaggatgctcaccaaaagtaattttctcttataccaagagaaatgtggcagatagaaaatgtgttgatgtattgtgatttaatttcaattttgtttcatagaagagatagagaaaaagttggacctttatttcagtattattttttaaactcatgatgtggcaaatgacccctttagtgaatcttacttgaagaacatgatatacctgcagataattaagat

SEQ ID NO: 304732 - DNA, 571 bp, Homo sapiens
tccctgtcttagtccatttgggctgccataacaaaataccataaaccgcgttgcttataatcaacaaccatttatttcccacagttctggaggctgccaagtctaagatgaagactccagcagatgtgatgactgctgagggctctcttccttataaatggctgtcttcccactgtaacctcacatagcagaagaggtgaaacacccctcaaagcctccatttcctaatagcaaccctttaggggttaggacttcgacatatgaattttggaaggacacaagcattcagatcatagcagcttcctatgtgccaggtactgacattgagaaacacctaatggcttccaccaaaatactcctctttattttcacatttatttttttaactaatgctttaagaaaaatatcctatttagcaaaatattaactatcaatggtggtatattaaccatagcagggaagctttattagaggatagagaatagagaccttcaggctttctggaggagtctaccaactctgccataatctattttcaatamttattgaatatctaagatgcatgagaatt

SEQ ID NO: 304733 - DNA, 594 bp, Homo sapiens
ttctaaggcactttgcttcttgctgtatagtagctcagacaaacactaaaaataaacctatgtttaagaggaaaaaaaggctttcttgctcagtggtacttacttatgactcagagggggggraaacataaaattttagatgccacacaacacacacacactgttttaaattcttatcaccctctaatcaatcattttctaaaagacctctttacctgtgcttcttatacaatgaacccttatgttattaagtgaacagaatagagcctcactaaagaccacaagatttatgaggcctcatggtcattgggcttgtgtttccaataggctctgaaggaattgttttacatttgcatacacagtctttcctataaaaaaaaactgagtcttttaatctacttttcccaacactctgattaagttagagatcaagcagttgagctaaaacagcaatacatgctgatgtcagttttgaaaggagctggttttgtctattacaagttgtttctaagattcctttcttgatgaatccttctttgctttgtggtaatttatattaattcaccaaagagctaaaaggactccttgggtgat

SEQ ID NO: 304734 - DNA, 594 bp, Homo sapiens
ttctaaggcactttgcttcttgctgtatagtagctcagacaaacactaaaaataaacctatgtttaagaggaaaaaaaggctttcttgctcagtggtacttacttatgactcagaggggggggaaacataaaattttagatgccacacaacacacacacactgttttaaattcttatcaccctctaatcaatcattttctaaaagacctctttacctgtgcttcttatacaatgaacccttatgttattaagtgaacagaatagagcctcactaaagaccacaagatttatgaggcctcatggtcattgggcttgtgtttccaataggctctgaaggaattgttttacatttgcatacacagtctttcctataaaaaaaaactgagtcttttaatctacttttcccaacactctgattaagttagagatcaagcagttgagctaaaacagcaatacatgctgatgtcagttttgaaaggagctggttttgtctattacaagttgtttctaagwttcctttcttgatgaatccttctttgctttgtggtaatttatattaattcaccaaagagctaaaaggactccttgggtgat

SEQ ID NO: 304735 - DNA, 439 bp, Homo sapiens
ttagggttgtattccatgaatacttaatttatagatastgaaatttgaattatgtataattttcatgtgtcatgaaatatcctattttgtgttttttcccaaccatttaaaccataaaagccattcttagcttgcagatttatagaagttcagcaagctgtatttggcccactagccaccatttatttacttatttaagatgaaagtagatagtcccatttatcatctgcattaaactagagaaattatacagatactgttctcccaaacagaccaaaggaagtaggagagggaaagccaagggtgcaggttggtccaaggcaggacttgactagacagttagaaatgaaaaatttccttgaaagggagaagaaaatgtgattcacacaagattatccttgtataggtgttccttttctgttctgcttcatttgtttgc

SEQ ID NO: 304736 - DNA, 484 bp, Homo sapiens
ccttttgaatcccagttcagccagttactattaatgtgatcttaggtaatttagttaactttctaaatgtcctcacctgtagaatggccataattatagagcctaccactgggttgcaaaataaataattaagataaaacatctggaatggttagcatactgtaagtcctacagtgaggccttcagaagtgttaactgtgtgaagggaataaatggaagagaaaactttgcatgaacaagacacgtcttcagttgaytttattgttaaggaatccagaattatgtcttcaaagagtgctactgcatctctaccccactgtgtctagttcttcaagtgcattaaatagcagtatgtgagaacttgttagaaatacactctccagtcccatcccagatttagtgaatcagaaactatggggttaggacccaggaatttgtattttagcaagccccccagataactgtgatgcatgctagagtttga

SEQ ID NO: 304737 - DNA, 580 bp, Homo sapiens
tcttatgactcctttctacactttaaacttgctgaagactggaatttttttgtgtgtatcttcaaaacttaatatattacatggtatacaatgggaagttgatacatgttttctgcaagaataaacagattggggatagatgcaaagagatagtaaagttatttaataccaattgaactaattaaacagttgccagggggtatgctgtacccacgactgtaagactgagtatatcagctctagaaagatgactactaggtcacacataacagagaacctatgtacttgtgataataaatcatattccttgggtggtttcatctatggccttttatagtatatgtgtatatayaattagatacataatgcaagaaatatatttaatatttttaaattttcttatcttccttttatcaagtgccagagtaaatgagtggtttcctccagccaaagtcaagggtttctagacttctatttattattttaaagttgttttatgtatttgcttcctttacaataaaaatacactataggaaatgtgctggtatgttgccagctgacaaatttattgagctactcc

SEQ ID NO: 304738 - DNA, 600 bp, Homo sapiens
agtggctttcctgtcacacaatccaatgaaaggtttagtcctcattttacctctcctttcagcaccattttataacaactccttttctttttggcaataagaaactccttttcttttggcaatactttctacatttttrccctttaccttccacagtatcatgctttcttggctttaatcctatttctctggctgctaaagtctctctactttgtaggctcttccgcctgtagccacctatttagtccaccaagctcttcttactctatatttgctctactaacaatttcataaatctatataattctaatagctacctcaaattacttcaaacatagtccccttctctgagtacccaactgcctgtgtaacatctctacttagctatcttaaaggtacatcacatacatcatgcctaatactaaactcatgatccatcctttccacccagaacctgacattcctctaaagtctcttacaaagcggatgatatctctatccatcagtgtataaaccaaaaacctatgagtcatttttcacatgttctcctccttaaaaccccatgccccatacatcaacagtttatatatattttcttat

SEQ ID NO: 304739 - DNA, 547 bp, Homo sapiens
caatttagcattccagggttcacacaattggatactctcatgtctataaaaagaaaactcttgcctggggctgaaaattagtgtttgcctaagcttaggtaagggggaaataaaccttgcatacatgtagagataaacaaaatgccttaagaaacatggcagatctgcatcctattccaaagaaaattcaagaatttattcacattggcaagttttttgtaaagagtctttacaaaagatcttaaatatatttcagatcttcctcttcagctcttattcctgttaactgagcattatgtctcttatctctaacatacccgtgcattcctttaaaattaccaagtggattttgtccgttaaccttcctttmtagtgcacttcaaggactatactgttagaaacaagtcagcaatgtatgtcaggtaaagagtgtgtgctcattataagcctgccaataactcatatttgtacagtatttttttccaaaatatgtttgctacattgctcattcgatcttcaagacagcactgtaagagttaaattttat

SEQ ID NO: 304740 - DNA, 599 bp, Homo sapiens
atacagtcagtcgaagtcaaagaaagtatttttatctatatttacttactcttttgctcttttcaatgcactcttgactaagtgttaaataggtttctagaagcagtcaaatatttttgtcagttttggaagattgtttcttatttgcattatatttctatgtagtgccaatgacttagatagattacatcatcccacgccaaatatttgatgatgttatcaactagctttccatggagaaaatgaggaaaatgggtctcatttttactgtatgtttttctcagaggcaggtctgttattatggaaaaagcactaaatagtcacaattctggcatttactgtctttctatcctctagcaaagcrttttgtttccaagtctattcattgcagaatgaagtagtttttgtggttctcaactcaagggtgttaaaatgctcaaggcttgtttgtaagtgttggtgggaattttttgtttgtcacatgactgaggcatattggcaattagtgaaaaagttccaggaaaaataaacagtcttcaaatgggtgggacagatttatataatgaatctctttcttgtctgaaatgccagcagtgccc

SEQ ID NO: 304741 - DNA, 541 bp, Homo sapiens
ccaagacgcattgtgactcttcaagaaaaggagatgacgtgcaagtttgggtattacatatacaggatggagcagaagaaagagttaggattcaaaggggtttgaaatgcaagttggcaatagttaggctgcatgaaatttaaggaagtaatttatgttaatccgatgatcagaaagacagacacctatcaattgtgaaaaataagggtcatttttggccttctgtgaaattagtgttgaaggtaacaggctttgctaaaataattgcctagtttaagcttcactctgaaatattatccccattttacagattatgaaactgatgtttggagtcaaagtgccctcctggtggattacattaggaatagtctactagataaatgaagcagaaagataaaaacataaaattcagtaatcagggtatgatatattttcataatgaattggttttgcttyactggtcaaggtaatttaattatttgcctcatctgaaaagtttctagcctatcctcataattccatttctatgctcaaatttatc

SEQ ID NO: 304742 - DNA, 590 bp, Homo sapiens
cctgacttcatggagctgactgtgcccctctggcctcatcttgccctcatagattctgctccagcgactccaccctccttgctgtttcttggataggccaagcataccccaacctcaggggtcttgcaatgaccataggactagcttcttcactaactttgggtcccacgacactgcctaatcatcctaagtggaatagccctacccttccaactctgacatcacttcctgtcccctgctttagtttttcttctgagatgtctatcatcttcaggcatatatggattttctaattatctattctcccaacttgagggaagggtctttgttttattcacttggagaagattcaggcacacagcaagtactcarcaaagatttgctggatggagagcagaaaaatggaggagacagtcattatgcaataggcatgctcaggtgaaaacactgcaccaggacaacagcttcaaagaccatgcgtgtagcattcccaaactttgtaatggggtctgtcttattcagctcaaagaacacatctcaaagcaagagatattggtctacttcacctttaattcatcacctcctaaata

SEQ ID NO: 304743 - DNA, 579 bp, Homo sapiens
attctacattcctcctcttctcaatgcctcaaatttactccctaccctccttctcctttctacctgctcaagttaaggtgtcatcatctcttgtctggactatgacagtcccctccgtctaaccttgtccactgtttaattcatttacctcacagccaccatgctccttccagtatgaaaacccctaatgttatgcatatgcaaacagcagggtggggtggcagtgggtgacctggtgaattacccaatagtggccaactattaataatgagaacatgccatacacctgataaaagctgaaattgaaattaacaatccctacctccataatattatatttatactcaaggataatcttaatattctttggatttacttcttattaaacaacttagaaatacagaaatgctttgacttattgagatatcacacttttgtaaatggctaatgtgatayaaattgagcacaatatttataactagtagccaggttagcacttcataaatctttataggtagatcccacatgtaaagtattccagagtatttccctgaataaggtgtcatgaatgaatattaa

SEQ ID NO: 304744 - DNA, 634 bp, Homo sapiens
tactgtcctaaaacagactcagattagtgtaatggatgttgctaggggataggagctggggaaaaggggagatgtttggtcaaagagtgcaaactttcagataagatgagtatgttctggggatctaatgtgtagcatggtgaatatggttaatatggtctaatgtgtagcatggtgaatatggttaatatggttaataacactgcacagtctacttgaaagagagtagttcttaagtgttctcaccacaaaaaaaaaaggttgactcttaggtgacagatgtgttaactaatttgactgtggtaatcatttcatcacatatacatatgtcaagtaatctcactgtatatctcaaatatatacaattttatttgtcattttagctcaaaactaggggaaaataaaaaaataaaatggactcaaatcttgcttataaaaactgaaaaaaattgttcttcagtgtgtttgtaagcagatttggtaactaaagaaggtttctaaattatgcttcagtgtaaaataagcagctaaaattaagaaagtccctttgaaatcactgaaaatagcagagtcatttgccatatccaagtagaaytggaatgtaaaaaacaatttctgtcatataagcaaaaat

SEQ ID NO: 304745 - DNA, 525 bp, Homo sapiens
tgatagtgagtgagttctcatgagatctggttgtttgataagtgtctggtgttttctccttctgtctctctcccctgctgmcttgtgaagaaggtgcttgcttctcctttgccttctgccatgattgtaactttcctgaggcctccgcagccatgtggaactgtgagtcaattaaacttcttttgtttataaattatccagtctcaggtagtatctttacagcagtgtgaaaatagactaatacatcagattatcagaaagttaaatggttggtagttttcctttaattctccaaaataaggcatcatataattataatttaatatatgatgcccaatctttcttcctgtcctgtctaatacttatttttttcttttttaattgaggattgttatataaaccttctaaggaaagcactatgtactatgcagctaagttttatttctcccaattaactgctctgcattatcttactagttttcaggaacaatttcattattctttctctttttgatttaactgtga

SEQ ID NO: 304746 - DNA, 608 bp, Homo sapiens
gtagtaagcttacagttttttttttctttcagtaccttttctttgtgggagtgtcctctttcctatcacaactggttctgcattaaccattcaactatagtrtcatgtttactattttctaggggttgggcatgtgactcaggctgagctgattatttctctaccccttaggacaaagcttgatagagcagatagctaaactcaaccaatgaacccaattaaatgccaaaatacaaaacaacagcaaaagcagtaacaatagaagtttcaaaagcaaaagacaaagcagactgaaatagaatgctcttggcattctaagtcttcattttctggatagggactttcatggtcccagcttaggtgagctgcataactctacaggtatgtactttcctattatgtgcacctggtttatctgataactctcaaatgtcttcaaatatagatgtcttcaaatataaagcttgctttagtttgaaaactacacgtataattcttggctctggatccataaatttgctgagagcaggaatcttaactttccccccattcttgattaaatcttcatccattccaatatcattaataattaatctagttatcaaaac

SEQ ID NO: 304747 - DNA, 475 bp, Homo sapiens
gaggaaggaatgtctgataatgtgatgggtagtatgtatgggaaaagatccttctactcaatctggtttggtctgatgggtgtgattttagcatagtcatttttttgcatgtttctttttgcagcttcaacttggccttttccatgacagaaaaacagaaggttagctstgtctctatttgggctctgccagcaacgtatactctcagtctcttctctgggttgttttcctctggttggctgagtagccactcgggtagtagcatggttctatgccaattcccatgtaataatagattgtcagccttcagaaattaccagaggggaagcaagccccagtttttatattaaagtccatccatccattgggaaacatctttctgatacaattctctcattctccaaagagatagagggcaagggaggaccaggactgatatttctggcaccctatgtgctttcttctctaaacgttc

SEQ ID NO: 304748 - DNA, 492 bp, Homo sapiens
cattcactgggtgctgttgaaagcattcagttttataagggtagcagagcataaaagtttggaaaatttgcagcctgacaatgtcatagaaaagaaaatcctgttttctgaggagaagttcaagtgggctgcagaaattttcatacataacaagtagctgaacgtaaatctccaagacaatggggaaaatgtctcctgggcatgccagtggtctttgcggcaacccctcccatcacaggtctggaggcctaggaggaaaactggtttcatgggctgggcccaacatctctgttctttgtgcagcatagaaaacttggttscctgtgtcccagatgctccagccaaggctgaaaggggccaacgtagagctcaggctgtggcttcagagggtgcacaccccaagccttggcagcttccacatggtgttgagcctgtgagtgcacagaagtcaagcactggggtttggtaacctctgcctagatttcagacgat

SEQ ID NO: 304749 - DNA, 511 bp, Homo sapiens
cccctgctgtagggatgtgtaaaattttgaaattgagagagatggtttaggatatctcgtggaagaaatttctaagcagcaaagcattcactgggtgctgttgaaagcattcagttttataagggtagcagagcataaaagtttggaaaatttgcagcctgacaatgtcatagaaaagaaaatcctgttttctgaggagaagttcaagtgggctgcagaaattttcatacataacaagtagctgaacgtaaatctccaagacaatggggaaaatgtctcctgggcatgccagtggtctttgcggcaacccctcccatcacaggtctggaggcctaggaggaaaactggtttcatgggctgggcccaacatctctgttctttgtgcagcatagaaaacttggttccctgtgtccyagatgctccagccaaggctgaaaggggccaacgtagagctcaggctgtggcttcagagggtgcacaccccaagccttggcagcttccacatggtgtt

SEQ ID NO: 304750 - DNA, 630 bp, Homo sapiens
atgaattaaaaccaccaataatttaaaagtccttctgcccttggctagcaagaaacaaaaaatggcaaatgagaaggtgaagctacaaktatgtgcactttggttcccaagttactctggtccattgcagctgctgtgttccattgttaggctgtgcccacctgggacagaagacagaaattaaaataagttcaattttaaaaaaatgcatatcttaggaaaatgtttaatattatttgctcttaagagaagttttatttatgagctattaatttcccattgtgaataagttgtaatataaattcaggaacccaacttttcagtcagttaaaactttaaaacctaatgagttgaaacaattgattctgctctttctcctagagggggtggaaaaaaaaatcaggatcttacgaagaaaatttattttgtttaattaaaggcacattaattaagatgctgtttaattcaataatggtgcctttaaaatgcatttttcatctttattctttaaggacaaataaagcagttataaatcagacattcctttaatgtaaggtgtgactaggaaaatatatgattcataatctgagagaatgctgataaaaataaatttgcattcacaatccttag

SEQ ID NO: 304751 - DNA, 540 bp, Homo sapiens
gagttcctcaaataatcaactttcattagagatcaagatttttgtttttcactgaatccactaatttttcatcattgaataaagcaactggtattttctgtagtggaaacacatatgacttccatttgaaaccatttaaactgaatacagagatccaggaaacagactgcagtagatcagagagaatccagaacattattttttwaaacatatgaaagatacaggtttgaatatcagaagcacctggcttccctttatagatagatgccaaccaaattaggaattcttagaagagaagagttacatcattaaataaagggtttggagaagaaactgcctggattttcaatgttcatcaactatggttgtgcatattttaccaggttgcattttattttccttattcttaaaaatatctatgtagtttctaaaaacattaggctccatttgtgccaaggttaaagtttcttctcttcgcaagaattctaatggaaaaagctccatgtagtacattcattagagcaaataaaaatagcaaag

SEQ ID NO: 304752 - DNA, 568 bp, Homo sapiens
atttctttttctctttaatgaatcctttctattttaaggagttaacaactatcactgaagaggaaaaagctaaataatggctaatctagtagttcaaatatgctcttgaattcctagtacctctgcatttattaaataagctagtcaaccagagttcctcaaataatcaactttcattagagatcaagatttttgtttttcactgaatccactaatttttcatcattgaataaagcaactggtattttctgtagtggaaacacatatgacttccatttgaaaccatttaaactgaatacagagatccaggaaacagactgcagtagatcagagagaatccagaacattatttttttaaacatatgaaagatacaggtttgaatatcagaagcacctggcttccctttatasatagatgccaaccaaattaggaattcttagaagagaagagttacatcattaaataaagggtttggagaagaaactgcctggattttcaatgttcatcaactatggttgtgcatattttaccaggttgcattttattttccttattcttaaaaatatc

SEQ ID NO: 304753 - DNA, 568 bp, Homo sapiens
atttctttttctctttaatgaatcctttctattttaaggagttaacaactatcactgaagaggaaaaagctaaataatggctaatctagtagttcaaatatgctcttgaattcctagtacctctgcatttattaaataagctagtcaaccagagttcctcaaataatcaactttcattagagatcaagatttttgtttttcactgaatccactaatttttcatcattgaataaagcaactggtattttctgtagtggaaacacatatgacttccatttgaaaccatttaaactgaatacagagatccaggaaacagactgcagtagatcagagagaatccagaacattatttttttaaacatatgaaagatacaggtttgaatatcagaagcacctggcttccctttatagatagatgccaaccaaattaggaattcttagaagagaagagttacatcattaaataaagggtttggagaagaaactrcctggattttcaatgttcatcaactatggttgtgcatattttaccaggttgcattttattttccttattcttaaaaatatc

SEQ ID NO: 304754 - DNA, 600 bp, Homo sapiens
taccaggttgcattttattttccttattcttaaaaatatctatgtagtttctaaaaacattaggctccatttgtgccaaggttaaagtttcttctcttcgcaagaattctaatggaaaaagctccatgtagtacattcattagagcaaataaaaatagcaaagtgctgcattccattatgatttctgcattttcattctgtgaaatatttaaactaagtactaacataatttttgtatttgataatgagctgatgtttgttaaattctatttgttttttctttggggaagcaatgctgaagaactcctaggcagtgggctttggcaaggacctttattacattttgttactgctgtatacagccttttgacataaattatcttttcaagaaaagtaattgattttttgagtaaggaatgataaagcaactactaaatctgatttttgtgccatgcaaaaagtaaagcrcttctccactggtcacaccttcgcatttacccaccccaagtctaaatttaatcctgcttgtgtgtacacctattacctctaggtatttttactcatagcatttgatgcatcgtgttatcatgatttacctac

SEQ ID NO: 304755 - DNA, 500 bp, Homo sapiens
cgtgggttatctgtttactctgttgataatttcatttgctgtgcagaagtcccacttgtcaatttttgtttttgttgcaattgcttatggggatttagccataaaatctttgctgaagctgatgttcaaagggtatttcctaggttttcttctaggatttctataatttgaggtcttacatttaaatttttagtctatcttggttaatattttgggaggtatattgtgagaggtagggctccagtttctttttttttttttttttgcatatggatatctagttttcccaacataatttattgaagaaactggagcacattattcagcaatcccactactgggtatatatgcaaaggaaaggaaataagtatgttgaagagatatctgcactattatgtttattgcagcattattcrcaataaccaaagtatgaaattaacctatgtctatcaactgatgaatgcataagaatttgtggtgtatttacacaatgaaatatg

SEQ ID NO: 304756 - DNA, 585 bp, Homo sapiens
ggcgttacttgtttataccaattccattaatttaactagcatgttgaaaggcaacaytgatatgtgtcataattatcttttattataatttgaactattctctttttattaccaagttgaaagttgaaagtttaataaattaaggaggcaatgtaattttggaaatagcagtggctaggagttgagacatctgagctttatcactggctctacaatatgattcagaatggttgatagatacattttctttactacaataagaaatttaaaaagagctggatcaggtgggtttaattttccttctagtttggatcatcaagtaaatattcttcacattgagatcagtagtaaagattactgtaaatagaatgttggaacatactgactatagctgcacagttggtttcagcaaagatcatatgaaatgttacagataacaaaggttcgtatgagacccttcatctcatggccttaatcttgacacccagataggagttacagggctatcaatctctttctgcagctgctggagctatttccaatgctaatgttggttccatttataggaaatcttcctcctgtttt

SEQ ID NO: 304757 - DNA, 609 bp, Homo sapiens
tattattttgcatatagaatcatttataacatatggttgttctgcttttccagccacattatgagcttaacttttttactaatttttactgaaacatatacaatatgttatcggtatttttctacaaatatttattgagcactcactatgggtcaggacatcagtgatatgtcagaaatctaataatgaataaaatacagaccctkcccctgaaaggatagtaatctggtagaggagcatcaaagtaaaagaaaattatattaaaatataatatctgatgtatagaactaggtccattaggttctgtgggagcacatagatgggaagaaactgatttgtctaggccagcactgttcaataaaattacaatgtgagttatatatgtaattcaaaattttctaatagtgatatcaaaaggaaagaagtcggtgagtacatttcataatacttttatttaatccaatatatccaaaatatcctttcaacttgtaattaatataaatattaatgagctagtttatattcttttcttttatttttttgagctaaggctttgaaatctgggatgcattctgtacttccagtccaccttagtttggattagccaca

SEQ ID NO: 304758 - DNA, 566 bp, Homo sapiens
ggacacagcccaactttaaaaattgaaactttgggcagataaaaattaccaggacattaactgaaaagtcattatataatagtatgcttttcttaccaaaatacctaagtattcaaacttttcatacattatattttgatttgtcattatcatgccctcaagatagacactatttaccctcatcttttaatgtggatactgcgatatggagaagttaagtgatttgcttcaggcttccagaagagttagaattccaaatctcctggctggcagtttcttgtctgatacatgagacagcactgcccctctaaggcagctgaaygtatacaggaatcaagcttagaggcaggatttaccgttattttcaggcaaggtttataagaagctgaacagtctctaagcagctaagaattcaactgctgagtcatttttttttcccaaccattcaaacagtttaacatgccttcctctccttaaatcagaacacagacttctaattccaggatgatgaaagcctgtcacttgacggtgaggggtgcgtttgatgaatatcacaaggtaatagt

SEQ ID NO: 304759 - DNA, 566 bp, Homo sapiens
ggacacagcccaactttaaaaattgaaactttgggcagataaaaattaccaggacattaactgaaaagtcattatataatagtatgcttttcttaccaaaatacctaagtattcaaacttttcatacattatattttgatttgtcattatcatgccctcaagatagacactatttaccctcatcttttaatgtggatactgcgatatggagaagttaagtgatttgcttcaggcttccagaagagttagaattccaaatctcctggctggcagtttcttgtctgatacatgagacagcactgcccctctaaggcagctgaatgtatacaggaatcaagcttagaggcaggatttaccgttattttcagscaaggtttataagaagctgaacagtctctaagcagctaagaattcaactgctgagtcatttttttttcccaaccattcaaacagtttaacatgccttcctctccttaaatcagaacacagacttctaattccaggatgatgaaagcctgtcacttgacggtgaggggtgcgtttgatgaatatcacaaggtaatagt

SEQ ID NO: 304760 - DNA, 600 bp, Homo sapiens
cccacctacatctttacaaactggtcaatacattcwtcatattttacctagttaatttagataccttctttgtactgtactgtaccactcaaacccatactccccaaggcccccagagaggtgtgacagcaacagaaattactactgctcaccaatatttcgaggtcttgtctctttttgcatgtagaaaaacttcaaccttttcagatctcttacacttaagtaggaccatatgacttctttgagcaatggtttttgtagggaagcaattatttacaggtggaggtaatgaaaagtctgtatgtgactttccgttctctattcccctgcatcatccaccaaaaagatggtgcaaaccggttagccagggtttgagtgaatatttaggtctgaagaccctacttcttccagccaaattgaagatttgtaggttaatttgttatctcaacttaaaagcctaccattactgatacaatgtctaaaacaaaattttgactatgtcacatgcctaaataaatcctccaatagtttgcttaccattcttgaactatggtccaataattttacacggtaaaataaggacttttataagttatcctc

SEQ ID NO: 304761 - DNA, 600 bp, Homo sapiens
cccacctacatctttacaaactggtcaatacattcttcatattttacctagttaatttagataccttctttgtactgtactgtaccactcaaacccatactccccaaggcccccagagaggtgtgacagcaacagaaattactactgctcaccaatatttcgaggtcttgtctctttttgcatgtagaaaaacttcaaccttttcagatctcttacacttaagtaggaccatatgacttctttgagcaatggtttttgtagggaagcaattatttacaggtggaggtaatgaaaagtctgtatgtgactttccgttctctattcccctgcatcatccaccaaaaagatggtgcaaaccggttagccagggtttgagtgaatatttaggtctgaagaccctacttcttccagccaaattgaagatttgtaggttaatttgttatctcaacttaaaagcctaccattactgatacaatrtctaaaacaaaattttgactatgtcacatgcctaaataaatcctccaatagtttgcttaccattcttgaactatggtccaataattttacacggtaaaataaggacttttataagttatcctc

SEQ ID NO: 304762 - DNA, 600 bp, Homo sapiens
cccacctacatctttacaaactggtcaatacattcttcatattttacctagttaatttagataccttctttgtactgtactgtaccactcaaacccatactccccaaggcccccagagaggtgtgacagcaacagaaattactactgctcaccaatatttcgaggtcttgtctctttttgcatgtagaaaaacttcaaccttttcagatctcttacacttaagtaggaccatatgacttctttgagcaatggtttttgtagggaagcaattatttacaggtggaggtaatgaaaagtctgtatgtgactttccgttctctattcccctgcatcatccaccaaaaagatggtgcaaaccggttagccagggtttgagtgaatatttaggtctgaagaccctacttcttccagccaaattgaagatttgtaggttaatttgttatctcaacttaaaagcctaccattactgatacaatgtctaaaacaaaattttgactatgtcacatgcctaaataaatcctccmatagtttgcttaccattcttgaactatggtccaataattttacacggtaaaataaggacttttataagttatcctc

SEQ ID NO: 304763 - DNA, 608 bp, Homo sapiens
attctttttgtgtattcatatcttcacacacttttttttctgaaacagagtctcgctctgtcacccatgctggagtctcactctrtcacccatgcctgatcacagtggtgtgatcatggctcaccgcagccttgacctcctgggcttaggtgatcttcccacctcagcctttggggcagctaggactaccggcgcccaccaacacatcagctaatttttgttgaggtgaggtttcaccatgttgcccagactgtttcaagtgatctatctgcctcggcctcctaaagtgctaggattacaggtgtgagccactgagcccagccgtatcttcatacttttgttcctacttttatctctaccttgagttcttgtcctcctactatttaattggataacttctgctcaaactttgagactccattcaggtgtcagcacctccaagaaagatttcttgaacttcaagctgattataaacttctccagggaatgtgtgatatttatctttttaatccccatcttctatcacattgccttttacttaaaaggcacctcaattgatgtttcttgaactctcttcacaaaataattccaagacaaataatcaaaag

SEQ ID NO: 304764 - DNA, 608 bp, Homo sapiens
attctttttgtgtattcatatcttcacacacttttttttctgaaacagagtctcgctctgtcacccatgctggagtctcactctatcacccatgcctgatcacagtggtgtgatcatggctcaccgcagccttgacctcctgggcttaggtgatcttcccacctcagcctttggggcagctaggactaccggcgcccaccaacacatcagctaatttttgttgaggtgaggtttcaccatgttgcccagactgtttcaagtgatctatctgcctcggcctcctaaagtgctaggattacaggtgtgagccactgagcccagccgtatcttcatacttttgttcctacttttatctctaccttgagttcttgtcctcctactatttaattggataacttctgctcaaactttgagactccattcaggtgtcagcayctccaagaaagatttcttgaacttcaagctgattataaacttctccagggaatgtgtgatatttatctttttaatccccatcttctatcacattgccttttacttaaaaggcacctcaattgatgtttcttgaactctcttcacaaaataattccaagacaaataatcaaaag

SEQ ID NO: 304765 - DNA, 608 bp, Homo sapiens
attctttttgtgtattcatatcttcacacacttttttttctgaaacagagtctcgctctgtcacccatgctggagtctcactctatcacccatgcctgatcacagtggtgtgatcatggctcaccgcagccttgacctcctgggcttaggtgatcttcccacctcagcctttggggcagctaggactaccggcgcccaccaacacatcagctaatttttgttgaggtgaggtttcaccatgttgcccagactgtttcaagtgatctatctgcctcggcctcctaaagtgctaggattacaggtgtgagccactgagcccagccgtatcttcatacttttgttcctacttttatctctaccttgagttcttgtcctcctactatttaattggataacttctgctcaaactttgagactccattcaggtgtcagcacctccaagaaagatttmttgaacttcaagctgattataaacttctccagggaatgtgtgatatttatctttttaatccccatcttctatcacattgccttttacttaaaaggcacctcaattgatgtttcttgaactctcttcacaaaataattccaagacaaataatcaaaag

SEQ ID NO: 304766 - DNA, 556 bp, Homo sapiens
tataaacttctccagggaatgtgtgatatttatctttttaatccccatcttctatcacattgccttttacttaaaaggcacctcaattgatgtttcttgaactctcttcacaaaataatwccaagacaaataatcaaaagccttaatcaaatgaaagatttaatcattttaatcaatgaggttttctccacaagactagatacatcatttttaattcacaaacgaattgatcatcatttttaaataaaatgaaatataactaaaaacataaacttctttcagtgtattcatgtctctggtttaactatttattaaatatatatttagaaagaaaagataacctttaaggaatctcactaagcattgggaaaaactcagtctcttggcttgataacttgaagaaaaagttttttccttcagtgaattctttatttgatcccaatttatatcttttccctcttatactctatcttccaaacagcagccagttattctttaaaaataattgacaacctctctccatgttcaatggctttcaaccttatcataaagcaga

SEQ ID NO: 304767 - DNA, 556 bp, Homo sapiens
tataaacttctccagggaatgtgtgatatttatctttttaatccccatcttctatcacattgccttttacttaaaaggcacctcaattgatgtttcttgaactctcttcacaaaataattccaagacaaataatcaaaagccttaatcaaatgaaagatttaawcattttaatcaatgaggttttctccacaagactagatacatcatttttaattcacaaacgaattgatcatcatttttaaataaaatgaaatataactaaaaacataaacttctttcagtgtattcatgtctctggtttaactatttattaaatatatatttagaaagaaaagataacctttaaggaatctcactaagcattgggaaaaactcagtctcttggcttgataacttgaagaaaaagttttttccttcagtgaattctttatttgatcccaatttatatcttttccctcttatactctatcttccaaacagcagccagttattctttaaaaataattgacaacctctctccatgttcaatggctttcaaccttatcataaagcaga

SEQ ID NO: 304768 - DNA, 614 bp, Homo sapiens
ttcatctctttcatctttcccttgctccctctgattcataaacatcctttccctgacaaccctcaaacataccgaggttgctgatacctttgtatttgctctttcctctgccttaaacaatgttaaccaaaatatctgcatggttccctacttttgtctctaatttggtctgtgctcaaatattaatttatcacatggatgttctctgacaaacatctataaaattatactttattatttttatctcctttagactgttttatttttcttgatggatctytttacctctttatatatgcctatttatttatttttggtattttgacactagaatataagatcctttcctaccgcattatgtttttctatgacaggggctttgtatctttgtttattactgtatctccagggtgtaaaacaacatcttgcatatagtataaactgaaatatattagcagaccaaatacatgaattagacaattttatcaaaggaattttaacctaatggataggtgcacaattacagtaaaataagtcttataaatatcctatatgaataaaagcaatgggctatgctggaaaagaaccataaccaatatagtctaactcataga

SEQ ID NO: 304769 - DNA, 608 bp, Homo sapiens
atgtttttctatgacaggggctttgtatctttgtttattactgtatctccagggtgtaaaacaacatcttgcatatagtataaactgaaatatattagcagaccaaatacatgaattagacaattttatcaaaggaattttaacctaatggataggtgcacaattacagtaaaataagtcttataaatatcctatatgaataaaagcaatgggctatgctggaaaagaaccataaccaatatagtctaactcatagatcttattacctaattgctatcaactgcatggatgtaaaatgggagttcttctcacttmttttttcctttttcttttcatctattttctttcttgtaatctgacagctctctctaattttgaataatatccagctgttttacctattgcttttttattacactatattaattttactctgtaagttggaccaactatgctcataagaactgaaatggagaaaaattcctctttgaaaatttccattatactcagttgcaattcttagccactaattatatgataatacataatatcatgacatttgagacctaaatgaatcttgagatatagccacaccaatgcaaggaaag

SEQ ID NO: 304770 - DNA, 608 bp, Homo sapiens
atgtttttctatgacaggggctttgtatctttgtttattactgtatctccagggtgtaaaacaacatcttgcatatagtataaactgaaatatattagcagaccaaatacatgaattagacaattttatcaaaggaattttaacctaatggataggtgcacaattacagtaaaataagtcttataaatatcctatatgaataaaagcaatgggctatgctggaaaagaaccataaccaatatagtctaactcatagatcttattacctaattgctatcaactgcatggatgtaaaatgggagttcttctcacttcttttttcctttttcttttcatctattttctttcttgtaatctgacagytctctctaattttgaataatatccagctgttttacctattgcttttttattacactatattaattttactctgtaagttggaccaactatgctcataagaactgaaatggagaaaaattcctctttgaaaatttccattatactcagttgcaattcttagccactaattatatgataatacataatatcatgacatttgagacctaaatgaatcttgagatatagccacaccaatgcaaggaaag

SEQ ID NO: 304771 - DNA, 446 bp, Homo sapiens
acttatgagaattacagttagttccaaagtgagctctttaccatttctgtattacaattcctaaattgataacaagcaaaagtttagcaactgtaaagtgaataaataaactgtggtatacttayataattgaatactattcagcaatgagaatgaactccatgcacaacataggtggatatcacaaatataatactgagcaaaagatggagacacagcataattttgcaagatcccaactccctggaggtttggatagtggtcaccttgatagaaaacagggctaggagaaagcaaagagagagtttctagagtgctgataatattttaacccttgttattggcaatagttacctagatgggtccacctccacaagctgtattcttatctgtataaacctaggttttaagaatcaattaaaaagattactatcaaaagttactga

SEQ ID NO: 304772 - DNA, 618 bp, Homo sapiens
gacatttaagaatgttcagaactgagtcatcaaaaaatattgattgggattattaagaatattggtcataattcaaagagcagggtaagacagaaagcagaagaacatgatgaaacccatagagtaagggaggcccatagcagaaagaaaaggatggtcccattgtaagatgaagctgcttccaaaggaaaracaaagctatctttttgcacatgattttcatataataaatgagcctgtgaaaaattagaaatctcataggagaccattaattcttaggggtatgtaagaattacagtttatctactatcaacctaaagacagtaggatatgcaatgtcagtggagagaataacttttgaccaatttttcagttattaatttctcatgcattttttaaaaaggtaagaagtgacgatagaaagaaaaataaattacttttttggtggtctaataggatcattccaaaaaattcaaggcaaacaatagattaaaatgtgtatagttctctattatctggctaatgtatgctgtggggattgaaggataataaagaggtaggaagttctcaaaagtaggtgatgcatgttaacttactatgacacacaaacaattaaca

SEQ ID NO: 304773 - DNA, 515 bp, Homo sapiens
ctcagcactgagactgctcaagtacaatttwaaaaaaaaggttcaattgatctcttcatagttgatgtgttgtcttctgaagttactttaaattattattactctggaccctttttcacccctgcctttcagcatgcatcactcttcacattgattttcatcatttcaatgtaattggaactagaaaacgtccagcaggagcaaaagtccatccacaatagtagcttttcaaatatctacttactgctcacctgtgcaaaggggagatttgaatctgattatgaagaatccagaaaatcccttcatttttccccacttacacaaagtaatacaaaaatccctcaggggaaacctccaacaggacttatctgtttccacaacttttatctctgttgatcccaggctcagttacatcagaatattttacttttacagacattgtttatcaattctttccagcatgaaaagtatgtattaaagtgatcacctgagttatgccccaaggcaatattaag

SEQ ID NO: 304774 - DNA, 515 bp, Homo sapiens
ctcagcactgagactgctcaagtacaattttaaaaaaaaggttcaattgatctcttcatagttgatgtgttgtcttctgaagttactttaaattattattactctggaccctttttcacccctgcctttcagcatgcatcactcttcacattgattttcatcatttcaatgtaattggaactagaaaacgtccagcaggagcaaaagtccatccacaatagtagcttttcaaatatctacttactgctcacctgtgcaaaggggagatttgaatctgattatgaagaatccagaaaatcccttcatttttccccrcttacacaaagtaatacaaaaatccctcaggggaaacctccaacaggacttatctgtttccacaacttttatctctgttgatcccaggctcagttacatcagaatattttacttttacagacattgtttatcaattctttccagcatgaaaagtatgtattaaagtgatcacctgagttatgccccaaggcaatattaag

SEQ ID NO: 304775 - DNA, 555 bp, Homo sapiens
caaaagtccatccacaatagtagcttttcaaatatctacttactgctcacctgtgcaaaggggagatttgaatctgattatgaagaatccagaaaatcccttcatttttccccacttacacaaagtaatacaaaaatccctcaggggaaacctccaacaggacttatctgtttccacaacttttatctctgttgatcccaggctcagttacatcagaatattttacttttacagacattgtttatcaattctttccagcatgaaaagtatgtattaaagtgatcacctgagttatgccccaaggcaatattaagcattccctttcctaccaagtgattttctgtcaactagtgtatttggtactcttgggaaaggcagagattcatttataaagaattatgctacacagtcataaatttaatcccccaaatcaatagcatttagattttttaagaygataaccaaggtgctatcaacaataataaagtctctgttctttacagtcagattatttttgcaaacgtaagtatttgactattggaaaaccacagtgtt

SEQ ID NO: 304776 - DNA, 523 bp, Homo sapiens
aaagtgcagcttcaaatgaatgattgcttggaagtgacaaaagtgggagtcaccaagatgacaccaattattgacttaatcattcatcattcactgtgttatatatgtgaactgagcatttataggctccagactctgctaagctctactgcacaaagttaagaaagagagagggggacagggggaactcttgtggccaaggagcccacttttttttggcaggacagaaatatttaaacaattgttacaaagaatataagttctgagataaaartgtaatgctgggaaaatgccaggtggaacatatcactatgtaatacgttcaaggggaatcaaggaaagctgcttaaaaggagggagggtctagaaggtaaaaaactgagccaaaaaaagaaagaaatgaatattaggtccaaacaggtgcaaaagaagtgtgccaagcagaacaatatgtgatttagggaatgcgtacagcatttggtatgaaaaaaaaaaaaaaagaatggagttattcaaagcagaa

SEQ ID NO: 304777 - DNA, 523 bp, Homo sapiens
aaagtgcagcttcaaatgaatgattgcttggaagtgacaaaagtgggagtcaccaagatgacaccaattattgacttaatcattcatcattcactgtgttatatatgtgaactgagcatttataggctccagactctgctaagctctactgcacaaagttaagaaagagagagggggacagggggaactcttgtggccaaggagcccacttttttttggcaggacagaaatatttaaacaattgttacaaagaatataagttctgagataaaagtgtaatgctgggaaaatgccaggtggaacatatcactatgtaatacgttcaaggggaatcaaggaaagctgcttaaaaggagggagggtytagaaggtaaaaaactgagccaaaaaaagaaagaaatgaatattaggtccaaacaggtgcaaaagaagtgtgccaagcagaacaatatgtgatttagggaatgcgtacagcatttggtatgaaaaaaaaaaaaaaagaatggagttattcaaagcagaa

SEQ ID NO: 304778 - DNA, 523 bp, Homo sapiens
aaagtgcagcttcaaatgaatgattgcttggaagtgacaaaagtgggagtcaccaagatgacaccaattattgacttaatcattcatcattcactgtgttatatatgtgaactgagcatttataggctccagactctgctaagctctactgcacaaagttaagaaagagagagggggacagggggaactcttgtggccaaggagcccacttttttttggcaggacagaaatatttaaacaattgttacaaagaatataagttctgagataaaagtgtaatgctgggaaaatgccaggtggaacatatcactatgtaatacgttcaaggggaatcaaggaaagctgcttaaaaggagggagggtctagaaggtaaaaaactgagccaaaaaaagaaagaaatgaatattaggtccaaacaggtgcaaaagaagtgtgccaagcagaacaatatgtgatttagggaaygcgtacagcatttggtatgaaaaaaaaaaaaaaagaatggagttattcaaagcagaa

SEQ ID NO: 304779 - DNA, 586 bp, Homo sapiens
agcattacatttaatagaaaaataatgagttaaagccactaataagttatagacaaaacagaaaaattttaaaacaaaataagagatgaaataatactcaccaaaaatacaagaaattaaaataaaaccattaaaattattccactgaagtgtctagatacaagaaaaagttattttcacattatagacggaatcagaaaatatatatggaaatatattttagtcacatgaaaatatgtaacataatcctacaaaaaattgtttgatctatgtaaataaaataaagggagagagagaagaggtttatacataaattaagtatgccaagcactgcactggaatttcaccttcaaaataattcagtaagataggtattatataaccactactgatgtgggtagtcaggctctgagtaactaacttgcacaaggtcataaaatttgaaagtgtttgaacaagaattcaaatcttgaactgaaaaatgccaaggtctatgttgtctcacagcattgtgctacagaakttaaagttttctcatcgtctcttcatattaagctatcccaatgaacgagaattcattttattt

SEQ ID NO: 304780 - DNA, 634 bp, Homo sapiens
gctctgttgcccaggctggagtgctacacccaccagaatttttaacatagctttttacttcagcagtttataagtcatgaacaaaacacaaggaaacatgaactaatgtttactgaataaaaatttctaaaagttagagattttatatgcattgtaattcatcacagtaatacaggacagtttttattttattcctgattcatagatgatgaaactgagtatcagagaggttaagaaacttgcccaggattgtatacaagaaaaggtaagaaccaaggcaatagcccagatctatctagctttaaagattacatacttaatgtaggcaataccttagtcgatgaaagaagaaaagccatatgattttttatttcaataggtacaaaaatatttaataaaaattaatagctattttcaattgttttaagaagaactgttaggaagactagaaatagattaaaattttcayaacctgataatgtacatttatcataagcctacaaaaaacattacatcaaatggtaatgaattctttaaaatcaggaacaaaataaggacttctatcaccacttctattaaactttgtccataaaataccagtcagggaagtaagaaaataaaaatgcataataga

SEQ ID NO: 304781 - DNA, 613 bp, Homo sapiens
acacattaaacacaattttaaatggattaaagacctgtaatttataatagaagagtatcttcatgaagccagaatagaaaacaattccaaacaagacttcaaatcacaaaccataaagggaaaaattttgttaattttgactatattaaaattagtaatcagaaagactacaatgtgcctttgcacatgctgtacttgcaacttgaaattaccttctcctagatayctaaaggtctaaactccttatattatgttctctctgaagcaaactccagaagatagaattcagagcaagtagtttatttgggaagtgatcccaagtagcacaagtagattagttccttgaacaggaaagtgaaggaaatcaataaagttgtgtaaacgaacagattgctgctattgaaaactggggctcaagcctcttggagacctctgagagactgtgtggaacaaagaaactggggacattatccactaacctcagccagcattacttgaaggctatttctggggatgttatcaccacaacacttctggtataacccatatgtagaccaagcacactcttgcaacaagataatgctcacactcagagagtcctagttgcagtaag

SEQ ID NO: 304782 - DNA, 613 bp, Homo sapiens
acacattaaacacaattttaaatggattaaagacctgtaatttataatagaagagtatcttcatgaagccagaatagaaaacaattccaaacaagacttcaaatcacaaaccataaagggaaaaattttgttaattttgactatattaaaattagtaatcagaaagactacaatgtgcctttgcacatgctgtacttgcaacttgaaattaccttctcctagatatctaaaggtctaaactccttatattatgttctctctgaagcaaactccagaagatagaattcagagcaagtagtttatttgggaagtgatcccaagtagcacaagtagattagttccttgaacaggaaagtgaaggaaatcaataaagttgtgtaaacgaacagrttgctgctattgaaaactggggctcaagcctcttggagacctctgagagactgtgtggaacaaagaaactggggacattatccactaacctcagccagcattacttgaaggctatttctggggatgttatcaccacaacacttctggtataacccatatgtagaccaagcacactcttgcaacaagataatgctcacactcagagagtcctagttgcagtaag

SEQ ID NO: 304783 - DNA, 422 bp, Homo sapiens
ttctatcattcattcatgaatgcattcaatcaaccaatgttattgagcacctgaagtatgttggatctcatgttagacaccggaaatttataaatcaggagagtatgccttcttgaacccaaagtctagcatgagaaaatcaagcagataataataaaaagcttgctaaacagactggttgctctggaagcacttaatgcaactgcragatttcacataagagatgactgagctgaatcttaaggaaaaggtttaggcaggccaagaaatagagaaggtcagttcacttgcaggaaacaacaaacacaagatgacatgtggcaagagagacatggtatcttctaaagaaaccacataaaatttagtggcacaaaaggtatctgtcaagaaggaaaaagaaataagcaggaactaacttgtat

SEQ ID NO: 304784 - DNA, 422 bp, Homo sapiens
ttctatcattcattcatgaatgcattcaatcaaccaatgttattgagcacctgaagtatgttggatctcatgttagacaccggaaatttataaatcaggagagtatgccttcttgaacccaaagtctagcatgagaaaatcaagcagataataataaaaagcttgctaaacagactggttgctctggaagcacttaatgcaactgcaagatttcacataagagatgactgagctgaatcttaaggaaaaggtttaggcaggccaagaaatagagaaggtcagttcacttgcaggaaacaacaaacrcaagatgacatgtggcaagagagacatggtatcttctaaagaaaccacataaaatttagtggcacaaaaggtatctgtcaagaaggaaaaagaaataagcaggaactaacttgtat

SEQ ID NO: 304785 - DNA, 539 bp, Homo sapiens
agtgattgtaacccaaagaaaataacagaataattgataaatgtataattattagtaattttcaaaggatgtatcgacatgtatgaaactcttttgttaaaataagccccaatggctctcaagtytgcctcagtgatactctagggagagctttataaagaatgggacatttcgaagaataaagaatgggtaattaaaagaaaggcagttgccgacagaggaaagagcatgcaaagataggtaagcatattaagtacattgatgtatttataaatgagaaaataaattctattcagtaactcaacaagataaatatgtgttcagaggacatggacagatgctatgaaatacagtacgtgattcatataagttaagatactatcttactgaactaatgctgacatataaggaaatggtaaactcccagaatgctttttttgcattcagattaacagctgtggtcttgctgcataggaaaatgtttaagtgagcttttggagactatgttatttccttagtataaccataaggactataag

SEQ ID NO: 304786 - DNA, 541 bp, Homo sapiens
tgagattatttccatttttaaaaatttactaaggtgtatttatagcccagaatgtactctatctttgtgaatgtcctacacaagcttcagaagtatgtgtatyctactgttgttgagtggagtattttacagatgccaactgaagcaagttgactgatgctgtatgtctctatatgcttcctgactttctgcttgcctgatctatcaatcattgataatggggtgctgaaatctccaactatactagtgggtttgtctatttcttcttttagtctacagtttttgcccccacgtattttgatgatgcattgttaggtgcaaacagctaggattattatgtcttcttgtaaaattgaccgcttattattataatgcctctctctttccctgataatctttctttttctgaaataggctttgtctgaaatttatatagctactccaactttcttttgattagtattagaatgatatagctttctccatctctttttttttaaccatctgaatcgttatatcttaagtagctttcttttaaata

SEQ ID NO: 304787 - DNA, 580 bp, Homo sapiens
aggttcttttcaaagtaaagttatctgaccttcaagggaatctactttgaaactgattattatactatttattcttcatagacatttatttaaagggtttttatcattctggtaaaattgatttagtatatataaaagaagcattcacttaatrtagagctattcatctggaagggttagcattctattagattttattgtgctctttggtttattttctaagttattttgaccaggttttcatttaaataatttaagcaatcaataagattattcctggatttgcaataagaataactgtcctcttcagagcatcctaatgtcaatgatacatttttgatcggtgaacttttgataagatgtcctatgtcactataaatcaataagatttaaaaaatctatcacttttgttgttttccaatcctgcaaacaaattaaaaacaaaattgaggataattagtactggtgtcggtgcgggaaactttataggaacatatgatttttctggaggttgattagctaatagataccaaaacactaaataagtgtattaccattggcacataaagtatacttctaa

SEQ ID NO: 304788 - DNA, 580 bp, Homo sapiens
aggttcttttcaaagtaaagttatctgaccttcaagggaatctactttgaaactgattattatactatttattcttcatagacatttatttaaagggtttttatcattctggtaaaattgatttagtatatataaaagaagcattcacttaatatagagctattcatctggaagggttagcattctattagattttattgtgctctttggtttattttctaagttattttgaccaggttttcatttaaataatttaagcaatcaataagattattcctggatttgcaataagaataactgtcctcttcagagcatcctaatgtcaatgatacatttttgatyggtgaacttttgataagatgtcctatgtcactataaatcaataagatttaaaaaatctatcacttttgttgttttccaatcctgcaaacaaattaaaaacaaaattgaggataattagtactggtgtcggtgcgggaaactttataggaacatatgatttttctggaggttgattagctaatagataccaaaacactaaataagtgtattaccattggcacataaagtatacttctaa

SEQ ID NO: 304789 - DNA, 624 bp, Homo sapiens
tccaaaactaatacatttatataatcttttgttatttaaaaactatgtgatatggtttggttgtgtccccacccaaatctcatattgaattgtatctcccataattcccatctgttgtaggagtgagctggtgggagatatttgaatcatgggggcagtttcccccatactgttcttgtggtagtgaataagtttcatgagagctgatggttttataagaggaaacccctttcacttggttctcattctctcttgcctgctgccatgtaagacattccttttaccttccaccatgattgtgaggcctccccagacatgtgaaactgtgagttcattaaaccttttttacgttataaattagccagtcttgagtatgtctttattagcagtgtgaaaacagactaatacactatgatatatataaacacagactatatatgtaatctrgaaggtaatacatcaaaatattaaagttatgttgtagagcagtagtatttcaatttgtctatttttatatgctttcccatatgtcctgactttcatataataaacagatattgatgttatagtcacaaagcagatattgatattataatacaataagattgtttcaaaatggtttat

SEQ ID NO: 304790 - DNA, 595 bp, Homo sapiens
aaatctacctttataaatgagaaaacatttaatcttacataattaacttaaaaagtaaattattgaggccaggtgtgtaatactgaggctcatgcctgtaatctcagcactttgggaagccaaggtgaggccagaagttggagaccggcctcgtcagcatagcaagactccatctctacaaaaaacataaaaaaaattatctaagcacagtggcatgtgccttgtagtccttggctacttgggaagctgaggggcctgtctcaaataaataaataaataaataaatcattcttgaaatacatcyatactgtacttaagaaaaattactttagaaattttggaaatttcaagacctggaattgggtttttgctgtaaaatttgaagctaggaaatgtagattcagttctctgttcttctatttactaattatgtgctaatgagcaaagcccccaatctctgtgaacttcagtttttgtaataggataaaatacaaatatttctatcctcacagaattattgtgagaatcaaatgaggtcatgcataataagatacactgtacaagttttatttatagctcttattctttggaggtc

SEQ ID NO: 304791 - DNA, 595 bp, Homo sapiens
aaatctacctttataaatgagaaaacatttaatcttacataattaacttaaaaagtaaattattgaggccaggtgtgtaatactgaggctcatgcctgtaatctcagcactttgggaagccaaggtgaggccagaagttggagaccggcctcgtcagcatagcaagactccatctctacaaaaaacataaaaaaaattatctaagcacagtggcatgtgccttgtagtccttggctacttgggaagctgaggggcctgtctcaaataaataaataaataaataaatcattcttgaaatacatccatactgtacttaagaaaaattactttagaaattttggaaatttcaagacctggaattgggtttttgctgtaaaatttgaagctaggaaatgtagattcagttctctgttcttctatttactaattatgtgctaatgagcaaagcccccaatctctgtgaacttcmgtttttgtaataggataaaatacaaatatttctatcctcacagaattattgtgagaatcaaatgaggtcatgcataataagatacactgtacaagttttatttatagctcttattctttggaggtc

SEQ ID NO: 304792 - DNA, 456 bp, Homo sapiens
aatgtggtctaaaaactgattagtctcattagtctcccttgagaagaaaacccaaacaaatatttwatggacaaaacacaggaatgggtttttaggagatgaataagatatggtctctaccttctgggaatttaataaaattaaagaatctagtctttttcaaatatcattcaatttcctgacatttgatgatcaccaattctgccctccttgcatggtactatctgccaatcaaaagatcagtgagaccatttatgaggcaatttatattctgatgaatgaatttgatatgtcaaatttctgtatgttttacttctgttgaataaagacaagacagggcaaattcctaaaaagagaatgaactgtatgttgcttcttaatcagtaatagagatattacttcatttttataatataaatctgaagtaccatgaaacattttatgactattagtaaa

SEQ ID NO: 304793 - DNA, 456 bp, Homo sapiens
aatgtggtctaaaaactgattagtctcattagtctcccttgagaagaaaacccaaacaaatatttaatggacaaarcacaggaatgggtttttaggagatgaataagatatggtctctaccttctgggaatttaataaaattaaagaatctagtctttttcaaatatcattcaatttcctgacatttgatgatcaccaattctgccctccttgcatggtactatctgccaatcaaaagatcagtgagaccatttatgaggcaatttatattctgatgaatgaatttgatatgtcaaatttctgtatgttttacttctgttgaataaagacaagacagggcaaattcctaaaaagagaatgaactgtatgttgcttcttaatcagtaatagagatattacttcatttttataatataaatctgaagtaccatgaaacattttatgactattagtaaa

SEQ ID NO: 304794 - DNA, 456 bp, Homo sapiens
aatgtggtctaaaaactgattagtctcattagtctcccttgagaagaaaacccaaacaaatatttaatggacaaaacacaggaatgggtttttaggagatgaataagatatggtctctaccttctgggaatttaataaaattaaagaatstagtctttttcaaatatcattcaatttcctgacatttgatgatcaccaattctgccctccttgcatggtactatctgccaatcaaaagatcagtgagaccatttatgaggcaatttatattctgatgaatgaatttgatatgtcaaatttctgtatgttttacttctgttgaataaagacaagacagggcaaattcctaaaaagagaatgaactgtatgttgcttcttaatcagtaatagagatattacttcatttttataatataaatctgaagtaccatgaaacattttatgactattagtaaa

SEQ ID NO: 304795 - DNA, 565 bp, Homo sapiens
caatttatattctgatgaatgaatttgatatgtcaaatttctgtatgttttacttctgttgaataaagacaagacagggcaaattcctaaaaagagaatgaactgtatgttgcttcttaatcagtaatagagatattacttcatttttataatataaatctgaagtaccatgaaacattttatgactattagtaaaaagaaaaatcaatcacctttggaaaatcattatgggtgtttcataataatatttgggagattgcctaactgtaatttactcatctgctccatgtaatgacattattaatacatacctttggtgttgatatcatttgggctgttattaagattctttttagagccaagaattaagtttcctgtgtagcaaagaacctattacacatagggtttagtaatgaaaaatgacttccttactgtaagtacttctattgagaacatctagctatctagattttaaactctttgcttagaagtacctttatttacatagtggttrttactcactgaggatgcagccctgactgtcataagaatgaagaaagtatcc

SEQ ID NO: 304796 - DNA, 619 bp, Homo sapiens
tagacctagtcaatattttctctcagtatgtgagtgctcagtgtggacggaagagcatcccaaaaatcgtacctggataggacagttcctgtttagatataccaccctttatggttgatagattctaaatgtcctaatttctagtggcattctcaatgatgttttcatttttattcaaatatacattgcttagccacttaaaaacttctctaactttgaggaatttcagataaaagtttaaatgaaatgctttcaaaattgctcctctcgaaatcctgtctcttactctcttcaaagctcttgatacttgttcagyatggtatcatttttcctgtcatgattcccaattcaatttcttaacctttgtgtaacaatactctgtacagtggtagtagattgtgaaatgactgcacttatacgtttgtagatgtgtatttatatttctactggccctgtccgtctctcttttatctgctaaccagattgtaaagacccttgaggaagaaatcgagttttctacttccatttctatctccatggagtaccctgaataatgtaggaattcagtcaaaggcaaatgttaatgaggtattaaaagcttgcctttgacataccatag

SEQ ID NO: 304797 - DNA, 577 bp, Homo sapiens
tgacatcagtggcagtcaggtggctaaactgtttgcacattacgttgaaaatataccccgagagtcaatatgagtactggtagagttttgtgttttgttttttaagctcctctgtctatggagagctatcatttaatcccacatttcttcaaggaagatctgcactcctgaggcctggccccataggccaacagtttctttaatgactgagattaccaagttcttggaaactttccaggggttgcaaaataaatatgagcttcattgtttattttctactgaattctgggaaggcttttcttttgatgcttacagaagatcctttgcagtcaggaatattgaaaggtgagcaggctgtttctctgttgcctttcaaccccaatggaagataacttttatttactgcaaatgaaatattgggaaaaaatataagtgctccctacagaagtctgtgcctgttgtaaacaaggtgtccagaatacaaggatgtgtgtacaacacaggggacttgtaaaagagggattcaagtcaggctagatggagacaatgtcattcrcctgtttacctgtttgtctat

SEQ ID NO: 304798 - DNA, 528 bp, Homo sapiens
ttttatttctttctattgcttgattgctctggctaggatttccagcactaagctgaatraaagtggtaaaaatggacatttttgtcttcttccagctcttagagagaaagctttcagcttttctttgttctgtatgatgttagctgtgggtttgttgtatatggcctacagaatgggaggatatatttacaaactatacatctgataaagaactaacatccattatatataataaatttcaaccacttaataagaaaaaacccaaataaccctattaaaaatgagcaaatatctgaatagacagttctcaaaagaagacatacaaatggccaacgggtatagtaaaaactgctcagcatcactaatcattagtgaagtgaaaattaaaactacaatgagatatcacctcacctcagtgatgtggaaaaaatgaacctcttatacactactggaaggaatttaagttaggacagccattatagaaaccacatagaggtttctcaaaaaaattaaaagaagaactaccat

SEQ ID NO: 304799 - DNA, 563 bp, Homo sapiens
gtctgtgctttacaactttgatgagccccatataaactgccccttgtggaaactccacttttcgatggccctgggtattataacaccctcaaaacagaagttagagctttgacatttagagggatattggtggtctaaagggaaagttagaacctgatgcaagtgaaatccactgttacattcatgataaccattttctgagcttataaatataytagaaagctattgttaagaaaacatagaccctttctttcttctttttttgagacggagcctccccctatcacccaggttcaagcgattcttctgcctcaacctcccaagtagctgggactacaggtgcatgccaccactcctggctaatttttttttttttttgtatttttagtagagtatcaaaactgctgagtggtgtgacttaagaaagcatcaaacatttgtgtgaatttgtatgaggaatgtggaagctttaaagcctgcctgcaagttctttgatactcctcccatacaaggaagagcttaattctccttgccttggatgcaaattggccgtagtcactcac

SEQ ID NO: 304800 - DNA, 569 bp, Homo sapiens
gtattccaatgtcgataggatgcaattcttgttctcaagaaaatttgctctcaaactcacagcctagtcaataatatgtatctacataaaatgattaagtgaaatcacaagaataggaacaaaggtatggggagttagcttttgagcctcttttaggtcaaataatctctgattccttaaacacttctttatgtttttggacataattttatgtagtgagacattaaaaggaggaagagataaaacatgcacttttctcctgatatcagttatattaatatatattaaacaatgacaaatatttaaaaaatgaaaataaaaagtttcaaataatatgctgatattgttatataaataaatagaattaccttggtgtygatttacttatgatattactaatataaaatattatgaaggttctctagaagttacatagtatccagatataaatgcagttgttctctttgtaaaagaatagcacattttattccacaaatcttttaaaattacaattactcttatcaataggtatcgatatctaatttcatgaaactggagaagagagatat

SEQ ID NO: 304801 - DNA, 595 bp, Homo sapiens
tcctttcaattaatcacacagcatcaggcatgatatggttgaacttcgctgtaggttttcaaattgaaataatttaatacagagaatcagtcacatggattatggaagactgggaagccaaacagggaactgtgagacaaccaagagctcaacagcagctggaaatgacttctattcccagggctctccaaagtccaggaaaakaaatgagatatggttaccaaaccatagaagtcagggcactctactaagggctgcccatcatagaggtggagccatgaaagagacaagaccaacatttcaaatgcaaccccaggcaggggtgatgggtgggagtacaggagcatggtagaagtgtagggatggtggtggtggtgatggtaggaataccctggcctttcttttttccctcctatcaaaaatcctaccagtacttccccttcactaaacctgtctggaagccagataacagcagcctaggaaaaagagcctacagagtcaactcttcccccagcctcctacacacaccaatgagagacagaggagagcagggcaaaggcagatggatatgtgggaaaaacatccaatgacctat

SEQ ID NO: 304802 - DNA, 333 bp, Homo sapiens
tttgaaattggaacttatgtttaaaatggaagcagggcctaaaggtttggaaaatgtgcagcctgaccatgtggtaaaaaagaaaaacccattttctggggataaatcaaaggctgctacagaaatttgcataaatcatgagctgaatgttaatcaccaagacagtggggaaaatgtcaccagtgcattccaaagatctacagagcagcctctcccatcacaggcctggaggcctagaagggaaaaatggttttgtgggtcaggccaagggccttgctgctctrtgcagccttgggacttggcaccctgcatcccagctgctccagctacagc

SEQ ID NO: 304803 - DNA, 636 bp, Homo sapiens
ctgcctagattttagaggatgtataaaaatgcctggatgtccaggcaggggcagagccctcatggagaacctctgctagggcagtgtggaagggaaacatggggcggaatcccctacacagagcccccactggggcactgcctagtgcagctgtgagaagaagaccaccatcctccagaccccagaaaggtagattgtctgacagcttacaccatgcacatggaaaagtttcaggcactcaacaccagcccatgaaagcagccacaggggctgtaccttgcagagccacaggggcaaagctgcccaaggctgtgggagcccactccttgcatcagcatgtcctagatatgagacaaggagacaaaaaagattttggagctttaagatgtaatgactgcctggcctggtttcagacttgcttgaggcctgcggctcctctgatttkgctttctcccatttggagtgggtgtgtttaccccatgcctgtacccccattgtatctgggaagtaactaacttgcttttgattttataggctataggcagaacaacttgccttgcttcagatgggactttggacttggacttttgagttaacgctggaatgagttaagactttgaaggactattggaaaga

SEQ ID NO: 304804 - DNA, 617 bp, Homo sapiens
acatacatactgataacaagatcaatccacaaagatataattgttctaaatgtgtacacacaaaacaaaagaaccccaaaatataagaatcaaaaactttgtgctactacatgactacaaaatttagaagtaaaaatattactattaaaaattaaaaccactgtayatatctttagattttattataatgctgtttttccatataaaaatataagaatatagtacaaactgtagtactatttttcacttcacatacatttttccctgggtatgtttgtaacacattgatatataattagatttatttgtgttaaaacatattcagacttcagagattgctagcttttgtcttgatttatttatatttaatcaagtttgagattacaatcaacctgtagattgacaatttctcattatcaattttttcagtacatgaacatggcatatctcttatttaatttgtcattagtcgttaatattttggttttttaaaataaaccttatgcattctatatttttcagtttatttctatttcaagagtttagattccatttctagtggtattagtttttaaatccttatatgttcattgcagatatatagaaatggaattgat

SEQ ID NO: 304805 - DNA, 603 bp, Homo sapiens
aatattaatagccaagaaaatgggaagaaaatatctccagggcatgtcagagatcttcacagcaacccctcccataacaaggttggaggcctaggagggaaagatgggttattgggctggccccaggcctcccctgctgtgtgctgcccctggacatggcatcttgcatcccaactgctccaactctagccatggctaaaggggccatggtacagcttgggtcattgcttctgagggtacaagcccaagcctcgaaggcttccatgtgatgttgagcctacacatgcacagacaacaagagttgaggtttgggaacctccacctaggtttcataggatgtatagaaacacctgaatatccaggcagaagtctgctgcaagggcagagccctayggagaacctcagataggatagtgcagcagggaaaagtggggttggagtctcacactgaggcactgcctagtggagctgtgagaagaggtctaccatcctccagaccacagaatggtagatccactgacatcttgcactgtgtacatgaaaaaaccacaggcattaaatgccagcttgtgaaagcagccacaggggctgtaccctgcacca

SEQ ID NO: 304806 - DNA, 702 bp, Homo sapiens
tgcatgtaacttttgactgtctacaaacttaactaatagcctgttgattggaagtataccaamaatgtatatagcagattaacacatattttgtatattgtatatgttatatatactgtatccccataatctataaaagctagaacaaaggaaatgctattgatgaaatcataagaaacagaaaatatatttactacttattaagtggaagtgtgtcatcataaatatcttcatcctcttcatattcacattgagtaggctgaggaggcagacgtagaggagggtttggtcttgttgcttcaggagtggcagagatggaaggcatagaggaggtataaggggaggcagcagatgtaggcacacatggtgaaattttattgaaaaaaatcctcatataaatgaacctatgcagttcaaacccacgttgttcaagggtgaattgttctaatgtactaactgtgttatctggtgaaacaatttctgaaccttggaactaattttaagtgtcactaagatgattgtgatatttaatcaagtaatataatattatttgagttatttcaacttagatattttaatctgtatatgacagattagagcaccacatatttagttgaatatgagaaagacatcataataataaacagcctgatctatgagaaatctcacatactgcatatatatatgatctagcacaatcca

SEQ ID NO: 304807 - DNA, 352 bp, Homo sapiens
aaactctatgcctcttctcatctgttacggaccaaaaaaaaaaaagtcactcttccataccagtagggagctgcgagctcctttccattatttttcttgcttttttggaggcagagaattttcccactactttgtgataattttatttttaccaatatcaagttactcttatagaaatcaagttttaagggagacatcatggtatttttgtgttactctgagcrggaagagcattcttccatatattattttttttaattaatagacaatagtattcttgcctttgtaagttatttttttaaataagattcatagtgttttgtgttccagtttttaatttaacttgctcttt

SEQ ID NO: 304808 - DNA, 484 bp, Homo sapiens
tctcttcccccttctccaaccctcccctccctctagactgacacacacgggggaaaaaaagcgaatccacttgtcttaggtgggatcatgcttgagaaatccatgtgaccattctgaatagtctctaggtgagatctcctctttgcttagctttatttccctgcctgtattagtcacagttctcaagagaaacacaaccaataaagtatgagtagataaatggaaagagatttgttatgagggattggctcacacaattatggaggctgagaagtcctatgatctgttttycttaatttattttccctgagagtatgcctcagtaattaatcactttcacaagaatcccaaacttgggctctgtttttagggtatcaaacctaagatagctgatgccaggagtggtcctaggaagtaaactcaatgacaaatattccagaggtggaatataaactgaccagaatacagtgaggatggcatctct

SEQ ID NO: 304809 - DNA, 510 bp, Homo sapiens
tggggcaatgtctggcttttaaggtgtataagaaaatagtaactaagaaaactgtggaattatgttatttctaagtgccagtgatgcattaaaaagagaaaacaggctcaactgtatttttaatcagtaatttagattttattaatcattattttattttatttttattwtttatttatttatttattttttgaaaaggggtttcactcttgttgcccaggctggagtgcaatggctcgatctcggcttattgcaacctccacctcccaggtacaagtgattctcctgcctcagcctcccgggtagctgggattacagtcatgggccaccatgcccggctaattttgtatttttagtaaagatggggtttctccatgttggttagcctggtcttgaactctggacctcaggtgatccgcctgccttggcctcctgaagtgctgggattacaggtgtgagccaccacgcctggccattaatcattattttaaagaaaaatgtaagaatctg

SEQ ID NO: 304810 - DNA, 510 bp, Homo sapiens
tggggcaatgtctggcttttaaggtgtataagaaaatagtaactaagaaaactgtggaattatgttatttctaagtgccagtgatgcattaaaaagagaaaacaggctcaactgtatttttaatcagtaatttagattttattaatcattattttattttatttttattttttatttatttatttattttttgaaaaggggtttcactcttgttgcccaggctggagtgcaatggctcgatctcggcttattgcaacctccacctcccaggtacaagtgattctcctgcctcagcctcccgggtagctgggattacagtcatgggccaccatgcccggctaattttgtatttttagtaaagatggggtttctccatgttggttagcctggtcttgaactcyggacctcaggtgatccgcctgccttggcctcctgaagtgctgggattacaggtgtgagccaccacgcctggccattaatcattattttaaagaaaaatgtaagaatctg

SEQ ID NO: 304811 - DNA, 510 bp, Homo sapiens
tggggcaatgtctggcttttaaggtgtataagaaaatagtaactaagaaaactgtggaattatgttatttctaagtgccagtgatgcattaaaaagagaaaacaggctcaactgtatttttaatcagtaatttagattttattaatcattattttattttatttttattttttatttatttatttattttttgaaaaggggtttcactcttgttgcccaggctggagtgcaatggctcgatctcggcttattgcaacctccacctcccaggtacaagtgattctcctgcctcagcctcccgggtagctgggattacagtcatgggccaccatgcccggctaattttgtatttttagtaaagatggggtttctccatgttggttagcctggtcttgaactctggacctcaggtgatccrcctgccttggcctcctgaagtgctgggattacaggtgtgagccaccacgcctggccattaatcattattttaaagaaaaatgtaagaatctg

SEQ ID NO: 304812 - DNA, 559 bp, Homo sapiens
tattctaactccagaaagtttcttcctagatatttattccatatttacctccagcaaactagtaggtctatgtaggcttagcctctgtctacaatgaagctatcaatctggttccagttgcctttctctacrttatccaccttttttttttaaagtgtacccttaggatggaaagtctccatactctattgcaaaagaatgaagctttttggagaaggcttttgaaccttctgttctacagtatgttccccttacccccatgaccctgggcatggccgtacagttggtattgagggcaatggctgtgcttctctgagtgacaccctccttttaggagttgagtgattgatggtggaaataacaacagtgccaggtttcttggtttgtttcttggtgtgaaacctgcaccccataaaccagggcaagtgggaatgatgtcctcacattctcagcagtgccactcccaagatagagcctccaaacaacatatgggggctaggtggaaaaaaagcggtgcttacctctcaccacactcacctgaaacatagtctgagtaaca

SEQ ID NO: 304813 - DNA, 579 bp, Homo sapiens
ctgttaattcttatcaagttctcattgattttcttgcataaatacatatttatttactatatatctttagggccatttccagaaaattagatggctgtaatttttacagttttcaacaacttcacggaagaataggttcgtggagctcctcatgttgtcatactggaagtagctcccctgcgtctatttttaagtctctttccacttcatcattcttctcaaactgtgattaacatctgagtattcaagatattccagaaagtttggcaaggccatatgataaatttggattgtctttataccccttgatttaatgcatatatatagggtaaaatatttatattaaagtacatatattattgtaataacacatatgattcagataggttttaaacataaaatctgagacaaaaaaaaaaaaaaaaacctcttgtatgagggttttccagagggacagaaccaataggatacatatttactttaaaggaagcttattaggttactwggtagaactggctcacaagattacacagtgaaatcttatgataggcaagctagggaaagagggaagccagtcag

SEQ ID NO: 304814 - DNA, 586 bp, Homo sapiens
tcttccataatttaaaatgaaatgtagaagagattaatgtaatataagcatacatagtctaacaaacaacaacaaaaacaattgtttaaagattcagttctagttacaaaaatattctattacttctaaggcctaccctttgccctcaacttctataragatgtccttctcaatagctcttcatctttctatattctttcttcttttccctcaagatttgactatgcaactttttacgctcacatagttttaactgcattcttgaagctaattattccccaaagaacatctctgttttgtcctttctatctccctttattccaccaatctaattacatagaacattgtgttccagaaaaatactgacagatcattttcccagtcgacttctccaactattaaaatgaatcttacccctcactttcattttctccttctattgactctagtgctgaatttagcacagcctctaaaatgaaagtgtgctaatgatttcagggaactataaaacatgaaaattacaaatatttcaatacactgccaagagaacataatacagtactcagtgtatcaccacctgacaaat

SEQ ID NO: 304815 - DNA, 567 bp, Homo sapiens
gtaaacatcttacatgttttagtatttttattctccagcagattatagttcttgatattactataaatcctactgctgtcttattacttaagttttgaattgttcattgccagtgtatagaaatacaactgatatttgaatatgggcattttatcatagaacactgcaaaaaaaaaactaattcgcttattagttcttacttgttttattgatactacctttatgattatgttacttgtgaataaaaagttacacttcttttttaatgtgaaygatttgcatttcttttgttgtcacactatttaaacctccaaaacaatatttactggaagtgtgatggagggcatctttgaattattcctgatcttacgggggaaaaacattatgtattttactttccattgatgtccactgtaggtttttcaaagatgtatctcatctttgtccaatgttgatgacatttttttttcagttttagatgttggattttataaaatgctgattgttttaagaaaacacctattaagttgacatatatattttttttagtctgttaatatggcaaat

SEQ ID NO: 304816 - DNA, 368 bp, Homo sapiens
taactcttactgtggttgagactcttaatacagtyttcaggtaacaaggatgataaacagtagagggtagtgaaaagggaatgaagacgagagaagtgacattaccaaaaggctctatcacaatcttaacaccaaggacagaatattgcaaaaaaaagtcacttatgacagtaaaataaaatcattctaatatatttgtcccaatgcaatattcctgtctttgttttgtaggcatgtatcctcaaaagagaaagaaagtgacttgtgaaagaaggagtattgttcagtaaagccaaattgtggttgattgctaagtcagaattttgtactaacattatccataaaaattgtgtttgattttatttcat

SEQ ID NO: 304817 - DNA, 368 bp, Homo sapiens
taactcttactgtggttgagactcttaatacagttttcaggtaacaaggatgataaacagtagagggtagtgaaaagggaatgaagacgagagaagtgacattaccaaaaggctctatcacaatcttaacaccaaggacagaatattgcaaaaaaaagtcacttatgacagtaaaataaaatcattctaatatatttgtcccaatgcaatattcctgtctttgttttgtaggcrtgtatcctcaaaagagaaagaaagtgacttgtgaaagaaggagtattgttcagtaaagccaaattgtggttgattgctaagtcagaattttgtactaacattatccataaaaattgtgtttgattttatttcat

SEQ ID NO: 304818 - DNA, 578 bp, Homo sapiens
actcagcccagagctgtgaatgagcaatctagacatttactcaaaatctccacttcacttgaattactatagcttttcattggctcttctgtaagtatttgttatcatggygataggaaacacatgttctgatgttcctctgcaaagtgatttgctctgtaaaaccctatcttagggagggtttttgatgtagatagacaattttaggaatttagtttggaaaaaaaatgttcaatgtatatttcaggtgagaaagtaatgaatggctggaacaaggaatgcatgcatttttttttatcatatggaactccctgatatttctgtcttgaagtccctcaagcaagagttggttctatttttaaaatataaatatgattgattgatggataggaatcatagtgttataggaacaacaggttcgtatgcctgctgtgcaataacatatccattaagctgagacagcaaagtttgcagcagagaaagagtttaatgattgcaggacactgaatgaggagagaggaggagctcctcaaattcatctccccaaaaagttctaggttgggttttttaaggagatc

SEQ ID NO: 304819 - DNA, 556 bp, Homo sapiens
aggtcgtcaattttatgtgtcaacttacaggactaagggatgccatagagttggtgaaacattattttttagtatgtctgtgtgtgaggatgtttccagaagaaaatagcatttgaatctgtaggctgagtgaagaagatggtcctcaccaatatgcgtgggcattatccaacatgctgagagactgaatagaagataaaagcagagaaaaggcaaaatttgctctatatttttsagtgaggatatacatcttctgcactcagacattggcacttcttgtttgggggatttcaggcttgttcctggatttacgccattgtccctccaacctcagtggttctcagggcttctgatttggactgggacttacaccattgggacctctgtcctcaggccttaggattcagactgaattacaccactggttttcctagttctccagcaaacagacagcagattatggcttctcagcctccacagttgtatcagccgattcctataagtcttctcttatatatattataatatataatacatttaaaatattatattgtat

SEQ ID NO: 304820 - DNA, 596 bp, Homo sapiens
tttatgctatcagactcaaaaaataaaaaacttaaatgttatagaaaaaataatattctagggacactcaatctcccacattattataagagatctctattgtgattaatattaggtgtcaacttgactggattgaaggatggctagatagctggtaaagtgctgtttctgggtgtgtctgtttgggtgttctcagaggagactgacatttgaatcagtggactggaagaggaagacccaccctcaatgtggatgggcaccatccaatcggttgccagtgctgctagaacaaagcagccagaggaagttgggataagctggcttgctaagtctcctggctttcatctttctcctgcgctggatgcttccttctgtccctcctgcccttaaacatcatactctagratcttttccctttgaactcttggacctacaccagtgtttgccagaggctgttgggcctttggctacagactgaaggttgtactgttggcttccctgtttttgaggcttttggactcagactgagccactgctggcttctttctcagcttgcagagagagactatcttgggacttgaattgtgattgtgtga

SEQ ID NO: 304821 - DNA, 596 bp, Homo sapiens
tttatgctatcagactcaaaaaataaaaaacttaaatgttatagaaaaaataatattctagggacactcaatctcccacattattataagagatctctattgtgattaatattaggtgtcaacttgactggattgaaggatggctagatagctggtaaagtgctgtttctgggtgtgtctgtttgggtgttctcagaggagactgacatttgaatcagtggactggaagaggaagacccaccctcaatgtggatgggcaccatccaatcggttgccagtgctgctagaacaaagcagccagaggaagttgggataagctggcttgctaagtctcctggctttcatctttctcctgcgctggatgcttccttctgtccctcctgcccttaaacatcatactctagaatcttttccctttgaactcttggacctayaccagtgtttgccagaggctgttgggcctttggctacagactgaaggttgtactgttggcttccctgtttttgaggcttttggactcagactgagccactgctggcttctttctcagcttgcagagagagactatcttgggacttgaattgtgattgtgtga

SEQ ID NO: 304822 - DNA, 586 bp, Homo sapiens
ttgtacagtgcccaacttgtgcattcatcccactagtaagtaattttggttatttaaaaataaaataagtatgtatttttttcaattcaggtctattattttttcaaatggatactgtgttcttagaacaaaaataattgttgtttggacctttctacttactaaacataactgttagctttttggggttttttttttgtcctgtaatcartgtgaaaaaaatattgagagactgagggttctgtgaatccagaaagttacgaagtctcttctctgatctcatacaacatgagtgctaaaaaaatataacaaaacgacaaaggaacaaaaatctctaattggatattagacatcaatgtcaaaaatatttgattcaaaacaaaaggagataattgtgctatcaacatcttcatcattactacgtacctaatataaaactaattactactacctgtaatttctaattcttacggcaatccacttacatagatatgaatgatgtttttgaagattttacctgagattgagattatagaacaagcagatggtctgtcagaacaagtagattgccatgtcttctttctgc

SEQ ID NO: 304823 - DNA, 586 bp, Homo sapiens
ttgtacagtgcccaacttgtgcattcatcccactagtaagtaattttggttatttaaaaataaaataagtatgtatttttttcaattcaggtctattattttttcaaatggatactgtgttcttagaacaaaaataattgttgtttggacctttctacttactaaacataactgttagctttttggggttttttttttgtcctgtaatcagtgtgaaaaaaatattgagagactgagggttctgtgaatccagaaagttacgaagtctcttctctgatctcatacaacatgagtgctaaaaaaatataacaaaacgacaaaggaacaaaaatctctaattggatattagacatcaatgtcaaaaatatttgattcaaaacaaaaggagataattgtgctatcaacatcttcatcattactacgtacctaatataaaactaattactactacctgtaatttctaattcttacggcaatccacttacatagatatgaatgatgtttttgaagattttacctgagrttgagattatagaacaagcagatggtctgtcagaacaagtagattgccatgtcttctttctgc

SEQ ID NO: 304824 - DNA, 644 bp, Homo sapiens
ctgtgttaaaggcagggtttgggtattggtgtgcttgtttgggtaacataggtgaataaaaacaaaaggataaataaaatataggtcaactggcagtgcaacatgtaagctggccttgtgattaaacaatgttttgttttgaatcaggtctgaagcttctggaggtgccaaggagggataatcaaagggtcttgagatcatggatgtcagaactagcaggagagagtcatagaggtgtagcaggaaggatctaggaagtgacttcaaaagtttaggcattgcttttctgatttcattttccccctaaaatggacagttagggctctaattcactaaaggtatcccagtaactgcatgtgattgaaaagcactaagaaattaaaaamcaaaaaacaaacagaaacaatacttctctatcattgtttttccttcccactgtactgttcaaggatagcagatactaatatgaataagtcatattatagagccttgattaggcatgtttacaacaagggtggttttcaaagaaattttaaaatgcagaaaaccacataaaagtttctaaaacctaaagtcaggcagtcatttatgagattaattggggaaacctttctgaacctcctccctccaaaaatttcacagaa

SEQ ID NO: 304825 - DNA, 496 bp, Homo sapiens
tggtgcaacatcagcatccgtaaataccaccccttgaatgactcagattcactttcttttctaattaagtttacttcatccagacatcttacttgctcacaatttttggaaacatttataagaaaagtgtttatagcaagaaatgcaaccaactgatcccggtgggtcagcagttaatcttgtagcatcacctcagtctaccacagctactagatttcccttctgctagataggcactaccctccaaatggtttggtgagtggggtgactaagggtttcgagcccctatttkccatgacttcatcaggctgtggttgctgttattgccatttataattaaaaacagaaatgtcagaaagtaataaaacgctaaaaaataaaagatagtaggatacagaagctggcctgaaggagcgctcataggccacagctggaacaatttgaacaatgaaatgatagaattggattataatccaaacattaaatatcaacaagt

SEQ ID NO: 304826 - DNA, 462 bp, Homo sapiens
ccctaagtgagtcatagggagtgatggtgagtggaaccataccaactttcagctcttggttcctgaacctacgtattcaactactggtaacactacatatgatggccagtggtttacagtgtgtaccacattgtttataatggtatttccggctctcagaatgtcttcttcaagctgacacattcaagaggcgcttccaaygttttatgaagccagcagcttttgaaaggtgcgctgtatgttaaaatagttggttctatgttcatgtttctctttccacattcttttctataaagtatgcccctagttctggtgtgatcttatataggattccatataacaggtaaaaaagggaaatccatacctggaatgtattaatattgaaagtatctgatataattaatggaccacaaaatgactgcttgctctcttaaagtaatggtgtcatatcaaggactcagc

SEQ ID NO: 304827 - DNA, 613 bp, Homo sapiens
tttgaatgaagtgagacttaaattgaggtttgttttattttattttgcctatggctgtgcaattattttagcatcatttattgaaaaggatatccatactcatataattgcttttgytcctttgtaaaaaatcaatcagacatatttatatgggtctattttcgagttatctattctgctctattgatctatatgtctatctatcaatatggcactataattataacgataggtataaagtaagtactaaagttagatggagtcattcttttactttattctatttatcaagattgttttagctattctgaggtttctttctttctatataaaatttaaaacaagttgtttttaatgtctacaaaagtaacatagtgggattttgataggaattttgttaagcttatagattaatttgagaataattaaaatatttattaagctgactcttccgattcatgcaaatggtatatctctttatttgcttaagacttatttaatttcagtcatctattctgtaattttcagcatatacaacctgtacatattttgctaagtgtatatctgacaagaattttaaagtaactgtcataacaagtattcaaaaacaaat

SEQ ID NO: 304828 - DNA, 586 bp, Homo sapiens
gaacaggacagggaaggggaggaaagcaagggggcgaggttaggccctgcagagggctgctcttgctgatcccacagggaaacctgtaagtttctgttaacttgagaggagagaactgagctttcatcctccacaccctcagacattggctaagggcyaccctgagggtgggggagggatggaatcttccgggcacctctggctgcctgcacacgggagcagggggctccggcagctcaaaggtcatcctcccatgagaatggcttgggcaggcctctaaggaagaaacacacagaaaagggggccgtggggagggtccccgacagcactgctggagtatgggcagcccccagcctagcatacagcgagtgttcagtacatggtcctgggtcagtcactggacaattcatgcaaatgagaatcacagaaaggttaggacatgaacctgcagaggcacagcatatccatatagggactggagttagtaagtcccttctcagacaggcttagatctcctaatgtcatacatagttctttggaatttcaagctgagatcttcttcgtatttcctgagaatccttctcct

SEQ ID NO: 304829 - DNA, 515 bp, Homo sapiens
atttgtgttgtttttagccactaactttgtggtcattcattgcagcagccaaaggagacccttttaggtggtgtgatcatttaattttatgtgtcaacttgactacctagagtacccagctatttaatcaaatcctcatstaggtattgctagagaggtcttttgtcaatgtggctaacatctacagtcagttgactttaggtatgtaggagggccttatccaatccgttggaaggcaggaagagcaaaaatgggggtttcccacaaaacaaggaattctgtctcaagcctatagcatcagctcctgcctgagtttccaacccgactgtttaccctacagttttcagactgtacatctctctgaacattttggtggacatgcaaatacgtttctgttcatttcaccttgatgcagtggaaggggtcaggggcttggactctgggccccccggctccccagtctgtcctctgtctgctcaggctgtctcccttgcctcctgcaaaaagagaaacca

SEQ ID NO: 304830 - DNA, 579 bp, Homo sapiens
ggattcagtgtcattctagtgtatgkggacatccacttgtccttggcactatttgttgaagagactgtctattctccagtgtattgccattgctcctttgtcatatatcagttgacatatatatgcggctctatttctgggctttcaattctgtgccaataatctatttgtctgtactttcacaaataccacaccattttattactgtatctttatagtaactcttaaagttgggtagtgtcaggttttccaacattgttcttctctttcaatttttgattggctattctgggtgttttgcttctccaaataaaccttagaatcagtttgttgatatccataaaacaacttgcaggattttgattggggtcgtcttgaatctgtatatcaagttgggaagaactgacatcttgacattattgagtcttcctatttttgaacactgatcagtgttttcatttatttacttctttgatttcttcaatatagttttgtagttttcctcatacagatcttacacatattttattagatttattctcaagtattttatttctttaggtgttaatagaaatggtt

SEQ ID NO: 304831 - DNA, 619 bp, Homo sapiens
aaaagttgctggttaagtgtgtatgaaggtactcaggctatgttaaaagactccagagtcctgggttgttaccaaatgtgcccggggctgtgggagaagacagatgcccagcgcaggctgctggaagattccagttatccatcatccagcaaggatgtgctgtgtcctactatgtgctgctactgcaccttctcctgcagcctctagagcaacacagacacaatagtgtcccacagtgtcccagccatcgagaaggtaacagtccagttttccaatgaccaattaaggttgttgtaacattttaacaaacacaaagcagccacttagccacctcatggtttccccaggccctgggcagccccrgcttctggacctgcatggaagagctccctccctcccaacaagagcctcatgctggacactgggtgatggcaggcagccacccaccatgctcaatatgctgacatcagcaagattttcccagccttcaccaacagtcttcctacctctactctacacatggggagagactggccagggccctccagcaaggctgcaggcacatgatgaataagccaccagttcctggctgctcctccggccctctgcagaaacctct

SEQ ID NO: 304832 - DNA, 619 bp, Homo sapiens
aaaagttgctggttaagtgtgtatgaaggtactcaggctatgttaaaagactccagagtcctgggttgttaccaaatgtgcccggggctgtgggagaagacagatgcccagcgcaggctgctggaagattccagttatccatcatccagcaaggatgtgctgtgtcctactatgtgctgctactgcaccttctcctgcagcctctagagcaacacagacacaatagtgtcccacagtgtcccagccatcgagaaggtaacagtccagttttccaatgaccaattaaggttgttgtaacattttaacaaacacaaagcagccacttagccacctcatggtttccccaggccctgggcagccccagcttctggacctgcatggaagagctccctccctcccaacaagagcctcatgctggacactgggtgatggcaggcagccacccaccatgctcaatatgctgacatcagcaagattttcccagccttcaccaacagtcttcctayctctactctacacatggggagagactggccagggccctccagcaaggctgcaggcacatgatgaataagccaccagttcctggctgctcctccggccctctgcagaaacctct

SEQ ID NO: 304833 - DNA, 488 bp, Homo sapiens
gagctgagccagaaagtaacttagaggttaccccaattctacagctcaggagactgtccagaggggaggggactggccaagaggctcatagcaaaatcagagctgaatggtgtagccaaggcttccaacctaggtactcctggccacacaccaggcaacctccaaatgcagcccaagccaagcccagccccagggaaaggtgactctggactcgctgctgttgaaccttctctaccagattataaaccctttggtgatcgggactgtttctcccacttcctctgagtcccttcagagaatacaggggstactagatggtgccccccaataaggattcagtcattataataatgttgtcagtgtcataactgctcctgcttcacgtgtgccaggaaccatactaagcactttccaacatcacctgaaaagtgggtgaattattcctgagttacccaggggtaaactgaggctcagagaaggtgagtaag

SEQ ID NO: 304834 - DNA, 612 bp, Homo sapiens
tctggcccacaggttatagtttgtggaaccctgactttaagaactattgagggagtgactttgggctaatgcagaggactctcagtgaatrtttttccctctgttgtgtggggacagagaatggagagagaacagaactgcctatccagaaagctgggttcaagccccatgtggctgtgcagcttctggcaagtctctgcacctctctgagcctcagcagcctcatctggagcataggaataaagatggcacccacctcccagtgtcgtcatgagggtcaaatgaggccctcatgggtcacaggcaatgcccttagcaatgagaaacactgggcaagtggtggctgacttaaacctctgcagggagagctctggccgtgactcctgggagccggtgaggtttagccaaagctccgagtggggaatgtgaggggctgaaccgcacaggggggatctttccaacagaagaggctaaaggaactggaggaagtcgagctgatcgcccatcgaggccaggggcctgacgctgctgccctgtttgaaaacagcaagcccctctacccccacccctgtaccacatgggaacagagctttgctgcataagggttgccag

SEQ ID NO: 304835 - DNA, 447 bp, Homo sapiens
cctctctatattttctcatggttagcttattccattagacataatataaatatcaaacgttttcttaattataaccacagaaatgtttgccaggctagaaagaaatgagacaggaaaacatgttttacaaatttaaaaaaaaaaaagccttaatagctcaacaagctgtattttttaactttggaaccttgcttatttcctgattatagtttttaataaagagaatttttatggtaggttgaaaaatgaaagaaattttaagattaaagacttgcttccatacattatagtaagacagtggcttattttgctayatgatttttctggcctcctgtgagaaacaaagtgaataaaattcaaggtacacaagtagatgttatgtctttataataatgtaggtatggatggttttgtaatgttaaatcagatttattcttttttaactgc

SEQ ID NO: 304836 - DNA, 497 bp, Homo sapiens
ggcaatgagtgaagccttaaaccttttaccttgtgaatcctccccctggtactggatcctgtttattttttctccttcatttcctataaaggagtgaggtgggatatggtgaaggaaaataggcactcttaaaaccaattactagattttgtttgctcggtcattacccattgccttgattttctgttccccacaaccagattgtacttcctgattcaaacctgagcttaccatactctgatataactccctggtgagagctcaccttcyattccctctaaagccaacctctacagctgaagtagctcctcctgaaactatcctgaactctagtaataagatctttactcaaatctggcttccactcttgttctctcaagccttcccttaacaaagatcaagtatgctttgagtctaaatccacctggctcctctgagttaacttgaataaattatttaataacgattggatcctaacttttaaaagttaaatagct

SEQ ID NO: 304837 - DNA, 446 bp, Homo sapiens
atactactatgttaaacctactactttaatgatctggctaccgtctgccaaatgtcacttttcaagtgagaacagaagaatgagattgtgaagattcygtggacaatgtctatataatcatttaagtgttaaatataaactaaatgacaatagcagcttgtaaattaatgctaattctggctgggagcagtggctcaggtggctcatgcctgtaatcccagcactttgagaggccgaggcaggtgaatcagctgaggtcaggagttcgagaccagcctggctaacatgatgaaacctctctactaaaaatacaaaaaattagccgggagtggtggcacatgcctgtagtctcagctactctggaggctgaggcgggagaaccgcttgaacctgggagatggaggttgcactgagctgatatcgtgccactgtactccagcctggga

SEQ ID NO: 304838 - DNA, 620 bp, Homo sapiens
gagagaaaaacccactgaagggttcaaatacatgtgaattctactgctttaagagaaataaaacaaataagcctagggaaatattagagtctaaaaaaccctagagttamtctcttttgggaacataaggaggtatacagaactgcagacctctaaacataagtaggaaaaagaaaaataaaagaatattaccaataattaaaggtgccagatcaaaatagtaataaatcaacaaataatttttgattgactggtggaattagatttactaaataaaaatggcttaaattttgactgtactaactataaatgtaatgaattataataattataaatggtataaatgcattctacaatgtgattattttctgtattttagtatatagtataaaatggaattattgggttaaagtacttttattacatttcttaatccattgtttttacctaataaaatttcctcctctatattccaaagttaaattgtctgtatattacttttatttatactgtattttttccaatctggccatttaaaaaaattattagtttgaaaattattaactccttccatcctctaataccacaataataaagtatctgatatagctaattatgat

SEQ ID NO: 304839 - DNA, 538 bp, Homo sapiens
cctgggaaatagctggttaagcttcaccacaaaggatagatctaaattgtttctgaaatgtttaaatttcaaaccccgcatagtcaaggataataaaacagactcatctttttttgccctcttgttaaattctaagcttcacrggcatttgaatacatctaaaaaatttggtttgtgagccttagaatttaaccacttacaaaactcttgagctccctccacttctgaggacgtttcctgacacattcaacagcatcagcgtccaatcaggagggagctcaaagagtaatccagctaattctaaggacacaaaggttttctctaggtaaacagtttaggtaaattacaaagtggtaagtttttcttgaggattgaatgaagaaagctactggatattgtgtaaggcagttgagtttctgccttaaacaagtgagtaaaggctcctatggttaagactgatgtgtgttgagagcacatctaacttgataagatcaattgtattgggagtaattaaaacaaatgtatgttctttggggtc

SEQ ID NO: 304840 - DNA, 547 bp, Homo sapiens
tgtgccctgcctgacatctcaatcggaccaaaaacacccctctccccagctacttgcatctgtcccgcgactggtgcagctgcaggccgccgccctgggtggctcgcggcaggagggactgagcccggggcagcccacaggggcaggaccgcgtcgcttacccagatgccgccgcggcggcaggccgactcctccgtgcaggaggggcgggctcccaagccgcgcactgcaagcagtggcgccggctcacgcacccctcggccgcctctcgcgcggcttcccgcgccggcagcccgcgatggccccacgtgaccgcgtgtctggtagcaggggaaagaggggcgccagggcccggggtgtgcgtgcgtgcgtgcgtgcgtacgtgcgcgccctcccgcccgcccgcctcagtggccgggcgggggtcggcccgcgctctgagtgcygccgccacagttcgcagttgtgactctgtaggcggaagcatagggacaagcctgagcgtcacaggctccccacaaacaaccgcgtgacccggggactttcc

SEQ ID NO: 304841 - DNA, 530 bp, Homo sapiens
aatacagaaaaatttccatagatttttgttaataagctgcaatctgttgtcttcccaaaaaaaatgaggtatatttgagaaacatcttcttgagaggtcactttggtctctatagaatgttttctcctgacattttcttctgtgctagtatctcatgctaaaatggtgaaattattttttctcatattcttatgtgaaccaaattaagggttactcgtgtctattttttctcaaaatggaaatgttttttattataaaatccatgctctttgaaaaattcagcctgtattgaagtacataaaatacaaaaatgaaagtcattttgactcccactccccagagataatcaccrtgtacagttaattccttgtttaaaacgagagaaggcaacatttgatcacagctgtgtgtgcctcactctgcctggggatggcctgtggtgattcatggactcatgttctctgttcacattactcaggttggtaagaattgccaggtagaggaaaggggagtgttttgcattgggctga

SEQ ID NO: 304842 - DNA, 560 bp, Homo sapiens
ttaggcttaatatatagctccattatgtctttagggtgtgggtataaaactaagccaccatttatattattgtttctatgggaatatgtgtttcaagttccaaataaattaaaaataaagttttaggatataacccagttataattgcagaacttcctgtactaagtactgaatttggagtctaatgcacagccaccagtgcagatagtgcataaaattttctaaacttgatcgtgtttgtcacttaagtgcgttgaaataaaacctcttatctttgggagcctctacaactggttattcctggaagtttcaagragaaacctagagaatgtaatagagattggaccctataccctgcaagatggtattctaggaaagaattttgccaatgtgacattatttttatagatggcagaatctttaaggtcatgatcttgggcttagagtcatattgcctgtgttctaatcccatgaagtcctctctttgtgatattacaaaggttatataacactgtatgcctctgttatttaatcttgaaaatgagtcttatagcagcatc

SEQ ID NO: 304843 - DNA, 525 bp, Homo sapiens
caaagtgctctacatacataattttaattaatccccacagccttatgaggtaagtatcatactaattttccagatgggggactgaggttcagagagattatttttcctaaatcacacagaaactatgtatcttagaactggagtttgaacctaggtttctgacttctacattcctgtactccacctatcaagaagtacaaagaagggccttttcagcctagaaacacatgtgataaarctcctatgagattgtgctccttgttcatctgtcatctgctgtgctggtaaggtggctagtaatagtgggtacccaattaacatgctgaataatgtgaaaacgtgagtggaaaacaaaactttatttaaatggttgattcagaatgatgttttagaaataaatattaaatgctgttatgttttgattttccttcatttaaacttaaaacagttagtggtactgtcagcctttttgaggggcccatagtaggtgggctcaattaaaaattaatttgaattcaacttcca

SEQ ID NO: 304844 - DNA, 598 bp, Homo sapiens
agacaggatgggtgaggtttaagaagtagacaagacccagagcatgggaaatggcgggcagcttggaagccaggatcaagtgattgatgttgtttttggtgctacaggaaaacttgaggggtttttaagcagggaagttacaaggtctgatttctgcttttaaaacagcatccaggttgctttacagagaatgacttctaggtagcaaaagagaaagggaggagataagaagctattataacagtctaagcaagagatggtggtgtcatggactggggtggtagcatagagatggaaagaggcagaccaatcagtggtattgtttagttagggtaacaagtaaatcccaatcccagtggcttaaccgagtagaattttgtttggtgttcctgactggtgcartcccctctacctggtcacacagaaaatgaggctttttctgtcttttggttccactctcctcaaagtctcaaaagtcctcattcaggcatcagatcgcaaatgagcaaacgcctcacgggcctggacagaaagtgttatacttcatgttaactcacatcctactagctagaatctagccacttgactgcacaaaatg

SEQ ID NO: 304845 - DNA, 581 bp, Homo sapiens
ttggtaggttgcgtttccattttgtttcaataatttttaaaattttcttaatttcttcactgacccactggtcattcaggagcatattaatttccatttgtctgcacagttttcaaagttccaatggttgttcattgatagttttattcctttgcagtcaaagaagatacttgatataattttaatttttttgaatttttaatacttgttttgtgccctaacacatggtttatccttgagaaagtccgtgtastaagaagaagaatatgtattctgcagccattagatgaaatgttcttcaaatatatattagaaacatttggtatatagtgcagattaagttcaatgtttctttgctgattttctgtctggagatctgttcaatgctgaaagtagggtgttgaagtctccaacttttattgtactgaggtctatgtctctttagctttaagaatatttactttatatatctgggtgctcctctgtttggtgcatatatatttaatattatgatatcctcttgctaaattgacttatccttatataatgtctttctttttataacataaggcacttaaata

SEQ ID NO: 304846 - DNA, 578 bp, Homo sapiens
tttcaacccaccctgtttaagggagcagtgcctctcatcactctgtctcaatctaatcacatgaacccttaaaagcaaagggagcagctactctggaagcttcagtgccacaggtaatgcattcagagcccaggactaaatctgagggtccactaaactctaaaaaacagatgaaaataatctaatagaaaaacattcctatagcctcatgatagaaaaacgtgaagtctcttttctctacttctacccagtaggcaagcagtgattttatcctccagacatatcatatcccctggaaagaaggragctatttgtttctgaagtctacagtcatgggaataagcagttaaaaatgtgggtttttccaatttcaaggtgagaaggcttttgtaaagacatggagaattaaaatcaaagtaggttcttccagtggcagagaccagtgccctctcccccacccagtactccaggagatgctaagattttctcatgaagctgggaggtggatttacggggactaaacctggaaacacaagactaagaggtccatgtttaaacttcacatggcagaactggga

SEQ ID NO: 304847 - DNA, 543 bp, Homo sapiens
gaagaaattaaaacatatgcctcagaagtaaaaagcatcataagagactattatgaacaattatatgccaacaaactgaataacctaaaggaagytgataaattcctagaataatgcaaccttttgaataaggaagaaaaataaagtcggaacagttcaataacaaaagagactgaagaagtgatcaaaaacctttcaaaacaaaaaaagcccaggaccacttggtttcatggctaaattctatcaaacattcaaagaattaaaacaagttcttaaactcttccaaaaaatagagctagagtgaacatttttaaacacattttatgaaatcaacatcaccttgatatctgaaccaaacacatcacaagaaaagaaaactacaggccaaactctttgatgaacactgatgcaaaaaatcctcagtaaaatactggcaaattgaatccagtaacacatcaaaaagattatacatcatgaccacattggatttatccctggcatgcaagtctggtttaatgtatgcaaatcaatcaatatgataca

SEQ ID NO: 304848 - DNA, 604 bp, Homo sapiens
gaacaaacagaacctcagtgtggatggcaggaaaagcagggcaggacctgctcacagaggtcctaacaaacaccacattttattttaaatctatgtgaagctattgtagggatttaagcaggagggtgatggagtccaatttacatttttaagagattacttgcacttctccatggagaatagacttcttgtgaggcaagagtagaaccagttagaaggttgtcttgcagttgtctagggagagatgactgtgccttaaaacagagagagtgataaactgtcaagaagctaaaaataaaagctttttaagaaaatatttattttcctatttttgggaaataaaggtgaagtgaggccacatgtctatagtccaatcagaaacatagagtgtagagatgaaaagaaaccttagaataattttttggattttctcacctcatatagaaagtccctctgctacatctttgasatatggccattgaaccctgctgaaaatcctcagtcttgaacaactgaccacactccacctcctctaccactatgagaaaggaggcttattgacagggatatgagtttccatacatgaaaagaatatgggcattat

SEQ ID NO: 304849 - DNA, 559 bp, Homo sapiens
tctttatctataaaagacgtgcaactatgatttcatttgggagtgaggagactcttaataaagctgtattcaggtttctattgctgtttgaagactgaagcattttggattgtcatttttttccaaagcccgacactgccatgtttttcagatgagcagttcccaaaagctccttcttacttgcttataaatgtaatactgtctttattttaccctccatctgctgccttcytgagtttctttctgctgcattcgttctctgtgagttcctgagaataacatacatgatttatatacttaccattcagtgtctggacaaggtatatgatgatggatgtttctatgacttccttaactctccttaatagttcttactttacaccagattttatgcagtcttgtggcatttgcactgtggggatggtgagaatatacatatttgctatggaaagctcctcccacagatgtcctctgagaatccactaagtagaagctcatgttctctctcagaaaaaccatctcatatgccagggaggcactgtgaaatatttgtcattgc

SEQ ID NO: 304850 - DNA, 631 bp, Homo sapiens
ccagttgataattaatcaacaggtctaccaggcactatcataaatacaaaaagaacataaaacacagttccatcttccaagaatacacagtttatctgaagaggtaaataagaaataagagaaggtacatcatccagtactcagtgatatggactgaaattacaatgagtgataagagattggcaaaacctgagcctgtgggtatgttgaagctggggctgttttcatagtcagttttcttatactgggccttaaggacatatgggattttgctgggcagagaagagaaagaacatctgaggtgtgagaactacaggaacagaggccaagaaacaggcataagcatcactctgacaagatcaagggatcagctgctctaaacactgtaacatttacatgcagccatgtggtcttcacttarcagcatcttccttcatttatgagctcatgccttagttagtgcatatttaccttttagaaaaattgaaaactatgggttttaaagtcagaaaagccctggtctcagatcccagctcaattatttactaactgtgtgaccttgttcaagtttccgttttctaaacagttgaatgaagataataatggcacatttttcataagcttattgtga

SEQ ID NO: 304851 - DNA, 563 bp, Homo sapiens
ctgggtagctctgctgattttggctgggctcacttacccacctgaggctgtgctgaccgagatgatgggtgacttggctccagcatgctagccaggtatgttttcatgacaaaggcaaaggtgcagagcctgagtagaaatgtgcagcgctccttgaagcctggcaaactctcttctgcctccttctgttggcgagttcatattcaagaggtgggtaaacagaccccaccttttcagtggragtgattgcaatttcatctggcaaatatgtggacataaggaggggtaaagaattgaggttattagtgtaatcagtccacgagagtcatctagtctagtagattcttccttctctctttctagtgccatctccctttattcctgttactgtttcttaggtccagctcttactgtctcaagcaggtgcattaggattctcacttgcattcttcacccctccaaggcaccaaacacgtcttatgatacagagctctggtggtatcagttctgcagttaaaaacattcagtgtctacccatgaaattctcttggactgatttctag

SEQ ID NO: 304852 - DNA, 622 bp, Homo sapiens
actcagttcaattactctccctttttctcatttgttaacgtgtgcatctaagtctagacttttttctctgtstaccattttggccatatcccaaagcacaggttttgaaatataatgctcagtcctcttcatttttaagtacttcgtcatttttgtctttataattttatgagtgaagaattatttaaatgagtgtttttccaaagatttttggaggtagaaactaactgtgagaatttttacttgaattgagttatgcacagtaaatgtggcttctgagattttcccttttctatgttggtttaggttttctttgtgacctaacacatggtctgtttgaggatgtttaacagaagtgtatgtgtgtgtgtatatgtgtgtgtttgtgtgtgtgtgtatactcaacttacaattggcttacattctgataaattcattgtaagtcgaaagtaacataaatcaaaactgatttacttccctaataaactcatcataaagtcaaaaagtgttaaatcaaatcttaaaagcccagatgttcctcaacttctgatgaggttccatcctgataaatctatcataaagtcaaaaaaatcatccgtcatgcaattgtaagtccagatgc

SEQ ID NO: 304853 - DNA, 622 bp, Homo sapiens
actcagttcaattactctccctttttctcatttgttaacgtgtgcatctaagtctagacttttttctctgtgtaccattttggccatatcccaaagcacaggttttgaaatataatgctcagtcctcttcatttttaagtacttcgtcatttttgtctttataattttatgagtgaagaattatttaaatgagtgtttttccaaagatttttggaggtagaaactaactgtgagaatttttacttgaattgagttatgcacagtaaatgtggcttctgagattttcccttttctatgttggtttaggttttctttgtgacctaacacatggtctgtttgaggatgtttaacagaagtgtatgtgtgtgtgtatatgtgtgtgtttgtgtgtgtgtgtatactcaacttacaattggcttacatkctgataaattcattgtaagtcgaaagtaacataaatcaaaactgatttacttccctaataaactcatcataaagtcaaaaagtgttaaatcaaatcttaaaagcccagatgttcctcaacttctgatgaggttccatcctgataaatctatcataaagtcaaaaaaatcatccgtcatgcaattgtaagtccagatgc

SEQ ID NO: 304854 - DNA, 413 bp, Homo sapiens
tataggaatacattagactctcttctccttgkgaaaaaaagtctcctgatacgacaatgcttatttttgtcaaaccttatttaaaacaatgcagaatcttcacctaaaagccaatcataaattaaacagtacttccatgtttctgtaccagaaccatcccgaaaagcaggtcctggcctgagcttgctcactagtgctctaaagaaaggatgcaacataacttacattttccttatgctgactatagctatcataagcgaagtataatctgcaaagaattccaattttccagtctttgcctttgactagacttacacctttcttagtacctttcttctatgtgcgtgaatttggtattttacccaaatttcctgagtctacatgtattcctcaggctgctgtcacccagtatt

SEQ ID NO: 304855 - DNA, 524 bp, Homo sapiens
ggaagatgggatgaggataatgtgcagcttgaaaaagtgtatgatataccttcttgaggaggaatgaagctggcacagctttagggaatgactcataacttaaggtgcatttgatctaaggaacaggcttttttgtgcagaggagcaaaaaaaggtaaggaacactgctgttgataattacgattgtctaatcaagrtgttcacatagggagatattgtaaacatgctatccccaagcagactcctttttctgagttatcagcaccatgagatcatccaggcaagagctctgggcaaagttgtaaagaacggctttggtatagtcacatctcttctaatggtggtcatttcaacctcctgggcatcttttcctctcctgcttggatttccaaaggcccagtgctcctgtattgtacccctgaatgactagactcttaaccacatctcctacctaggcttatctttcccaagacagcacctcatgtattgactttatcttactcctccgtcacagagacacttac

SEQ ID NO: 304856 - DNA, 537 bp, Homo sapiens
caaataatacatttttcagacatgaaagttatatgaagtatatttcaagacaccaagatcttatggttattttaaatatgaacaaactgaaggctgaaatcttatagacataaaataaaatctggaaaacatatatacatatagatacatacatacacttcatgaggcttttgttagcaacgcttccatatactttttgtagcactcctataaacaaggtctttgaagtacttttcaattatgagatgttagaagtgtattaatataacatcacactgccctttcttacccagcttattgcagctaggtcttcttcaacaagactcctctacacatgaaatgcaccaagtccagctacttttacagagcaagagcatccagagaagttacacgytctataaagaacagagacaaggcatttccgtttgtttcacaggacatatttcttttttaaaattagaacagaaatgttgacagcttcaatgtatacaatgctgagaggactttatcttaagtcaaagaacatcaattaagcta

SEQ ID NO: 304857 - DNA, 537 bp, Homo sapiens
caaataatacatttttcagacatgaaagttatatgaagtatatttcaagacaccaagatcttatggttattttaaatatgaacaaactgaaggctgaaatcttatagacataaaataaaatctggaaaacatatatacatatagatacatacatacacttcatgaggcttttgttagcaacgcttccatatactttttgtagcactcctataaacaaggtctttgaagtacttttcaattatgagatgttagaagtgtattaatataacatcacactgccctttcttacccagcttattgcagctaggtcttcttcaacaagactcctctacacatgaaatgcaccaagtccagctacttttacagagcaagagcatccagagaagttacacgttctataaagaacagagacaaggcatttccrtttgtttcacaggacatatttcttttttaaaattagaacagaaatgttgacagcttcaatgtatacaatgctgagaggactttatcttaagtcaaagaacatcaattaagcta

SEQ ID NO: 304858 - DNA, 538 bp, Homo sapiens
agtgaggtttaagtaaggttttgaagattctggttagatgttcattaaagccttgtcattatttttactgtttctcaacaaaatgtaagacattttgatatcacacacataaaaagcaagctccaacagaatagtttatgtccaactgctagtagtcatctgtcagcataaagatacttagatgtccttaattttttttataacttcattcaataacagtccttgctgttgaatcaaatatttaatgattgtctactatgtgccagggctggaaacacacaataaacacaatacctctatcttatcaatcatggaatttagggaccagtggggatgacagcacagtaagagaagttatggggagctcctaaacagcttcctggaagaagtgacctccaagttaagatcttaaaaataatgaacacacttaagagaaataaattccaagcatagaaaaatgcaattgcaaatgtgtagaaaagaaatrgtaaagctttagagggacagaaaatattataccattggtgggtagcaagag

SEQ ID NO: 304859 - DNA, 608 bp, Homo sapiens
agagatgttctgaagttggaacttctgtttgaaagggaagcaaagcataaaagtttggaaaatttgcagcctgaccatgtggtagaaaagaaaaatccattttctggagagacattcaagccagctgcagaaatttgcrtaagtaacaaggagccaaatgttagggagaaatgtctccagggcatttcagagatcttcaaggcagcccctctcattacaggcccagaggcctaggagggaaaaatggttttgtgtgccaggcctagggccctgctgtttggtgcagccttgggacatggagccctgaatcccagctgctccagttccagccatggctaaaaggggccaaggcacagcttgggccattgctttgaaaagtggaagccccatgcctttgtggtttccacgtggtgttgggactgcaggtttgcagaagacaagagttgagctttggaaacccccacgacatttcagaggatgtacggaaatggctggatgtccaggcagaagtctgctgcaggggtggagccctcatggagaacctctactagggcaatgcagaggggaaacatggaattggagccccgacatggagtccccactgggaa

SEQ ID NO: 304860 - DNA, 608 bp, Homo sapiens
agagatgttctgaagttggaacttctgtttgaaagggaagcaaagcataaaagtttggaaaatttgcagcctgaccatgtggtagaaaagaaaaatccattttctggagagacattcaagccagctgcagaaatttgcgtaagtaacaaggagccaaatgttagggagaaatgtctccagggcatttcagagatcttcaaggcagcccctctcatyacaggcccagaggcctaggagggaaaaatggttttgtgtgccaggcctagggccctgctgtttggtgcagccttgggacatggagccctgaatcccagctgctccagttccagccatggctaaaaggggccaaggcacagcttgggccattgctttgaaaagtggaagccccatgcctttgtggtttccacgtggtgttgggactgcaggtttgcagaagacaagagttgagctttggaaacccccacgacatttcagaggatgtacggaaatggctggatgtccaggcagaagtctgctgcaggggtggagccctcatggagaacctctactagggcaatgcagaggggaaacatggaattggagccccgacatggagtccccactgggaa

SEQ ID NO: 304861 - DNA, 449 bp, Homo sapiens
ggagtccccactgggaaaccacatggtggagctgtgagaaaagggccaccatcctccacatcccaggatggtagatccaccaacagcttgcactgtgtacatggaaaagccacaggcactcaacagcagcctgtgaaggcagccatgagggctataccctgaagagccacaggaatggagcttcccaaggccctgggagcccactctttggatcactgtgcccttgatataagacctgaagtcagaggagatcattttggaactttaagatttgatgactgccttgttgggtttcagatttccaggggggctgtaacccttttgttttggccaatctcccatttggaacaraaacatttactcattgtatcttggaagtaactaacttgtttttctattttacaggatcataggcagaagggtcttgccttgtctcagatgagactttg

SEQ ID NO: 304862 - DNA, 646 bp, Homo sapiens
cttgccttgtctcagatgagactttgaactttgacttttaagttaatgctggaatgatttaagactttgggggacttctgggaaggcatgattggtttggaaatgtgaaaaggacatgagatttgggaagggacaggggtggaatggkatggtttgactctgtgtctccaacaaaatgtcatctcaaattgtaatccccacatgttgagggaaggacctggtggaaggtaagtggatcatataggtgttttctcctgtactgttctcatgatagtgagtaagttctcacaagatctgatggtttaaaagtacatggtgctcccccctttcctgctgccacataaaaagtgcctgcttcccattcaccttccatcatgctggtaagtttcctgaggcctccccagccatatggaacagcaagtcaattaaaccacttttctttataagttacccagtctcaggtggttctatatagcagtgtgaaaatggactaatacacacattgacatgtctctggaactttcctttactacagtatattcttaggtaaaactcttgcttctctgacttaagatttgagaaggaatagcagataaaaattcttcagaaagaaaaccactgattctaaaacatgaactagctaaca

SEQ ID NO: 304863 - DNA, 646 bp, Homo sapiens
cttgccttgtctcagatgagactttgaactttgacttttaagttaatgctggaatgatttaagactttgggggacttctgggaaggcatgattggtttggaaatgtgaaaaggacatgagatttgggaagggacaggggtggaatggtmtggtttgactctgtgtctccaacaaaatgtcatctcaaattgtaatccccacatgttgagggaaggacctggtggaaggtaagtggatcatataggtgttttctcctgtactgttctcatgatagtgagtaagttctcacaagatctgatggtttaaaagtacatggtgctcccccctttcctgctgccacataaaaagtgcctgcttcccattcaccttccatcatgctggtaagtttcctgaggcctccccagccatatggaacagcaagtcaattaaaccacttttctttataagttacccagtctcaggtggttctatatagcagtgtgaaaatggactaatacacacattgacatgtctctggaactttcctttactacagtatattcttaggtaaaactcttgcttctctgacttaagatttgagaaggaatagcagataaaaattcttcagaaagaaaaccactgattctaaaacatgaactagctaaca

SEQ ID NO: 304864 - DNA, 537 bp, Homo sapiens
tcataaaactttgcttctagaactaccataagaacataccagaaaagctgagagaatccagagaccatatgaaggaaacagattgctgttgcaggctctcagagacagctgaaaacctcagctgcaggaagccccacccaaggagagtctgagctcagacatgtctaacacgatccccactggatgatcttcctctgcccaccctagtagcctaagacaaatgacataatctcctgggagctgtatgtccacatccatcacctgatcctccctatactaccatagctgatgttctcttgaaagcaccacctcctggctggaggccagccaatacaaaactagtccaataaacaaaactaaaaccaaggaccctcaaaaagtccacttcrctctcctgccacctcttcaccaaagcatgtgctcatatccacagctgagagacttgaatacagttcacatcacaggactctgtgcagacactccccagtacaagctgggaacctgctagctcctctgagtggctagatccagaagaga

SEQ ID NO: 304865 - DNA, 537 bp, Homo sapiens
tcataaaactttgcttctagaactaccataagaacataccagaaaagctgagagaatccagagaccatatgaaggaaacagattgctgttgcaggctctcagagacagctgaaaacctcagctgcaggaagccccacccaaggagagtctgagctcagacatgtctaacacgatccccactggatgatcttcctctgcccaccctagtagcctaagacaaatgacataatctcctgggagctgtatgtccacatccatcacctgatcctccctatactaccatagctgatgttctcttgaaagcaccacctcctggctggaggccagccaatacaaaactagtccaataaacaaaactaaaaccaaggaccctcaaaaagtccacttcactcycctgccacctcttcaccaaagcatgtgctcatatccacagctgagagacttgaatacagttcacatcacaggactctgtgcagacactccccagtacaagctgggaacctgctagctcctctgagtggctagatccagaagaga

SEQ ID NO: 304866 - DNA, 598 bp, Homo sapiens
attcacactaaaatcacttccctctctgtctaacgacaacaataatggtgaaagcctacttggaaaacagcttgatggaacagctgcttcagactcattaggaatctcacactttctgtaatttaggggaaaggatgcccacaaccacaagcacattgcagttcaggtatcaagcagacactgtacttctttttctggttcatttttctactcataaaattaatatgtaaactattcactcaattattatagaatcataagtgacttgctaaaattttcaccactaatttccaggatattcaaccagattgtcttgcaatggctgtccccttattccataagtttcaaagctgtctcacattcccaaagtcagttaaatactggcttaaatcttcccttttatgtggcatcattagttgttgtataacccattctgggtccccaaattaagatctgagacttaagatattcattaacaaactaagaacatatttatcgctatgttcttcctctgctacagacaagtacaagttttgatgactcacctgaattgaagttaccrtgggaactatcagagtgatgctaccatatgtagaaa

SEQ ID NO: 304867 - DNA, 599 bp, Homo sapiens
ggagagacccatggatccacatttctgccatgaagaaaataacttaagaagtcagaaacccactctacccccactgtgaaagagtagcccagttagccctgcagagtttcaccattcagcaaggcactccttctctaaggcagccacatagttctagggcccaggatagttcaggcagtggamaatactttgatattacttggcataggttcccattgcttagaatttctggttcattgaaatgagaagatttaaggtatagtctatcacagagaagagagacaacctcagtattctgcagaccagaaaacagtggcacagaagcagtgtgatgctctctcttcagaaggcataaggagagagcaaatgagaggtccactaggctggaagtaaagcagtgaaggagaggctgtcagctaagcttcagcagttctgggaggggggcagtgtgagaatgctatgaacagaagtcacgggtcacccagagtaggaaactataggactgctagcagaaacattaggaaactgtgccgtattggatatgcatagcccagaaattaaacccaaatcaagcccattttgtagtcagagaaacaatt

SEQ ID NO: 304868 - DNA, 599 bp, Homo sapiens
ggagagacccatggatccacatttctgccatgaagaaaataacttaagaagtcagaaacccactctacccccactgtgaaagagtagcccagttagccctgcagagtttcaccattcagcaaggcactccttctctaaggcagccacatagttctagggcccaggatagttcaggcagtggacaatactttgatattacttggcataggttcccattgcttagaatttctggttcattgaaatgagaagatttaaggtatagtctatcacagagaagagagacaacctcagtattctgcagaccagaaaacagtggcacagaagcagtgtgatgctctctcttcagaaggcataaggagagagcaaatgagaggtccactaggctggaagtaaagcagtgaaggagaggctgtcagctaagcttcagcagttctgggaggggggcagtgtgagaatgctatgaacagaagtcacgggtcacccagagtaggaaactataggactgctagcagaaacattaggaaactgtgccgtattggatatgcakagcccagaaattaaacccaaatcaagcccattttgtagtcagagaaacaatt

SEQ ID NO: 304869 - DNA, 590 bp, Homo sapiens
gtggccacacgactaaagacatgggtgtcaggctttctgggaaagggctctctaacaacccctggctctttggagttgggagcgttggtttgcctggaactagcttccgcttttcctgtacttccaggctgagccgagggttgagagagaggaaagccaytcagcaccagggtctgacaacaagttcgttgaccctgtggccatgagcggaactctcaaaggcatgtcgcccaagcaagactcacccatctatcctatctatcctaacccttgctccctggttcctaacacctgccagacaaacttcctctcacctctcttctccgaggctagtcctgcttctaaaaaaccactcgctgtctctggtgcttttctagtttctcctataagaatgatttctagtataaacttcaggactctgttaccttcttttggcacctgggctcaccaatcagaaagacataatttttgcccagagccccatcataggagggaccatctggaattttaggatccctccccagactagaaggcccaacaaaagctattcctgaagctaggatatgaggagcctcagaaattgtagcctt

SEQ ID NO: 304870 - DNA, 535 bp, Homo sapiens
aggtattgtgcccaaaggaagaggggaggaatcttgagtaatccaagtcaaaactactcaaaggtaatctgcagcccagtagcagcagcagcagcagcagagacataacctggaagcttgttagaaatgaaaattatctggcagaacttcagacccattgatcagaatgtttggggatgggccccatgaatctgtactgtaacaagttttcaagcatgctaaagtttgagaagctcgaatccaatcatacctattccaagttccaaagcataagattagaacaaacaggttaaaacttaaaagatgctcttcttgatttgactctcagcttgttatttgtgttattgctgatagaaatgtactgatttctgtatrgaaatgtactgattttagtacattgcttttgtatcctgaaactttagaattgctaaagttgttcagcaattctaggagcctttttgtggaatctttaaggttttctcagtatagaatcatactgtcagtgaaatgctatctgaatagagatagtttgact

SEQ ID NO: 304871 - DNA, 595 bp, Homo sapiens
atccgaaaccatacaaatatgccaaatgaatagctcaagttcagaagatgctaaatctctactgtttacaatttgatcatatcttttgtatctttaaaacaaacgtggctttacatatatatgggaaaagctccctttagaagcacatactctatgagattattaaaaataaatacaggaaaggatacagragtagaaacaatgtgaggagaaagaacttaatcacacaggaaaggaccaaagtaattctcttccctttatctccagaggtgtaattactaatatgtgcataatactttagagttcataaagaacatttagatgcatgaattcaggtaattctcagaacagaggtagacagaacaagaatatgtgcctgttacatgaagatgctatcaaggagtaaagttgaaactcaaacccaggtatctgcctaagaatcttaatgcatttctaaaatattgtctgtccaccatcatgaacttctggcaactggggctctcggtctcatccaaaggcaacagcagaagctgacaggttcttgtatgacgccatccactcaagcacagttcaaggattggttcaaggatgggca

SEQ ID NO: 304872 - DNA, 453 bp, Homo sapiens
gatgaattatgaagaaatataacatatcaacagattagtaatgtgtaaaaaatttgaattcgtaatcaaaaacctttcaacaaagaaaagtccaggacccagtatcttcaccaataaaatcaacgcaacctgcatcaaaattttaatgacatgtgttacagaaatagaaaaatgcatttctgaaattcacatagaaccacagaagaacccaaacagacaaagtaatgtcgaggaaaaacaacaaagctggagacattacactacagaactttaaaatgcactacaaagccaaagttatcaaaatagcagytactggcataaaaactagtcaatggaaaataatagagagctcagaaacaagtccatacatttatagtcaatttacttttaacaaagatggcaagaacttgcagtggagaaatcccggtctcttcaataaatgatgttaggaaa

SEQ ID NO: 304873 - DNA, 575 bp, Homo sapiens
ttgggaattaaagaagtttccaattttttgttgactgttagaagaaattagtttatattgaatattaagtgttggtatgctagagccaaatcttaccagctggcgaggactgattgtgcatgactcttccaactctgcaacatgatgttactttggtagcttgaaatcagccaaagagagagtacttacaccacaggaattggcaaataatataagttagagcttttgcagtaattaaatatttaccaccatctaactgatgataggagatggcaagtagaaggaatcagatatgtgaatctctcaaagctgatggaaagacaatgcaagctaagcaaactgaataatattcaatataggaaattctattctccttcaaacatcaaaaaatgcaattaattagttaatttaatttaatctggtcaaacagtggrcaactacacagttataagaaatgacaacatatctttatattttattacatatcattatatagcagttttcaaagtacagtaaacaagatattaattgctacatagtagcacttgtagagtgctactatagagttactatta

SEQ ID NO: 304874 - DNA, 551 bp, Homo sapiens
accagaatttgggttggttgagtccttagaagtgcaaactgttatactgttaacacattttttgttatattttccaacatgatttctgtttctaaatataatacagtaaatcagcaaattttactagccaaaattaaatgccacatgataagtgtggatgataagtgcaggtccaaygagcatgaccaatgaaggtcctaccctcaaggactttatggctatgacctaaaaatattatttaaaaactatttataataaaatataacaaacacattagagaaagaaacaaaatgactatgggataacagaagagagaataattaatttttagtaacaacttcaaaagtcttcacggaactaatgatattatatctggacataaagttttgaaggcaatttttctacatacacgaattaagaagggtgctctgtgtattaaataatatatggctaaaagtcacagtgggagtgaatgctgttatgctgaaatattcattcctgctacctggtacaatggcagaagataaaaattaaaatatagtcaaatatga

SEQ ID NO: 304875 - DNA, 551 bp, Homo sapiens
accagaatttgggttggttgagtccttagaagtgcaaactgttatactgttaacacattttttgttatattttccaacatgatttctgtttctaaatataatacagtaaatcagcaaattttactagccaaaattaaatgccacatgataagtgtggatgataagtgcaggtccaacgagcatgaccaatgaaggtcctaccctcaaggactttatggctatgacctaaaaatattatttaaaaactatttataataaaatataacaaacacattagagaaagaaacaaaatgactatgggataacagaagagagaataattaatttttagtaacaacttcaaaagtcttcacggaactaatgatattatatctggacataragttttgaaggcaatttttctacatacacgaattaagaagggtgctctgtgtattaaataatatatggctaaaagtcacagtgggagtgaatgctgttatgctgaaatattcattcctgctacctggtacaatggcagaagataaaaattaaaatatagtcaaatatga

SEQ ID NO: 304876 - DNA, 623 bp, Homo sapiens
accatccctttggtaataagtgagtttatattcagttattttatgcaagatctcgttgtttaaaggagactgggacatcagttttatctctctcttgttccctttctcgtcatatggcacactggctcccatttgccttctaccatgattataagytttctgaggcccctaccagaagcagatgctagcatcctgcttcctgcaaaggctatagaactgtgagccaattaaacgatctttctttataaattacccagtctcaggtattttttagaataacacaataaaggactgacaaagctcccctgggaatactgagaatctggaggttttgcttgaactggaaccacatttaaagcctatattgactacaggccaactgggagttactttgaaggtagatgagatatagacacgtgagctgacagagagagatgaaacccagtggtttttcaatagtaaagtgaattccaaaatatgaaggtaaatacacatccccaaagtgtctgcctgataatgaacatttctaacaaatttccaagtgatgtggatgctgtttctctggcctctacatttgagaatctttagtctttttgcatctgtctaattttaattgaagtaac

SEQ ID NO: 304877 - DNA, 623 bp, Homo sapiens
accatccctttggtaataagtgagtttatattcagttattttatgcaagatctcgttgtttaaaggagactgggacatcagttttatctctctcttgttccctttctcgtcatatggcacactggctcccatttgccttctaccatgattataagctttctgaggcccctaccagaagcagatgctagcatcctgcttcctgcaaaggctatagaactgtgagccaattaaacgatctttctttataaattacccagtctcaggtattttttagaataacacaataaaggactgacaaagctcccctgggaatactgagaatstggaggttttgcttgaactggaaccacatttaaagcctatattgactacaggccaactgggagttactttgaaggtagatgagatatagacacgtgagctgacagagagagatgaaacccagtggtttttcaatagtaaagtgaattccaaaatatgaaggtaaatacacatccccaaagtgtctgcctgataatgaacatttctaacaaatttccaagtgatgtggatgctgtttctctggcctctacatttgagaatctttagtctttttgcatctgtctaattttaattgaagtaac

SEQ ID NO: 304878 - DNA, 576 bp, Homo sapiens
aaatatctcttgcatgcctttcattgtcaagtcctgcccccagattcaccgtttcttaatatcacatgcaragaatcaaataggagtggctttttgcatgtggagtttttcacttagcacagaagtggacaaactgtagcccaccggccaattcctgcttcactcttacttttatgaacaaaattgtattgattacagccacacccattaatttacatagcatctatgactattttttttctacaaggacaaagttgagtagctgcaacagaaattttatagactgcaaagcttacaggagttactacagggccctttaaagaagtttgccaatcctagacttggcatgtttttgaggttcaagatattgtggtatatttcagctctccatacctttttgttgttcagtagtgtcctagcctatgcatttatctcatttcctttatccatttcccagttgtgagattatttccagttcttggctattttgaataatgctattataaatttgtgactatctctttgtgcagaaatatgttttcattttcttggatagatacctatgggtggaattgg

SEQ ID NO: 304879 - DNA, 537 bp, Homo sapiens
caaccctcaacgtccagctttgtatcaaaatctttgggaattgtgtctggggaatctgccactcccagcaaagtaaaaccccasgtgcatcaaaaatagatgagagctagaaaaaaatatatataatatgtatatatatatggtttaaaaaataaaaattggacagactatataataatatataataatctgccactcccagcaaagtaaaacctcaggtgcatcaaaaatagatgagagctaggaaaaaaaaaaaaaaatatatatatatatatatatatggtttaaaaaataaaaattggacagaaaaatagagtgggtggagtgatggtgaggactagggatgtgcaggcagacagcagcagaggccaacaggcagcccatgaccagttatcatcactgcaggaccttagagaagaattgaatagccgagcccctgctgttgcttggctcacttgctaaacagccctgcccaatacagaagcctgatctccaacaatctcaggaacaagttgggaattagtatgattggtgttt

SEQ ID NO: 304880 - DNA, 402 bp, Homo sapiens
atggcatctaagtgtgcaagagaaagaaagggtaacacatctctcactttaaatcagaagctaggctgggggaaggggcttacatttgtaatcctagcacttgacaggctgaggccgaggattattgagcccaagagttcgagaccagcctgcgcaacatagcaaggcctcatctytaaaaaaaaaaaaaaaaaaaaaaaaaaggtttaattagctgagtatggtggtgcattcctgtaatctcagctacttgggaagctgaagcaggaggatctctcaaggccaggaattcgaggttgcggtgagctatgcttgcaccactgcactttagcctgagtgaaagagtaagatcccatctcataacaaaggaaaattgatcaaagcctagaaacaattaaactt

SEQ ID NO: 304881 - DNA, 402 bp, Homo sapiens
atggcatctaagtgtgcaagagaaagaaagggtaacacatctctcactttaaatcagaagctaggctgggggaaggggcttacatttgtaatcctagcacttgacaggctgaggccgaggattattgagcccaagagttcgagaccagcctgcgcaacatagcaaggcctcatctctaaaaaaaaaaaaaaaaaaaaaaaaaaggtttaattagctgagtatggtggtgcattcctgtaatctcagctacttgggaagctgaagcaggaggatctctcaaggccaggaattcgaggttgcggtgagctatgcttgcaccactgcactttagcctgagtgraagagtaagatcccatctcataacaaaggaaaattgatcaaagcctagaaacaattaaactt

SEQ ID NO: 304882 - DNA, 552 bp, Homo sapiens
cagcttactagtagcatttgttttagcaataaggcatttttaacttacagtatatatattgtttttaaaaacataatactattgcatatttgatagattatagtataatgtaaacataactttaatgtgaaaaaaagtccttaacttgttttcttgctgtattcactttattgtaggtctgcaccaaacccrcaatatctttgagatatgcctgtatatatacaaaatattaagagaaaattaaatgatttttctgtggtttagtaatttttgtcattattatttttatttctttttaaaattttggtcaccttacaagttatccattgttccttgtaaggaagattagataaggggttagaagatgagagtggaattcagactaattggcagctaatgtgttcatgtgtctcaaaaataattgagaacagttgttaagaaaccctcattcatgtcatctagcactaattggtggtaaaacaatccacatatggaaatgaaattagaaacccaggggaaaagaagtccaagctaaaatgaaagcaaattgca

SEQ ID NO: 304883 - DNA, 510 bp, Homo sapiens
tttgctcacatggtcttcccttggttcatgtaggtgaatgcagtgagaaatcatgtgtctcttcctcttgttataagggctttattcctatcataaggatctcactgtcattacttaatttaattacctcccaaagtcctcaccttccaagtatcatcaaattggggattagggcttcaacataaacattctggggggatataagcattcggtccataaaattgcctaagtatcaaaagaccagaaagtttgctttttgatcttgggcaattcatgacttctctggttctcagcagccatgtattctgaattcagctgccttacctacctcatgggcttgtggrtgaatattcaacaattatttttaaaaaaatagaaacatctccaaattgcttttagaaagagattataaaaaagcaaatatgcaaatacttactaaatacctttttcaatgataaaatatataaagcatgactcctgatagacatacatttttgcattagcaagtga

SEQ ID NO: 304884 - DNA, 440 bp, Homo sapiens
taatcatttttctgtcacgttatttgtcaaaatatagaagaaaaaatgataactcataaataaaaggtaactttattattttttttttttgctatttgaaagttatgagaaaaaaagaagctacatctgttcatgattttggatcacagaccacagtgaaaacaggtcacagttgcttacttcttaatatttttcaagttaaacttttttaattttctgagctctccaagtagataaaaattatttttaataaaatagttcttgcattctctaatttaaaagtaaaatttaggattagattgtgtagatatatggycttcacatttaagaattctatcttctaataaatatacttagatatacatatatacaattatacatccatatataggtcccaatgttctatggttaatagacgagttggatttagcattatacac

SEQ ID NO: 304885 - DNA, 524 bp, Homo sapiens
atttaaaagtaaaatttaggattagattgtgtagatatatggccttcacatttaagaattctatcttctaataaatatacttagatatacatatatacaattatacatccatatataggtcccaatgttctatggttaatagacgagttggatttagcattatacactgctttaagtaattttagatcagttagatttgcttagtcggatctgatattttttccatttcaggaaactgtgtttaaaatatggaatttccatatggcttagaaatagttgaaagaaatacagatattrctttctaaacattccaactaataaaagagatgaagtctcagacataataaaacttcagataattgtatttaaatacttagatttgaaattgaattctttacacttgtcttcagataatagcagtgcttgtaatatattctgagaatttgccacttctcaaaacaaaatcacaactagtaagcaaactgtgaaactgtgattactcaagaggtaaatatcacctgtta

SEQ ID NO: 304886 - DNA, 587 bp, Homo sapiens
gcctccttctttggaagctcagctcaagttgttcctcctggattcactctctcctttgtctgaaaagccattcctctaattggttataaagctttttgtccatttatcacaagccttgggaaacctttctcattgtgctgtcatataattatttcattcctgtagttcagttatatatggattattattaatttttacatatttctttcatcactattaaataaaagaatataaatgctttgatgatagacattctttcattttggtatattctgcccagtaatacagtrttttacacgtgtttcatagaattctgctgtgatgtggatgttgcacatcctgagggcttacagcagtgccactgttaaagttgtcgcaatgccttatcaaaaagacagatacaaccctccccttgaaactgcagatcactgtaaggaaaactaagggaaatgaatgctccataataaccccagccacaggcagctgaatcacgttaacatattaagacttattatgcccaaccaatattgagaatatctatttctggctaattgaaaagaattccagtaccatttgcaattttcttt

SEQ ID NO: 304887 - DNA, 587 bp, Homo sapiens
gcctccttctttggaagctcagctcaagttgttcctcctggattcactctctcctttgtctgaaaagccattcctctaattggttataaagctttttgtccatttatcacaagccttgggaaacctttctcattgtgctgtcatataattatttcattcctgtagttcagttatatatggattattattaatttttacatatttctttcatcactattaaataaaagaatataaatgctttgatgatagacattctttcattttggtatattctgcccagtaatacagtattytacacgtgtttcatagaattctgctgtgatgtggatgttgcacatcctgagggcttacagcagtgccactgttaaagttgtcgcaatgccttatcaaaaagacagatacaaccctccccttgaaactgcagatcactgtaaggaaaactaagggaaatgaatgctccataataaccccagccacaggcagctgaatcacgttaacatattaagacttattatgcccaaccaatattgagaatatctatttctggctaattgaaaagaattccagtaccatttgcaattttcttt

SEQ ID NO: 304888 - DNA, 587 bp, Homo sapiens
gcctccttctttggaagctcagctcaagttgttcctcctggattcactctctcctttgtctgaaaagccattcctctaattggttataaagctttttgtccatttatcacaagccttgggaaacctttctcattgtgctgtcatataattatttcattcctgtagttcagttatatatggattattattaatttttacatatttctttcatcactattaaataaaagaatataaatgctttgatgatagacattctttcattttggtatattctgcccagtaatacagtattttacacgtgtttcatagaattctgctgtgatgtggatgttgcacatcctgagggcttacagcagtgccactgttaaagttgtcgcaatgccttatcaaaaagacagatacaaccctccccttgaaactgcagatcactgtaaggaaaactaagggaaatgaatgctccataataaccccagccacaggcagctgaatcacrttaacatattaagacttattatgcccaaccaatattgagaatatctatttctggctaattgaaaagaattccagtaccatttgcaattttcttt

SEQ ID NO: 304889 - DNA, 628 bp, Homo sapiens
cagccacaggcagctgaatcacgttaacatattaagacttattatgcccaaccaatattgagaatatctatttctggctaattgaaaagaattccagtaccatttgcaattttctttataattcatccagctcactggtatgggaaaaaaaggtaggtggaggggraaaaaagttttgtattagttacatatcccaaaataggctcttaaatagacaagagtgggtaaggagtggctcaggtcatttgtattattcaaaatgaattatttaaatatctctgatggaaccagttgaaataaatttggaaataaagtataatattaccacagagtcatattgttggtgacaagaaagctaaaaaaaaatgggaaaaaaataactggctggtaatattttaaagggtaaccaatgctcactatcagctgcggtaagacattaagtaatagagcaaagtaatgttaactgctctcctggtaagatcagtaaatgaaataaaccccagcatccgggtatcattaatctatagtgaataatggcggtggtagtgtaaggagattaaaaagggcattgtaaacatttgtggctgtataatatacaaattaaaaatgtgagaacgcttgcagctgc

SEQ ID NO: 304890 - DNA, 632 bp, Homo sapiens
tgaattatttaaatatctctgatggaaccagttgaaataaatttggaaataaagtataatattaccacagagtcatattgttggtgacaagaaagctaaaaaaaaatgggaaaaaaataactggctggtaatattttaaagggtaaccaatgctcactatcagctgcggtaagacattaagtaatagagcaaagtaatgttaactgctctcctggtaagatcagtaaatgaaataaaccccagcatccgggtatcattaatctatagtgaataatggcggtggtagtgtaaggagattaaaaagggcattgtaaacatttgtggctgtataatatacaaattaaaaatgtgagaacgcttgcagctgcataatctacaaattaaaaagtgtaatagcatggcattaattactggctgatcaattcccccataattgctagcatgtagatgaacgattataggtccaaaatgttatttgagaaaragacattgaccttggaactgcaagaaatgatactctgttgtaaggtaatacaggatcctatcaaatgtggttctagtatttgtagcagccgccagctcagtgcagggctgtaatcaccacactatttctttagattatggtgccagag

SEQ ID NO: 304891 - DNA, 481 bp, Homo sapiens
ataaataaaaatggaaataagacataccaatatctatgggatagagcactagcactacaaagacagaagtttatagcaataaacatctataaaaaagattagaaagattttaaatcatctaacaatgtacctaaatgaactagaaaagcagtaacagatcaaatccaaacttagtagaataaaataaatgataaagatcacatcagaaataaatgaaattgagactaagaaatgaatgtaataaaaaagtgtttatttgaaaagataaacaaaattgktgacactttaggtagaataagtaagaagaaaagagagaagacccaaataaaatcagaaaggaaaaaggagacattacagctgataacacagaaatataacatatcatttgaaacttatgaacaataatatgccaatgaattgaaaaacctagagacaattattaaattactggacacatacaacctgcaaagattcaaccaga

SEQ ID NO: 304892 - DNA, 606 bp, Homo sapiens
ggtcaatttctctttattgttggatggtactccattgtacagatacatcgcattttgttgtccattcagtggttgatgggtatttgggttgcttctagttttagctactatgaataacactaccgtgaagatttgtgtatgtctatatgttgacaaatgttttcatttcttttagttaaatacctagaagtggaaatgttgggttgaatggtaactctatgtttaaccttttaagacattttcaaactgttttccaaagcaattgtactattttacattctcacttgcaatgtatgagagtcgcagtttctccacatctttgccacatctgctgttgtcaatgtctttttgactagagcctttactgtgggtatgtggtggtatcactgcacttttaatttgcatttccctgatgacaactgatgttgagcatcttttcatggtgcttattagccatgcaagtgtcttcttttggtgaaatgtctattcaaatcttttgcccatttttagtgagtttttcatcttattaatgkattataatggttctttatatattctgaatactagatccttatcaaatatttgatttacaaataccatctcctg

SEQ ID NO: 304893 - DNA, 647 bp, Homo sapiens
tctttctctactgcagtgccctggtttcagtgaattaactttgtctttgcggtgggcaggaagaacttatcaggcgattatgctttaggttgatagcaggattgaaggacacatcaatggcaatgtgcagagatggaggmcctgggacctacactcaaacaccttggatctacataaacctcccagaatttagatttaatctcggggaaagaggtggtaagggaagcccataatgattaagattaattttctaccagtctagaaaaatacaggttcaaaattcagttgtgtttcttgtttgtttttttttgagacggagtctcgctctgttgcccaggctggagtgcagtggcacaatctcgactcactgcaacttccgcctcccaggttcaagcgattctcctacttcagcctcccgagtagctgggactgcaggcgcacgccaccacactcagctaatttttgtgtttttagtagagacagggtttcaccatgttggtcaggctggtctcgaactcttgacctcgtgatccacccacctcggcctcccagtgtgctgggattacaggcatcagccaccacacccagcctcagttgtgtttttgatatcagactaggtttattctgcccacactcagcaagtcaat

SEQ ID NO: 304894 - DNA, 647 bp, Homo sapiens
tctttctctactgcagtgccctggtttcagtgaattaactttgtctttgcggtgggcaggaagaacttatcaggcgattatgctttaggttgatagcaggattgaaggacacatcaatggcaatgtgcagagatggaggccctgggacctacactcaaacaccttggatctacataaacctcccagaatttagatttaatctcggggaaagaggtggtaagggaagcccataatgattaagattaattttctaccagtctagaaaaatacaggttcaaaattcagttgtgtttcttgtttgtttttttttgagacggagtctcgctctgttgcccaggctggagtgcagtggcacaatctcgactcactgcaacttccgcctcccaggttcaagcgattctcctacttcagcctcccgagtagctgggactgcaggcrcacgccaccacactcagctaatttttgtgtttttagtagagacagggtttcaccatgttggtcaggctggtctcgaactcttgacctcgtgatccacccacctcggcctcccagtgtgctgggattacaggcatcagccaccacacccagcctcagttgtgtttttgatatcagactaggtttattctgcccacactcagcaagtcaat

SEQ ID NO: 304895 - DNA, 609 bp, Homo sapiens
gccttgcctccaaaaatgtgatgcccaaccagcagtgttggcttcagttgagaacttcagacataccaaatcagaatctgtacttgaacaagatcctgtagtgattcatgtgccaattaaggttcaagaagggctgttcttacagttaaatgaatgaactatggctccttgtgtcaacttggataactcttaaaaatataatttcagagaaaaaaatasaagctgccaaagtttagtaacagtattattgagtcaggatagatagtaaaggaaataaccatgtccttgggacatgaaaactgcaccgtcaacacatgagctggtaacaatgtcagttaccatgtctgttatgtgggacacagcaactgcaccagcaacgtaacaaaccccagtactcacattgtgatcaagcccatccaagcagaactatcttcagggactttcccctgtagaaagcatgcgcattttaattttacttgtcctcagattgaccctttgctcattataatagtaaaaaacacacccctggatggagattgaagatgctaatgagacatgtgatacatgaacaagcacgtacagctactgagaatacccaaaagaccacct

SEQ ID NO: 304896 - DNA, 609 bp, Homo sapiens
gccttgcctccaaaaatgtgatgcccaaccagcagtgttggcttcagttgagaacttcagacataccaaatcagaatctgtacttgaacaagatcctgtagtgattcatgtgccaattaaggttcaagaagggctgttcttacagttaaatgaatgaactatggctccttgtgtcaacttggataactcttaaaaatataatttcagagaaaaaaatacaagctgccaaagtttagtaacagtattattgagtcaggatagatagtaaaggaaataaccatgtccttgggacatgaaaactgcaccgtcaacacatgagctggtaacaatgtcagttaccatgtctgttatgtgggacacagcaactgcaccagcaacgtaacaaaccccagyactcacattgtgatcaagcccatccaagcagaactatcttcagggactttcccctgtagaaagcatgcgcattttaattttacttgtcctcagattgaccctttgctcattataatagtaaaaaacacacccctggatggagattgaagatgctaatgagacatgtgatacatgaacaagcacgtacagctactgagaatacccaaaagaccacct

SEQ ID NO: 304897 - DNA, 609 bp, Homo sapiens
gccttgcctccaaaaatgtgatgcccaaccagcagtgttggcttcagttgagaacttcagacataccaaatcagaatctgtacttgaacaagatcctgtagtgattcatgtgccaattaaggttcaagaagggctgttcttacagttaaatgaatgaactatggctccttgtgtcaacttggataactcttaaaaatataatttcagagaaaaaaatacaagctgccaaagtttagtaacagtattattgagtcaggatagatagtaaaggaaataaccatgtccttgggacatgaaaactgcaccgtcaacacatgagctggtaacaatgtcagttaccatgtctgttatgtgggacacagcaactgcaccagcaacgtaacaaaccccagtactcacattgtgatcaagcccatccaagcagaactatcttcagggactttcccctgtagaaagcatgcgcattttaattttacytgtcctcagattgaccctttgctcattataatagtaaaaaacacacccctggatggagattgaagatgctaatgagacatgtgatacatgaacaagcacgtacagctactgagaatacccaaaagaccacct

SEQ ID NO: 304898 - DNA, 589 bp, Homo sapiens
taaatagggtggtcacgttaacccctatcgagaaggtgagaagtaagcaaagwtttgaaggtgaggaagttagctcagtagacaactgggtaagaaagttccaggctgcagcagattccttaaggcagaggagtacctggtttgttctaagaagatcagcggggttagtgtggttggagaggtataagcaagacagtagtagaagataagatcagagatgctcaacaaatatttgttgagtgaatggatgaaaaaaacaaatattttcaatttttactactatgaagaatgttcccatgccttgcatattttctcataggtgagaaaacaagtctctagattcatccagtccacaaactgtaatctcatctatattaagtggcaactctacaaagcattgtgtccttttattgccaaagaggaaggatctcctggctgagtcaagagatggcggtgtgtcctcttaaccctgagtcattgaactgctcttagcctggattcacacaacagagcctgaagctgaggagataaaggagatcctgtggctccagtcacaagcctgtggtgctgacaggccactccaccttca

SEQ ID NO: 304899 - DNA, 538 bp, Homo sapiens
tgctgttcaccggacactccgggtccagggggtgtgcagctctgtgcctgagcagtccccaggcatgtggggcttttctaaaagtggatacagcggctgtcgcccactgatcctctgtgctgagtgacccagattggcacagcgcagctgggtcctacccagggcgagtacgggaaagaggagtaaaaataaaaactggttgggcagcttaggtggagtcaggatacttgaaagctcacaggttactttgctaattmttgggcagatttttccttttttcttttttgaggggatagtgatgattccaatgacagttttctagatttcttggatttgacaaaatagtttcatacagaacagcaaaatgaagtatgtagaaaatatgttttttgagattagaacatttgcccttgacatgagtttcttatttatcctattcaacattcaagtctccaataaagttttccccaaaggtatctcttttatggagttactttctgaatgaagacatttctgtcttttttgttaatagaacgaa

SEQ ID NO: 304900 - DNA, 538 bp, Homo sapiens
tgctgttcaccggacactccgggtccagggggtgtgcagctctgtgcctgagcagtccccaggcatgtggggcttttctaaaagtggatacagcggctgtcgcccactgatcctctgtgctgagtgacccagattggcacagcgcagctgggtcctacccagggcgagtacgggaaagaggagtaaaaataaaaactggttgggcagcttaggtggagtcaggatacttgaaagctcacaggttactttgctaattcttgggcagatttttccttttttcttttttgaggggatagtgatgattccaatgacagttttctagatttcttggatttgacaaaatagtttcatacagaacagcaaaatgaagtatgtagaaaatatgttttttgagattagaacatttgyccttgacatgagtttcttatttatcctattcaacattcaagtctccaataaagttttccccaaaggtatctcttttatggagttactttctgaatgaagacatttctgtcttttttgttaatagaacgaa

SEQ ID NO: 304901 - DNA, 531 bp, Homo sapiens
ttctatttttcaacactgctgcactggggaccaagttttcaacacatgaattctggggtacacacttaagtcatagcacttgggttgagtcttgaaaaattagcaagcattgtcagttggatggggcagtaagggtgaggagaggtgacagcaatggctagacctcgaagggaacatgagcagaggcatggaggtgtgtggtagcagagtgcacttgggaagcagcagagctgggacatagcacatggagagtgctgctggaagaagacacactgggtcacatcagcagaggccttgtgtgccatgcctgagggtttggtgytggaactaaatgggctgggctcagagtcagcctgaatcgcaaacttggctctgccatttactaatgctatgactgtgggggaagttatttggcctctctgtgctttacctcttaatctgtgaaatggtgagggtatttttagcacctaccttgtgaattgtgattaggattaaataaattaatatactcagtgcttgatataaagtcaa

SEQ ID NO: 304902 - DNA, 578 bp, Homo sapiens
acattggtaaatattacccttaactactgttcttcagtgagcaggcctatgcaaacctgcccccaaagtccaaggaagctgaaaggccaaaaaggaggctaacatattcggctcctaagaaagaaatatttaatagggacttatgaacagaaaccatgtttgtttctcaggcagcagcaagacaagatggtggatccctgtgstattacccaccagaccaagggcttggataccacagggaagggtcactcagaagggatgtgtaagacaactgaaatatgatagaatgaaggtcactttaacctaagggcaggacttatggtaagtagttactgttacacaggaataatagattaactggaaatcttagaggctttcctggatctgggttaatcagaagtcaaagtgatggattagcctccaagatggaggtgttttagcttccacactacagactttgttcagatttcaccaattattccactcatgtcctttctgtattctaggatccaattcatattaccacatagcttttaggtggtaaacatttttaagaaagcagattcctatctgtagcc

SEQ ID NO: 304903 - DNA, 578 bp, Homo sapiens
acattggtaaatattacccttaactactgttcttcagtgagcaggcctatgcaaacctgcccccaaagtccaaggaagctgaaaggccaaaaaggaggctaacatattcggctcctaagaaagaaatatttaatagggacttatgaacagaaaccatgtttgtttctcaggcagcagcaagacaagatggtggatccctgtgcyattacccaccagaccaagggcttggataccacagggaagggtcactcagaagggatgtgtaagacaactgaaatatgatagaatgaaggtcactttaacctaagggcaggacttatggtaagtagttactgttacacaggaataatagattaactggaaatcttagaggctttcctggatctgggttaatcagaagtcaaagtgatggattagcctccaagatggaggtgttttagcttccacactacagactttgttcagatttcaccaattattccactcatgtcctttctgtattctaggatccaattcatattaccacatagcttttaggtggtaaacatttttaagaaagcagattcctatctgtagcc

SEQ ID NO: 304904 - DNA, 599 bp, Homo sapiens
agtctgtgcacggtggtatcatggtatgggctggggaagcatttcgatgttaagtagctaaaacaaggccagggatctggaagcsaggggttttgtactcatgaaggtctttattttttattttttatttttgacagggatgcctcaaatttgtaggtagttcccttgaatagagataaaaagggaatgagagaaagaaaaatatccaaagacccaatagaaacaagatagcaagcagagcatctgtatagaagagctttggaatttagcagtgatgtgacaaaatgaagaggatactggactaggagctgagtaagagttcatgtgtcctactcccccctacctacctgccaatcttcattttggctaacactgttttctttttatttagttttctaattaagaagctgcagccctcagtaaatgtccctgtaagcacttaatatccactgtatatgtttgacaaacagaaagcaaatgtctaagtatactaaagcaagtgctttatttaaataaaaactccatgtgttcattctcttttggttgcaagtggcaggacccaactggaaccgcttaagctaaaaagaaaaaaagaaaaa

SEQ ID NO: 304905 - DNA, 599 bp, Homo sapiens
agtctgtgcacggtggtatcatggtatgggctggggaagcatttcgatgttaagtagctaaaacaaggccagggatctggaagccaggggttttgtactcatgaaggtctttattttttattttttatttttgacagggatgcctcaaatttgtaggtagttcccttgaatagagataaaaagggaatgagagaaagaaaaatatccaaagacccaatagaaacaagatagcaagcagagcatctgtatagaagagctttggaatttagcagtgatgtgacaaaatgaagaggatactggactaggagctgagtaagagttcatgtgtcctactcccccctacctacctgccaatcttcattttggctaacactgttttctttttatttagttttctaattaagaagctgcagccctcagtaaatgtccctgtaagcacttmatatccactgtatatgtttgacaaacagaaagcaaatgtctaagtatactaaagcaagtgctttatttaaataaaaactccatgtgttcattctcttttggttgcaagtggcaggacccaactggaaccgcttaagctaaaaagaaaaaaagaaaaa

SEQ ID NO: 304906 - DNA, 613 bp, Homo sapiens
tatgtttgacaaacagaaagcaaatgtctaagtatactaaagcaagtgctttatttaaataaaaactccatgtgttcattctcttttggttgcaagtggcaggacccaactggaaccgcttaagctaaaaagaaaaaaagaaaaaagaaaagacatctattggctcatgtaactgcagagtccaggaataataggcacagctttatacaagagctaatgttatgacatcaggatgcagtttgtctatttcttagctctgtttcctctgtgctgacttcctcctgcttggagccttctctcaccagcaaacaatagctgctggcagctcctgggrttacatacttcctgattcacaccaaaaggaagaaaagcaggaacctccttctctgggaacttaagcaaacttatgaactgagtctgattgtctgtgattggcctgacatgtggtctatatctgtgaattagtctctgggtagtatcatgtgctgatcaggttatatctaggttgcatgccttcctctgaatcagaaatggggctccacctgaagaacatgggctaggggtgggaaagaggattggtccttatgggaagaatcaggctatgggccagcgg

SEQ ID NO: 304907 - DNA, 576 bp, Homo sapiens
tggtccccaataaaccaacttgtattcacctcttcatgttgtctccttctcccatgtggttatcaccaatacactgcagcagaagtgatatcatgcaacctccaaggacaggccttgagaagacatggaggttcggcattagccttctttatgctctcaccaatatgtgagaaaacatggcctagatactgaaagatgagcgaccatggagcaaggatggcctcgagcccacatggataaagaggcccagcctttgcagtgtcccagctgagtctggccctcagatgcactagttgaatggatcatatgagtccagatgagaacagcggaagagccattcaactaactcacaaaattgtgagcaataacagatcatcatttttagtcactcagtttggggtcatttrttacacagtgactgataactaaaacactcacttcttgcttttatcctcttaaatccatcctccacactgcttcctaaggcctggatctgaccatatgtcttccctgcttgataaaaacctgatcagcttctactctttagagaatcaggtctcaactctgaagcctgct

SEQ ID NO: 304908 - DNA, 550 bp, Homo sapiens
tcttccatgggcacaggccaggataggggttctcctgccatggggatcagtgaggataaggcatctgtcttagtctgtttttactgctttaacaaaacaccttaggctgagtaatgtgtaaagaacagaaatttatttcttatagttgtggaggctgggaagtccaagatcaaggcaccaacagagaggtgaggaagctctctgttttcaagatggygcctagttgctgtgtcctcacatggaaggaagatggtggaagagactcccttcaacctcaagtccttttacaagggtgttaatgccattcatgaaggcacagccctcatgatttaattacctcctagaggccacaaaccttaatactgttgcatcagggattaagtgccaatatcaattttggaggagagaccattactcaaatcatagcagcatcgtttgccattggatactcattgtcccccttatgatctgagaaacattttagtctttggagaaaggggaccattgttaatggtgctccaaggcagaagacctaagattccttgtaaaa

SEQ ID NO: 304909 - DNA, 606 bp, Homo sapiens
agctaacgggtctgaactttttcagcaggtaagtgggagccacaaaaaggttttttttgttgttgtttgtttgttttgagatggagtcttgctctgtcacccagactggagtgcagtggagcgatctcagctcactgcaacctccacctcccgggtttargcaattctcctgccttagcctcctcagtagctgggattacaggcacccgccaatatgccaggctaatttttgtatttttagtagagacagggtttcaccatgttggtcaggctggtcttgaactcctgacctcaagtgatccacccgcctcggtctcccaaagtgctgggattataggcgtgagccactgtgcccagcccacaaaagggttttgagtgagggttggtgagatgtgtggaagaaagatcactccaaggcaggcaatgaggaatgcagagtggagggggccgcgtgaccctgggagacccactgggaagctgtcgaggcagcacagatagcagggtgggagtggtggggagggaaggaggccaagtgcaggagaaacagaaaccaacatagtgttgtttggggaaacggggaggaaattgtgtgaagaaaaaaagacc

SEQ ID NO: 304910 - DNA, 606 bp, Homo sapiens
agctaacgggtctgaactttttcagcaggtaagtgggagccacaaaaaggttttttttgttgttgtttgtttgttttgagatggagtcttgctctgtcacccagactggagtgcagtggagcgatctcagctcactgcaacctccacctcccgggtttaagcaattctcctgccttagcctcctcagtagctgggattacaggcacccgccaatatgccaggctaatttttgtatttttagtagagacagggtttcaccatgttggtcaggctggtcttgaactcctgacctcaagtgatccacccgcctcggtctcccaaagtgctgggattataggcgtgagccactgtgcccagcccacaaaagggttttgagtgagggttggtgagatgtgtggaagaaagatcactccaaggcaggcaatgaggaatgcagagtggagggggccgcgtgaccctgggagacccactgggaagctgtcgaggcagcacagatagcagggtgggagtggtggggagggaaggaggccaagtgcaggagaaacagaaaccaacatagtgttgtttggggaaasggggaggaaattgtgtgaagaaaaaaagacc

SEQ ID NO: 304911 - DNA, 604 bp, Homo sapiens
cagtgctgacatgagtcccctaaaattcgttcatctttctgctggtaagacttcttttcatttgtcctaagctcatcactgggtttcagagaggttcagatacagatgaacactgaggtttggagcaatttggagactgccctcttgcattgactgattgctttctatacctgccacctctgtccttttcagctcctcccctatagcaactccctccccaaagctctccaactcatccccaacaccagacagcattttcttgaacaggagaagctgcttgggcctttttgcatggtgacctattttcctttccaaaaaagagaatcaaaatctagtccttgttcaattttggtagaaaagtggtgggtgtggattgttttcaggaagtcttctatgagcctcaatcctctcaattcaagtcagtaaacaaagatggaggggacagagtagacaaggggagctgaaggagggaaaggtgaggaggcaagtaggcccacacaccgcacaccccacgctatgctacaygatgttaaaaatatgtaaatgaatagtggagttggcttcccactggacgcaacatttgaacagtgccttgaataacaag

SEQ ID NO: 304912 - DNA, 555 bp, Homo sapiens
gagtacgcactgggaaggggcttaaggaggtcagtgaaggcttgtactatgtggtacattgcacattcgtggccctctatgagctgcaccccccagtgttcatctcctgrcatagttctttcccgtgatgatcttcagcttggccatgtaactagcttagccaatggaacatcagcattcattgcatggatatgcaagctgaagcttgataagtacttgcacattggggcttgctcttttgaaatgcttcttcctggagaatacccaccatggtttcaggagactcaattagccatgtgaagaaacccatattgaggagaattgggcccctgactcatagcctcagctaagctatcagcaggtggccagcaccaactaccaccaactctggggccatttgaaccctccaccctaaaaccgcagccaaccccatgggaagaagaactgcctgaatcaacctacagaatcataagaaataatgaactgttgctgtcttaaccactatgttttgggatcgcttgttccacagcaatggataaccaaagcaagctgagt

SEQ ID NO: 304913 - DNA, 495 bp, Homo sapiens
tccacagtgtgctttggcccagyaaggtcctgggggaagtactcctggtaatcctgagaatcagatagcaggagtgcatttccagggctgcaggccaccctccacaggaccacctgggtggctagtgtgctcagtgctggtcaccaggggctgaccttcaagtgtcagaggaagctgggaagttttggatcctggattgagaaactggcctgtgtttttaactctaggagtcatgatctgaatgtgaaattccaagggctacaaacacagaccatgggcttttatgactctgggtgacctctatcctctggctgtcatttggggatatttttcttctccttttaatcctgaaaaggaaagaaaaaatgttacaagaagcaagttactcatcactttgttaaggattgattccatttaattccagagcttgtttgacccttggataaacaattgaaaccttctggaggtacctaaaaggaatgcaagaatgcattt

SEQ ID NO: 304914 - DNA, 495 bp, Homo sapiens
tccacagtgtgctttggcccagcaaggtcctgggggaagtactcctggtaatcctgagaatcagatagcaggagtgcatttccagggctgcaggccaccctccacaggaccacctgggtggctagtgtgctcagtgctggtcaccaggggctgaccttcaagtgtcagaggaagctgggaagttttggatcctggattgagaaactggcctgtgtttttaactctaggagtcatgatctgaatgtgaaattccaagggctacaaacacagaccatgggcttttatgactctgggtgacctctatcctctggctgtcatttggggatatttttcttctccttttaatcctgaaaaggaaagaaaaaatgttacragaagcaagttactcatcactttgttaaggattgattccatttaattccagagcttgtttgacccttggataaacaattgaaaccttctggaggtacctaaaaggaatgcaagaatgcattt

SEQ ID NO: 304915 - DNA, 606 bp, Homo sapiens
tctcttttttccatagcaataggtaagtagatattagacaattataaatttaaaaatataataatcattaaatgtagcacatcaaagcaattctgtaacagaactaattactattcaggtatttcataagtttatgaaatgaatgaggttttaagtgattacctgtcttgagtatagctgtttagtaaccaaactaggtttaaaaaataattattaaaacaaatctataaaacatcagcttaactcttatgatgtgtgttgtttctgtccccccaacccaggctgattcacttctaacgacaggaaaatgtagtgaaataaaaggagcccagaatttcaaagcagaattccctggattttattccctctgactttccaattttgtaacttagtagttatgagaatttagataggctgtagarctttcctgagcctaattttcatcatctagaaataagaaaacctgctcttgttttttaacttacgaggttttggagaggatcaaataggatcaagtatgaaaataagaatatatattttaaacagaatcccaggctctaactctttaaatagattaggggcataaccctgacatgcaaacgccaa

SEQ ID NO: 304916 - DNA, 644 bp, Homo sapiens
gttcttcgaacccaaaggagtaatcaagttgctgtctgtctttttttaactgaagaaatattgaaataatgaggaagtatgctttgtgagtagtatggaggtgtactcagagctacttaaaatatcctttgtgtaaaatgaaacatcaatctaattccaagtgtggagagccagcatggcaaatccaatgtagctgcaaggcagtttacattgtatcttaccactgttcaatttaagaaaagattgaagaacatcaggctgctataaaaacaatttacgcagaataaatttggtactcgtcaaccgtttttcaaaggaagcagctctccagcagagccagggtgtcatgcaacatggcttagcggtacttgaatagaatgattattaggcataaaatgagttcaaaaatagatttacaaaagtattaaatgattgaaacgagagcactagctgccatttaaatggcatttaaattgtgttaattgagactaggtagtaggaaaagtattgaaacttccaggaattkacagacctttttctgtcagatttctattacagcagcctacaaaataataggttaaggaaaatcagaaaacatctatgagttatgcttgtctatcctctttgtgatgcattgcatgatt

SEQ ID NO: 304917 - DNA, 550 bp, Homo sapiens
aagctcacccaaaaaatcttaaaggagaatggtagcaaggtgaattccccatggaaaatcagttggtaggaaaatggtgaatggatacggtgagccaatcaactacacaaatcagttaaaaaaaatcagaatatagatgatctgaaaattaacatggttaattttaacagtcatatattttttaaaacaatgtatttwttaagtcaaattatgttcaagacactgggtcttgtgaactttatcgagttgagaaactgacaataatattttgtcactaatttacagtatcaaaaattatattgttataaatttttgaagtatataacgaagaataatgttggtatcagccccatggaaacacaatgttttcaaaacctcaaatctgtctgctagatatgccaatagccagtgatttttttcttttttaaagatttaaaaatttgtgttagccatgttgcactaaaattgggaatattacaatgttagtgcataaatctggccaaggataatttcctcttataagcgagaattctcagtatgaaccaaaagt

SEQ ID NO: 304918 - DNA, 612 bp, Homo sapiens
aacttatggcactagagaatggcttcaaataacccagctttgacagtgtcctcatttctaccatgctgaggcatgatgtttgttaattcaagttacagatgaaaaatgagatctwaaagagtgcatgttttgagattcaatattaattgttagaaaaaccaaagtttaatttttatattaaagggtgatttagattcagtgaagagcagatgtaattacacagctagatcagttttgacagatgtatataaaggagcaacccaaacccttatcaagacttaaaacatttccacaatgccagaaattttccacaggtcctttcccagtctatttcatcactgtctatcctgcttcaatgatctatttatctaccattagccaatgcctcacagtctaaattatttagatttatattgtcttggagttaggtagtgtaccttctccaaattagttcttacctttcaatactttcaggcaatgttaggccatttgcattttcctttaaatattataataaccttgcaaaatgccattaaaaaaactttctgagaatttgattgtgattgtactgactctgcagctcagtttggggaaaattgactttttagcagt

SEQ ID NO: 304919 - DNA, 612 bp, Homo sapiens
aacttatggcactagagaatggcttcaaataacccagctttgacagtgtcctcatttctaccatgctgaggcatgatgtttgttaattcaagttacagatgaaaaatgagatcttaaagagtgcatgttttgagattcaatattaattgttagaaaaaccaaagtttaatttttatattaaagggtgatttagattcagtgaagagcagatgtaattacacagctagatcagttttgacagatgtatataaaggagcaacccaaacccttatcaagacttaaaacatttccacaatgccagaaattttccacaggtcctttcccagtctatttcatcactgtctatcctgcttcaatkatctatttatctaccattagccaatgcctcacagtctaaattatttagatttatattgtcttggagttaggtagtgtaccttctccaaattagttcttacctttcaatactttcaggcaatgttaggccatttgcattttcctttaaatattataataaccttgcaaaatgccattaaaaaaactttctgagaatttgattgtgattgtactgactctgcagctcagtttggggaaaattgactttttagcagt

SEQ ID NO: 304920 - DNA, 517 bp, Homo sapiens
tacaaaattacaaatgtaatataagaagtgatttgattcttcttttgaaaaagaataaacatagtacatacatgtgtgtatgtgtaactttattgtaatctgtcacaatgggcaagtaaggattgaatatattatttaatccaaaggtaactgcaaattgactttcctctggtgctgtggaagagattaataacttacactgagctagcatctcaatctcaatagcagcttagtcaaagctgcagttaggctttggaatcagacagactggaattcctatctggattggacagctgactggctgaatgaacctgggcaagtcatttggtctttctgagcccctgtttattatctgttaaaatggaaataacaatagtgtctacctcmcatatttttaacttacagttctgtcatagagtcaatgatggtattggtaatgaaatttaccacttaaagtggatattttatgtgattctcttcttgtcttttaaaaatagtagatagctcacttagctgc

SEQ ID NO: 304921 - DNA, 595 bp, Homo sapiens
caccactgcacttcagcctgcatgacagagtgacactttgtcaaaaaaaaaaaaagcatataatttcttaactagatctcttgaatatttctacctgccaagaagaattaacaacctttactctcctctctctattccattatggcaataatgcagatgttttattttcaaataaaaattacattataatattgactacaattttgaattatatcaactccaccttcaacctacctgaagattctcatatggcccactgaaagtcaggagctcaatgtgcttttaaaaccccatttgggaattaaagagatacacaaaatatctcttgattgtcagatttctttayttctattgttttcttaattaaaattgttatctttaggtttttttaaaccccgatgtcaccagctttggccttaagtgacttttatgtgtgtctaaaaccaaaactgttctctacacattggagacaaaggtacttctagatcagaaatagtaggattagtcttatgaatgtagggttgcttcagcactgccttatcctaattcagtattatagagtttcagcccttctgtaccttattaaaatgctagc

SEQ ID NO: 304922 - DNA, 579 bp, Homo sapiens
aaacagtaagacagaaacccctagggtgtggcttttatgatcttggctacaggagaaacccttgacccactagggccttggttcttccaaaagattgcacagagatgttgctccagaaagggaatctacatggaatctcacaggcaagcaagactagagcagcctcagccagccgccatttcaagrgtctagatactggggatctacagacctggctgctgttgctgcactgctccaaggagagagaggagagagggggtactgagcattcctgtgcacccttggaaaagtccctaccacgctgctgtgagctgctgttgggactgagacatgaatggactgtactccctgcagctttttacactgcttgcctgggaccccaccctctctggcttcagcctcaaggttctgttttgagaatttaagagtgggctgtgccccatcctcaggttgaattgggctgatatagctgcagctgccacccagccagagagggtcaaggaaaccaggccccgctatggacatttaggatgatacccacagcaatgggctgctgtgagactgagatgtgaggatact

SEQ ID NO: 304923 - DNA, 605 bp, Homo sapiens
ttatgatcttggctacaggagaaacccttgacccactagggccttggttcttccaaaagattgcacagagatgttgctccagaaagggaatctacatggaatctcacaggcaagcaagactagagcagcctcagccagccgccatttcaagggtctagatactggggatctacagacctggctgctgttgctgcactgctccaaggagagagaggagagagggggtactgagcattcctgtgcacccttggaaaagtccctaccacgctgctgtgagctgctgttgggactgagacatgartggactgtactccctgcagctttttacactgcttgcctgggaccccaccctctctggcttcagcctcaaggttctgttttgagaatttaagagtgggctgtgccccatcctcaggttgaattgggctgatatagctgcagctgccacccagccagagagggtcaaggaaaccaggccccgctatggacatttaggatgatacccacagcaatgggctgctgtgagactgagatgtgaggatactgcactttccacagatttttgctcatgctgcttacctgggaagggccctgctctccatggt

SEQ ID NO: 304924 - DNA, 605 bp, Homo sapiens
ttatgatcttggctacaggagaaacccttgacccactagggccttggttcttccaaaagattgcacagagatgttgctccagaaagggaatctacatggaatctcacaggcaagcaagactagagcagcctcagccagccgccatttcaagggtctagatactggggatctacagacctggctgctgttgctgcactgctccaaggagagagaggagagagggggtactgagcattcctgtgcacccttggaaaagtccctaccacgctgctgtgagctgctgttgggactgagacatgaatggactgtactccctgcagctttttacactgcttgcctgggaccccaccctctctggcttcagcctcaaggttctgttttgagaatttaagagtgggctgtgccccatcctcaggttgaattgggctgatatagctgcagctgccacccagccagagagggtcaaggaaaccaggccccgctatggacatttaggatgatacccacagcaatgggctgctgtgagactgagatgtgaggatactgcactttccacagmtttttgctcatgctgcttacctgggaagggccctgctctccatggt

SEQ ID NO: 304925 - DNA, 617 bp, Homo sapiens
agaccaaaaatttctaagtgtgaatggctgcttggtgctacctggccttccagattcctataaagacacattttaaaaggtaggatgatagaccttttatttaacactgtgttcacttgatttataacatttagatatttaggaatacagcatatgggcctccattcgtaccctcatttcaggccttccaatgttaaggaaaggcttaccagctagcctctatctctctactctccacaacctaacttctcgtggytttcttatcttgctgcatcccatttgctcattccctacttctttcctcacctgattttgcttgggcacctacaacttcaacacacctcttctaatttatgctgacttttacttccttgttagaaaagtctagtgggcaagatgctcagtcctgactagacttgttcccttagcagtgttcaacattgctaaccactttctcttgcttgaaacattctttgttcttggtttctagggcgccacggtcatcttactttccccaatacttctctggccattccttctgtctgtcccttattcagtcctcagtggtcattctgaggctctcatttttttccaattcaatggcttctctccatgtc

SEQ ID NO: 304926 - DNA, 617 bp, Homo sapiens
agaccaaaaatttctaagtgtgaatggctgcttggtgctacctggccttccagattcctataaagacacattttaaaaggtaggatgatagaccttttatttaacactgtgttcacttgatttataacatttagatatttaggaatacagcatatgggcctccattcgtaccctcatttcaggccttccaatgttaaggaaaggcttaccagctagcctctatctctctactctccacaacctaacttctcgtggctttcttatcttgctgcatcccatttgctcattccctacttctttcctcacctgattttgcttgggcasctacaacttcaacacacctcttctaatttatgctgacttttacttccttgttagaaaagtctagtgggcaagatgctcagtcctgactagacttgttcccttagcagtgttcaacattgctaaccactttctcttgcttgaaacattctttgttcttggtttctagggcgccacggtcatcttactttccccaatacttctctggccattccttctgtctgtcccttattcagtcctcagtggtcattctgaggctctcatttttttccaattcaatggcttctctccatgtc

SEQ ID NO: 304927 - DNA, 617 bp, Homo sapiens
agaccaaaaatttctaagtgtgaatggctgcttggtgctacctggccttccagattcctataaagacacattttaaaaggtaggatgatagaccttttatttaacactgtgttcacttgatttataacatttagatatttaggaatacagcatatgggcctccattcgtaccctcatttcaggccttccaatgttaaggaaaggcttaccagctagcctctatctctctactctccacaacctaacttctcgtggctttcttatcttgctgcatcccatttgctcattccctacttctttcctcacctgattttgcttgggcacctacaacttcaacacacctcttctaatttatgcygacttttacttccttgttagaaaagtctagtgggcaagatgctcagtcctgactagacttgttcccttagcagtgttcaacattgctaaccactttctcttgcttgaaacattctttgttcttggtttctagggcgccacggtcatcttactttccccaatacttctctggccattccttctgtctgtcccttattcagtcctcagtggtcattctgaggctctcatttttttccaattcaatggcttctctccatgtc

SEQ ID NO: 304928 - DNA, 635 bp, Homo sapiens
ttcatttttttcacaataggtgcatggtgctatcagcatagatgccaacacggtcctcttagacaggccttttgtttccacatatgatggcacaacattaaatagatcttggcatttgctgtttgggtaagatagatacagtagaaaaaagttttcttggatttcaccaccatttagaaatgatacaaatgctacaacaagacacttattgatgaaatctgttgagtcgtcaacctgcattggtaagatgtgcagtttattaccccaaagttcttctcatcctgtggcatgtcaacaatatgataacttagcataccctgtaatacagaacctcgtcaaattatcatattgcaactcttcctatcattttcctcactatatatttctatgctagtattattaggttctcatcaagtacatcaattttttcatatttttaggcaacatatttaattacttaataacttgcttcctgagccttttcactaaatgtgactttttttaaacaaaatttcacttttattctgagattccaatagcarttcaaaataatcaacaactttacctataaaatggctatgatttgtactcatgtctttttaattttcctgcaggaaatgatgtgcaaatgatgc

SEQ ID NO: 304929 - DNA, 635 bp, Homo sapiens
ttcatttttttcacaataggtgcatggtgctatcagcatagatgccaacacggtcctcttagacaggccttttgtttccacatatgatggcacaacattaaatagatcttggcatttgctgtttgggtaagatagatacagtagaaaaaagttttcttggatttcaccaccatttagaaatgatacaaatgctacaacaagacacttattgatgaaatctgttgagtcgtcaacctgcattggtaagatgtgcagtttattaccccaaagttcttctcatcctgtggcatgtcaacaatatgataacttagcataccctgtaatacagaacctcgtcaaattatcatattgcaactcttcctatcattttcctcactatatatttctatgctagtattattaggttctcatcaagtacatcaattttttcatatttttaggcaacatatttaattacttaataacttgcttcctgagccttttcactaaatgtgactttttttaaacaaaatttcacttttattctgagattccaatagcagttyaaaataatcaacaactttacctataaaatggctatgatttgtactcatgtctttttaattttcctgcaggaaatgatgtgcaaatgatgc

SEQ ID NO: 304930 - DNA, 635 bp, Homo sapiens
tttgtgttcctttttgcactagtacagtgaaatgacttagaagtttataattcttattatccataaaatcctcctctaccatctcaactttgtcttcaaaaattaccttaatggaatatctgacattttggacaatgtaaacattgatgaaacttaaaacaaaatgacataataaataaccctcttagtccatttgggctgttataacaaattattatagactgggtgccttaaacaagaaacatttattactcacagttatagagactgggaaatccaacatcaaggtactggcatagcaagtgtctgttgaaggcccgcttcctggtttacagaagactatcttcttgtatccactctcacatggcagagagcagaaaaagaagaaagcgctctcatttctcttgctataagggcactaatcccatcmtgactctttcactcccatgacctaattatttcccaaaggcctcactttttaataccatcccactggggattaaagtttcgatatatacatttttgggagaatacaagcatacaattcatagtaataacaaatgaaggaaaaaatcacagaaatatgaaaaattcacaatgtaattcaattctaacctacataatccttattctgc

SEQ ID NO: 304931 - DNA, 589 bp, Homo sapiens
cacctttaacagccaatcattgacaagaagaagaggttgtggtaggcactttgagagggagatgtttatgtcatcaatctactgtcctcccttttgtgtgacatagtgttcaccttttatcattgacctcccctatctcacagagaaactgagaatgcacttgtctaaatgagcacagtcctactgcacactgtcttacagagctacaagactgttgatgaaactgctgctggggccgttcagtaataatccatcactgcaagtgcaaacattgtggggtatgtaaagtttaaaaaaaattccccctcctytttgttttttccccaatctagtaatatcttgtggaatcctagagcttcacaccctctttagttaccatgatttatttaatttcctgaagtgtatcagtactttccattcatgctcctcacgttgccatctcttcttcttggaatgcccctgtcccattgactccctgacacccaacactccaaattagcacagattcaccattatgcccttttcacagtctcgcataccaccattcatagcacttccctcaattgtactcaaataattaatatcaatg

SEQ ID NO: 304932 - DNA, 589 bp, Homo sapiens
cacctttaacagccaatcattgacaagaagaagaggttgtggtaggcactttgagagggagatgtttatgtcatcaatctactgtcctcccttttgtgtgacatagtgttcaccttttatcattgacctcccctatctcacagagaaactgagaatgcacttgtctaaatgagcacagtcctactgcacactgtcttacagagctacaagactgttgatgaaactgctgctggggccgttcagtaataatccatcactgcaagtgcaaacattgtggggtatgtaaagtttaaaaaaaattccccctcctctttgttttttccccaatctagtaayatcttgtggaatcctagagcttcacaccctctttagttaccatgatttatttaatttcctgaagtgtatcagtactttccattcatgctcctcacgttgccatctcttcttcttggaatgcccctgtcccattgactccctgacacccaacactccaaattagcacagattcaccattatgcccttttcacagtctcgcataccaccattcatagcacttccctcaattgtactcaaataattaatatcaatg

SEQ ID NO: 304933 - DNA, 550 bp, Homo sapiens
tccccctcctctttgttttttccccaatctagtaatatcttgtggaatmctagagcttcacaccctctttagttaccatgatttatttaatttcctgaagtgtatcagtactttccattcatgctcctcacgttgccatctcttcttcttggaatgcccctgtcccattgactccctgacacccaacactccaaattagcacagattcaccattatgcccttttcacagtctcgcataccaccattcatagcacttccctcaattgtactcaaataattaatatcaatggtggtttaacatctttttcttctacttggacataaatgaccaggtccatgtctcttgtgttaactactaaattcccacttcatactataatcaaggccttcagaaatgatgcttacctttatttttgttgcttataatttacagaggtaatatatgaaatgaatgaacaatctgaaatcacagggctttaacaggtggtaggcatgaaaaataaggcaacacggtaaatagcacagctggtccaagagtttctgtgaacaa

SEQ ID NO: 304934 - DNA, 514 bp, Homo sapiens
aaactcaaaagcatctgtacagcaaaggaaacaatcaataaagcsaaaagagaacatatagaatgggagaaaatattcaaaccatatatcttataaggaattaatatccaaaatatacaaggaactcctacaacccagtagcaaaaaaaaaaaaaccaaataataaaaaaataataacccatttaaaaaatgggctaaggatttgaatagacatttctccaaaggagacatacaaatggccaataggcatatgaaaaaatgctcagcatcactaataatcaaggaaatgcaaatcaaaaccacaatgacatttcacctcacaccatcaggatagcaattcgaaaacaaatacaatcattggtgaggatgtggggaaattgaaacctttatacaccattggtggtaatacagaaggatacagccgttacggaaagcagtatggaaatttctcaaaaaatttaaaatagaactaccatatgatatagcaatcccagttttgggtgtatatccaaaa

SEQ ID NO: 304935 - DNA, 514 bp, Homo sapiens
aaactcaaaagcatctgtacagcaaaggaaacaatcaataaagcgaaaagagaacatatagaatgggagaaaatattcaaaccatatatcttataaggaattaatatccaaaatatacaaggaactcctacaacccagtagcaaaaaaaaaaaaaccaaataataaaaaaataataacccatttaaaaaatgggctaaggatttgaatagacatttctccaaaggagacatacaaatggccaataggcatatgaaaaaatgctcagcatcactaataatcaaggaaatgcaaatcaaaaccacaatgacatttcacctcacaccatcaggatagcaattygaaaacaaatacaatcattggtgaggatgtggggaaattgaaacctttatacaccattggtggtaatacagaaggatacagccgttacggaaagcagtatggaaatttctcaaaaaatttaaaatagaactaccatatgatatagcaatcccagttttgggtgtatatccaaaa

SEQ ID NO: 304936 - DNA, 514 bp, Homo sapiens
aaactcaaaagcatctgtacagcaaaggaaacaatcaataaagcgaaaagagaacatatagaatgggagaaaatattcaaaccatatatcttataaggaattaatatccaaaatatacaaggaactcctacaacccagtagcaaaaaaaaaaaaaccaaataataaaaaaataataacccatttaaaaaatgggctaaggatttgaatagacatttctccaaaggagacatacaaatggccaataggcatatgaaaaaatgctcagcatcactaataatcaaggaaatgcaaatcaaaaccacaatgacatttcacctcacaccatcaggatagcaattcgaaaacaaatacaatcattggtgaggatgtggggaaattgaaacctttatacaccattggtggtaatacagaaggatacagcmgttacggaaagcagtatggaaatttctcaaaaaatttaaaatagaactaccatatgatatagcaatcccagttttgggtgtatatccaaaa

SEQ ID NO: 304937 - DNA, 604 bp, Homo sapiens
tgtgaaaccgcagttagccagagaagagatagcccttaacattaacatttcacataataactattctcctaacaaatgtgtttcactgggctcatttaattaataaaatatgtttctagaataagcattaaaatagcattaaaggaggaaagtgattcatgtatgtatggctatattctgcacagaagattatatcacagaagattatatcatatagaactatcatatcatatagttctactaccaactttctctaactctcttcttctagaaaataaatgaaaagaacctgtttcaataytgtataaaataaaattacttcaggtttcacctgatttttttcatcactttattgcttttttaaattcaagtttaaagacaggtaaaacttttaagatactagacatgtctgtttttctattgcttgggaaaagagaaaaagtagtgggtggattatgaatactgtgtaaacatcttgatgaagaagaggttcttgtgagacaatgagaaaccaattgatttttccctttgttcactgtttagacctattgcatggggttggtacttagcctgccccttgacgaaatcttgggcaaacccatga

SEQ ID NO: 304938 - DNA, 564 bp, Homo sapiens
ggtcaactgatctttgacaagagtgccaacaatacacattgagaaagaaaatccccttcagcaaatactgttgggaaaattagatatccacatgcagaagaataaaagtgaacttctttcttataccatatacaaaaattaatgtaaaataaattacagattttaaygtaagatctgcaaccataaaacttctaggataaaacataggggaaagcgtcttggcattggtctcagcagtgatttcatgaatgtgacaccaaaagcacgggcgaccaaaacacaaatagataagtgggactatatcaaactaaaaagcttctgtatagccaaggaaataatgaaaagtgaaaagttagcctacaaaatgatataaaatgtttacaagtcatatgtctaataagagcttaatttccaaaatacataaggaactcctaaaacttaataacaaaaaagcaaataacttgatttaaaaatgggcaaagaacttgaataaacaaggtatatacatagaatggaatactatttaactttaaaaaagaaggaaatcctgtcatttacaacaat

SEQ ID NO: 304939 - DNA, 535 bp, Homo sapiens
ttaaaaacataataactagcagttttccaacttattgctaatagagtttgaatctcttgatctacttcttgctattgagtgacttacaagtaaaacttcagtatggatataggtattccccatgggttcagccyataggcaataagcaagctagatagtcattttcatgctaacagtggttgacaatcttctttgcccagggctttccaggatttcaaattaggggtccaagaaaggaagggaatcaaaactggaaactgtcaggcccaccctccacctctttctaaattacaatgaaacatggggagaagattacggtactgactgtgagtgtgaaagagaagtgtgaatttcttctcttttggctcatgaatcataacctcctccctgctcagtaggtcttaagtgaagggtgcatttactgccttatcattaaatggtggacatttctgctctatgaagttacaacagaaaatattttgcttaaaaatagaccatctcaaggcgtgtcaatgttaatttcctccatcaatta

SEQ ID NO: 304940 - DNA, 507 bp, Homo sapiens
agcattccagttgtgtatgtgtaccacgttttccttactcatwcatctattgatgagcactcaggttgcttccaagtcttggctattatgaaagtgcttcaataaacatggaagtgcatttatttcttcaatatattggcttcctttcatttgaagatatacctaatagtgggattgcagaatcttatggtagctctattttcagttttttgaggaatctccaaaaaactgccactccttagtggcagtactaatttacattcccacaacagtgtatgagggttcccgttactccacatcctcgccagcatatggtattgcctaacctctgggtaaaagccattttaactggggtggaataatatcatcatagctttgatttgcatttctctgatgatcagtgatgctgagcaccttttcatatgcctgtttgccatttgcatgacttcttttcagaaatgtctattcagatcttttgtctattttaaaattggattattagatttt

SEQ ID NO: 304941 - DNA, 507 bp, Homo sapiens
agcattccagttgtgtatgtgtaccacgttttccttactcattcatctattgatgagcactcaggttgcttccaagtcttggctattatgaaagtgcttcaataaacatggaagtgcatttatttcttcaatatattggcttcctttcatttgaagatatacctaatagtgggattgcagaatcttatggtagctctattttcagttttttgaggaatctccaaaaaactgccactccttagtggcagtactaatttacattcccacaacagtgtatgagggttcccgttrctccacatcctcgccagcatatggtattgcctaacctctgggtaaaagccattttaactggggtggaataatatcatcatagctttgatttgcatttctctgatgatcagtgatgctgagcaccttttcatatgcctgtttgccatttgcatgacttcttttcagaaatgtctattcagatcttttgtctattttaaaattggattattagatttt

SEQ ID NO: 304942 - DNA, 600 bp, Homo sapiens
gtagcccctctacaccaacacacacaatagacctttcagatacacttgcagcccccaggtgatagctgaactacaatcctggacaggacttgagtgagaggcaccagcgaagccatgtgctaattcatgatgcacataaatttgagataaaattcttgttttataagctgctaaattctggggatagcttgtaagcagcagtagatgactaatcagttgaggcaacccyaaggcagcaagtccttacttgaaggaggatttgggtggcacatctctatatctgtcatagtctacctgttttgtcatttgtatacacatatatttgagtaacagctcctccaggattctggtgggccacttttccttaggggaaatagaaaagaaggaaattagcagaactaactacagttgctctgctatggttgatctcaggaccaatattgctatttactttatttctcctatactagtcattttaggtcctgcaccatcaggcactatgtctgctgtccttggtcatgtgtctggtagcattactcagactgtcctccccaagaagtctgatctatggttaccatgtcctcctcatgcctgcactgc

SEQ ID NO: 304943 - DNA, 576 bp, Homo sapiens
attgtaaatgtttaataaaatatcagtagggtaagtgataaactattgtgactttaagactcagaattaagtaatatatgttctgaaaggttaggcctcactggggtatcatttcacttcattcacagtatggtctataaatactatttataaacacagtctataaacacaccataataaataaaactatcagtccttgaagcaaaatatttttcaaacaaaactgtcaccttttacagaaaaagaaamctatagtgtgacttcttaacatttttatggcaacattgataatttgtttcataattaactgtaccttctttgatttgtaatatcacttacagcttatgtctgcatatcgaggtttctaaataactctcataataactttggaaagtgatctcttactatcaccttttgaggaatttacctttaagtaacggggaaaaaatggaattgtttctgtatgtctttctcatgagaaagaaggtttctacctgaggtatagttaaaaatacttttttcaattcattcataatagagcactacaccaatacattgtaagaaatcagaaaaaat

SEQ ID NO: 304944 - DNA, 527 bp, Homo sapiens
aagtttcttcaacgattttcaatgtggtttccagatcagtagcatcagcaatgcctaggaacctattagaacttggcccccaccccagacctcttgaatcagaagctctggggtgggacttatcaaactgtgtttgaaaaagcccttctgatgattctgatgctcactaaagtttgggaaccactactttattgttttaaaatttttatttatttatatatttttgagatggagtaccgctcttgtggcccaggctggagtgcaatggcacaatctcagctcactgcaaccaccacctcccgagttcaagtgcttctcctgtctcagcctccygagtagctgggattacaggcgcctgccaccacacccggctcatttttgtattatttgtagagatgaggattcgccatgttggccaggctggtctccaactcctgacctcaggtgatctgcccgcctcagcctcccaaagtgctgggattacaggcgtgagccaccagcctgcccgggaaccattactttagtgt

SEQ ID NO: 304945 - DNA, 487 bp, Homo sapiens
tgcccctgccctaaagatctgtgtaactttgatcttgagagagataacttagggtatctggcaggagatatttctaagcagcaaagcactcaggaggtgacagagcctaaaactttggaaaaatttcagcctgacaatgcagtggaaaagaaaaatctattttctgggcagaaattcaagcagaaataatgaggagccaaatgctaatggccaagacaatggagaaaatgtctccagggcatgtcagaggcctttgaagcagtgcctcccatcacaggactggaggtctaggggaaaaaatggtctcctggactgggtccaggggactcctgctgtgtgcaaccttgggacttggtaytctgcatcccagctactccagccatggctaaaaggggctaaggtatacagcatgagccatagattcagagggtggaagccccaagcattggcagcttccatgtggtgttgaccctgagaatacgcagaa

SEQ ID NO: 304946 - DNA, 535 bp, Homo sapiens
tgaggttatcatgaggcttacaaataacatcttataatacattactttagactgatggcaatttaacactgattgcaaaaacaaactaacaaacaagctataagaaaactaatagaaactctaactttgttcycctgctttttaactttttgttgtttctgtgtgtatcttattataccgtctgtatcttgacagttaatattattttttcataggttcatgatttagtctttctactcaagatatgagtagcttacacaccacaattactgtgttacaatattctgtgtttttctttgtgcttactattaccattgcgttttgtaccttcagattattttttattacttgttcatgtacttcttttcagactgatgaattccctttagcatttcttgtaagacaggtctggtgttgatgaagttcctcagctcttgtttttctgggaaaatttttatttctccttcatgattgcagggtatttccactggttaaactattgtaggataatttttttttccttcagcactttaaa

SEQ ID NO: 304947 - DNA, 562 bp, Homo sapiens
taggacccctatttaaaatgaacacatgctggaagaataacttcagtggcaaaaagctatggggcaccctgctggggtatatatgaaaaaaaggaaagtggaaaagtcttagcagtaacgaagatgtccccataaggtacctgaagaactcaactgtgcctgcaatgaaagttaaagcattttttttttttttttgccatcacaaaaaaaamcaatggccagtcagggttcactagaggagcagcaacatccaagagaggatcacaatgaaaaagcaagaaatgcctatcctttttatttcttattaccttctttctcctaaaagagataatgggtgagaaatgagaggggagagagcaatggaaaatggactgtgttccctcccttactcaggacgaagttcagctattcctaggaaaaagaaaagagaggataattaaattagacatgaactagatgtcttaaactgggctcaaccaaaaataacattttattaattgaaaatgatcaaagagttatgcgatctatctgacatagccttaggggacaacaaaaggaaatt

SEQ ID NO: 304948 - DNA, 658 bp, Homo sapiens
tggattagtgaggggagtgagaatgtcaaagagatactgaaaaattttaagaattttaaattgccaatgaaaaaaatgttttgtcatatgacttttagaaatcatcttttggtgggcacaaagtgaaaaaaaactcagmaattttttcacacattcttctttttcattaactgattgagcatctttacttgtcaaacatgggttaacttgttggatggacataacagtcctgctcctgagctcctggaacttgtgttcttttttccctagatgctcagaagaaaaataaaaccctgtagaaccagttagcaaaggcacagaaaatccaatgacccatggtctttcataatgggaaaaattagcattagtttaacacctggtacatgtcttcagattcattatataatttcatcttcagcataaatacagtgtaagtacttattcctatggggagaacaaacaaatcaaggcccagtatcattatataacattcccaatctcagccagctacataaatggcagagcaataataagacaccgattttgtctggaaccaaaccctgtggtttttttccactacatcaggctacctctttatgacatggccacacagaggcaaacaaaacatttgggagagatatctacattttgtaatttg

SEQ ID NO: 304949 - DNA, 643 bp, Homo sapiens
caatctcagccagctacataaatggcagagcaataataagacaccgattttgtctggaaccaaaccctgtggtttttttccactacatcaggctacctctttatgacatggccacacagaggcaaacaaaacatttgggagagatatctacattttgtaatttggagatcaaagcaatatggtatcattttaattgggagcattattgagtaaatcccatacaatatgggtaactttggatttatccttaagctataattccttaataaagattcataattaaatgagtcggtgtataaatttacccaaataaaatcatataacatagataaaagcattttgggttatttagaggcaaagcattatataatttttataagaatttcagtttactgtagaattccataatgtaattatgtaacttcatgattttcaaaaatttacagaaattaattttattcattgcattactacgttatctacagttttctgctgttctccaatcataaaaagaaaaagaaataacaaaaatctccccggggtaaataatactgtagcccctgtcatgaaataaaatatgccagtcccttcctatgtataaacmaagaagaagtatcatgatgacaaagtggttcaaaaggct

SEQ ID NO: 304950 - DNA, 558 bp, Homo sapiens
catggattagaagaaatcaactgtttaattattaaaagtcaagkgtgggttagcatgtcagtatgaaatactgggaactttgccctcacttgtaagccttcttccttggacttcctctgggtgcttagaagaaaacatggggcaaggcaggggatgaaaaagaaccaacctcaatgatgcaagactgtagggtatggtcagacgttgctaggagaaaatgttaattccttcttgtgtccttggacccttcttttctaagaaataaaagccttaagctggagatgaggcagcaatcactgtaagttccagagcacagttaacaactcattgcatctgggtcaaaggtaaaaggaaaagctctttctgctggtgaaggacagaaaatcttcctggttccaggaatctatatgcataccaggtggaggtctgccactgctggagtccaaggaggtatctcctagccaacatgaaccacagatccaagattgtggctagctgtcacagacaggaggggcacaaatgctgagaaagctctacctctaagatccaggtatgcaa

SEQ ID NO: 304951 - DNA, 558 bp, Homo sapiens
catggattagaagaaatcaactgtttaattattaaaagtcaagtgtgggttagcatgtcagtatgaaatactgggaactttgccctcayttgtaagccttcttccttggacttcctctgggtgcttagaagaaaacatggggcaaggcaggggatgaaaaagaaccaacctcaatgatgcaagactgtagggtatggtcagacgttgctaggagaaaatgttaattccttcttgtgtccttggacccttcttttctaagaaataaaagccttaagctggagatgaggcagcaatcactgtaagttccagagcacagttaacaactcattgcatctgggtcaaaggtaaaaggaaaagctctttctgctggtgaaggacagaaaatcttcctggttccaggaatctatatgcataccaggtggaggtctgccactgctggagtccaaggaggtatctcctagccaacatgaaccacagatccaagattgtggctagctgtcacagacaggaggggcacaaatgctgagaaagctctacctctaagatccaggtatgcaa

SEQ ID NO: 304952 - DNA, 522 bp, Homo sapiens
aaacatggggcaaggcaggggatgaaaaagaaccaacctcaatgatgcaagactgtagggtatggtcagacgttgctaggagaaaatgttaattccttcttgtgtccttggacccttcttttctaagaaataaaagccttaagctggagatgaggcagcaatcactgtaagttccagagcacagttaacaactcattgcatctgggtcaaaggtaaaaggaaaagctctttctgctggtgaaggacagaaaatcttcctggttccaggaatctatatgmataccaggtggaggtctgccactgctggagtccaaggaggtatctcctagccaacatgaaccacagatccaagattgtggctagctgtcacagacaggaggggcacaaatgctgagaaagctctacctctaagatccaggtatgcaagccctgtataagactgaagctgaactaggaaaacaaacttcatcataaccaccagaagcctagcattatgtaaccagtaagagcatggagagaaac

SEQ ID NO: 304953 - DNA, 558 bp, Homo sapiens
catggattagaagaaatcaactgtttaattattaaaagtcaagtgtgggttagcatgtcagtatgaaatactgggaactttgccctcacttgtaagccttcttccttggacttcctctgggtgcttagaagaaaacatggggcaaggcaggggatgaaaaagaaccaacctcaatgatgcaagactgtagggtatggtcagacgttgctaggagaaaatgttaattccttcttgtgtccttggacccttcttttctaagaaataaaagccttaagctggagatgaggcagcaatcactgtaagttccagagcacagttaacaactcattgcatctgggtcaaaggtaaaaggaaaagctctttctgctggtgaaggacagaaaatcttcctggttccaggaatctatatgcataccaggtggaggtctgccactgctggagtccaaggaggtatctcctagccaacatgaaccacagatccaagattgtggctagctgtcayagacaggaggggcacaaatgctgagaaagctctacctctaagatccaggtatgcaa

SEQ ID NO: 304954 - DNA, 607 bp, Homo sapiens
aaaaaacaaacaaacaaaaaaaactggaaaagttttccaattaggaatctccacacaagtccagggaggacatctacgtacaaaaggtttgaggggcctcagaatctcttgccagggtaattggtaaagttcttttcctatatgaaaccagtccataaagactgggagaggtggcttttgttttcaaatgcatagatccaatacaaagttataggggaaaaaacacacagggaaaatgtcccaatcaaaggaagaaaataaatctccagaaactgaccctaaagaaacataggtataagaactaccattataaagatgttcaatgagctcagaaaaaaaatgcatgagttaaatgagaatttcaacaaagagatagaaaatgaaaaaagaacaaaacagaaattttagagcttaagaatgcaataagtaaactgaaaatttgctaaaggagttagttcaacagtagacttgaccaaatttgctaaaggagtkagttcaacagtagacttgaccaagcagaagactcagcaaattcgaagatacgtcacttgaaattatccagtcagaagagtaaaaagaaaaaaataatttaaatttgtaaagaaaa

SEQ ID NO: 304955 - DNA, 570 bp, Homo sapiens
attatattgagtgggcaggatgtgttgatgacctacacaagggaccaaaaatgcctgtgaagagaaaaggatgacaaaatgtccaggacttggagatcgattagatgctgttatgactgagttgtatcccccggctccaatacatgcaagccctaacctttagtacctcagaatgctaccgtattgagaacgagtctttaaagaggtaatgaagttaaaatgaggctgttagggtgtgcactgatccaatgggagtaggtttttctaagaagaggagattagaccccacaagagccactaaggacgcatgttacatagaggaaaggccatgtgaggacacagtgaaaggcggccacttccaagccaaggagagtcagtcctcaggagaaatcaaacctgctgacaccttgatcttggacttcaagtctctagaactatgagaaaataaatttctgttggctcaacctcctaatatgtgattttggttatgaggccctggaaaacraatatagatgcccagtgtcagagaatggagaaggtgcttggacattgattgactaagataagaat

SEQ ID NO: 304956 - DNA, 621 bp, Homo sapiens
caagtgtaagagatctgtttatatagtcagacatatcacttaaatctgatttaatttgggaaaacatatctatttatagatagatatctatttatatctatttatagatatctatttatatctatttatagatagatttctatttatagatatctgttttctctgggtatgctagtttcctcctacaccttcagaaatgggcatgtttggttaattgctgtgtctaaatggtccagtctgagcaactgtgagtgtgtgtgtgagtacaccctgtgatgggattaaataatgtagtttaatggttaatgataataatactaattaataataataatgacattggctgacacagaatgctatgttacaggtgctaatgaattgtaacattttatgttgtcaataatctttcataacaggtttttgttttgagttttgcatagatcaggtaactagagcccaaacaggttatctttcttaaggtcacacagctaatgagagagaagctagtattagaagcctgctttgcttaacttcaaatccaaagtctttattattttcattgcattatgctgccttcttggctaggrcctacctaggcacaatggggaggaatatagcatt

SEQ ID NO: 304957 - DNA, 498 bp, Homo sapiens
ggtttttttttgtctagcaaagatattgcctccaattaaggcaaaatcagaagaatgtgggcagctactaagctattccctgaaaagagtataagtagaaggcaaaaatcccagatctaatgaataccaaatcagaaaaaccaacatcataatctatagaaattttaaagattatgaaacaygtaaagcttccaatctacactattttttattctttgtttccccaaatttattaggagtaaaaaaaatcatctttggtgtacttttgtagaaagagaaaggtatgggtagcagaccattatcattaagtattgatattattacgttaaacgttatcactgtgtaatcagacttacaagaagaaaaatgacaagagacagagtgtaccagagcagctgtgaaagtaaggagtacgtggatagttggcctatgccttagaaagcaacctggagaacagacttcagtgaagaatatggtcagctaaaattcaccaatact

SEQ ID NO: 304958 - DNA, 501 bp, Homo sapiens
ttaaattataaaagaatgttcggttacctgcagcagtttctatgagattgtttttgtcccagagcagccaggagagaagacagcaattgtgtggtaaaataagacataattggaattgagagtccagattgctaaattagactttttttttagctttgtcactaatttgtaatttgacgtctttgaygtcattctatcttccttgggttcattccttgttctctaaataaaatattaggtttacatagaacacgaagcatccttagaaatttttatatgttcaactaccacttttaatttaaataaaatgttagctgttcaaaaagccaaaaaaaaaaaaaaaaaaaaaacagaaaacattatctcactggcttataattacaatagaagtcagttctcattgacaccaatgcctcgaagccctggaaaaataatagggtaaacagtgaaaaggttgaggaaagaatattttgaaatatctgcaggctagttcatttcaga

SEQ ID NO: 304959 - DNA, 554 bp, Homo sapiens
ttacatggcagcacccacctggtaagctcatcaatttctgcaagcagtggttccttcacctttaaagtgggcattgtcactttgtttaaattacaatctgatgataataggagctaatgttttccaagctcttattttatgctagacactgtgctaaggactttgtgtgcattttaccaataatcttcacaataaacctagcaaagttgcagttattcttctaattttcaaatgtagataatgagtcacatgcccaggtctcactgttaaaatgtgtaagcccttgatgtgttgcctggtaatgataagagctcagataaatatagctactgaaattgtttattactatcattgttaatattacttgtcagcctctaccctagaaatcagaagtagacaaartgcctttgtaattaagcaaatgtggttagcttgatctcgtacatgtgagaatattataggcccccattaaaataaaatgtaatggtaattattctttttaaaatgtaattgttctaaaatttgctacttgggagatgtcatatatttggtta

SEQ ID NO: 304960 - DNA, 580 bp, Homo sapiens
tgtcagtgggaacactaatgcaagaatgacatgttttccaaacctcaaggcctcacaaggcttcatcctatatactgtgtatggctgttaacattaaagcattgcaatttgtaaatcacaaccagtagaagctatttgctctcattgttactctagataattttgaatattactgtgccagtttgactactacatttttgagaaactgccttttcctattattctttccatgtaatgtgataaaaagagaaaagccagaaaagctgacattcttaaaataaattggaaacttctcttttgatactgtggttttctttattaatatttaaatcacttgcacacatactttattataatagccatcagaatgatgtgagaattaattgaagcaacwgttatacagtgattatgaaatatttgcaataagggtcagctgtacagaacagagtactttactctcactgtgtattgtagaaaatctgagtctgcctttatagtaaaaataagcccagaaaattcatttatgaaggggatacatgaaaagaactgagcatatgcaaaaataccacgcagaatgtgt

SEQ ID NO: 304961 - DNA, 597 bp, Homo sapiens
gtcaattttacaatgaacaygtatgtcaaaacatcacactgtacaccttaaatattgctatggtctgaatgtttgtgtcccttccaaaattcatgtgttgaaacccaatcaccaatgtgatgttattcagaggtgggtctttggaatctgattaagagttagtttccttataaaagatgtttcaaagggctggtttgcccttccactacatgaggacacatctagaaggtgctatgcatgaaccagaaagtggctcctcaccagacacagtcctctggtgtcttgatcttgggtttcttagcctccagagctgtgaaaatagatttctgtagtttgtaggccactcagtctatggtacgttgttatagcagcccaaacaaactcagacaaatatataaagtttttgtcagttataccttaataaagctggtgaataaaagagtatttcattaaaatctaaacattgaaaattaaatctttgataaaaaagaataacaaggtttggatatgattatcagtggaggcaataacgttatgtttttttgtgtgaaggtgatataaaggaagatgaaaatgataaacaaaagaccattatat

SEQ ID NO: 304962 - DNA, 573 bp, Homo sapiens
gacactgtgtggactggagtgggaatccractgcactgctgggtgcaactggtgtcactgcagccctccatgtgtttacaggaggacatcagtgggggttccagggatgcggagatgaaggggctgtgcaccccaaggcattatgcagtcttgaaaggtccaggctttcaaaatagcatcatactgcagctgcttgggtcttgggggtggggagtggaactcagtgtgaactctctctcaagaataatgccttctcgcggattctaggcagctgtctatgctagtctcagggtgcataatgattaaggggctctcctgtggctgggattgcaggaattcgtgatgggaatgtggactgatggggatccctcttatgctttctccacattgagggcctctctgggctcccagacaatcctaatcaggctgggtgcctctctttctttttcagttccctgagtgtttcctgtcacttccctgctgaataccagtgttctctcttagaggctttattctaagtgtgattatttactcactctttggttcttgtttgtgtaggagatgagtgcccag

SEQ ID NO: 304963 - DNA, 512 bp, Homo sapiens
caatgtgaacttcatttactaccaataaataattctcagcttatagcacccagtcacttaataatacattgaattcagcattagtaacagtattgaaaggagttagccagcttgctttgggcagacagtaagggaagggtccctggagaaccatcaacccacctcaaaagtgcttataccaggtgttttatgcagataagggaacttgcacaaagggcttgcctaaacatgcccaaagtggaaaacttagttccttaacacatgcgcagtaagagaaatgaatcaatatggagtagctcagtctaagggcccacatacgcacaggaaggatggkgtggagccaccaggaactcacaccataagcccgggtattgaactgtaaaggggacaactggcaacctgcttttcaggtcccctctctttgctgagagttttcctttcacttaataaattctactccacccattctctagggtctgcatgcttaattcttcctggtcatgagacaagaa

SEQ ID NO: 304964 - DNA, 556 bp, Homo sapiens
atacatgttttaaagtctttgtctagtaagtccaatatcttccttagggacagtttctgcctattttgctccttggagtgggctatgtttctctgtttttctttgtgacttatgatttttttaatagggcatttgaaaaaacagccacctctatctgatttggcagactggctctatgccagggaagtccttcatttattagctagtcttgctctgaacttaggtatcagtcccaggtgaaaaactaaattcttctcaggtattttctgaccatgcattcttatcttgggccacatatagtttcttagcttcccacactatgactgmttttgaatgtcttaatttcccaaagagcatcaccctagattcttctcagggttctgaatgatctaatgtatgtctccacctataatcttttaccccaggcattggtaagtctgtagtatttctgcagtttaacaagtattgctgctgcttttcctcattgagatctgagttaagaagacagttaccagtctttcaggtagtccccaggcagatgagaagtttgcagata

SEQ ID NO: 304965 - DNA, 583 bp, Homo sapiens
tttattatcatttgtatcttacaataagcacttgatactattgcaatcatttaaaacacaataatgagctgggtgcagtgacttatgcctgtaatctcaactatttgtgaggctgaggtgggaggactgcttgaggccaggagtttgagactaagctatgatgacaccatggcactctggcccaggaaacagagtgagaccctgtctctaaaaaaaaattaaaataaaataaaatgcagtaatgacataattctatctgaaaagaggtagaaacatttttttcaaatttattaagattagattgtgtactgctgaagagctatgttagtgatttgtatacayaggctaggccatatcctgggccatgattttaacttaagggtccatgtcccctgctccacattctgcaaacaccatgttttggtcccatgtttttccccacatcctatttttctcagctctttaaagaacaacaacttgctgctgtgtggccttaggatgttatctgatagaacttttgaggaaaggctcaaacagatacatcttgaaattttagcagtgtctccctagtgattttcaaagt

SEQ ID NO: 304966 - DNA, 589 bp, Homo sapiens
aataaaatgcagtaatgacataattctatctgaaaagaggtagaaacatttttttcaaatttattaagattagattgtgtactgctgaagagctatgttagtgatttgtatacacaggctaggccatatcctgggccatgattttaacttaagggtccatgtcccctgctccacattctgcaaacaccatgttttggtcccatgtttttccccacatcctatttttctcagctctttaaagaacaacaacttgctgctgtgtggccttaggatrttatctgatagaacttttgaggaaaggctcaaacagatacatcttgaaattttagcagtgtctccctagtgattttcaaagtggagtgattgcacaccagatgttgtacaagatcactcacttacggtgtgaggacaatatgaagacttctcttaatatatatttagataccgatatttactacatgggttggaattcttaccttgctcagagcccatatcaggtggccatcggtctggtacagtattacagtattcaggtaccctctgggaagagtgagaaggttgaagagtaagagtcacaggacaaaagagg

SEQ ID NO: 304967 - DNA, 612 bp, Homo sapiens
ggtgtccttgttttactcagtctcatctggccaggagtctgctgtttcctgctgtcacctggaacctcatctccctgctcaaatttgaaaatcatgtaatacttctaataccacattaaaacttaggttgtattttagataatatattttttgcccagaattctgttaaaagtcaaatattaaggatgacctgggaaaacccagcctgtctatgtttggaaggtatatcttttagtaatgtcatttgatgaagaggaatcacaacacataggctttatgacaatatccaccatcataaatgagatgtggctgaaatatgggtgataacrtcttcatttaattaacactggaagccaagatttcaccactatacaattcatccatgtaaccaaaaaccacttgtacccctaaagctagtgaaatagtaataataataaattgaacaaaaggatagtgaattgagggtgacaaagtgtctacaagaggtacatttattgccagtggccatggaaatgaatgctggcaataatggagcagggaagagacaaccaggagttcagcctgccctggtgtcctatgaattctccatcacagagggaccaaccagaggct

SEQ ID NO: 304968 - DNA, 640 bp, Homo sapiens
cattccagccctgcaaagttctacccagatatatctgagattcttcaaggatattttccatgtacccctaaatgagtcctgctttttgctgctgcctctgttgtcactgcagaaggcctgctatgggtagtctcagcaacagagacacacaacctgttgatttaggattcaatagcaccactgtccttgcttctactctcagatctagggatcttcagtcactgatgccatctaactgaaggcacacacttactgctgtggatgctaggcagggctacaacacttacctctactgaacaggacccactgccagagaaggcagccagcctgatggctcaggtcatcagtgctctcatcccacccaattcttctgctacaaagtgggcatgggaatggcattcctcctgtagaatatgtttggttatggagattccttagcaaggaacttagactcctaggtgttaagtagtgggatagctcctttagttagcaaaaatggcccytttctctttctggtatatctaaaccaatgcagaggctaggtgggagagattacagtattagctgtgtatctgaaactacttttcctttccaactctgcaaattctcctcaaccttcctatattttgtccttgatatt

SEQ ID NO: 304969 - DNA, 545 bp, Homo sapiens
aataccatgctatttttgttactgtattcttatggtatagtttgaagttgaaaaatgtaatgccttcagctttgttcttttgcttaggattgctttggttatttggactcttttttggtcccacacaaattttagmatatatttttctaattctgtaaaaagttatgttggtagtttgataggaatggcattgaatctgtaaatggttttaggtagtatggccattttaatagtgttgattcctccactccatgagcatggaatgcttttccatttgtttgtgtcatctatgatttctttcaacagtgttttgtagttctctttacaaagatctttctctttcttggttagatgtaatcctgagtattttttttttttttgcagctattgtaaaagggattgcattcttgatttgaccctcagcttgaacattattggtgtatagaaatgctattgagttttgtacattggttttgtgccctgaaactttactgaagtcatttatcagtgctaggagccatttggtagcatctttagggttttct

SEQ ID NO: 304970 - DNA, 595 bp, Homo sapiens
tttctttttatgatacctctaattaagcttcttgttatttcctaatgcttaaacatcctggaaactaacttggcaataaaaaagatgtttcagtttctatagttaatacaaatgtattataaatatgttaaaactgtctctggttaaaacaaacatctgattaaaattttctggtggtttgtataatgggtgttcactgaattatttaattattctttttttgagaaagtataaaacagcatgcatcacaggtgttcaataggttttcatgataaatagcgatgcccttcatttcttgtctgctaccatcaatgtaagatttttataaataaacaaraactatccttgcaattggtcccctaagaaaagaatcaagaacttcctatctgtcaacagctaatttttctcaccattttagtataattgtgacacaatacacaaaatatacaaaaatgcactattccagaaaaccaaacagaagggaaagtattaccaaattagagaaaactttttaaaatagcaaacaacattcttgatcttctctcctgcccacttagggtacagaaatctcttctacgacataggaaaatgagaa

SEQ ID NO: 304971 - DNA, 636 bp, Homo sapiens
accaaatttttttattattattattattatttatgcaataggtttttggagaactagtggtgtttggttacatgaataagttctttagtgatgatttctgagagtttggtgctcccatcactcaagcagggtacactgtaccagatgtgtagtcttttaattctcactgcacccccccaccccccaccaccatttctccccaggccccaaagtcctttgtgtcattcttgtgcctttgtgtccrcatagtttagctcccacttatgagtgagaacatacaatgttggttttctattcctgagttacttcagttagaataatgattttcaaatttatccagcatgctgcgaatgccattatttccttcctttttatggctgagtagtattccatgatatacatataccacaatatctttatccattcatggattgatgggcactggggctggttccatatttttgcaattgcaacttgtgctgctataaacatgcatgtgaaggtatcttttttgtataattacttcttttcctttgggtagatacctagcagtggaattgctggatcaaattgtagatcatttttagttctttaaggaatctccacactgttttccatagtggttttactagttta

SEQ ID NO: 304972 - DNA, 636 bp, Homo sapiens
accaaatttttttattattattattattatttatgcaataggtttttggagaactagtggtgtttggttacatgaataagttctttagtgatgatttctgagagtttggtgctcccatcactcaagcagggtacactgtaccagatgtgtagtcttttaattctcactgcacccccccaccccccaccaccatttctccccaggccccaaagtcctttgtgtcattcttgtgcctttgtgtccacatagtttagctcccacttatgagtgagaacatacaatgttggttttctattcctgagttacttcagttagaataatgattttcaaatttatccagcatgctgygaatgccattatttccttcctttttatggctgagtagtattccatgatatacatataccacaatatctttatccattcatggattgatgggcactggggctggttccatatttttgcaattgcaacttgtgctgctataaacatgcatgtgaaggtatcttttttgtataattacttcttttcctttgggtagatacctagcagtggaattgctggatcaaattgtagatcatttttagttctttaaggaatctccacactgttttccatagtggttttactagttta

SEQ ID NO: 304973 - DNA, 636 bp, Homo sapiens
accaaatttttttattattattattattatttatgcaataggtttttggagaactagtggtgtttggttacatgaataagttctttagtgatgatttctgagagtttggtgctcccatcactcaagcagggtacactgtaccagatgtgtagtcttttaattctcactgcacccccccaccccccaccaccatttctccccaggccccaaagtcctttgtgtcattcttgtgcctttgtgtccacatagtttagctcccacttatgagtgagaacatacaatgttggttttctattcctgagttacttcagttagaataatgattttcaaatttatccagcatgctgcgaatgccattatttccttcctttttatggctgagtagtattccatgatatacatataccacaatatctttatccattcatggattgatgggcaytggggctggttccatatttttgcaattgcaacttgtgctgctataaacatgcatgtgaaggtatcttttttgtataattacttcttttcctttgggtagatacctagcagtggaattgctggatcaaattgtagatcatttttagttctttaaggaatctccacactgttttccatagtggttttactagttta

SEQ ID NO: 304974 - DNA, 636 bp, Homo sapiens
tggaagacaaattcttcttttatagagactaggttcctttttttttccttattaggtggcactctatagattatktacagaatcgtggtgtgtgtgtgtgtgtgtgtgtgtgtgcatgcacgtgcacagtatgatttgataatctcagtcttgttagctactaattctcctttattttattttgcttaccatctcaatttcttcatctaatcagtcaccaagctctacacattctactttgctaagtctcccagacaaatctttcacatttgctcctctaaagtattaagtcacaccttccctaatgatgtatttcttggatgattgcaacaggtttcaaactttcttccttaatttgtttcttttcttggatttgtgtctgaactcactccttaccaggtgggtaacttggggtgagttacacagtctctctgaggttgagtttgcactttgcaaaatgggcacaatcataccagttatttatatttgttgtgaggattaagtgagttaatgtatgtaaatgcttagcatacattaacagcatgggggaacaacccccatgatccaatcacctcccaccaggtccctcccttaacacatggagtttacaatttgaaatgagatttgggtggggac

SEQ ID NO: 304975 - DNA, 636 bp, Homo sapiens
tggaagacaaattcttcttttatagagactaggttcctttttttttccttattaggtggcactctatagattatttrcagaatcgtggtgtgtgtgtgtgtgtgtgtgtgtgtgcatgcacgtgcacagtatgatttgataatctcagtcttgttagctactaattctcctttattttattttgcttaccatctcaatttcttcatctaatcagtcaccaagctctacacattctactttgctaagtctcccagacaaatctttcacatttgctcctctaaagtattaagtcacaccttccctaatgatgtatttcttggatgattgcaacaggtttcaaactttcttccttaatttgtttcttttcttggatttgtgtctgaactcactccttaccaggtgggtaacttggggtgagttacacagtctctctgaggttgagtttgcactttgcaaaatgggcacaatcataccagttatttatatttgttgtgaggattaagtgagttaatgtatgtaaatgcttagcatacattaacagcatgggggaacaacccccatgatccaatcacctcccaccaggtccctcccttaacacatggagtttacaatttgaaatgagatttgggtggggac

SEQ ID NO: 304976 - DNA, 636 bp, Homo sapiens
tggaagacaaattcttcttttatagagactaggttcctttttttttccttattaggtggcactctatagattatttacagaatcgtggtgtgtgtgtgtgtgtgtgtgtgtgtgcatgcacgtgcacagtatgatttgataatctcagtcttgttagctactaattctcctttattttattttgcttaccatctcaatttcttcatctaatcagtcaccaagctctacacattctactttgytaagtctcccagacaaatctttcacatttgctcctctaaagtattaagtcacaccttccctaatgatgtatttcttggatgattgcaacaggtttcaaactttcttccttaatttgtttcttttcttggatttgtgtctgaactcactccttaccaggtgggtaacttggggtgagttacacagtctctctgaggttgagtttgcactttgcaaaatgggcacaatcataccagttatttatatttgttgtgaggattaagtgagttaatgtatgtaaatgcttagcatacattaacagcatgggggaacaacccccatgatccaatcacctcccaccaggtccctcccttaacacatggagtttacaatttgaaatgagatttgggtggggac

SEQ ID NO: 304977 - DNA, 573 bp, Homo sapiens
ttgggtggggacacagagccaaaccatatcaatggtgttttattttaaaatattaaccaatacctaagtatcactagatatttaagaaatacaagccacacaaaaggaaatgaccatgacaaagaaaaatagaaagctgaaaccaggaagaagcacaagtaacacaggcagctgagttctcaataagtagaagaggaagaaaatgttccccataaaatgatcacttcatctccttccactttcttaaagatagtctctgctggagtcaataawactcctcattgcccctcaaatgtgctctatgtttacctgttaccgttttcccttctgcttgtgaaatccaactcaggctttaaggtccagctcaaatgccccctaaacttacaacattcactgatcctaataaatggaagtaaattttcccttcctgcacactcccagaggcattccttgtctttgccctagcctatccttatctttgctatttcaaatgtcccctaagtcatctgcatgctctcttctcccagcaaattagatggtaacagaggggtgcctttagagccttcatcttga

SEQ ID NO: 304978 - DNA, 573 bp, Homo sapiens
aatgttccccataaaatgatcacttcatctccttccactttcttaaagatagtctctgctggagtcaataaaactcctcattgcccctcaaatgtgctctatgtttacctgttaccgttttcccttctgcttgtgaaatccaactcaggctttaaggtccagctcaaatgccccctaaacttacaacattcactgatcctaataaatggaagtaaattttcccttcctgcacactcccagaggcattccttgtctttgccctagccyatccttatctttgctatttcaaatgtcccctaagtcatctgcatgctctcttctcccagcaaattagatggtaacagaggggtgcctttagagccttcatcttgagatccagcagattgaaaaaataaataccctcttttaagagtgaagtggctatacacttctaagacatcattcttgcctcacctaccataacaaacgtagcagccagtcagcctgttgtctaaatatttctctttccatgttcagtttcacacaatacttcacttttgtatcaagtattctttcagcaactacttaggttgc

SEQ ID NO: 304979 - DNA, 574 bp, Homo sapiens
accaaggaatttggaacttgtctttaggcagtgggaatgccacagaagttttgtttgtttgttttttatcacataagaatttaagttttaggaaaaaaaaaactctagatgtagagaattaattggtattttccctataatgtatctcagccataaaggtacccatgtttgtaaagtatttttcgtatgtaaattgccagaaagaatgatagactgccttttaaaaagatcacttgagttcatttttacccattttcaaatatttatttttttcctcctctcaatactaagaaaaatgattttgctagttttctgacttaaagactaatgttgaataaaaaagctcagatagattcaaagaaaattatctacttttttaaactttaaaacattcgggttttattccccccttgaaagagaaagtactatttatctacctttgtcaaatcttttaaaayagtaacccaagaaacacgatgattcatctccttcttactgactgttgtactaaaaacctgagacttctgcttgtatcatttagttctagcaatccatggtcaagaagaatcccaca

SEQ ID NO: 304980 - DNA, 501 bp, Homo sapiens
aaaaatatgggttcaaaacttgtctgccacttactgtgtgaacttggacaagtgacctcagctctttgaatccatttcctcgtctgtgcaaatgtggataataatacccaaatcacagcattttgtagggttaaatgaaataacttagaaggcactgagttcagtatctggtgcatagcttaacaacataatctaactcatttcctttctgttcatcattgcttttcatctcttttgattyagcaagttccccttttccccttacagcagattttgttccatacaaagtttttcctttccattattactttgtatcacaccctttcaattcctgttatgttaaaaattcagaaagggtcattttatacaaatgcttataaaagtaaccacaaaaccaacagtatttaactctactgccacagatttaaataaatgtaatatgtacccttttcacaagctctattttaaacccaaaatacaatatgctatttctcataatag

SEQ ID NO: 304981 - DNA, 501 bp, Homo sapiens
aaaaatatgggttcaaaacttgtctgccacttactgtgtgaacttggacaagtgacctcagctctttgaatccatttcctcgtctgtgcaaatgtggataataatacccaaatcacagcattttgtagggttaaatgaaataacttagaaggcactgagttcagtatctggtgcatagcttaacaacataatctaactcatttcctttctgttcatcattgcttttcatctcttttgattcagcaagttccccttttccccttacagcagattttgttccatacaaagttttycctttccattattactttgtatcacaccctttcaattcctgttatgttaaaaattcagaaagggtcattttatacaaatgcttataaaagtaaccacaaaaccaacagtatttaactctactgccacagatttaaataaatgtaatatgtacccttttcacaagctctattttaaacccaaaatacaatatgctatttctcataatag

SEQ ID NO: 304982 - DNA, 501 bp, Homo sapiens
aaaaatatgggttcaaaacttgtctgccacttactgtgtgaacttggacaagtgacctcagctctttgaatccatttcctcgtctgtgcaaatgtggataataatacccaaatcacagcattttgtagggttaaatgaaataacttagaaggcactgagttcagtatctggtgcatagcttaacaacataatctaactcatttcctttctgttcatcattgcttttcatctcttttgattcagcaagttccccttttccccttacagcagattttgttccatacaaagtttttcctttccattattactttgtatcacaccctttcaattcctgttatgttaaaaattcagaaagggtcattttatacaaatgcttataaaagtaaccacaaaaccaacagtatttaactctactgccacagatttaaataaatgtaatatgtasccttttcacaagctctattttaaacccaaaatacaatatgctatttctcataatag

SEQ ID NO: 304983 - DNA, 523 bp, Homo sapiens
agaggccagactgagcatgtggttttaggtttggtagccaaataaattcggtaattctgaagcccaggatggatttgatttcttggcccagtgaaagaaggaagggaccatggcaaacaaagacccagaggaggggtagaagtcatggtgctcaggagcagctcgcttcccagatcaagaagaaatgatgcttgccatgcatattctagtttattctccccagatttaccaatcacatctctacctctcacgggactatgtaaagtgtggagagaggctaggcctatgctgaagaataatccttcctcatgtccactccaagtggggaaacattattcccctctaaaattgatttacatagggagggaggaaccaggtcataatgaactttctataatgtagyaggatttagattgtaaaggaaaggcaatgggtacttattaaataacttttttaagaatagaggcaagagaaacagatttgactttcagaaaaattattctggaatggtacactgtagagg

SEQ ID NO: 304984 - DNA, 608 bp, Homo sapiens
acagataggttttaaagttattttttgaaaaataaaggcattagaatatacactcaatttataagcattaaatttaattttaatcccatttaacagaagtaaaattctctgaaatttaaagtaattgctgaattacctgaagcaaaagactttggataaatgtttctctaaaacaagaggaagtgcttacattttaatatatctccctgaagctaaataaatgcatgaagcttatagcactctttatttctttgtttgtttacatttaaatatgtgcttccacattagaccgtgctataaatgtgaataaattaattggcaggttcacarttttgtctacttccttgcttgggattatatgtatcctgccttttctgccaatcccttataactttttaaatccttgtagttttgcaactttcctaaatatatcttggaattgttcattttttgtcaaatttttatatcaaatattccagagatatattctaactttgataattgtctacatttttttttggtggtacatggcgatcatcaatttcaatctttcagttccatttttgtttccttatcttttcttctatatttttgaattttttcccctg

SEQ ID NO: 304985 - DNA, 608 bp, Homo sapiens
acagataggttttaaagttattttttgaaaaataaaggcattagaatatacactcaatttataagcattaaatttaattttaatcccatttaacagaagtaaaattctctgaaatttaaagtaattgctgaattacctgaagcaaaagactttggataaatgtttctctaaaacaagaggaagtgcttacattttaatatatctccctgaagctaaataaatgcatgaagcttatagcactctttatttctttgtttgtttacatttaaatatgtgcttccacattagaccgtgctataaatgtgaataaattaattggcaggttcacagttttgtctacttccttgcttgggattatatgtatcctgccttttctgccaatcccttataactttttaaatccttgtagttttgcaactttyctaaatatatcttggaattgttcattttttgtcaaatttttatatcaaatattccagagatatattctaactttgataattgtctacatttttttttggtggtacatggcgatcatcaatttcaatctttcagttccatttttgtttccttatcttttcttctatatttttgaattttttcccctg

SEQ ID NO: 304986 - DNA, 648 bp, Homo sapiens
tggcaacacacatcagcattccaacagatgtcacctggccactgacagaagattggaacatatgaggcaaagtaagaaacttgttcaaaaggaaaaaatgatccccagtgaggtttctgccagggaggatcaccagactttcaggcctgaggcttgggaagggaggaggctctgagtcactgaaggccataccttgtcatcacccttgcatgggtatcagattgaaagaatgctcccaagagcactgtctcccatagaacgctmccctcctccccaaggacttcctctcctccctcaaacacagaacctctgcagaaaccttaactggtcagcttaaagaagcctgaggataaactggctgtgaccacttacgatgaccaaaggacttcattacaaagcatgatgtctatttctttctttatttaaatccacgttctaaagaaaattttcagtagctgagacaaaggagtgtctatttcatcagcagcaacttaaaaactctccgctacccatctctattcttgccttttccatgaactaagattgtgtctatctgctcatctgtcaagccctcagcccatcaaggaaacacatgataaactaggggtgaagggaataaaaatatttcaccccaaaatatacctcttt

SEQ ID NO: 304987 - DNA, 598 bp, Homo sapiens
tgttattacacctaacaacggtatcacatcctttcatctgaaacagtgaaataacaccatttcacatgggagggtcaagtgagataatgcctccacaatgggacagccatacatattaagtgaaataaacaaagcattcttcaaattgtgaagtgctacasaaacatgagctatgctgcaagccatgtacagtttctgtttacaaacatatcggtgtcaaccttgtgcactgcctatccaacttttcaaaacatccctgaaaacaggtgacatttgaagatatatattggtttattctaagaccacattaagagagagcattactatacatgagagaagaaagaaagttgattgaatccagtcagaaaccaggtcaatgaaaagaatgctacttgtttttcttctccattacaatattaagttttatttttatttttttgagacaaagtctcgttctgctgcccaggctgtagagcagtggtagaaacagtaatctcaaactactgggctcaagcaatcctcccaccttcgcctcctgtgttgttatgttttaaaataaaggggtggttaatacattggatactcgagttatttttag

SEQ ID NO: 304988 - DNA, 436 bp, Homo sapiens
ggaattccggaccagcctggacaacatggtaaaatctcgtctctactaaaaatacaaaaattagctgggtgtggtggtgtgcatctgtagtcccagctactcggggagctgaggcatgagaatcacttgaatccaggagggggaggttgcagtgagccaagattgcaccactgcacctgggtgacagagaatctgtctctaaatacatacatacatacatacatacataaatgttagctgccgccatcatcctcctcatcgtggagttgtctaaatacasaaaaatcatgatcatattcattagaaggagataatacagcaggcagtgggacccaacggaaggcctccgcgccaaagaataagaaagctctgaatgcagaggtggcaaaaatcagaaaggactgactactcatccaaaggtggactcaaaagaaca

SEQ ID NO: 304989 - DNA, 436 bp, Homo sapiens
ggaattccggaccagcctggacaacatggtaaaatctcgtctctactaaaaatacaaaaattagctgggtgtggtggtgtgcatctgtagtcccagctactcggggagctgaggcatgagaatcacttgaatccaggagggggaggttgcagtgagccaagattgcaccactgcacctgggtgacagagaatctgtctctaaatacatacatacatacatacatacataaatgttagctgccgccatcatcctcctcatcgtggagttgtctaaatacacaaaaatcatgatcatattcattagaaggagataakacagcaggcagtgggacccaacggaaggcctccgcgccaaagaataagaaagctctgaatgcagaggtggcaaaaatcagaaaggactgactactcatccaaaggtggactcaaaagaaca

SEQ ID NO: 304990 - DNA, 430 bp, Homo sapiens
ttttatgattcacttgactaccaggtgtcagcaacttttatttttattactttaagttagaaggactttgaaggttttcgtggtttattctcttcttttttaaaggccaaaccaagatcactttttggtaatggctacctttcctctgaatgtatttctcaaaaagttctttctggtttttattaaacccamacagttgttataatttaaaagttacccttttagagtgagattagctagaaaagaaattaaggattattttaagtaactcagcaagtaaccttttccaagaagcttagattataaattaacgaaaaccaaattataaaccaaggtgtatggttgattgtgggttaagaattttatcagcagttttgctgttgtatgtaccagtcgtatattttactactgagtagaagaaaagtctaaa

SEQ ID NO: 304991 - DNA, 575 bp, Homo sapiens
ttcagaattccaaagatacagagaattctaaaagcctccaggatggaaaaccgaatgacctgaaaaggaacagaaagcagattgacttcagataaattagccagaaagcatcatgcagccaaactgtcagtcctgtgtgaaagcaaaataaaggcatattcaaacatacagactcagaaagtctatcatccatagatctatcctgaaagatgcacccaagggtatattcccagcaaatccaaaaaggaatccaagaaggaaaatgatgcagtagctaagaaactaagaaactatccaccaaacccaggaagctacgtgaaaaagaaatcatggatggcaactgtgccaccaaccccaagagcaaatggtacaaatccaatcgggaaattagaaggtcctgaaaagaatgtctccaagaggaaaaggacatttgtctttaacaaacactagaatgaaaaagctgcataatcctagtgataagaagaaggcatatcaaaatacraaatttgtaaaaattacacgctgtcttcttcatcctgtggcatcagatgtagagaatgaaatggatggaattg

SEQ ID NO: 304992 - DNA, 557 bp, Homo sapiens
cagaaatgtaatcatctcacttcaaaaccatatacaaataaataggtggaagggttttggaaaaaaaaattctttttacaataaaatggatagcatgataaatttgcaatctctagtcaaggtttgtgtgtatgtgtatgtgtgtgtgaatgtgtgttgtaatggctttgagatataatttacatactatgcaattcacccatttaaagtttacaaatcactggtttttagtatattcacagatacttgctactatcaccacagtcaattttagaacattttcatcaccccaggaagaaaccctgtaccccatagctatcacctccctatctctcctttctccctttgcttctcttcccctctcagccactttctgtctctacagacttgccgtttctggacatttcatataaatggaatcacggtggtgactggtttctttcactcagcgtgatgttttcaagcttcattcatccgtatgtcagcaccgcattccyttctatgataatgtcccatcccatgtctagaccgcattttgtggctggaagggagtttga

SEQ ID NO: 304993 - DNA, 495 bp, Homo sapiens
agaatgagaatgaaggtgagcttgcctcttcaaagctctcctcctgtctccaggacgcagatgtcctgagaggacaccacctcctcacctctcttcctttccacactgccatgggaaattgttgatcatcaaaggacacaaggagattgcagcccaagagtggaggctggagcctgtctggaaatgagaagcctttccaggaggaaagagggttgttggaaggcaggagaccagacctgtggccagaatctggctttctgccatgtctcacccaaactaaattaaccactccctgtccccasgtgccgcctccacctgcagggccaccaggggttgctcaggcctcctctcagctgaccagccccaggctgagcagagacacatgggggcagggccgtccttctgcagccacaggactttcctcctggctgcacgagaggatcagaatgaagccgagacaatcgtaagagtggtcattcaaggcaaggaaaaggt

SEQ ID NO: 304994 - DNA, 495 bp, Homo sapiens
agaatgagaatgaaggtgagcttgcctcttcaaagctctcctcctgtctccaggacgcagatgtcctgagaggacaccacctcctcacctctcttcctttccacactgccatgggaaattgttgatcatcaaaggacacaaggagattgcagcccaagagtggaggctggagcctgtctggaaatgagaagcctttccaggaggaaagagggttgttggaaggcaggagaccagacctgtggccagaatctggctttctgccatgtctcacccaaactaaattaaccactccctgtccccacstgccgcctccacctgcagggccaccaggggttgctcaggcctcctctcagctgaccagccccaggctgagcagagacacatgggggcagggccgtccttctgcagccacaggactttcctcctggctgcacgagaggatcagaatgaagccgagacaatcgtaagagtggtcattcaaggcaaggaaaaggt

SEQ ID NO: 304995 - DNA, 582 bp, Homo sapiens
  misc_feature (1)...(582): n = A,T,C or G
nnnnnnnnnnnnnnnncacacatatacatgtacacgcacacacacaagggcacaaacacacacaggcacacacacaggcacacattgctccagagctcacycctcagcgccctgaccccctggctgcctggggtgctgtttggccatgcaggctgctgaccgccaaggcctgctggcccacggacagtgtccagcctggggtccccaggcagccctgtgacaagaactgcatgctgccaagaagcctcccaggtggctttcccagaggctctcgctgctgtgacagtgtcattgagaaaggacatctggaggagcctctgagagcaagtggttcccagatcccagcatgcgcacccagacagatacatcctccccttcagactccacgtggaaaggaaacacacacaaaacaatggcaggtcaggacagggggaccctgcaggggacgcggaagtgtgtgcgtcctcctggaacagggtatgagcccggcctcaagcagaacagtaatgcagcagacatttgtctctgggactggaggcctcgctccacaaagccagctcaggcagcagcctgtgcccagag

SEQ ID NO: 304996 - DNA, 582 bp, Homo sapiens
  misc_feature (1)...(582): n = A,T,C or G
nnnnnnnnnnnnnnnncacacatatacatgtacacgcacacacacaagggcacaaacacacacaggcacacacacaggcacacattgctccagagctcacccctcagcgccctgaccccctggctgcctggggtgctgtttggccatgcaggctgctgaccgccaaggcctgctggcccacggacagtgtccagcctggggtccccaggcagccctgtgacaagaactgcatgctgccaagaagcctcccaggtggctttcccagaggctctcgctgctgtgacagtgtcattgagaaaggacatctggaggagyctctgagagcaagtggttcccagatcccagcatgcgcacccagacagatacatcctccccttcagactccacgtggaaaggaaacacacacaaaacaatggcaggtcaggacagggggaccctgcaggggacgcggaagtgtgtgcgtcctcctggaacagggtatgagcccggcctcaagcagaacagtaatgcagcagacatttgtctctgggactggaggcctcgctccacaaagccagctcaggcagcagcctgtgcccagag

SEQ ID NO: 304997 - DNA, 540 bp, Homo sapiens
tatattattccattctcacattgctataaagaaatactgcaattgggtaacttattaagaaaagaggtagaattcatggtcctgcagactgtgcaggaagcatagtggcttctgcttctgggggaggcctcaggaaacttacagtcatggtggaaagctaaggggaaacaggaacatctcacacagctggagcaggaggaagacagagtggggaggaggtatcacatacttttaaacaaccaggtctcattcacaatcacgcgaacagcactgaggagatggcgctaaaccattcatgagaactctgcccccatgatccaatctcctctcaccaggcccacctcmgacactggggattacaattcgacatgagattcagtggggacagagatctgaaccatatcaagagcgatcctgggaacgcccaccaaagaggcatcagttgcctgttacattctgtctgtggagtcctcattcagaagtttaagtgtggcaaagggaagattttgagatgtttaagacataaaatgctacagacag

SEQ ID NO: 304998 - DNA, 540 bp, Homo sapiens
tatattattccattctcacattgctataaagaaatactgcaattgggtaacttattaagaaaagaggtagaattcatggtcctgcagactgtgcaggaagcatagtggcttctgcttctgggggaggcctcaggaaacttacagtcatggtggaaagctaaggggaaacaggaacatctcacacagctggagcaggaggaagacagagtggggaggaggtatcacatacttttaaacaaccaggtctcattcacaatcacgcgaacagcactgaggagatggcgctaaaccattcatgagaactctgcccccatgatccaatctcctctcaccaggcccacctcagacactggggattacaattcgacatgagattcagtggggacagagatctgaaccatatcaagagcgatcctgggaaygcccaccaaagaggcatcagttgcctgttacattctgtctgtggagtcctcattcagaagtttaagtgtggcaaagggaagattttgagatgtttaagacataaaatgctacagacag

SEQ ID NO: 304999 - DNA, 591 bp, Homo sapiens
taaacaatatcctacaatggtttgagtttacattcctttatttgctaatatggttcagttgcttttcacatattaatcgggtatctgtgcttcttctgcaaagtgctttcttttgtatttttttctattggggagctttttyttatcttattagaaattttaatatattctagatctttcgtcagtcatgtgttgataataccttctgctaattcatgtcttatttgaattttgttatagagcttggatgaacaatatttttttaatgctgcaaatgtattaatcttttccgttaggggttgctttaactaattcttttctaccccgagaccatgaagatattctcctatatcatattctctaagttttgactttaataattaagtctttaatccatttgagatttatttttacattaagagataaagtaaagatccgatttcagtgtttgtcctgtagttaatcaattactcttcattaaagagtctgtccttcttccacgaccttcattgccagctgagtcagtagcccgtttctacacacctgcaaatcattggagagttcctccaattctattctctgtgcttgcct

SEQ ID NO: 305000 - DNA, 580 bp, Homo sapiens
cacctttgggggtcataatgattatgttgagaatgcatgccttacaggaaaaggaatggtaatatgcattgttggtaaaccctggatttaattactacacactttttaggaaactatctagaaatatatgaacatgtcccatatttcatatcccgtatttctagatatctcatatttctagaacttttttgctgaagtacaagtaccaaaaaacatgaggttacacgtaaaagagtgtttatatcagcattacttgtagtggcaaaaacttgagttcattaatacgggaacggtagagcaagttatgatggagtcaccatacatctctcaaacagaagaatctatattactgacctgaagagatgtctataatgataaaagaaaaacaaattagagtgcaataagcagttatactttcagaaaaatgagaaygatgtgtgggagcttatcagtttcatttttgtgtatttttgctttattaaattagtttctaaaagcatttagacctcctttaatttaatattttaaaaatgtcaaatatgaaacaagttaaagagcatggaaaagttacaattgcacc

SEQ ID NO: 305001 - DNA, 581 bp, Homo sapiens
ctgctataaataactacctgggaatgggtaatttatgaagaaaagaggtttaattgactcacagttctgtaggcttagtaggaagcatggctaggaggcctcaggaaacttacaatcatggcagaaggcaaaggggaggcaactacatcttaccatggcagagaaggagagagagagtgaaggggaaagtgccacacactttcaaataaccwgatctcatgagaacacactctctatcaagagaagagcaagggagaagtccgctcctgtgattcaatcacctcccaccaagcccctccactgacatgtggggattacaattagagatgagatttgggtggtgacacagattacaattagagatgagatttgggtggtgacacagagccaaaccatatcacctatggattggttttataagtggagagtgatgttcgactaataaaacacatctttgttttattagattttaagtctgccattcatgcctccttttccttaacataaatatgcaaagtaagcagaaattccaacaaagataaagggtcttaacaaccttgttgtctcactcgtaataatat

SEQ ID NO: 305002 - DNA, 581 bp, Homo sapiens
ctgctataaataactacctgggaatgggtaatttatgaagaaaagaggtttaattgactcacagttctgtaggcttagtaggaagcatggctaggaggcctcaggaaacttacaatcatggcagaaggcaaaggggaggcaactacatcttaccatggcagagaaggagagagagagtgaaggggaaagtgccacacactttcaaataaccagatctcatgagaacacactctctatcaagagaagagcaagggwgaagtccgctcctgtgattcaatcacctcccaccaagcccctccactgacatgtggggattacaattagagatgagatttgggtggtgacacagattacaattagagatgagatttgggtggtgacacagagccaaaccatatcacctatggattggttttataagtggagagtgatgttcgactaataaaacacatctttgttttattagattttaagtctgccattcatgcctccttttccttaacataaatatgcaaagtaagcagaaattccaacaaagataaagggtcttaacaaccttgttgtctcactcgtaataatat

SEQ ID NO: 305003 - DNA, 529 bp, Homo sapiens
tttgtggctgccagtttaaagtgcagagttttgccatggaatgccctttcaattttttattaattacatggaaccaaagactttaaatagcctccgggatcccaaaaaatgatattttaaaattatccagctttactgtcagaaatttaatttgaagttcaaaagtcaagataaaactaaagtcatcaaaacagaaggacaaaagaactttaagtggtcaggaaagaaaggtgtgggtttgtgttcaattgcagaagagtctcagkgtgagagtttatggaaaccccaactagagcccacctgctcaggtgtcttcacgcacacatatgtctcagagaggcacacagtagcagcaaacaactacggccagtttgtgatgttaatgacttttttacagaattacgtaataacgtcattagtattttaaaccctttggcatatgagagccactatgctccggaaagcgtgatcacactgaaggaatccttttcacttgagtccttggcttgaaaatgccactgtttggatg

SEQ ID NO: 305004 - DNA, 529 bp, Homo sapiens
tttgtggctgccagtttaaagtgcagagttttgccatggaatgccctttcaattttttattaattacatggaaccaaagactttaaatagcctccgggatcccaaaaaatgatattttaaaattatccagctttactgtcagaaatttaatttgaagttcaaaagtcaagataaaactaaagtcatcaaaacagaaggacaaaagaactttaagtggtcaggaaagaaaggtgtgggtttgtgttcaattgcagaagagtctcagggtgagagtttatggaaaccccaacwagagcccacctgctcaggtgtcttcacgcacacatatgtctcagagaggcacacagtagcagcaaacaactacggccagtttgtgatgttaatgacttttttacagaattacgtaataacgtcattagtattttaaaccctttggcatatgagagccactatgctccggaaagcgtgatcacactgaaggaatccttttcacttgagtccttggcttgaaaatgccactgtttggatg

SEQ ID NO: 305005 - DNA, 529 bp, Homo sapiens
tttgtggctgccagtttaaagtgcagagttttgccatggaatgccctttcaattttttattaattacatggaaccaaagactttaaatagcctccgggatcccaaaaaatgatattttaaaattatccagctttactgtcagaaatttaatttgaagttcaaaagtcaagataaaactaaagtcatcaaaacagaaggacaaaagaactttaagtggtcaggaaagaaaggtgtgggtttgtgttcaattgcagaagagtctcagggtgagagtttatggaaaccccaactagagcccacctgctcaggtgtcttcacgcacacatatgtctcaragaggcacacagtagcagcaaacaactacggccagtttgtgatgttaatgacttttttacagaattacgtaataacgtcattagtattttaaaccctttggcatatgagagccactatgctccggaaagcgtgatcacactgaaggaatccttttcacttgagtccttggcttgaaaatgccactgtttggatg

SEQ ID NO: 305006 - DNA, 529 bp, Homo sapiens
tttgtggctgccagtttaaagtgcagagttttgccatggaatgccctttcaattttttattaattacatggaaccaaagactttaaatagcctccgggatcccaaaaaatgatattttaaaattatccagctttactgtcagaaatttaatttgaagttcaaaagtcaagataaaactaaagtcatcaaaacagaaggacaaaagaactttaagtggtcaggaaagaaaggtgtgggtttgtgttcaattgcagaagagtctcagggtgagagtttatggaaaccccaactagagcccacctgctcaggtgtcttcacgcacacatatgtctcagagaggcacacagtagcagcaaacaactacggccagtttgtgatgttaatgacttttttacagaattacgtaataacgtcattagtattttaaaccctttggcatatgagagccactatgctccggaaagygtgatcacactgaaggaatccttttcacttgagtccttggcttgaaaatgccactgtttggatg

SEQ ID NO: 305007 - DNA, 526 bp, Homo sapiens
tgacaaccccattcgcctctgagctagggaagtagagatgctctatacctgtgtccacacccctcagaggacaccaaaggtttcacagagagagctccacacacctctgaggttggatccagccacacagaggtgtctgctatgcagcaagctaaacacaaccaattcctggtgttgggattaacaagcagcagggcagaccacgagaatgaacatttatcaacagccatcgggaaacatgccctccagctctcacatgttctccaggctccctgggcaaatggagtcctaagtattttatattttttgagctactataaatgggattattatctgatttctttttcagacagttcattcycagtgtataaaaatgctctttatttttgtctgtggattttgtatcctgcaaatttactgaatttattagctctaacagtgtttttggtggcatctttaggattctatatgtaagatcatgtcatctgcaaacagggacaattttaacttcttttgttccaatttg

SEQ ID NO: 305008 - DNA, 590 bp, Homo sapiens
ttatttaaatatgctttcagtcccttggtctctcttctccttcttgaatacctgtaactcaaatatttgatcttttggtgttatctcacaaatcccataagctttcttcattcccgtttactctttttctcctctgactgtatgttttcaaataacctgtctttaagttcacggattctgtttcatcaattctgcagttgacactctctactgcatttttcatttcatttattgtgttttccacatccagartttctagaatttttaaaaaataatttatacctctctgtggaatttctaattgcagtcatttactgttttcctgattttattgaattgtttttctatattttcttgaagttcatgaacttccttcaaacacttactttgaattatcgggccatttgtttatctccatttctttggagtctgctgctgggagattattgtggtttttggtggtgttgtgtctccttggtttttcatgtttgttgttgttgttgttgttgttgccttacgttgatgtctgcacattttgggaagtagggacttattctattctttgtagaatggcttcgcctgggtaagcc

SEQ ID NO: 305009 - DNA, 588 bp, Homo sapiens
tctctgtggtgattgacgtgccaccagagtggcccttggagtaacaaaggccacacccaggggtttgggcctaaatgtgcttgctccgggcacgattctcaaacctggagcccatgaggattacctgggagctgttgcagaacgagggcagctgggcctgtgcccgggcctgtccagggttgctggggtggggcctgcatgtcagggtggaatccttgccactcctgcctgcagcctggtggagacatgctcttcaggtcagctctggttatttacgttttcacatcagtacggcagggcctgcatgggtgcgtttgtgtctttcacttggcttcctgctggtgaggggtctgctggcagaggtgctcacatgtgctcccctggcctgatggggcaggtttctctctggccacgtgcccacgtgcattctgtctgctcaacctcccaagtgcacagcttgaaggtggtccagaccttaatgtggggggattttcaccaaaaccctgtggtgtctccaaacagagcgagaatgaaccccctgggaagcatrtgaagaagccgtgggaggcaaacggagctgtgtttggt

SEQ ID NO: 305010 - DNA, 515 bp, Homo sapiens
catctgtggggcttttgagtaacaatcaggtgaacatgccagggccttctttttacccatgtcttggtacagatcccatacatcttggtgcagccattctgtttgaggatgttttaggggagacacaggatgctgcaatccactttactgagcaccttttgccggaaggaatccgtgctgtatcctgtgacctagtctgcaaaggggarcacgtgagcgctagtaacgcccttgttcttggacatcaggaagggggtgggcctcatgtggccgggggcgctcagggaccacccagggagcacagtgacgtgggccatcctcagcactgccctcaggaccacccaggggtgcagtgatgtgggccaccctcagcactgccctcagggaccacccaggggtgcagtgacgtgggccaccctcagcactgccctcagggaccacccagggagcacagtgacgtgggccatcctcagcactgccctcaggggccacccaggggtgcagtgacgtgggcc

SEQ ID NO: 305011 - DNA, 477 bp, Homo sapiens
atcctgggcaacaattttttttatttgatccccaaagcacaggcaacaaaatcaaaaataaacaaatgggattatatcaaatacaaagctctacacagcaaacaaaacagttagcagagtgcacagacaacctaaggatkgggagaaaatatttgcaagctgtacatccaataagggcttaatatccaaaatatataataagctcaaacaactcaatagcatgaaaatgaaaaacccaattaaaagacaggtaaagaatctgagtagatatttctcaaaagaagacataaaaatggccaacatgtatgtgaaaagatgctcaactgtgctaatcattagggaaatgcaaatcaaaaccacaatgggatatcatatcacacctgttagaatggctattattaaaaagacagcaagtgttggtgaggaagtggtgaaaagggaaatcttgtgcactattgggaatctaaatcggtacag

SEQ ID NO: 305012 - DNA, 591 bp, Homo sapiens
cctaaggatggggagaaaatatttgcaagctgtacatccaataagggcttaatatccaaaatatataataagctcaaacaactcaatagcatgaaaatgaaaaacccaattaaaagacaggtaaagaatctgagtagatatttctcaaaagaagacataaaaatggccaacatgtatgtgaaaagatgctcaactgtgctaatcattagggaaatgcaaatcaaaaccacaatgggatatcatatcacacctgttagaatggctattattaaaaagacagcaagtgttggtgaggaagtggtgaaaagggaaatcttgtgcactattgggaatctaaatcggtacagtcattatggagaactgtatggaggcctctcaaacaacaaactaccatatcatctagcaatcccactatgaggtatttatccaaaggaagtaaaatcagcatgttgaagagagatctgcaccctcatgtttactgcagcactgtccacaatggccatgacatagaatcaacstaaatgtccatcgacagatggatggataaagacacagtgggatactattcagtcttaaaaaggaaggaattct

SEQ ID NO: 305013 - DNA, 552 bp, Homo sapiens
catcctttcaacttggtctcagtacttttctacataatgtagtttatagtttcttgatagaatttttctttataaaacatattacactgcttgtgtttcatgttttatggtgtgtaactgtagcctgcaaaggaataagattactgatatttgatgaatattcttccaaaccaataagccaattattttatgatgtaaggaaatgttgctaaaatgattaattccatggagagtaatagtgcaaaaggtgacagaattcacaaatacatttaggggacaagtgtaaagagcagttaggatcttgatacatagtggatagctaactaacctcaccatcttattatgtttatttctcagaaaactaaaaatagaacatgtgattttcataatttagagaatgattttttaatcctaaatttagatagaaaaattactttgaaaaaatatcttttctagttagagattcaaccagytactttaaaagggaatttatttattaatcaattaaaaatgtgaatgtataatttaaaaatattcagcaacatactaggc

SEQ ID NO: 305014 - DNA, 511 bp, Homo sapiens
tggacagtgatatttataattacctatttacttaacttaccaagataatgacttacaacctagatttttatttcctttatttattttttccaccaaataaacattttccaatttcttctttaaaactgtgaaaaaatatggttttgcaagacgttatactgaccaaatttatgcagttgcttcaattgtgttcagttttgcctggaatctgtctacattttaccaaaaaaaaaatggcacatttattttctagcctcatttaattatgtgtaatttggtccacatattgacaggattttaaaaagtgtaaagttttcatctaccataaatgatttgaacatcaacaaatagccttgcaactttcttctaaggaatggaaatcttgaaacactatgttattgcctttcatatcttggtttttgaatagctagcrtggctatattttcttagccagttattcttcatactttacagtgtgagtccagaacacattaataggagacacttggat

SEQ ID NO: 305015 - DNA, 562 bp, Homo sapiens
aaatattttcaattttcccaaaatgttcccattaacccctgtttgacctataagagggttgtttgttaatttctatatatatgagaattttccacgtagtttttttgtttgtttgtttgtttgtgtgtttttgacacagagtcttgctctgttgcccaggctggagtgcagtggcccgatctcagctcactgcaagctccgcctcctgggttcatgccattctcctgcctcagcctcccaagtagctgggactacaggtgcccaccaccacgcccagctaatttttcgtatttttagtagagatggggtttcgccatgttagccaggatggtctygatctcctgacctcgtgatccacctgcctcagtctcccaaagtgctgggattacaggcgtgagccacagcacatggccttccacatagtttttttaaattacatgttattttgtgatctaagaatatgaagtatattctttcttttttttttttttttttgcgatggagtcttgctttgtcaccaggctggagcacagtggcacagtcttggctcattccaacctcc

SEQ ID NO: 305016 - DNA, 562 bp, Homo sapiens
aaatattttcaattttcccaaaatgttcccattaacccctgtttgacctataagagggttgtttgttaatttctatatatatgagaattttccacgtagtttttttgtttgtttgtttgtttgtgtgtttttgacacagagtcttgctctgttgcccaggctggagtgcagtggcccgatctcagctcactgcaagctccgcctcctgggttcatgccattctcctgcctcagcctcccaagtagctgggactacaggtgcccaccaccacgcccagctaatttttcgtatttttagtagagatggggtttcgccatgttagccaggatggtcttgatctcctgacctcgtgatccrcctgcctcagtctcccaaagtgctgggattacaggcgtgagccacagcacatggccttccacatagtttttttaaattacatgttattttgtgatctaagaatatgaagtatattctttcttttttttttttttttttgcgatggagtcttgctttgtcaccaggctggagcacagtggcacagtcttggctcattccaacctcc

SEQ ID NO: 305017 - DNA, 521 bp, Homo sapiens
tttgttgcccaactgaagggaaagctaacaaaatgacaagcaatttcatctacctatggaaaaacagaaatcagagggtcatctgaattatatagtgaaagagctggagaatacctcgataatccatagaaccaacacgtccactgcgcattgggaaaagaaaaacaagacttagagttaaaaataatggagaaatttcattcctagctgtgttagtttctagggctgacataaccaagtaccacagattgagtggcttaaacaacagaaatttattgtctcatggttctggagaatacaaggttcagatcaagrtgccagcacggttgattccttctgatgtatgtcagagggaaatttgtcccatgcctctctcttacctccttttggtttgctggcaatttttgaactatgcagccgtaagaaaggtaggaatctattatcctcagcaaactaacacaggaacagaaaatcaaatactgcatgttctcacttataaataggagctacattatgagaac

SEQ ID NO: 305018 - DNA, 445 bp, Homo sapiens
gaaaatgaattcaaaattgatcatagagctcaaggtaaaacaaaaaactatacaactcccagaagataatacaggagaaaagctagatagctttgggtttgacaatgacatttaaatcataacaccaaagacatgatctatgaaaaacagagctgataagctctacttcattaaaataaaaaaaattctgctctaagaaagagaataaaaagtcaagacacagacttaaagaaattattttcaaaaggcatatcagataaaggactcttatccccaatacacaaaagagtcttaaaattcagtaataagaaaaaaaaatgaaaaatttgctaaagacattgacagacacctcaccaaagaaaatatacagaataaggatrtgaaaagatgctccttatcctagttcatcaaggaaatgcaaattaaatggtatatcactgcacac

SEQ ID NO: 305019 - DNA, 494 bp, Homo sapiens
cttgtgtgggagactgaggtatataggaaattgttgtaccttcttaatttctctctgaacctaaaactgctttaaaaataaaatctgttataaaattaaaatagcatatcaaattgcatttttgttattaatcattatgaataacaaatgtcctttgacagtggtttgagaagaccaggtattttggacaagctgttagctgacttttccaaggcaaaaacaaaacacaaatggaagagtgtattatatagttcctttctccatgttaccctcttcttagaacctacataaatctgaatgggaacaatgccagacctcaacaaagacaattgtcaatatgcatactggatataaaagtttgtatttatggcacagggggatagatggaaamggtgattggggtgctctggatagcctagctttgggaatatgtatattgacacaataagtatatatgtcgagtaactttattaatggtttcagagaacgaccag

SEQ ID NO: 305020 - DNA, 557 bp, Homo sapiens
tgttaccctcttcttagaacctacataaatctgaatgggaacaatgccagacctcaacaaagacaattgtcaatatgcatactggatataaaagtttgtatttatggcacagggggatagatggaaaaggtgattggggtgctctggatagcctagctttgggaatatgtatattgacacaataagtatatatgtcgagtaactttattaatggtttcagagaaygaccagatgaaggctactgcaatcttggtcacccttcacagttaagcatggacatggttatacaggagagtgggtttttacattacagaaaaaaaaaatcttgtggtacaagggagggattttcttcctggccttctccaatgaccaagactataaagctcattaatgtgtttcattcattagatttttttttttttaccaaatttgcagctgctccacaatttattaaaagaatgtgcttgactagctctacaaggtatatgttattgtctcaaaagaactgtattactaaaaataaacaacttattatgaatcatatatgcagggccatt

SEQ ID NO: 305021 - DNA, 573 bp, Homo sapiens
gttcaagactggcctgggcaacagagtgaggccccatctctacaaaaataaattaactgggcatgatggtgcacacctgtggtcccagctagttggcaggctgaggtgagaggatcacttgaacccaggagtttgaggctgcagtgagccatgatcattccattgcactccagcctaagtttccaaaggggtgggaggggaggggagatctgaggccttttagaagtgattaggtcatgagggctctgctcataaatacattaatgctgtaatcgtgggactggcttagttatcatgagtttgcctcctttttcctctttctctcatgtactcacttctaccttccatcattccaccatgggatgaccctcaccatatgctggcatctgtgcttttgrgcttcccagcctccagaataatgaaaaataaatttcttttttttttaataagttacccagtctgtggtgctctgttatgacaggaaaaaaaaaaaaggactaggacaaaatgctgtaagattcttttgaaattattattgggcacattttattatcactgttttctccataaatt

SEQ ID NO: 305022 - DNA, 606 bp, Homo sapiens
gtggtgctctgttatgacaggaaaaaaaaaaaaggactaggacaaaatgctgtaagattcttttgaaattattattgggcacattttattatcrctgttttctccataaattctattacaaattttctaaacgaaatgaaaccaaaccaaaacaaaaagcttattttgcccatcaaaaggttttcctaatatatattgaacttagaaataaattatcccattctactagacagaattatcttgacagtgtttttaagtaattatgacactgctttatactttctagacttctgaagcattttctagtttatatggcagcaatactttatttcatttgaggaacccagttgacatccttcttccttttccttaaaactgactgcatgagttgtaacttaaaattatcacttttcttcctcaaattatattttttttcctcctttaaattctggataagtcttctttctcccccttctggctctagtttgttctgatttagttactctagtaaccttcctgttcttcattcattctacctgtctccaatgctcagagtttacataggggtatgtgtaagaaataagcaagagttatctcacatttcaa

SEQ ID NO: 305023 - DNA, 552 bp, Homo sapiens
cctctgggcctgtgattaaagtggctgccatgaaggtctctaaaatgcctttgaaacattttccccattgtcttggctattaacatttggcttctctttacttatgcaaatttcttcagccttaaattcctccccagaaaatgggtttttcttttctgccaaatggtcaagctgcaaatttttcaaacttttttgctctgcttcccgtttaaatataagttccaatttcagatcatctctttgtgaatgcatatgagttgttaaaagcagccaggccacatcttgtacactttgctgcttaaaaatttcttccaccagatcctctaaattrtcactgtcaaattcaaagttccacagatttctagggcaggggcaaaatgccgccagtctctctgctaaagcaagcaaaagtggcatctactttagtttccaataagttcctcatctccatctgagattacctcagcatggacttcactgtgtgagaaaacattttaaattgtccattttcaaagcatgataaatccaagtaatggcagccagcctgcagat

SEQ ID NO: 305024 - DNA, 433 bp, Homo sapiens
caatttaatgaaatattgaatatttctccataggcgcccactattggtgttttattttaatcttaattatacttatttaccagtttaaaattaaaaaaaaaatgtagaggatttgaaatcctaaccaacatcaccacaacagatgccaacttctttttgtttaattttcaatttttgctgattgagaaatagtcaagagaaacaaaagtgtattagtgacagcggatttgccaaggtatccataatggagaaatgctttctgtgatacaccgaaatgtcaaagaaagttcataattagtggatccttagagagatttgtatccaaacacacagcygactcttcagcaagttctagattcagaggttcttattttctaaatcttcagggggcatgatagcctctcttagggaggaagattactagttgcgccta

SEQ ID NO: 305025 - DNA, 576 bp, Homo sapiens
gtacaataaatagaattttaatttattttagctattaataaaagtaaatgatgtcttatgcttcttaaaattcattttgttttcatggagatgacatttttgtgtgttccatttcacagatgaactctgaattgatctttcgttaatacttcttcaatctttttgtgctctggaaagttgcacaatgaactttgcatcatgttatggaatgcctttgcttgagcaacatattgaacactgatttatactttaaatatggatattttaataagagagcacaagctcaatttaacaatggtcagtgaatgacgtgaattcataaacatgattggcatgttaagggatccgcttgtgagtttcaaatacatagtcttcacgcagatacattaagatgcttaataaagtaattatacttagcatcttattatttctgtacttaatggtcttccagggaggatctaaatttatatgttcctatttwaaaaaaaaaagagatgtcttctgatgggaacatgttcccataataaactagatggaaaactgaattgaaataaattttaagaagatatgttttcc

SEQ ID NO: 305026 - DNA, 584 bp, Homo sapiens
attaaaattgaaataaaacaatcaggagatactttaaatatttattagtttatctttaaagattaaatgatgcttatgtttatgtcctacatcaatgaaatatttaacaatgactgttgactgtgtataggcctctttggacaaaatccctactaaagggagtaattggaaaataaaacagtgaattatattaggtactagaagaaataaaaatgcaatggggttaaaaggaaggacagtttactatttcattatgccagaagaatttgcctcatctaatagagaaaatgaaacataaattactctctatgaataaacagaattttgacacataaaaattggagaaaaggggaaaaggcatagaggacatgctaagacattgttcagaaactagtttgaatagaactttatgtgtcagaaaatagaagaaaaagtgtcaaaaagtgttgaaagtragtagaagaaataagttgtacaaacctggctttcactctcatgactttggcctaatacttcccaagaagcacttccctgtatgctctaataagagagcagaaagcactatcaaaagaattaatagcaca

SEQ ID NO: 305027 - DNA, 555 bp, Homo sapiens
atagaataaaggttgtttgagtagaaaatccatgacttattaacaattgtgtatcaattagtgtgaagaaagtatggtgattatcaagaaaaggacataactgtcttcaattattttgaaaggctcatacaaaagaataattagtttacatcttcagattcaaataggagaattagaaccagtgagtattcgaagattaaaacaacagatttctgctraattagaagaaatctgataagactacacatttagaatggaattggactaccacttggctgagtaaagatgtctttgctctgtgccctgaggtttaccatcatcttttggatcatggtgaagacaaaacaaatggcagccatggacaatttggagagtaagaagtacataggcttgtggaggtgggagtcagaactgatggccaggataatgagcaggtttccaagcactgtgaccaggttcatggacagaaacagcccaagaaggggctgcagttctggatctcctgagaggctcaaaatgaggaattctgaaaattctgcaaggtgttctgattgc

SEQ ID NO: 305028 - DNA, 598 bp, Homo sapiens
ctcctgctctgtggcagggtccctaacaggccacaaatctgtactggtctatggcccaggggttggggacccctgctataaaagaatacctgagactaggcaatttgtaaagaaaagagttttattttggctcatggttctgtagactgtaaaggaagcttggtgctggcatctgcctcagggagcttacaatcatagcataaggggaaggggaaatgagtcagcatgttacatggcaaaggaggaagcaagattgatggggaagtgttacactcttttaaacaaccagatctcctttgaactcagcaagaactcactcattacctccaggaggsctccaagctgttcctgagggatccgacctcattacccaaatatctctcagtaggccccacctccaaaattgaggatcacgtttcaacatgagatttggagaggatacatatccaaactatatcagaagatttctcgaagactaaaaatagaattatcatttgactgaacaaccctattactgattacataccccaaaggaaataaattttccataaaaagatatcctttacttatatgtttatctcagtactattcataatag

SEQ ID NO: 305029 - DNA, 598 bp, Homo sapiens
ctcctgctctgtggcagggtccctaacaggccacaaatctgtactggtctatggcccaggggttggggacccctgctataaaagaatacctgagactaggcaatttgtaaagaaaagagttttattttggctcatggttctgtagactgtaaaggaagcttggtgctggcatctgcctcagggagcttacaatcatagcataaggggaaggggaaatgagtcagcatgttacatggcaaaggaggaagcaagattgatggggaagtgttacactcttttaaacaaccagatctcctttgaactcagcaagaactcactcattacctccaggaggcctccaagctgttcctgagggatccracctcattacccaaatatctctcagtaggccccacctccaaaattgaggatcacgtttcaacatgagatttggagaggatacatatccaaactatatcagaagatttctcgaagactaaaaatagaattatcatttgactgaacaaccctattactgattacataccccaaaggaaataaattttccataaaaagatatcctttacttatatgtttatctcagtactattcataatag

SEQ ID NO: 305030 - DNA, 567 bp, Homo sapiens
tcaatgtagttaagtagtgaaagagaacttattagaattttattatagtttctttacaattttattatagtttcttaatttaatgtaagagttctgcaacaaatgctcttccaattaccaaacctcttggtagacaatgtgtcagcattaccaacaagagaatcttagagaaatatatactacaatatgagagaacacaatatataaggattatataatmaaacagtgtttcttttcctaataaacataaatgtttctatgtcagtaaatacatattaaattaaatctaatattcaatcacctcagatttctttaccaatcaacataaatatgcaggtagatatataaattatatgtgtatgtttattttatatatatatacacgaatgtaatctatacataccaacatgtgtgtgtatatatatgtgtacacacactaatactttaaaattacatatgtaatatatacaatataaattccaaagcctaggttttaatctacatattgaaataaaaccagaatttgagaagtatttcagctttttcgtattacctagcctgaagaaa

SEQ ID NO: 305031 - DNA, 580 bp, Homo sapiens
tatggttcaacttatatgtaatatccagaagaagtctatttatagagacaaaaagcataacattggcccgttgggcctggtagtgagataagggagtgactgtaaataggtacaagctttcattttgtgtcataaaatgttctaaaactgaattgtggaaatggttacatgactccaaaagttcacaaaaaatcattgaattgtgtacttgtaatgggtgaaatataaagtatgtacattatacttcagggtgtctaggggagggatagcattaggataaatacctaatgtaggtgacgagttgatgagtgcagcaaaccactatggcatgtgtatacctaagtaacaaaactgcatcttctgcacatctaccccagaacttaaagtataataaaaaaagaaaaaaaagttttaaaagaygattaaatacaatgaactgccttttatcagacagaagaattaggtaaagccattaacttaataggagacttacattcccaatctcttagttacctttatatctaaaaaaggattttctcattttaagcatagaacagtcaaaatttgaatcttaaaattt

SEQ ID NO: 305032 - DNA, 632 bp, Homo sapiens
tctagccttctttgatcgttggcaaggtttatgatttgattagaattttatttrtaaaaataggtggtaggtaaaatttagcctgtgggttgtagtttgtagaaacttgcataaaatcagaagcctagtcaatgagtaaaaatacattgactaaaataagtgttgttcctttatcccaaaccatggcaaagtagtatcttgtctttattattatatatttacaaagtaaatatatgatatattaaatatatattacatatagaatttacattatatataatgtaaattatttagctactttggattatttgagaagcacattccagctctgaaaggaagagaagggagaacaaaatgtactttgcagaaatgctaaaggaaggacatctttaatgctgtttcataaggccgaatggagttaagataatcagccctagaaaattctgtagttgttatttttgcaactttttctattgctaaatgattagaaaattcaattattgaaaagaactagtaaacataacttggccatcaacagaccttgtagtgtgctatagtgtaatagaagagcttccatatttttctatttaaaggccattaaatagaaccaattttcacaagttgggttttaa

SEQ ID NO: 305033 - DNA, 611 bp, Homo sapiens
gtttgttctttttgcttagtcttcctttggccatgcaggatcttttttcattccatatgaattacagcattttttttctaattctgtgaagaatgatggtggtattttgataggaattgcattgaatttatagattgctcttggcagtatggtcattctcacaatattgattctacccattcatgaccatgggatgtgtttccatttgtttgtgtcatctatgatttttttcagcagttttttatagttttacaacaaagtactaatatccagaatctccaaggaagtcaaacaaatcagcaacaacaaaacaaacaatcccatcaaaaagtgggcaaaagacaggaatagacaattctcaaaagaagatatacaaatggacaacaaacagatgaaaaaatgcccaacatcactaattattctgggaaattcaaataaccacaattcaatatgacttcactcctgcaagaatgatcataataaaaaaatmaaaaaataatagttgttggcttggatgtggtgaaaatggaacacttatacaccgttggtgggaatgtaaactagtacaaccactatggaaaacagtgtgaaaattccttaaaagcacatct

SEQ ID NO: 305034 - DNA, 556 bp, Homo sapiens
atggaatactactcaaccataaaaaggaacaaaataatggcatttgtaccaacctggatggaattggagaccattattctaaatgaagtaactcaggaatgaaaaacctaacattgtrtgttatcagtcataagtggaaactaagctatgaggatgcaaaagcataaaaatgatacaatggactctggggactcaatgtaaagtgtgggagccagggtgagggataaaagactatacattgggtacagtgtgcactgctcaggtgatgggtgcaccaaaatttcagaactcacctctaaagaagttattcatgtaaccaaacaccacctgtcccccccccaaaactattgaaataaaaaattaaattttaagaaataaaaataaaaacaaataaaataaaataatcttaatggtttaccatttaatccttgaaacaatcctgggaggtagaatttttttcaggagtgttacacctttatctttctgtatggttataaacaagtctgattttttttcatcaaatagagatgagtggcaaaaaaagagagaaagaaac

SEQ ID NO: 305035 - DNA, 556 bp, Homo sapiens
atggaatactactcaaccataaaaaggaacaaaataatggcatttgtaccaacctggatggaattggagaccattattctaaatgaagtaactcaggaatgaaaaacctaacattgtgtgttatcagtcataagtggaaactaagctatgaggatgcaaaagcataaaaatgatacaatggactctggggactcaatgtaaartgtgggagccagggtgagggataaaagactatacattgggtacagtgtgcactgctcaggtgatgggtgcaccaaaatttcagaactcacctctaaagaagttattcatgtaaccaaacaccacctgtcccccccccaaaactattgaaataaaaaattaaattttaagaaataaaaataaaaacaaataaaataaaataatcttaatggtttaccatttaatccttgaaacaatcctgggaggtagaatttttttcaggagtgttacacctttatctttctgtatggttataaacaagtctgattttttttcatcaaatagagatgagtggcaaaaaaagagagaaagaaac

SEQ ID NO: 305036 - DNA, 567 bp, Homo sapiens
aaacccctttttttctgtattggttccattgatgctttgtcgccaaagtcagaagtagcttgccagcaaggaacttccctacaaaattctgttaatattagacaatgcccctggccatccagaactccatgagttcaacaccaaaagcactgaagtggtctacaaattcccaaacactttgtcaggtagtgacaaggaacgttaagtctcattacacatggtactctaagaaaaggatcatcaatrttgtggaagagaaccctggtaaagagaacatcatgaaaggctggaaggattataccattgaagattccatagttgttatagaaaaagcaatgaaagcctcaaaaataataaattcctgctggagaaactgtgtcctgatgtacacgtttcataggatttatgagagaatcaagaaaatcatgacagagtttgtgctatgacaaaaaggtggagggtgatggatttcaagatatagatctaatagacaccacatcagaggaattaacaaaagacgatctgatggagatgaatgcttccaaatcagtgcccaaagatgaggaa

SEQ ID NO: 305037 - DNA, 567 bp, Homo sapiens
aaacccctttttttctgtattggttccattgatgctttgtcgccaaagtcagaagtagcttgccagcaaggaacttccctacaaaattctgttaatattagacaatgcccctggccatccagaactccatgagttcaacaccaaaagcactgaagtggtctacaaattcccaaacactttgtcaggtagtgacaaggaacgttaagtctcattacacatggtactctaagaaaaggatcatcaataytgtggaagagaaccctggtaaagagaacatcatgaaaggctggaaggattataccattgaagattccatagttgttatagaaaaagcaatgaaagcctcaaaaataataaattcctgctggagaaactgtgtcctgatgtacacgtttcataggatttatgagagaatcaagaaaatcatgacagagtttgtgctatgacaaaaaggtggagggtgatggatttcaagatatagatctaatagacaccacatcagaggaattaacaaaagacgatctgatggagatgaatgcttccaaatcagtgcccaaagatgaggaa

SEQ ID NO: 305038 - DNA, 610 bp, Homo sapiens
acataatttataaaaatttatatggccttattccagttataaagaaagccagactgaacacgaaactacaagttcttccatcaatacctgtttacagtaccgttaaaattatatatagctatatctattaaaatttgaccaagtttataatatagataggtagatatagattcaccgtcctgcaacactaacgttttgtgaagtaaaatgatagtgccaaagggcaaatatttttcatgtaaatcattgtctaccattataacaatttttgaattgatttttttaggaatctacgagtttaaaagggagtctaatcttaggagataaagaaaaccacacatactgcattaatatttactcattgcaaaatcttaagaatctatcaacatatttagtaacatactgcaaaaatacctaataaacaataaggaaarcatgtttaaaatacaataaattgtttcatttgaatatcacaaattagaatttaaaggaatacaaatttaaaatccactgtgatgtttagttcaggagaatcgtgggtgatgaagcagtttcaaacacgttgggttttaatgtatgacaatattttgattttactgttcatcttgct

SEQ ID NO: 305039 - DNA, 491 bp, Homo sapiens
ctcttgcatcaatttgtctaaggttctgatgatatgttgagtgcttctaagagattttgtaggagtcagaaatggttattaatccttaggtttccaaggaatatgttgatcacttcccaaagccaaataaaaatatctcacagttctacattaatgactagatgcaacaggcaacacatttggcttgctattttcccatttagcagaatggaatgaacagttttcaaaccactttcctgagtacacataaaacagtttcatccccacaagccacrtgtctaaaacgcaatctcacaagtgctgttcatcacactgtactccttcctcacacatttttatttatctccatttgcagtttcaatagtgtcgtctatgaaacttttgagcaatgctgcaaagagattacttgcacaaattttatttaataaatttgtgaaagtgtcatttctgggttccctttcctccatggaatttgacaggccatggaattt

SEQ ID NO: 305040 - DNA, 532 bp, Homo sapiens
tgcaccatttatttagtatataccttgtaccagattcagtggtcactaccttacttggattatttctctataatttcccaagagctccatgaatctgcaactattattgtcctccttttacaaatgaacaaattttatttagagattgattggctcaaatttatgcaattaataagggctaaacagatgtattatgagacaacagaatgtcaaatgtaatcattattttgtgatcacatcttccatcacaattaaattctaaaaaaacctaggaaacctagcaataaattatgtggaatggataactcatggtgattaactgtaccagtaagacttttttcatattataggagcattttttaagacaataggttacctgaggggaatttaaacatgttgtactttataaaaaaatcagttggcaggtttcaagtgcacatttattgggttattttagataaacatgattcatgaaggagccgtgaagatggtctgaattkcagcaagcagactgtactggattggagaatta

SEQ ID NO: 305041 - DNA, 642 bp, Homo sapiens
aaccgccaaattcttctcttacatcattctgtgacttcaccttgtcctcatccgttcatgcrtaatacggaattaaagaagctcctgtaattaggctccctcctaattacaaaaataggtgatataaacatgttaaaaatattgttgctttttccagaaaatcaaaccgaaagtatgcagaatgttggtagttaaaactccttttgttattttgtgtttgttcgtttgttctgttttgttttttgaaacaagagtctcactctgttgcccaggctggagtgtggtggcatgatctcggctcactgaagcctccacctccaaagttcaagtgattctcctgcttcagcctcccgagtagatggggttaaaggtgcccaccaccacgcccagctaatttttgtgtttttagtagagacagggcttcaccctgttggccaggctggtcttgaactcctgacttcaggtgatccacctgcctcggcctcccaaagtggtaggattacaggcgtgagccaccgtgcctggcctaaaactccttttgattggtgcgtgggtgacaatggattccctgtccctgctgccatgaatcagtcgcacctgcttcagatactactcagaatttcttgtccttaaatgccaccc

SEQ ID NO: 305042 - DNA, 642 bp, Homo sapiens
aaccgccaaattcttctcttacatcattctgtgacttcaccttgtcctcatccgttcatgcgtaatacggaattaaagaagctcctgtaattaggctccctcctaattacaaaaataggtgatataaacatgttaaaaatattgttgctttttccagaaaatcaaaccgaaagtatgcagaatgttggtagttaaaactccttttgttattttgtgttygttcgtttgttctgttttgttttttgaaacaagagtctcactctgttgcccaggctggagtgtggtggcatgatctcggctcactgaagcctccacctccaaagttcaagtgattctcctgcttcagcctcccgagtagatggggttaaaggtgcccaccaccacgcccagctaatttttgtgtttttagtagagacagggcttcaccctgttggccaggctggtcttgaactcctgacttcaggtgatccacctgcctcggcctcccaaagtggtaggattacaggcgtgagccaccgtgcctggcctaaaactccttttgattggtgcgtgggtgacaatggattccctgtccctgctgccatgaatcagtcgcacctgcttcagatactactcagaatttcttgtccttaaatgccaccc

SEQ ID NO: 305043 - DNA, 642 bp, Homo sapiens
aaccgccaaattcttctcttacatcattctgtgacttcaccttgtcctcatccgttcatgcgtaatacggaattaaagaagctcctgtaattaggctccctcctaattacaaaaataggtgatataaacatgttaaaaatattgttgctttttccagaaaatcaaaccgaaagtatgcagaatgttggtagttaaaactccttttgttattttgtgtttgttcgtttgttctgttttgttttttgaaacaagagtctcactctgttgcccaggctggagtgtggtggcatgatctcggctcactgmagcctccacctccaaagttcaagtgattctcctgcttcagcctcccgagtagatggggttaaaggtgcccaccaccacgcccagctaatttttgtgtttttagtagagacagggcttcaccctgttggccaggctggtcttgaactcctgacttcaggtgatccacctgcctcggcctcccaaagtggtaggattacaggcgtgagccaccgtgcctggcctaaaactccttttgattggtgcgtgggtgacaatggattccctgtccctgctgccatgaatcagtcgcacctgcttcagatactactcagaatttcttgtccttaaatgccaccc

SEQ ID NO: 305044 - DNA, 572 bp, Homo sapiens
  misc_feature (1)...(572): n = A,T,C or G
ttcaggcaattttgtattgcttagtgtggcatcttccgcagctaaaggatagagtaggtgctgggtatacagtaggcactcaaacattattggttgtgatttatcaagcagaccaaaccacattttctactgaatcattatctcttgtcaaatatcaaagatgnatgtggatgtagtacaatggctgcttctctaaataaaatgattgccagtgcactctataggagacattcagggtttgtcagagacaatagcacacctgaaggtatgcaaatttcctaactggttaccttaccctcaggaacttcaacaattcatccacttaacatcacctctaaagtgggacatttctgtatatcacattcatctttgtattgtcttactctaaagtcattaatgctcctattgtcttctaggtgagttaaaatttcaacaagcacctatcattcccagccagaaatttataccayaaatgcacatgttcactctttcctccctctacaggatggtcttcacttttacttcactgatcaaacatttattttcttcttccaggggcatctcaagtagta

SEQ ID NO: 305045 - DNA, 598 bp, Homo sapiens
aactaatgctgaatggtttcatcaccctgtgaataagaagttataatagaataagcttcttatggtaagtataatggtggtggagggacagaattttcccagaggagccaatgtttaaactgaatcgtgaaagataaagtatttactgatcagacaaaagaatgaagggtggattacaggcaagaagaaaatttcccaacaaatgtactttgtaaattaattgggaaatgacctagtgcacttatgaggaacccccacctgttccttggagaaaaaggagcagaaaggtagaccagaactccagggccgagaccttccatctatgtagaaatacgagtaagtgaccacagagtaaactrtctagagttctcactccagagtgtggaatcatgatttctcagcataaaatttgcttctttctctgaagttcttcctccaagagcacttttgttagatctcttgactgattctaccatgttttggctattgctggcaggactctgaccctatgtactgggggaaaacaggcccatacacactgtccttagagaagtcaggcctaaaactgcttattaaacacgagatcctgaccttctct

SEQ ID NO: 305046 - DNA, 598 bp, Homo sapiens
aactaatgctgaatggtttcatcaccctgtgaataagaagttataatagaataagcttcttatggtaagtataatggtggtggagggacagaattttcccagaggagccaatgtttaaactgaatcgtgaaagataaagtatttactgatcagacaaaagaatgaagggtggattacaggcaagaagaaaatttcccaacaaatgtactttgtaaattaattgggaaatgacctagtgcacttatgaggaacccccacctgttccttggagaaaaaggagcagaaaggtagaccagaactccagggccgagaccttccatctatgtagaaatacgagtaagtgaccacagagtaaactatctagagttctcactccagagtgtggaatcatgatttctcagcataaaatttgcttctttctctgamgttcttcctccaagagcacttttgttagatctcttgactgattctaccatgttttggctattgctggcaggactctgaccctatgtactgggggaaaacaggcccatacacactgtccttagagaagtcaggcctaaaactgcttattaaacacgagatcctgaccttctct

SEQ ID NO: 305047 - DNA, 536 bp, Homo sapiens
ggtccctggggctctgtatgatgttgaactgtctaccagggtggattcttttctgtctcacctctaagaataaattcagatgatgacaggtaagataattccactattaccaacacaggtggaagggctaccaccccactgcttaaacatggttgtcaacccgtgggactaaggaggcctttgcaagtcacaaaggcattccattcatggaagcaggtccattctcctcatatccacctaaatgtaggcaaagaaaacaaagttccttgccccaaaatgcttgcacatcccgatggcttgatcatacgtgtgattccgatgttataaaatattaagcaaaaaaatttaaatgttttattaacaatccattcctatcactatgaaaaccacccttaattgagcattgttctggaactactgtgtttttcccagcattgcttttaagctgaaaaagccctgcragtttgtcttatatagagggcaatgtgaactattacagttaccctcgaacacctttgacttcctgcctgcctgcc

SEQ ID NO: 305048 - DNA, 536 bp, Homo sapiens
acaatagctgatgagctaaaaaaatcatttaaaaatctcatcatgttttaagaaagtttgtgaatttgtgttgggccacatttaaagccatcctgggccacatgaggcctacgggccactggttggacaagcttgattcacataaagttatagaacagataaaattagtctatggtgatagaaatgagaacagttactacttagtgtaatggagattgatagaatgagggcrtgagggaatcttggcttcagacttgtttatgctgtggctttaaagtgacaactaaaaacttaaattttatatgccgaaattatattttattcacatatgtgtatttatttgaagtggatgagatatttagttatagtcttcaaagatctgtcaatcttctgaaataaggctactctcaaatttgttgtgcaaattggtacaataaatatcaaagtggcaaactctagttacagacagaattgtgtccacccctcctgcccaattcatatgatgaagttgcatttttcaatgtgattgtatttgg

SEQ ID NO: 305049 - DNA, 591 bp, Homo sapiens
taaaaaattccttaaacttgagagatagagaggacataacatgtacaatgtcaaacatccatttattcaactgccattggcaagggcatactccatgctgcaacttgtgctggatgcagtgagacatgaggatgagctagctaacctctagttaagaaagttgtaatccagtgagtgagaggaccaagtaaatggatgactccaatcccgtgtcattgagggaaacccattttatcgcaaactgacctaagtaaaaatcgctgtccatcttaaccccatcagatggacacagaacccctgctgcaggccatgatgcaggcaatgagtccaaccactcacctgacagctcagctctttctacctgaatagtagatgactggctgtgttctttggtcctgagatgtgtttcagacccattctgtgtgaaaatccatacctctggcctagtgctctgtacttgtgcattcctataaaagtccatgattctgtgtagtagatgttatcrtacatttatacatttatttcatggataagaaaatgtgggttgattagttatttttcccttctgggatatcagccttttgcacagtt

SEQ ID NO: 305050 - DNA, 508 bp, Homo sapiens
ctcatgattaatggcagctggggcctcagctgggctatcagctggaacatccccccccccacacagtgttctcttctcatgggccartttgagcttcctcccagcatgatgggctccaggtgaataaggctaaagtgttagcatttttatgacacagtgctatggattgaacatctctcccaaaatttcgtgtgttggaaacttaatctctaaatctctaaatttatatgttgatggtgtttggaagtggggttttaaagaggcaattagaaatagataaggtcatcagggccctcatgatgcaactggtggctttataagaagaggaagaaagaccttagatagcacatttgcttttttagtgatttgatgcctcctgccgtgtcatgacaaagcagaaaggttctcaccagatgcagccacctgatcttggacttttcagcctccagaactgtgagtaaaattacctctattttttataaattacccagtctcaggtgttctatat

SEQ ID NO: 305051 - DNA, 508 bp, Homo sapiens
ctcatgattaatggcagctggggcctcagctgggctatcagctggaacatccccccccccacacagtgttctcttctcatgggccagtttgagcttcctcccagcatgatgggctccaggtgaataaggctaaagtgttagcatttttatgacacagtgctatggattgaacatctctcccaaaatttcgtgtgttggaaacttaatctctaaatctctaaatttatatgttgatggtgtttggaagtggggttttaaagaggcaattagaaatagataaggtcatcagggcccycatgatgcaactggtggctttataagaagaggaagaaagaccttagatagcacatttgcttttttagtgatttgatgcctcctgccgtgtcatgacaaagcagaaaggttctcaccagatgcagccacctgatcttggacttttcagcctccagaactgtgagtaaaattacctctattttttataaattacccagtctcaggtgttctatat

SEQ ID NO: 305052 - DNA, 620 bp, Homo sapiens
taaaagtttaaaaactcttgagttatactgatttcttgacttgatgcacacagaacaatgactcaacttggagaggtgaagacatctcccaggtcacccagctgcagacagtgctctgcccctcccagcaggactgtcactcctgccaccaaacgacgactcttcckttttaggtattagtggcatgtaattgatggattccttatcagggtcaaaatgaaagctgaaccttatatacatacaggtgagaaaatatttttggaaccccaaaatagtcattttggaagtatttccatgactacctggaaaacaggtcgtttcaaagattaccttaaaaaaaaatctatacgataagaagttgaaatattgcagaaacttcaaatcctgccttatttaaaagttaaggtgaattaaaatagtagtgatagaattgtttcctaagatacagggcaaatgggaaataggcgtagatgccaaatgtttcctgtttgaatttctagggcgttaaaggaatcagggagctatgttgttgaacgtgtctgcaatgtcaggtgaactctggtgagcctggagcaaacaggattctttttcacaatgcagggcagacagaagagtgaggc

SEQ ID NO: 305053 - DNA, 620 bp, Homo sapiens
taaaagtttaaaaactcttgagttatactgatttcttgacttgatgcacacagaacaatgactcaacttggagaggtgaagacatctcccaggtcacccagctgcagacagtgctctgcccctcccagcaggactgtcactcctgccaccaaacgacgactcttcctttttaggtattagtggcatgtaattgatggattccttatcagggtcaaaatgaaagctgaaccttatatacatacaggtgagaaaatatttttggaaccccaaaatagtcattttggaagtatttccatgactacctggaaaacaggtcgtttcaaagattaccttaaaaaaaaatctatacrataagaagttgaaatattgcagaaacttcaaatcctgccttatttaaaagttaaggtgaattaaaatagtagtgatagaattgtttcctaagatacagggcaaatgggaaataggcgtagatgccaaatgtttcctgtttgaatttctagggcgttaaaggaatcagggagctatgttgttgaacgtgtctgcaatgtcaggtgaactctggtgagcctggagcaaacaggattctttttcacaatgcagggcagacagaagagtgaggc

SEQ ID NO: 305054 - DNA, 562 bp, Homo sapiens
tctcttgacacatatgaagaaaaaaaagaaaatgaagacaaatttattgaacacctactatgtgcagggcactgagctgggcactttcccatgcatttatcttatatcatgcaatcatgccaagaggcaggtggctgtaatcccatcttcaaatgacaaaayggagagtcagagatagacaggtccataacacaaagctggaatggggaagagcagagtctgcgcccagggctgtctttgttccccagctgcattttcaggttccaatagagtctgaatccatcctatggctccttctcatcctacactgcagagggaaaaagaactccaaaatgctactgcatattcagagggaaagcatgtctccttagtgcctactcgtcagcagtgacagtctgtcttcccctagcttggtgcagagggtcaatttaaatcctctgaagtgccaagagccccatctgctcctccatctgaaatgggaatattttgctctttttttttttttttttaaatcttgatttggtcttttgctgtttgtgttgcagccttcagcccagatgcc

SEQ ID NO: 305055 - DNA, 562 bp, Homo sapiens
tctcttgacacatatgaagaaaaaaaagaaaatgaagacaaatttattgaacacctactatgtgcagggcactgagctgggcactttcccatgcatttatcttatatcatgcaatcatgccaagaggcaggtggctgtaatcccatcttcaaatgacaaaacggagagtcagagatagacaggtccataacacaaagctggaatggggaagagcagagtctgcgcccagggctgtctttgttccccagctgcattttcaggttccaatagagtctgaatccatcctatggctccttctcatcctacactgcagagggaaaaagaactccaaaatgctactgcatattcagagggaaagcatgtctcyttagtgcctactcgtcagcagtgacagtctgtcttcccctagcttggtgcagagggtcaatttaaatcctctgaagtgccaagagccccatctgctcctccatctgaaatgggaatattttgctctttttttttttttttttaaatcttgatttggtcttttgctgtttgtgttgcagccttcagcccagatgcc

SEQ ID NO: 305056 - DNA, 537 bp, Homo sapiens
caattcctgccaaacctaattagaaactgcatgaaacagagccaaattagtccaattgttccagccaaagctcaagacacagtgagcgcccagcctcaatcagcagaaccaggttcccagcccaccccgagctggtcacaggtggctgagttatctctgctgagattagaactgcccaggtcaccactcaactcagggacaataacaaatgctcagtgttttaagcaactggattttgraatgatgagttacttatcaataacaaactcacacatcatctcttacctcttttctgtgtatcagagtaaaatgggaaaaatgctctcatatattatttacaatacatacaatatattataggtaatgtctatcatataatatatctaaagaacataataagcactcaacaaagtattcatccctccttatattatcctctaaaaactatttctcattcttgtgttgagtaatttaaaaagcaatgccatcgttaccaaagtaaatgtaagatgtagttctaggcctcagcattcagcc

SEQ ID NO: 305057 - DNA, 605 bp, Homo sapiens
gtgtttaattcaacagtcccagaagtaactggcccgagagaatgatggaaaggcttatagatgtctcagtaattgcaaaagctgaggtcaacatgattcctacaaagtgaatggcatgttttgaattagggattaacatatgataatgagttcccacagccagaataaatgggtctggaaactcaggggttacaggaggaatcgtattttcactaactcaactaatgattcactctctcctaaaggtttcactgttcttcccatgactttgagctctgctagttagagctctcatcacccaatatgtgaatacttccacaaaggttgtaccactgaactggaccaccaggtgacatgggaccagcaggccaaaaaagagggtcactgtgttgacccaggtcattgatactgatttctaaggagtaatagctttgctgcaacagaacgccagcaggaaaggacgctctgaaatccaggagattctctgaaattcctccacgaaccccgtatmcagctacaaaagctaacagatgttttcagcagcccattataggcaggactacccagggctcagcttgtgaggaaggatgaggtacctcacctcc

SEQ ID NO: 305058 - DNA, 586 bp, Homo sapiens
taggcatttgagtgagtccttctttacatgttaccaggaaatttccaaacagccaagrgaatggaaatgtcgccagtagaacaccagtcaacgttgcaaaggtctaggaggtacacaaaaacggatttttctatgtccctgctaatgattgagtctatgagaagaagaaaaatagtttttttcctggacatttaaagaaggtgcagcatgggagccagtcaatattctaagcaaatttgatcccacctggaactgtgatgagaaaccagatgagaatagtctaaccttgttaaacctggcaccctggtagataactgaagcatgtttttgtcttcctgatgtggctattgatttctgggctgcaaatatgtctccatagtttcttcctttctttaagaaagaaaattactggaattttgattatgtctcaagtttttgtggcttgagatcaatatcatactgcattgaaaaatgaaacgatttctatcaggaaacctgaaagatctgggggaaatccctagaaatgttttcatatatttttttaagcttcattatatctaagtgattttttgaaaaatcgaaagtt

SEQ ID NO: 305059 - DNA, 586 bp, Homo sapiens
taggcatttgagtgagtccttctttacatgttaccaggaaatttccaaacagccaagggaatggaaatgtcgccagtagaacaccagtcaacgttgcaaaggtctaggaggtacacaaaaacggatttttctatgtccctgctaatgattgagtctatgagaagaagaaaaatagtttttttcctggacatttaaagaaggtgcagcatgggagccagtcaatattctaagcaaatttgatcccacctggaactgtgatgagaaaccagatgagaatagtctaaccttgttaaacctggcaccctggtagataactgaagcatgtttttgtcttcctgatgtggctattgatttctgggctgcaaatatgtctccataktttcttcctttctttaagaaagaaaattactggaattttgattatgtctcaagtttttgtggcttgagatcaatatcatactgcattgaaaaatgaaacgatttctatcaggaaacctgaaagatctgggggaaatccctagaaatgttttcatatatttttttaagcttcattatatctaagtgattttttgaaaaatcgaaagtt

SEQ ID NO: 305060 - DNA, 518 bp, Homo sapiens
tatgaacctggaaaactcaagagacattatgctgggtttatcagcttttatgtttttaattagttmataatataatgcagcagctctcaagcgtggttccctagctagcaaaatcagtgactcctgggaacttgtaaaaaatgcagattctcaagccccgcttcagatttactgaatcagaaacactgtgtatgttttaacaagctccgctggtgctttcagtgcaggctaaagtttgagaactacagatacaaaggagggctctgtatctgcaacaacaactatgtaatgatgactagtccccactcttccgaagctacccatggcaaaattagaaacataattcttcaaaaaccactggcactgatttagtgcacagaacacctgtggataactcaattccttttgtccttccctgtgtcaaggccaaaggatctaatgtgatataagcattccagaggtggaagggagtggtagctactcaagacccagtatttttacaggtgatcttcaatgtg

SEQ ID NO: 305061 - DNA, 513 bp, Homo sapiens
atgcctggcacaacaggaggcctctaggaatccattctgattggttagtactcttaacctaccagtagttacatattttgagtatttcctggacacaaatacagccagtaaggcaatgcctctggctacacattcacttacgcttcaccactggaaggtataaaatgagagaggttgcactggcctcaccttgaaactgattgacctgctgcactgggtatggattccgctgtggctggaggtgctgccggggtagatgtgattgctgcaactgctagaacaacagaacacaagaggggtggagaggtgagatagggagcaagcacacaattcaatatcccagcagttccgaggaaggtagtgttttccccaaaactaaacwttgtgttgaagaatcatatgcatacaggcaagtgcacaaagtctaaggatagagtcaggtaggttttcacaaaacgaacacactcagggccaccagcccccacatcaagaaacagaacgctgccaggagcc

SEQ ID NO: 305062 - DNA, 589 bp, Homo sapiens
tggctgtgactcccagaggttcaggcaagccatctgacctctctcagtccccaccccctgaaatgaaaaccatactcataagactccttgacaatggaaattttggaggtgacatagttaatgaagtgtcatagaaaggaaatagctaagaatactctaaaacctccccattcccagtatgggcaatttgggaaaaatgagtaactaaaaattaggggttctcaaagtgtggttccaggatcaaatgcattagtccccacctgggagcttgttagaaatgcaaattcccaggctcccctctaggcctcctgaattagaacttttgggggtgttttaacaagctctccaggtggttacgatgtcccatagagaatcattggggcaaataatcctgtgccctgattagattgcaaagctgcactttcaaaagcaagtcagggtgctgagttgcttagtttctattgcaaaatttcstgctttggaacaaaattttcaaaattttcagagggttgctcaggccagtgatgtttgcaatgcaaacccaagaattctgaaaggagcccatggctgaaaggagccaattcttcca

SEQ ID NO: 305063 - DNA, 581 bp, Homo sapiens
aaattactctatagagaggttgtgtggattaatggataatgcagataaagggctttaaggagctccaggcacacggttgagtgtacactacatagtggccaccagcatccctgctgtcatctaattcatttgtgcttctgcctctactcttgcctgttcttcatgggtaggagagtggcctttcaagtcagatcacataaggctttgccctgcttaaagccttccagtgtagccaggagtggtggctcatgcctgtaatcctagcactttgggaggccgagactgytttgttctatcctacctcagggcctttgcattttgttctgtcctacctcgggacctttgcattcacagttcctccttacctgggattcccctccccttatcttctcttagctggtttttggtctcagcataaaagtcacttcctcaaagatgtcttccctggccacccaaccaagggtagctacccagccacacttctattgaatacttctctggtttaatacttccctttgttaattttcatcatagcatttgtcaccaccttacacattcttgtttattctgttacctagtct

SEQ ID NO: 305064 - DNA, 553 bp, Homo sapiens
agattctttacgtttcctcctgtccagggcatctgaaaccaccctcacaggttaacaagaatgacaagccatgctttargcagaattttagttaggcattgaccagggtgcacaggtgcactttgacccacttccctgcaccagctaactaaccgagagtcacagagcaggctgaccaccagctcctctattgttcctatcgatggaatctgtgacatttgacctttttacccaagaactgcttaaagtgtttttcagaacctgaattcctgcagaacggctgccaccaatcggtttaaagacccccaccaagaaactcactcagcacaggaatgttgtttcttcatctccctgtcccatgacttcactcctcacttctggaccaatcaacaatccccacactttagccatttgcccatacagagcccttaaaaacctcatccccaatcctctcagggaggtggatttgaggtttcctcttgtctcctcatttggctgccctaccattattaaaccctttctctgttgcaactccttctgttttggtgtattg

SEQ ID NO: 305065 - DNA, 570 bp, Homo sapiens
atccattggtctacaagtcctcagacatggcaaacttgaagaaactgggctgtggctacatgcaatgctcagttgaatgcatacttaaataaatgaaagaagtgtgcatagggtgtaacacaaggagatacttaactaggcagattttagccattccattgaaaaatgtttcagaatcatcatggaagccaggctaggttggagaatgaatgggagtgagaaaatggagaaatcagcatggcttttgttttcctagaagttgagtgtgaaaaggagaaagacagcatagtaaccacttagtttcagccataacactccatggcatgatccacactctcctctgaagtctggttttttcacactcatcctgtctcctagagaagatcctaataaagggtcccttccagcatccagctctccattcctcaagtgcattgggccatgtcagaccatttcctgagttaagcttagtgtaactggagagacaagtaaaagggacaggygtgcaaacatggaaagaaaagcagggaggtatgctatggactagactgtgtccttcccaaaaatcct

SEQ ID NO: 305066 - DNA, 590 bp, Homo sapiens
gagctatagcaaagcgtggtctccagttcctttcccaggaagagtctagagtagttaattttgagcttgcaaaggcttttaactatttaatatgatttttagagctatgacatgaatcctaaaattcctatttcctggaaggtggagaccacgggaaggtaccaccacatggttaaaaggtcaagctcccaaggacataaaacaaggtggagatttcatccagttttttgtttgtttcagggacctgcagccaagtttattactgaccagcttgtgaggtcatcctgaaaagcgggcttacaggtattctaagcccatgttttatcctaaagtacccctttacacagaaaaacgaattcatggcacaaaatacaccagcttaagactagccttagaattctttttggcattaatcaaaactttacagaggacataaacactgattttttccccccattcatttaactatttgcacacagagacagaagccagaaatctgactgggaagaaattcctacccttttgccagcatgctaagcttctgggttctctttccctgagkggccctagtgatctggcttgtggcacaa

SEQ ID NO: 305067 - DNA, 598 bp, Homo sapiens
tcagtttccccagtggcatcactccccatttggggagttcagggtcaccctgctgccacctcttcggagagggcgcccagcccctgcctgggcttctcacccaccaggcacctctggccttacatcctgccccttcctgagcagctctacaaccccgggtacgcggagagcaagtcaaaggcaatgtttgcctgccgcctcctctccaaaaacacctctgcccccagctttccatggcaactcgccttctcaggactgagtgtggccagtccaaccccacaggctccgactcttccgtagtgatctgcctgggagtgcacagaaggcagccagcgtctaggacacggagggaggaggggacaggaaaaaagcacacgccactctcacttaggacgacacygaagccacaagtcctccaaaagggggattgggaggggaggcaaggagccttgttgattccttctgacagatttcgcttagggcagatgtgcgtcaattgcagagaacaactgtacaggactttggaagaggactactttgcccatatgaaataaactacatctcctttctatccaaatttgtaaggtggagcaattgc

SEQ ID NO: 305068 - DNA, 597 bp, Homo sapiens
aaagtgggaagatctggaatttcctcccgtgatgatttttataaatagcatagtgtctcccaaacttcaagcattaatctaacactgtgaaagttttagccttttaatgtatcactatctttctacaaatcagcttttttgcttaaattaagaaaaaataaattttacatcattacargagcagaaagagtgtagctttctaaataaaggttaagtataaaaataaatccaatgaaagcaaaaagttactaaattctagttagatactaatgattgctgacggctctgaccatgagattctttctctgttgaatagggtgtaaaccaaaaattaaattctaaggccccccaaccatctgaatggacttcctcctcagccagggctcttttaaaaatttaacctgagaggctgtttcaggccatgatggaaagtgagagtcagacatacccccttatacctcttcagcattcacagcaacacagactttaaggctgataagaaacgttttacaaactattctctctgaagcctaccatctgaaggcttcctctgcaaacaagaactttggtctccataatcctttatcttaacccaga

SEQ ID NO: 305069 - DNA, 588 bp, Homo sapiens
gagaaccactgtcttaaccaatgtttctcagcatagcccataccactgctaccacactggaggtgacagaaacacacagatgtctgggcctcatccaggatccattatgacacgccagcaaagcacacatggtctcatgtaacttgcacaaaactcccaggagcctgtaaatkattcccattttatagataaggaaactgaaactgagacctagaaagcttcaagagcttgacaaatcactccatttgactgcatccaaaagagggaagatggggcagggctgttgagggggtgaataatctggtaggtgcccaaagtgagcatcagtggtgccaggatagaggagaaaggggtgtggaaggttctgcagtggcagaagggaagaggtgaggctgggaatagatgggacctgtaggcctcacgggtgcagcccaggagaaatgctggtttccactggaggagtttacagtatgcctgggtggaagagagaaggacagacagacatgggagggaaatctgaggctgagatggggcaacaggctctgaggcaccagcaaaggtaagtgtggctggagccgagtctcagct

SEQ ID NO: 305070 - DNA, 603 bp, Homo sapiens
gtagtgagacatcacaaaatgcagtcagactctttattttagttaaggtgtgttttataaccctgaatgtggttctctcttggttctcatgaagaagataaccttccagtgaagactgtactgatcatgtatcaaaatggctactttccccatccscctgccagagacataaggtaatttttttcccagctcttcactgtgagaacctggtggggtttctggaggtaaaacctgtgaaagtgtgggcccttcccgaagactacagcctcaggagtttctcactctcctgctagttctcagccttcagcaatttgtcaaaattaccttttaagtgtttctattagcttatgacttcaggctttagctcctagtaagcggatctcagctctgaatctcagcattcagctgtctatccaaattttaaggtggtttcctctgcaacctcaattctctgatgggtccagaggtcattgattttcagtttgtccagctgttttcctgttgtaaggaataaagtgataatttccaagctcttttgaggttgaatctgaaactgaaaatatccagtaaattttccatctcctaggatatagatttcatttc

SEQ ID NO: 305071 - DNA, 603 bp, Homo sapiens
gtagtgagacatcacaaaatgcagtcagactctttattttagttaaggtgtgttttataaccctgaatgtggttctctcttggttctcatgaagaagataaccttccagtgaagactgtactgatcatgtatcaaaatggctactttccccatccccctgccagagacataaggtaatttttttcccagctcttcactgtgagaacctggtggggtttctggaggtaaaacctgtgaaagtgtgggcccttcccgaagactacmgcctcaggagtttctcactctcctgctagttctcagccttcagcaatttgtcaaaattaccttttaagtgtttctattagcttatgacttcaggctttagctcctagtaagcggatctcagctctgaatctcagcattcagctgtctatccaaattttaaggtggtttcctctgcaacctcaattctctgatgggtccagaggtcattgattttcagtttgtccagctgttttcctgttgtaaggaataaagtgataatttccaagctcttttgaggttgaatctgaaactgaaaatatccagtaaattttccatctcctaggatatagatttcatttc

SEQ ID NO: 305072 - DNA, 497 bp, Homo sapiens
agcaataaatttctgttgtttataaattacccaacctaacgtattttttatagcagccctaagatatctattttataattttaaaatatctacatatttttatacagttagccctctttatttgtgggttcctcctctagagatttaaccaactatggattgaaaatatttgaaaaaaaaagtaacaatacaaaaatgaaaaaataacacaaatttaaaaatacactttaacaactatttacatagcacttacactgtattaggtattataagcaatctagacatgatttaaattatgcaggaggatgtgcataggttatgcaaatactatgccatcttatatcagagacttgwgtatcctcagatttcagtatctgtggtgtgtcatagaaccaattgtccgtggatactaaggggcaacttagtctctactttattcttagcattattttttctttttatttttagagtctgttaatgttattagtcttttttaa

SEQ ID NO: 305073 - DNA, 460 bp, Homo sapiens
gacagacccttctcatagatccatctgcctcagggcttgtaccagtcttttcctgaagaatgaggggaagtgtttgttaaaatatactctctgtctttgtctgtcaaagtttccatttcagaaaatcctactaraattggattgacttgctggaattgttgtagtactcacaggtttgtatgcctgctgcacagtaacagaccaaaacactgagactacagggatgcagcacagaaagagtgtagtgatcgcaggccaccaagcaaggagaagggaggagaccctcaaattcctctacccaaggaacttttgcctggggtttctatggggatcatggagggtgagggcctggaagactggggtcgttgattggttgggggaaagaaggtgaaattatcagaatgtggaaactgcactcttcggtgagtcagctcctcctggggtcctcagacagctggca

SEQ ID NO: 305074 - DNA, 460 bp, Homo sapiens
gacagacccttctcatagatccatctgcctcagggcttgtaccagtcttttcctgaagaatgaggggaagtgtttgttaaaatatactctctgtctttgtctgtcaaagtttccatttcagaaaatcctactagaattggattgacttgctggaattgttgtagtactcacaggtttgtatgcctgctgcacagtaacagaccaaaacactgagacyacagggatgcagcacagaaagagtgtagtgatcgcaggccaccaagcaaggagaagggaggagaccctcaaattcctctacccaaggaacttttgcctggggtttctatggggatcatggagggtgagggcctggaagactggggtcgttgattggttgggggaaagaaggtgaaattatcagaatgtggaaactgcactcttcggtgagtcagctcctcctggggtcctcagacagctggca

SEQ ID NO: 305075 - DNA, 465 bp, Homo sapiens
ctgaagaatgaggggaagtgtttgttaaaatatactctctgtctttgtctgtcaaagtttccatttcagaaaatcctactagaattggattgacttgctggaattgttgtagtactcacaggtttgtatgcctgctgcacagtaacagaccaaaacactgagactacagggatgcagcacagaaagagtgtagtgatcgcaggccaccaagcaaggagaagggaggagaccctcaaatycctctacccaaggaacttttgcctggggtttctatggggatcatggagggtgagggcctggaagactggggtcgttgattggttgggggaaagaaggtgaaattatcagaatgtggaaactgcactcttcggtgagtcagctcctcctggggtcctcagacagctggcatcagtggggccctacagaccagctggcatcagcggcatccttcagaccagctggcat

SEQ ID NO: 305076 - DNA, 498 bp, Homo sapiens
ttggtaaattcacaaacatgtggcaagtaataacatactcttaaataaccaacaaattgaacaataaatcacaartaaaattggacaatactttgaaatggatggccaatgaaagaaaaattgccaaaacttataaaatgcagctaagagagaattttatagctgtaaatgcatattaaaaaaataagagccgaatacatagaaacagagtagaatagtggttatgggagaagagaaaaatggaaagacataaatcaaagtgtataaagctgcattgatccaggatgaataagcctagaaatctgatgtacacatgagaactatagtcaataatattgtgctgcataatggaaatttgctaagaaagtacactttaggtgctcttgctacacacccacatagatcaaaaagaggtaaccttgtgtttgtgatggatatgttcatttgcttgtctgtagcaatcattttactatatatgtatgtcaaaacctcatgttg

SEQ ID NO: 305077 - DNA, 498 bp, Homo sapiens
ttggtaaattcacaaacatgtggcaagtaataacatactcttaaataaccaacaaattgaacaataaatcacaagtaaaattggacaatactttgaaatggatggccaatgaaagaaaaattgccaaaacttataaaatgcagctragagagaattttatagctgtaaatgcatattaaaaaaataagagccgaatacatagaaacagagtagaatagtggttatgggagaagagaaaaatggaaagacataaatcaaagtgtataaagctgcattgatccaggatgaataagcctagaaatctgatgtacacatgagaactatagtcaataatattgtgctgcataatggaaatttgctaagaaagtacactttaggtgctcttgctacacacccacatagatcaaaaagaggtaaccttgtgtttgtgatggatatgttcatttgcttgtctgtagcaatcattttactatatatgtatgtcaaaacctcatgttg

SEQ ID NO: 305078 - DNA, 582 bp, Homo sapiens
agcatggaataagctcattttatcccaaatcaacagagtccataaagccgttttcctcttctgtgctcagtttttactatacacataaaaatgtggtcttaatttagaaatttgtatgtcattaattttattgcaggaatggctaaatttggcctctgttaatagaaggcatcagcatctacatttcaaatcccaagtcaattttttcaaggttgtgcaaaacagtaatttaataattatccaccaatctgtaagcacwaagtctgcctgtagtggatgttctaatttcacttttcctcttttcatccgttgtgggcaggaaaggagctcatgtgatatgtctccttgaaggcttgctgtgttggtcacgacccatcaggaagcagatgactcatctatctgggttatttgtggaaaggttaataaaaagaccatgcaaaaagcgtggtgaaggtacagagaaagcacaagaaatggtcggtcaggtattctgggggcagtagcaactgccaggagagcctggcagagcaaaggaagaaaacagtttcctaactccaaagagggcggccacatggagagagc

SEQ ID NO: 305079 - DNA, 582 bp, Homo sapiens
agcatggaataagctcattttatcccaaatcaacagagtccataaagccgttttcctcttctgtgctcagtttttactatacacataaaaatgtggtcttaatttagaaatttgtatgtcattaattttattgcaggaatggctaaatttggcctctgttaatagaaggcatcagcatctacatttcaaatcccaagtcaattttttcaaggttgtgcaaaacagtaatttaataattatccaccaatctgtaagcactaagtctgcctgtagtggatgttctaatttcacttttcctcttttcatccgttgkgggcaggaaaggagctcatgtgatatgtctccttgaaggcttgctgtgttggtcacgacccatcaggaagcagatgactcatctatctgggttatttgtggaaaggttaataaaaagaccatgcaaaaagcgtggtgaaggtacagagaaagcacaagaaatggtcggtcaggtattctgggggcagtagcaactgccaggagagcctggcagagcaaaggaagaaaacagtttcctaactccaaagagggcggccacatggagagagc

SEQ ID NO: 305080 - DNA, 541 bp, Homo sapiens
tttcagatctaacactgtataaatgacctggaggtttctatgtcttccctgaaagagaccctatttcctgaagccgcagagctgagattgctaaaaaccacatctagtatctcatctggtgagtggctgaattataatgcaaatttattaacttctcaaggtaggtgctattaaaatgatggtattaactgcaaagaaatgggaccctgagagctggaataagacatactactgatgatggtattataaattagtacagccattttggattcttaacattaggtctctaaattctggcaagtcttttttgccagtggaagcagccactcaacccgtctgaggagataaacccttcattgcctgagaaacctgttatggctcccctgagataggtgccttacaagataattctgagtctcccaggactccccttcttgcattcatctttggttccagactttagtctagtccyaaaagactagacttttaggactagactcaagtcctaaaagagaggtgcagagtgcgcctgtgagaaggt

SEQ ID NO: 305081 - DNA, 458 bp, Homo sapiens
tactatactggctgggtgattggcactggttacacagtggatgttggactgcttctccacaatggaaataaggaataatatgtctagaatacagcagataccttaggttgtctgttagtactaccatgccctgtgtttaacattaatgaaaaactacaacaacccaattcaggcaggactactaatagcytagatccttctagaataaaaatctgagtcgccccagcttaagaaccacagccagctgaggcacttgtagagggaaaatggaatatataatggtcagtggaaaaagatagctataaatactaactatgactatgtgacaagttgcagaaataaagactatttgttatgagtatttctacctcatttttatgaatatgtgtatatataatctttttcttctctatcttatccccttatcagatttcagtattgttaattttgcaatgtag

SEQ ID NO: 305082 - DNA, 549 bp, Homo sapiens
tgttgtttgcctggtttctgatagaaagtccaaaacaatttttatctttgttcctttgtaagttaggtgttttgttttattttgaactgctgacttctttctagattttctctgtatatktggtttgcttcaatgtggatattataagtgtacttgtagaatttgggggtatttattctgcttggtttttccaagatttccgaatctgtggttttaagtctgtcattagtcttggaaagcttttggccatattacttcaaatttttattccactttattctgtcttccttcttcttctggaattctgcataagttattcctgttaaaattttcccacagttcttatacattctattatgcttttattctcttttctcattgcattttcacttaggaaatacttgctgacatatcttcaacctcagatcctttccttggctttgtccagtctgctgctgagattatcaaaggcattcttcatttctgttacagtgttttatttttagcatttttcattaattctttcttagagtttccatctctgtgctt

SEQ ID NO: 305083 - DNA, 587 bp, Homo sapiens
ctgttgtttgcctggtttctgatagaaagtccaaaacaatttttatctttgttcctttgtaagttaggtgttttgttttattttgaactgctgacttctttctagattttctctgtatatttggtttgcttcaatgtggatattataagtgtacttgtagaatttgggggtatttattctgcttggtttttccaagatttccgaatctgtggttttaagtctgtcattagtcttggaaagcttttggccatattacttcaaatttttattccactttattctgtcttccttcttcttctggmattctgcataagttattcctgttaaaattttcccacagttcttatacattctattatgcttttattctcttttctcattgcattttcacttaggaaatacttgctgacatatcttcaacctcagatcctttccttggctttgtccagtctgctgctgagattatcaaaggcattcttcatttctgttacagtgttttatttttagcatttttcattaattctttcttagagtttccatctctgtgcttacattatccatctgttcttgcatgtcgtctacttttt

SEQ ID NO: 305084 - DNA, 554 bp, Homo sapiens
gttaaaattcttttgttcctcggggtgctcccttgatgtggtgctctcccctttcccctgtgggtggggtttcctgagagccaagcttcagtgattgttatttctcttctggatctagctacccagtggagctactgggctctgggctggtactggggagtgtctgaagagtcctgtgatgtgatccattctcagccatggataccagcacctgctctgatggaggtagcaggggagtgaagtggacactgtgagggtccttgatggtatttttcttaagtgtgctgcttttgtgttggttggcctccagccaggaggtggcacyttcaagagcacatcagctgtggtagtatagagaggtagcaggggagtgaagtggactctgagggtctttggttgttttgtttgtttgtttgtttgtttgtttgttttagacagagtctcactctgttgcccaggctggaatgcagtggcacaatctgggctcactgcaaccttcccctcctggttcaagcaattctcctgcctcagcctcccaagtagctgggactaca

SEQ ID NO: 305085 - DNA, 554 bp, Homo sapiens
gttaaaattcttttgttcctcggggtgctcccttgatgtggtgctctcccctttcccctgtgggtggggtttcctgagagccaagcttcagtgattgttatttctcttctggatctagctacccagtggagctactgggctctgggctggtactggggagtgtctgaagagtcctgtgatgtgatccattctcagccatggataccagcacctgctctgatggaggtagcaggggagtgaagtggacactgtgagggtccttgatggtatttttcttaagtgtgctgcttttgtgttggttggcctccagccaggaggtggcactttcaagagcacatcagctgtggtagtatagagaggtagcaggggagtgaagtggactctgagggtctttggttgttttgtttgtttgtttgtttgtttgtttgttttagacagagtctcactctgttgcccaggctggaatgcagtggcacaatctgggctcactgcaacyttcccctcctggttcaagcaattctcctgcctcagcctcccaagtagctgggactaca

SEQ ID NO: 305086 - DNA, 610 bp, Homo sapiens
gctgcagtagcatagggaggatcagatggtgggtgtggctatagtgcttccaagagataacatcttttgtcttcaactacctgggcaggtagagaaagaccatcaggtgggggcaaggttaggcatgtctgagctcagactctccttgggtagggcttgctgtggctgctatgggggatggggtgtggttcccatgccaacagagttatgttcctgggggattatggctgtttctgttgcatcacacaggtcgccaaggaaggaagggaaagccacaagcctcactcagctcctatgcagcccacagcccaaagggccagtctcactgccaccgtatttccccaacagcatcaagtttatttccaggcaacyggtgggcagggctgacaacttgccttgggctgcaagcctcccagctgagaaagcaaacagactcacagttccttagctgtcccacagaacctccagtggcaattcaactccttcaaagggtctgtggattcccttggctttcctgacatgttcctgtggtagttcttggagcaaaagttcacagtggggctctccaaagactgctctgtctgtccgagcgggagctgcaagttcgtcc

SEQ ID NO: 305087 - DNA, 614 bp, Homo sapiens
gagatgatcccgtggttttgtgtttagttctgtttatgtgatgaatcacatttattgatttgcgtatgttgggccaacttcatatccaaaggataaagcctactcgatagtgattgattagtttttgatgttctgctggattcagtttgctagtattttgtaccaaatacactcttgaaccacagtgcaataaaaatgtaaatcaatactaagaaaatcactcaaaaccatgcaactacatggaatttaaacaaggtttaattcctgctcctgaataacttttgggtaaaaaatgaaattaaggcagaaatcaagaaattctttgaaaccagtgagaacaaagacacaacataccagaatctctgggacatagctaaggcagtgtgaagagggaagtttatagcactaaacaaccacatcaaaaggaaagatctcgaattagcaaattawcatcacacctagaggaactagaggaacaagaaaaatacaactccacagttggcataagacaggaaataaccaaaatataagagccgaactgaaggaaactgagatgccaaaaacaatataaaggcagagcaagatggtagaatagaagtttccgttgctcatcc

SEQ ID NO: 305088 - DNA, 577 bp, Homo sapiens
cacacaaataaaagtaccttcgtaaaaaccccaaacctaatgagcactcacagtacctggttttaacttcatatcacttaaacaggcactgaagaagtagaaaaaaaaaaggcttcaattgctgatgccactgtttcccccaaaccccaccctgggcagcagcagtatggtgcagagagagactttatgtgcttgasagagggagagtgtaccaataatgagacactgcattgaattcagtgcctccctgttatagcaggaagtaaaccagacccaactcagctgacatcaacccatggagggagtatttaaaccagccctaggcagaggagaattgcccatcccagcagtcagaatttgagtttctgcaagccttgccacctcaggctggagtgctctggggctctaaataaatttgaaaggcagtctaggccacaaggactgcatccctaggcaggtcctaatgctgaactaggcccagagccagtggactggaggtttggaggcacacaatttactgatccaccagctggggcagctaagggagtgctgacatcaccctttccttaaccccaag

SEQ ID NO: 305089 - DNA, 577 bp, Homo sapiens
cacacaaataaaagtaccttcgtaaaaaccccaaacctaatgagcactcacagtacctggttttaacttcatatcacttaaacaggcactgaagaagtagaaaaaaaaaaggcttcaattgctgatgccactgtttcccccaaaccccaccctgggcagcagcagtatggtgcagagagagactttatgtgcttgacagagggagagtgtaccaataatgagacactgcattgaattcagtgcctccctgttatagcaggaagtaaaccagacccaactcagctgacatcaacccatggagggagtatttaaaccagccctaggcagaggagaattgcccatcccagcagtcagaatttgagtttctgcaagccttgccacctcaggctggagtgctctggggctctaaataaatttgaaaggcagtctaggccacaaggactgcatccctaggcaggtcctaatgctgaactaggcccagagccagtggactggrggtttggaggcacacaatttactgatccaccagctggggcagctaagggagtgctgacatcaccctttccttaaccccaag

SEQ ID NO: 305090 - DNA, 547 bp, Homo sapiens
ataggctatttgaaaatacatagacataggagacacaataaaaaaaggttaaaaaatgaagcaagcctacaggatttaaaaatagcctcggggcaaatctgagaatttaaagaagaggtagagaaaaagatagggatgtaaagaatattcaaagggataataacagagaacttcccaaacctagagaaggatatctatatccaagtacaagaaggttatagaacaccaagcagatttaacccaaaaaagactatctgaagacatttcataatcaaactcccaaaggttaaagataaagaaaggatcytaaaagcagcaagaaaaaagaaacaaataacatacaatgcaactcctccaatacatctggcagcagacttctcagtggaaactttacgggccagcagagaatggcatgacatatttaaagtgctgaaggaaaaaaaagaaaaaaaacattttacctttgaatagtatatctggaaaaaagaaaaaaaaaattcttcaaacatgaagaaataaagactttcccagaccaacaaaagctgaa

SEQ ID NO: 305091 - DNA, 547 bp, Homo sapiens
ataggctatttgaaaatacatagacataggagacacaataaaaaaaggttaaaaaatgaagcaagcctacaggatttaaaaatagcctcggggcaaatctgagaatttaaagaagaggtagagaaaaagatagggatgtaaagaatattcaaagggataataacagagaacttcccaaacctagagaaggatatctatatccaagtacaagaaggttatagaacaccaagcagatttaacccaaaaaagactatctgaagacatttcataatcaaactcccaaaggttaaagataaagaaaggatcttaaaagcagcaagaaaaaagaaacaaataacatacaatgcaactcctccaatacatctggcagcagacttctcagtggaaactttacgggccagcagagaatggcatgacatatttaaagtgctgaaggaaaaaaaagaaaaaaaacwttttacctttgaatagtatatctggaaaaaagaaaaaaaaaattcttcaaacatgaagaaataaagactttcccagaccaacaaaagctgaa

SEQ ID NO: 305092 - DNA, 573 bp, Homo sapiens
ctacatttatgggtcgagatcccaaatctgaagatcaaaaattcaratgttccaatgaacattttctttgagtgtcatgttgatgataaaaaaatggagtttttaatttttggatttgtgatgcccaacctgtatcatgtaaacagatgatgaagggtgagagctaagtttgttattgttagcataggaggtgtggcaaagggcaaaagctagaataattcatacagtaatggagcataattggagacatgaggatgaatttgtgtttattttagtatacagatgacaacatttagaaatacttgatgatatatatgtaagtgggtcagtatacatatattttcttgctctgataacgagaagacctagaagcaatgacatcccagtagcagtgagcacactcagtgaccagctcttgctttctaccaggaatcttcaaagaaaaggatgattctaggttggaggcaggagatacaccagatgagcctgggtcaccttgtagtgacagaacgtaaggaaatgcttttaaaaaatacaatgatgggggtatgtcaaaggaacccacaagacaat

SEQ ID NO: 305093 - DNA, 570 bp, Homo sapiens
gctgttatttgttgttgttgcgtaatagatttcttggttggctgtataagtaacaaattattgtygaattataagagccccttatttattctggactgacatccaaatatatgatttgtaaatattttctcctattttgttggttgtcttttcaaatccttaatggtgttcattgaagtacacaagttttgaattttgatgaagtctcatttttctcattttcttttgttgcctctgctttagtgtttcatctgaaaaggaactgccaaactcaaggtcacaaagacttaatcttacatgctattctaagttttatagttttagttcttatatttaagtccgtgcttcactttgcattaatttttatatacagtgtgaggctggagttcagcttcatttttgcatgtgaatatccagttattctagcactatttgtttaaaacactattcttttccccattgaaatatgttagcattcttgtcaaaaatcaattgaccataaacatgaatatttatttctgaactctcaattctattccatagatctttctttctatccttatatcaata

SEQ ID NO: 305094 - DNA, 570 bp, Homo sapiens
gctgttatttgttgttgttgcgtaatagatttcttggttggctgtataagtaacaaattattgttgaattataagagccccttatttattctggactgacatccaaatatatgatttgtaaatattttctcctattttgttggttgtcttttcaaatccttaatggtgttcattgaagtacacaagttttgaattttgatgaagtctcatttttctcattttcttttgttgcctctgctttagtgtttcatctgaaaaggaactgccaaactcaaggtcacaaagacttaatcttacatgctattctaagttttatagttttagttcttatatttaagtccgtgcttcactttgcattaatttttatatacagtgtgaggctggagttcagcttcatttttgcmtgtgaatatccagttattctagcactatttgtttaaaacactattcttttccccattgaaatatgttagcattcttgtcaaaaatcaattgaccataaacatgaatatttatttctgaactctcaattctattccatagatctttctttctatccttatatcaata

SEQ ID NO: 305095 - DNA, 579 bp, Homo sapiens
acctcttaacatcatcactttagccattgagtttcaaatgggacaattcaaactatagcataattttctatctgtttacattcaacctgtttgtgtttttgaacctaaagtctttctcttataatcagcagatarttggatctttttaaatctatgatgacaatctcagcctttgactgtggattttagtgcagtaaagtaagtacccagaaggtaggatatacatctgcatgttgtcatttgttttctacctggcatttttgttgttgttctttgatttctctatttttttcttcttttatgactaatattaataattgtttactagtccaccatttacatgccattgtttcttttactatattggtttgtgttagtttgttgttgttatttacctggaggctaaactaacatcttaccctaaaacaatctagtttagatttaaaataatttcatttcaactgtatttaaatatggctccatttcctccctcctcctttgtgctttaattgtcatacaaattatatttttatatattattattccatccacatattattataattgctgttttataca

SEQ ID NO: 305096 - DNA, 618 bp, Homo sapiens
ctcaagcccctttcctataagcccagtgtattgtgtgtgaggcctgaaattcctgccatggactgtaggtacattgacaagttatttgatctttcttagcatttgtaatcccatctataagtggggagaacaatctctacctaytttgaaaggctgatgttatacttggcacgtggtagaaatctgatgaatgattgttggtattattggtgttcttgttattcaatgaccccaggagtagagatttagtctgagactcagtccttgcagatcatgaaacaaactatcacgttgattctgttttctcctcatcttcctcttcatctgcctcctccctcacataagcatatttcatgttggccaactcttataggcaagtttctcagcagggcttcctggaatgtgcttgtacattgccccctcctgcattgctcccttctcagaccccattaggtgaggtagcattctaaagagctgctctaattccacttgaacatccctaaaatcagctaagccgaggcaagtagcagcccatgcagcctcattggtatgcattccactcgagagtgtgggcacggtaaatgacacatgaattatgtatgccagcgttcggtacaa

SEQ ID NO: 305097 - DNA, 432 bp, Homo sapiens
tgatttattcaagagatagcgcttacacaaagtggcgcgtggctagaggtatcagcgacttaaaaatcagcacactttggcttcagtactggcctcattccttaccagactcttgacctttgacagatttacccaagtctgtatggcttctttggccaaaaggacaaaatcaaaatagtttaagacatcagccttgtttaacccacagggtggatgtgaagggctttcragcatatgttacctggaagaatgtgttccagggaaccatgtgttacctggaagaatgcatttcacttcgaaagcattcctaatttcatcttaattatttgaagaaaagttcttagaaagttagatatggtatctgaaaactgtcacgtacatctttcctattgcctatactaaaggatattggaccaagcaaaaataacatag

SEQ ID NO: 305098 - DNA, 432 bp, Homo sapiens
tgatttattcaagagatagcgcttacacaaagtggcgcgtggctagaggtatcagcgacttaaaaatcagcacactttggcttcagtactggcctcattccttaccagactcttgacctttgacagatttacccaagtctgtatggcttctttggccaaaaggacaaaatcaaaatagtttaagacatcagccttgtttaacccacagggtggatgtgaagggctttcaagcatatgttacctggaagaatgtgttccagggaaccatgtgttacctggaagaatgcatttcacttygaaagcattcctaatttcatcttaattatttgaagaaaagttcttagaaagttagatatggtatctgaaaactgtcacgtacatctttcctattgcctatactaaaggatattggaccaagcaaaaataacatag

SEQ ID NO: 305099 - DNA, 584 bp, Homo sapiens
tttaggttactctgggagaaaaccagcctcacagaggcagcaacactaattctgctagctcccgcctctttagggctccctcttgcttgaatacccaactcatcccacaacaccagacatgtattgtgatccctcccctgggccttgcttgggcttggccaygtgttgtgtgtcaccatagaagacaccttctgtgtcttccttctctggagccagaactttctacagaagacttcctttccatggttggcctaaacactgccttggtcgtttcataaatcttagcaaaatgtcctctctcaccttggcaactctcccccgccccaaccaagtcatggccgggatatggttccagttgtctggagctgttggcagctgtttggagtggctcccacttttgtggaaccctgagccacagggctaggtggcaggcacccggggtggatgtagtgaggaaagagattccttttcttccttgtgtgtgtggtgagggggtccacagctctctgccaaggtcctctctgggtgagaacaggctcttggggagtcccttgattcatgggtgagagctggatcaagtgtca

SEQ ID NO: 305100 - DNA, 584 bp, Homo sapiens
tttaggttactctgggagaaaaccagcctcacagaggcagcaacactaattctgctagctcccgcctctttagggctccctcttgcttgaatacccaactcatcccacaacaccagacatgtattgtgatccctcccctgggccttgcttgggcttggccacgtgttgtgtgtcaccatagaagacaycttctgtgtcttccttctctggagccagaactttctacagaagacttcctttccatggttggcctaaacactgccttggtcgtttcataaatcttagcaaaatgtcctctctcaccttggcaactctcccccgccccaaccaagtcatggccgggatatggttccagttgtctggagctgttggcagctgtttggagtggctcccacttttgtggaaccctgagccacagggctaggtggcaggcacccggggtggatgtagtgaggaaagagattccttttcttccttgtgtgtgtggtgagggggtccacagctctctgccaaggtcctctctgggtgagaacaggctcttggggagtcccttgattcatgggtgagagctggatcaagtgtca

SEQ ID NO: 305101 - DNA, 584 bp, Homo sapiens
tttaggttactctgggagaaaaccagcctcacagaggcagcaacactaattctgctagctcccgcctctttagggctccctcttgcttgaatacccaactcatcccacaacaccagacatgtattgtgatccctcccctgggccttgcttgggcttggccacgtgttgtgtgtcaccatagaagacaccttctgtgtcttccttctctggagccagaactttctacagaagacttcctttccatggttggcctaaacactgccttggtcgtttcataaatcttagcaaaatgtcctctctcaccttggcaactctcccccgccccaaccaagtcatggccgggatatggttccagttgtctggagctgttggcagctgtttggagtggctcccacttttgtggaamcctgagccacagggctaggtggcaggcacccggggtggatgtagtgaggaaagagattccttttcttccttgtgtgtgtggtgagggggtccacagctctctgccaaggtcctctctgggtgagaacaggctcttggggagtcccttgattcatgggtgagagctggatcaagtgtca

SEQ ID NO: 305102 - DNA, 584 bp, Homo sapiens
tttaggttactctgggagaaaaccagcctcacagaggcagcaacactaattctgctagctcccgcctctttagggctccctcttgcttgaatacccaactcatcccacaacaccagacatgtattgtgatccctcccctgggccttgcttgggcttggccacgtgttgtgtgtcaccatagaagacaccttctgtgtcttccttctctggagccagaactttctacagaagacttcctttccatggttggcctaaacactgccttggtcgtttcataaatcttagcaaaatgtcctctctcaccttggcaactctcccccgccccaaccaagtcatggccgggatatggttccagttgtctggagctgttggcagctgtttggagtggctcccacttttgtggaaccctgagccacagggctaggtggcaggcacccggggtggatgtagtgaggaaagagattccttttcttycttgtgtgtgtggtgagggggtccacagctctctgccaaggtcctctctgggtgagaacaggctcttggggagtcccttgattcatgggtgagagctggatcaagtgtca

SEQ ID NO: 305103 - DNA, 462 bp, Homo sapiens
tcttcttcctttcctttactgaactgcgtttgcaccttttcaaaaatcagttgggtatatttgtatcagtctatttctgggctttctattgtgtttcattggtctatgtgtytattcgtgtgccaatactacattgccttgattactttagctatatagttatcattaacattgggtagagttatccctctaactttactcttccttttaaaatcatgtttagttatcataagtcctttgctttttcatgtacatttatgagtaagcatctatgtctacaaaaacttttctgggaattggatcaggattctgttaaacctactgatctatttgcgaagagttgatgtttgcacaatgttgaatgttccaatccgtaaacatgacatgtgtctgtatttatttaggtcttatttgatttcctttttaagcatttacaattttcaatatactaatattttcaat

SEQ ID NO: 305104 - DNA, 475 bp, Homo sapiens
gttcttttttcacatatattgtgcctcataagattttttctttttcccagtttgtgacttgtctttctttttttttttaataattaaaaaattaatgggtacacagtaggtgtatacatttatggggtacatgaaatgttttgatacaggcttgcagtacttaaaagtcacatcagggtaaatgaggtatccatcacctcaagcaytgatcatttcttgtgttacaaacattctaattatactcttttagttgttttaaaatgtatgatattgttgactgtagtcaccctgttgtgctatcaaatactagatcttatttattctggctgactatatttttatacttcttaaccatctccatcctccctataccccactacccttcccagcctctggtaaccatcattctattctctatctccatgagttcaattgttttaatttttagatactacaaatgagtgagaacatgtga

SEQ ID NO: 305105 - DNA, 583 bp, Homo sapiens
taggattataaatgaaggctcctccccatccccttgataagtggtggaagtgtaacacccaacaggctctccttgccccctgtctaggcagggccaatttatcaagacaggggaatttcagtagagaattgcaactcatacagagccaggtgtatgggagaccagagttttattattgctcaaatcaatctcccccaaaacttggggatcagggttttaaggacaatttggtgcataaggggttggaaaatggggagtactgattaattgggtcagagatgaaattatagggagtggaagctgtcttttgcactgagtcatttcctgggtagggttcacaagaccagatgagctagtttattgttctgcatggtaccagctgaaccatggagtacaggatctgcaaaatatctcaagcactgatcttagattttacaatagtgatgttatccccaggarcaatctagagaggttcagaattttgcagcctccagctgcatgactcctaaaccatattttctaatcttgtagctaacttgttagtcctgtaaaagcaatctagtctccaggcaggaagggggtt

SEQ ID NO: 305106 - DNA, 622 bp, Homo sapiens
ctgccttttcaacttagcaagattgccgctccacttgggccccagttttctacattgtggaaggaaagtgcttccccagcagaaagctaaggaaaccttgtttgtttcccttctctcaggaatcataatctttcactacctgttgttcartgcttgaaaacagatgcctcatatattttgaccatatttatacttgtttatggtgggaaggaagattcattactagttattccctaatgattggaagcagaagtatgaaaatcatttgtacctttaagatattatgacaaaccacaatgggtttgataaaaacaatgcattaggacctgaagtctgtctcactaccatcctcatccccccagtcatctgaagattctgagctctgattattgctggatgttccagtgtggctaagactgtggggataagacagaccccagtggtattttaaattttttgcacaagttgccatcaattaaaagtttgagaagtttcacataaaaattcagagtttttactttttttgtaaaatggaaagataagatggcactcaatgagcatggaaatagtagtctgaagcagtatagcagtttccttctttagacagggtgtatattttctg

SEQ ID NO: 305107 - DNA, 581 bp, Homo sapiens
tcaggatgataaccctcttgatcaagtttttcaggatgatgattcagggtgatggtttggaagcattctctttgaaaactagttggtagttgatgcacaatgaaatactgtccagctgagaaagagatggaaaattatccggtggctaattcccaagctgatggccctaccctacctcagttctatccccacctcatgccctgcagattgctggggtttctggtggaaatccaactcctctttaaaacctcctccatttcctcaccctccayctctactcttagcacttgagagtgtacatttcgtctttgctcctcttccctccccagatgatccaaatagaaaatacatcagcacgtgggaaagagcaacgttgatcgtcttcacggaaaggctgaggaccctgcgcctaccacatgttggccagggtgagcaagcagtgaaagagaaaacacttttttcaaaaagccaactggtaaggaatgttactaagctaccatgtaattttctgtagctttctggctgggtgtcacaagcctgttaaggcctagccatgtaggattatccctgttacttccaaa

SEQ ID NO: 305108 - DNA, 602 bp, Homo sapiens
cagctttttcctcccctctctacatgttttatgcatcacccaagaaattgcctagaaacagagaatagccttttctaagtatatggtttaagcattcatttgaacaaagtattcgagtttctgaggtttacatattgtgtttcagtttcatatacaagtgataagcatttttaatatcggggctttcacttaaatcccagaccattcactttttttgcatatgaaatggacccagttgctcaatgctgggcttaggaagtaacagactcacattwtgtagacattgtagccaagagtaaggcaaatgcctgagggtgttaggttatctttatttaatttattcccctcagtgttatggcattgccagggaatcccagcccaattgaaacaagaatgcaccaggtgcaaaccccactttttagtgtactccctttcctagaccactgagtagataactgtgataaggaaaaacccaaacatttgctaaactatgtgaaggaaggaagaacagccagcttccttgttctcaatactgttggggaagcattgtcaataatctcacttcatggcaggacaggatgggccaaacagccagtgtgagg

SEQ ID NO: 305109 - DNA, 586 bp, Homo sapiens
tatacttaatgatgagaaactagaagctttcctactaaggtgaaggcaaggatgttccctctcagcactctttttcaacattatactgaaagtcctagctaatgtaataagacaagaaaataaaataaaaagtatacagattgggaagaaagaaataatactgtatttgtttgaagatgacatgattatcaatgtagaaatcagaaagaatcaaccacaagaaagtctcctggaataagcaattatagcaaagttgcaggatacaaagttaatattagaaagtcaattgatttcctatgtaacatcaatggacaagtaaaatatgaaattaaaaacaagttaccatttacattagcacccctcaaaataaaatacttaggtataattctaacaaaatttatacaagatctatatgaggaaaactaaaaaactctaatgaaagagatcaaagaagaactaaataaatggaaagtccatgttcacagacaggaasactgagtattgttaagatgtcagttcctcccaacttgatagcaagttactttgtggttattgacaaactgattctaaagtttttatggaaaag

SEQ ID NO: 305110 - DNA, 548 bp, Homo sapiens
tttcaaaaacaaaacaaaacaatttagtattatactgtaatggtaaatatgtgtcaccaaacatatgtcagaatccattcaatgtatgaagagtgagccctaatataaacaatggactttgggtgataatgatgtrtcaaagttcattgattctaaccaatgtaccactgttgtgtgggatgtctatagcagggaagattgtgcatgtgtgagaatagcaggtaaatgggaactatctgcattttctgcttaatttttatgtgaacctaaaagtgtgctaaataataaagtttatttttaaaaagataaaccattgcaaaaaaaaaaaaaagattagttctcaccattatatgcagtacagtggttaatattgcaaggtcttcagtcagactgtcagggtttaaagccctaataacacttccctgtgattcagtttcttcatctctgaaatggagataataagagtacctatctcagagttttagagagaaataaatgagatttaaattgcttagaacagtgcatgtctcgtaagtttcacttcaata

SEQ ID NO: 305111 - DNA, 491 bp, Homo sapiens
agtgagccctaatataaacaatggactttgggtgataatgatgtatcaaagttcattgattctaaccaatgtaccactgttgtgtgggatgtctatagcagggaagattgtgcatgtgtgagaatagcrggtaaatgggaactatctgcattttctgcttaatttttatgtgaacctaaaagtgtgctaaataataaagtttatttttaaaaagataaaccattgcaaaaaaaaaaaaaagattagttctcaccattatatgcagtacagtggttaatattgcaaggtcttcagtcagactgtcagggtttaaagccctaataacacttccctgtgattcagtttcttcatctctgaaatggagataataagagtacctatctcagagttttagagagaaataaatgagatttaaattgcttagaacagtgcatgtctcgtaagtttcacttcaataaatcttagttattatttcatatacaaattttaaa

SEQ ID NO: 305112 - DNA, 491 bp, Homo sapiens
agtgagccctaatataaacaatggactttgggtgataatgatgtatcaaagttcattgattctaaccaatgtaccactgttgtgtgggatgtctatagcagggaagattgtgcatgtgtgagaatagcaggtaaatgggaactatctgcattttctgcttaatttttatgtgaacctaaaagtgtgctaaataataaagtttatttttaaaaagataaaccattrcaaaaaaaaaaaaaagattagttctcaccattatatgcagtacagtggttaatattgcaaggtcttcagtcagactgtcagggtttaaagccctaataacacttccctgtgattcagtttcttcatctctgaaatggagataataagagtacctatctcagagttttagagagaaataaatgagatttaaattgcttagaacagtgcatgtctcgtaagtttcacttcaataaatcttagttattatttcatatacaaattttaaa

SEQ ID NO: 305113 - DNA, 548 bp, Homo sapiens
tttcaaaaacaaaacaaaacaatttagtattatactgtaatggtaaatatgtgtcaccaaacatatgtcagaatccattcaatgtatgaagagtgagccctaatataaacaatggactttgggtgataatgatgtatcaaagttcattgattctaaccaatgtaccactgttgtgtgggatgtctatagcagggaagattgtgcatgtgtgagaatagcaggtaaatgggaactatctgcattttctgcttaatttttatgtgaacctaaaagtgtgctaaataataaagtttatttttaaaaagataaaccattgcaaaaaaaaaaaaaagrttagttctcaccattatatgcagtacagtggttaatattgcaaggtcttcagtcagactgtcagggtttaaagccctaataacacttccctgtgattcagtttcttcatctctgaaatggagataataagagtacctatctcagagttttagagagaaataaatgagatttaaattgcttagaacagtgcatgtctcgtaagtttcacttcaata

SEQ ID NO: 305114 - DNA, 491 bp, Homo sapiens
agtgagccctaatataaacaatggactttgggtgataatgatgtatcaaagttcattgattctaaccaatgtaccactgttgtgtgggatgtctatagcagggaagattgtgcatgtgtgagaatagcaggtaaatgggaactatctgcattttctgcttaatttttatgtgaacctaaaagtgtgctaaataataaagtttatttttaaaaagataaaccattgcaaaaaaaaaaaaaagattagttctcaccattatatgcagtacagtggttaatattgcaaggtcttcagtcagactgtcagggtttaaagccctaataacacttccctgtgattcagtttcttcatctctgaaatggagataataagagtacctatctcagagttttagagagaartaaatgagatttaaattgcttagaacagtgcatgtctcgtaagtttcacttcaataaatcttagttattatttcatatacaaattttaaa

SEQ ID NO: 305115 - DNA, 641 bp, Homo sapiens
gaaccaaaaaaaattatcttgcatgtaccttttaagtataaatagacaagaccatgtaaattataccttacaactacaccctctataatctccatacagtaaaactggaaaggtcagaatattatttaatgctttacaatttatatgagaataaactgaattgtagcttcccctccaaaaaaagaaatatttgtattgctattaagataagtttggtggtttccaaaattggatacagtgaaaaattagcttctacttatgtacgtgtgtgtatgtatgtgacattatgcaaatcttttttgaggtataaatttctaaaaatagagttgctgggtcaaagaatacacatgtctacatttttatataaatgcacaatttgcccttcaaatgacctttaccaatttattctctcagcatttaggaatatattcatattttccagactttttttcaacaagtacaagaaaagatttatactttcttatatagcagtcaccccaaagtactgaaagttctacaattttgtaaaggtccagtatggcccayggacactttatgacctggtatcagagatgagttcacacatggcttgaccacttgctggcagtgtgactttcacaaagacacttaaactttttaat

SEQ ID NO: 305116 - DNA, 402 bp, Homo sapiens
accatttttccacagggccaggacccctgagctcctggttctgcaccagtgattttcaattcaggctgcacattaaaatcaccmgagagctgccaataatccttatgcctagaccccacctaatttggttagagattttgacctaattgtttcaggatgggaccaggcatacttcgaacactctctaggtgatcctaatgtgtaaccagagttgacaatctctgcaccaaaccagtggttttcaaagggcagcacttaaatcatcatcatcatcagcagcagcagcagcagcatcaccacctgagggcttgttacaaatgcacactctcaggtccctgcaaaggtctactaagtcagaaactcggaggctggagcccaacagtctattttaacaaggcttct

SEQ ID NO: 305117 - DNA, 611 bp, Homo sapiens
ctgcaccagtgattttcaattcaggctgcacattaaaatcaccagagagctgccaataatccttatgcctagaccccacctaatttggttagagattttgacctaattgtttcaggatgggaccaggcatacttcgaacactctctaggtgatcctaatgtgtaaccagagttgacaatctctgcaccaaaccagtggttttcaaagggcagcacttaaatcatcatcatcakcagcagcagcagcagcagcatcaccacctgagggcttgttacaaatgcacactctcaggtccctgcaaaggtctactaagtcagaaactcggaggctggagcccaacagtctattttaacaaggcttcttccaggtgattctgatacacattcaagtttcagaaccagagtgcatttttacacttgatcatagccaaaaggctgagaagcgataccacagtgcatttctaacaagttcctaggtgatgctgataccactggtccaggaccactctttaattaagaaccactactaaagtagtatggcattaagaaccagcattacttagtttactgccctcttactacttagtgtaggtgtgttaatttacaaagtac

SEQ ID NO: 305118 - DNA, 526 bp, Homo sapiens
aacctggacttctatgtccttccagttcttaacatagatggttatatctacacttggacaactgtgagtacaccatgtttggtcctgggatgagttcatgaactaaagctcaattcaggttaatttttccaatgttatccattccrgctctaaaaatatttcatacctatgtaaagaaaggaaccccatttgggataaaaatcagcttaacatttttaatcaaaccatctacattaagtttaggcctaaggaagcctaaggcctttttagagttgaagtccattacaggttttttctttgttttttactctcctcttccatcttcttaatgtttgtggattgcctgccacccaattaggattatattgataaaaattcatgtaccaacttgcatccatgtcaaatcagttctagaagcatgaaggcaatgaataatgtataaacacaaaaccagcctacatttttcaatgcaatcattcacacagggggcaaacatcacataaagtctttttatgcagcagacaac

SEQ ID NO: 305119 - DNA, 526 bp, Homo sapiens
aacctggacttctatgtccttccagttcttaacatagatggttatatctacacttggacaactgtgagtacaccatgtttggtcctgggatgagttcatgaactaaagctcaattcaggttaatttttccaatgttatccattccggctctaaaaatatttcatacctatgtaaagaaaggaaccccatttgggataaaaatcagcttaacatttttaatcaaaccatctacattaagtttaggcctraggaagcctaaggcctttttagagttgaagtccattacaggttttttctttgttttttactctcctcttccatcttcttaatgtttgtggattgcctgccacccaattaggattatattgataaaaattcatgtaccaacttgcatccatgtcaaatcagttctagaagcatgaaggcaatgaataatgtataaacacaaaaccagcctacatttttcaatgcaatcattcacacagggggcaaacatcacataaagtctttttatgcagcagacaac

SEQ ID NO: 305120 - DNA, 589 bp, Homo sapiens
aacagtgatgattcaatcacgagccaaaataccaagttattaaaaatagagctaactttttcccttctattaccacccaaagtttcatagacatctccaagctgtctttaggaattggaagtcaagggaaacagaggatgcyattttattttattggttacctctcatactaatccaatgattagtgataggaagcagagaaattaacattgtggggatactgaggaggacccactgtctggtctgtataacatttcatttcagtactttgacatgacacctgccgctggaagctcttttatgtgtagtgaagtgaagaaaatgggtttgcaaagttgaactgattttcctaaggttgtagaattattgatttcagaggtaagacctagaacttctaagcattttgttattctttctgtggatatgcaatcatacatcatataaattatatatatacacatttaagggagacatcagtgtggggaggcaaattttgagtggtggacagaactgggttattgtacccatggacaaatacaggctcactagctgtgtgactatgaccagccactcaaatttcctgggcttt

SEQ ID NO: 305121 - DNA, 564 bp, Homo sapiens
catttttctgtttgcttttttgtgactctaaggtctagtgtttccctaaccatctgggaagcttattaaaacaaaaattgatgggacctttaaccagagctcctaatttggtaagtccaagtagaggccaatagttttcattttgaacaagytctcaggtgatgctgacacttggtctgtgagccatgctttgagaaccacttttctgggcattaaaacatgcatttttagttcatcataatgcacttagagttgattttctaccagttcacataaaatgtatgaatgttacaatattaaaattttatttaattgctatcttttattgccatatattgttgtcatacgtgtgtgtatagataatgtatctaagtaataaaaaatacaattttattatttttcttttaaaaagtgaattgttattcagccaaacaaatagagaaaaaatacatattttacattaatcctatatttaccattttagattctcttcctttcttcctaaagatccaaatttctaattgatattattttattcaaattgaaaagctacctttagcattt

SEQ ID NO: 305122 - DNA, 555 bp, Homo sapiens
gctgttcctgtttggccatcttgggaggagggccagcattaccttttctatttctgtgaagaatgtcattggtattttcataggaattgcattgattctgtagattgctttaggtagtatagccattttaacaatattgattcttccaacccatgatcatggaatatctttccttttctttttggtgtcctcttaaatttcttgcatcatgttttacattttcattgtagagatctttcacttctttagttaagtatattcctaggtgtcttgttttatttgtagccactataaatgggattactttcttgatttcttttttctaattgttcactgttggcacatagaaatgttactgatttttgtatgttgattttgtgtcctgcaactttactgaatttgtttatccactgtaatagattttcagggtactctttagttttttccaaaaataagccatgtcatctgaaaacaagmaaaatttgacttcttcttttccagtctggatgccctttatttctttctcttgtcaaattgctctagttaggagttcca

SEQ ID NO: 305123 - DNA, 670 bp, Homo sapiens
tgttgtatatggttttttatcatgttaaggtatgttccttctatatccagtttttggggggcttttatcatgaatgaatgttgaattttatcaaatgctttttcagcaccagttgaaatgatcatatggttttggcctttattctgttgawttgatgtatcacattgatttatttgtgtatattgaactatctttgcatccctgagataaagcccacttgattatgatgaatgttgttttcatgtgttgttgaattttttgcttctattttgttgagaatttttgcatcaatattcaacagggatattggcctttagttttctttttatttttcaatgtgtctttgtctggttttggagggtaacactgtcctcatagaataagtttggtagtgttccctcctctatttttttggagtagtttgagtagaactggtattagttcttctttaaatgttttgtaaaattcagcagcaaagccattgagccctgagcctttctttgctgggagactttttagtacagcttcaatgtcattacttgttattggtctattcaggctttggattttgtgatggttcaatcttgataggttggttgtatgcatctaggagtttctccatttcttgtaggttttccaatttattggcatatagttgcttatattagcc

SEQ ID NO: 305124 - DNA, 331 bp, Homo sapiens
aacatagcccaatttgaaagagattgagaaaccacagttctcattaagaatattcatgagtttgcaccttgaaaagccagcaatcacatgatatgccagaacggacaagatcgtttgagaagaggaaaaaaaaaaagatgcaatttaaaataagttaccaggtatgtgctacgggaagttctgaagtgaaacagggggtatggaattgcatgaactatttgaactgtcagtcaaatctgtcttaataaraatttacagggctatcccagggctgcacattatcatctgaaaagcttaaaaaagaaaatcacccaggccgtgggccccaccc

SEQ ID NO: 305125 - DNA, 583 bp, Homo sapiens
taggattataaatgaaggctcctccccatccccttgataagtggtggaagtgtaacacccaacaggctctccttgccccctgtctaggcagggccaatttatcaagacaggggaatttcagtagagaattgcaactcatacagagccaggtgtatgggagaccagagttttattattgctcaaatcratctcccccaaaacttggggatcagggttttaaggacaatttggtgcataaggggttggaaaatggggagtactgattaattgggtcagagatgaaattatagggagtggaagctgtcttttgcactgagtcatttcctgggtagggttcacaagaccagatgagctagtttattgttctgcatggtaccagctgaaccatggagtacaggatctgcaaaatatctcaagcactgatcttagattttacaatagtgatgttatccccaggaacaatctagagaggttcagaattttgcagcctccagctgcatgactcctaaaccatattttctaatcttgtagctaacttgttagtcctgtaaaagcaatctagtctccaggcaggaagggggtt

SEQ ID NO: 305126 - DNA, 565 bp, Homo sapiens
cctctactccactgttcattctggtgtcttgtccaggcagccacagtgggcacagttaaaagcagcaccctgccagcctgcagccatatccttcttgtgactagagtcactggcaagacatccttgtagggtgggagggagatcttctctctcttacttcttgttcttcttggccaaygaaatagaaattccaacctgtctgaagtgagaggaaaaagtgcttttcctttttctgaccactttccacaaaagaagagtggcatttatctgtttggtgtgatggtgaggatcaggcattcagtggtctgctgttgggtcagggggtcaatgcttaaaaggctgcatgtacttgtggcatcattcactttgtctctgcactcaaaaggaaggaggaagccccaggtcctctatgcagcaagtggagtgagaatcggctctgcatgtccgatgtccttgtgtgtgtgtggcggaggcaaatgaagaaaaagcattaggatgcctatattggcctcaagtccaaggttcttcaatatggttttggtagcactatacagatttttttaaa

SEQ ID NO: 305127 - DNA, 686 bp, Homo sapiens
cggtacggctgttgaagaaaattgagctctttcatcactgctcaaatacagtcctactctattctttaagctattctttccctggtccttctattttctctcccagcatcccatgcatcccctcctgcctgccatggactctcccttagtttgtgtctatctggcttacttaaacatcttattagctaaccttgtgccttgagaaaatcattttatgttttgcaactttgaktttctcaaatttaaaattaaaccattaaatgaaacctctaagattccctttaggctggacatggtggctgatgtttgcaatcccagcactttgggaggccgaggcaggcggatcacttgaggtcaggagttcgagaccagcctggccaacgtggtgaaaccccgtctcaactaaagattggaaaaaattagctgggcgtggtagcgcatgcctgtatcccagctactcttgggaggctaaggcacgagaatccctagaacctgggaggcagaggttgcagtgagctgagattgtgccactgcactccagcctgggcaacagagtgagagactctgtcttcaaataataataataatgataataataagattccctttagctcaaaccatgagcagagtggggagacttgtttgggtgggagctggggtccagatgctttggctagtgaatgtgg

SEQ ID NO: 305128 - DNA, 686 bp, Homo sapiens
cggtacggctgttgaagaaaattgagctctttcatcactgctcaaatacagtcctactctattctttaagctattctttccctggtccttctattttctctcccagcatcccatgcatcccctcctgcctgccatggactctcccttagtttgtgtctatctggcttacttaaacatcttattagctaaccttgtgccttgagaaaatcattttatgttttgcaactttgagtttctcaaatttaaaattaaaccattaaatgaaacctctaagattccctttaggctggacatggtggctgatgtttgcaatcccagcactttgggaggccgaggcaggcggatcacttgaggtcaggagttcgagaccagcctggccaacgtggtgaaaccccgtctcaactaaarattggaaaaaattagctgggcgtggtagcgcatgcctgtatcccagctactcttgggaggctaaggcacgagaatccctagaacctgggaggcagaggttgcagtgagctgagattgtgccactgcactccagcctgggcaacagagtgagagactctgtcttcaaataataataataatgataataataagattccctttagctcaaaccatgagcagagtggggagacttgtttgggtgggagctggggtccagatgctttggctagtgaatgtgg

SEQ ID NO: 305129 - DNA, 569 bp, Homo sapiens
ctttggctagtgaatgtggtcatctcccctccattaccaatggcttctacagatttaatatttaattaatattaaattccctcttttgaaataaacagttagattgttgyctcctaactggactctgactaatacaaggagaaattttgttttatagattacttttacctaataaggttctgcttcatctttggggaagatactcactgccagaaagaagaggaaatataggaggaaggtgcagtccatgattggagccaggctggcagaggtcagctgggtttttattacagttttctggaaatacagattagcttgcattagaaaagcgaaagaccttttagatgttcaagtagactggaaagtagtgtgggttagagaacagaagggtaacaatcttccctccaacctaagaaaatagctttcaatttctccttggagacctcaaaattataaggtaagcatattttttgaaaagtgggttcattatggtcatcaggttctaaacatctgtctgtgcctacagtagctacattccacatgggttgaggcatggcctgctctcactc

SEQ ID NO: 305130 - DNA, 552 bp, Homo sapiens
tttggaacatgcacagaaaatggagcaccagggctgaggtaggatagaagtgaaatgaagcttaagtgttcccatgtttgatgctgcctgcttttctccccaccctttcsatcttgggctttctatcctcccccaaccaaagtctatttcttggaaagcattcacattcctgggttaaatggcagaaaagagtaaatgaccgtgttacttgttcaagatggtttgtatttttcacaaggaacaaagccctactggttttgaaccaaaggaatggacttcaaattgtgtaatgtcaagtttaagaagccagtaggaaatcaggagaccacacttgtaggtgactgaagactcgacccacataggaagctcagtagagggacagtgtccatcacagggtgggtgcacaggcatgcatgttgaatcaacagagtcacaccggtctagcatatccctcagtgagaaggaagtacataagttgtatgtgcacagaaagtctgtgccatcatgagccttctggaattgtccatgggacttattggagaaacttaaaag

SEQ ID NO: 305131 - DNA, 521 bp, Homo sapiens
agttgaaaccatatttcttgtgctggaatggatttaagacaaaaattatattgcacatttgggcacggaccttgatttttcaacatgcatctttcatgtgttaggaactgatgctgcacattttctcccccggggattttccttttcttaaggcattaaattgcttgctcagatgtataaaggatgtaccaccttgaatggatgtgctaattagcaatggtaaartttatgtatgcaacattgataaggaaggagagattaaaatcctatttcatttatgtattatatgtttacaaaaaagaaaaacataagggaaagcgacctcttttgtctagctgagaatttagaaatgaaaggcatgcatgcatttttcagaaggaggtgagcaaaatgttttatggctttctagcagatattccacaccaatagttccgaagccctgccatccatgagcccctgaaaaaaattccatggttagcctttgtccttgtgtaatgactgtttgcattcctctatccaac

SEQ ID NO: 305132 - DNA, 538 bp, Homo sapiens
gaacatgatatgcttgtcaaagacaagraccaactatgaattagagataatattttatagtaaaaatgataaaataaaaaacatgaaataaaatataattatccattactaaacatgtatagttattataaagtaaacaatgaacaattactttatgaaagttttgatatagtaatatcaggagaatagggaaggaagaaatggggtgatgttggtgctaaatcataattttctataacaggaagccccaacctgggcaacacagtgagaccccatctctacaaaacaattacaaattaaaaaacaattagctggacatggtggcatgcacctgtagtcccaggcactcaggaggctgagatgggaggaccccttgagcctgagtgattgaggctacagtgagccatgattgtgccactgcacttcagcatgggtgacagggattttgtcttaaaaacataaaaaataaaaataaatgatgtcaaaatggacattaattaaattttaatgcaactcaagaaatatttgttgagcatat

SEQ ID NO: 305133 - DNA, 538 bp, Homo sapiens
gaacatgatatgcttgtcaaagacaagaaccaactatgaattagagataatattttrtagtaaaaatgataaaataaaaaacatgaaataaaatataattatccattactaaacatgtatagttattataaagtaaacaatgaacaattactttatgaaagttttgatatagtaatatcaggagaatagggaaggaagaaatggggtgatgttggtgctaaatcataattttctataacaggaagccccaacctgggcaacacagtgagaccccatctctacaaaacaattacaaattaaaaaacaattagctggacatggtggcatgcacctgtagtcccaggcactcaggaggctgagatgggaggaccccttgagcctgagtgattgaggctacagtgagccatgattgtgccactgcacttcagcatgggtgacagggattttgtcttaaaaacataaaaaataaaaataaatgatgtcaaaatggacattaattaaattttaatgcaactcaagaaatatttgttgagcatat

SEQ ID NO: 305134 - DNA, 562 bp, Homo sapiens
ctcaatgtttagcttccacttgtragtgagaacatgtggtatttgattttctgttcctgcgttagttcacttgggtaataggctccagctccatccatgttgttgcaaaggacgtgactttgttcttttttatggttttgtagtattccatggtgtatatataccacattttctttatccagtttaccataatgggcagttaggttaattccatgtatttgctattgtgaatagtgttgctatacatgtgtgctatacatgtgtatgtgtctttatggtagaacaatttttattcctttgggtatgcacccaataataggattcctaggtcaaatgataattctgctttgagttcttggagaaattgccaatcttctttccacaatggtcgatgtattagtctgttctcacactgctataaagaactgcctgagactgggtaatttataaagaaaagagatttaattgactcacagttccacatggctggggaggcctcaggaaacttacaatcatggcagaagggaagcaggcacgttttacctggcagcaggcaagagac

SEQ ID NO: 305135 - DNA, 562 bp, Homo sapiens
ctcaatgtttagcttccacttgtgagtgagaacatgtggtatttgattttctgttcctgcgttagttcacttgggtaataggctccagctccatccatgttgttgcaaaggacgtgactttgttcttttttatggttttgtagtattccatggtgtatatataccacattttctttatccagtttaccataatgggcagttaggttaattccatgtatttgctattgtgaatagtgttgctatacatgtgtgctatacatgtgtatgtgtctttatggtagaacaatttttattcctttgggtatgyacccaataataggattcctaggtcaaatgataattctgctttgagttcttggagaaattgccaatcttctttccacaatggtcgatgtattagtctgttctcacactgctataaagaactgcctgagactgggtaatttataaagaaaagagatttaattgactcacagttccacatggctggggaggcctcaggaaacttacaatcatggcagaagggaagcaggcacgttttacctggcagcaggcaagagac

SEQ ID NO: 305136 - DNA, 632 bp, Homo sapiens
gcgatcttttcagtaggtgcctttttatttcatttggtgtacaaatattcctcaattcacagagacattcagagcgcatttgctataaaacgaaattccacatcgaaatatatttttccattctcattttaaaatagaaatatgcttgtgctccaaaataagtagctaaaactgtggatttcacatttattactgttttagctgcatcttggtcgttcggttatattgtactttcattgttgttcttcgtacgtgttttctactatcccttgtgatttcttctttggccatgggttacttagtagaatgtggcttcatttcaaaacctttgggaattttctagatgtcttttttattattgatgtctagtatagtttcattttgatcatagaatattctgttatttcaatgtgttgaatgtttsaccttttaatagcccagggtacagtctttcttgatgaatattccatgtacacttcagaataatatataattggtgtgtatagtgtgtagttttctttagtagttgaatttttgataatgttcttcaaatcatctgtatccttgctgcttttctttggctacttttttttcaattactgagagtggaatgttaaaatcccaaaatttga

SEQ ID NO: 305137 - DNA, 551 bp, Homo sapiens
cttaccaaatgctagagactgacacaggctatgtcattttttcaatacmaagccctgtgaaatgggtactatcagaccatttttacacctgtggcttagaagacttaaatgtctagtgtaagggcggttgtagtggtaggcagaggcaggtctcaaaccctcgcctacctaactcagacacacttggcaatactatatatctctttaagcctttcagaggatatgttttaggaggtggattgttccattttatatatatatgaacatgatagacagacagatagatagataaatagatagagataattttaaacgtgctcactttcatttatgaaaatttacatttgataactaaaagagccttgcaattccagcatctccctcatggtggcagtagaagactaagtcatgtacacgcagcctccagcaccaacaactaacccagaagaaacctccttaataaatcagcttttggtcaagattggtgttacgtaaaatgcaaaattaggaccctcggaaggggaaaaaaagagtctcaagtatctaggtta

SEQ ID NO: 305138 - DNA, 540 bp, Homo sapiens
tgggtactatcagaccatttttacacctgtggcttagaagacttaaatgtctagtgtaagggcggttgtagtggtaggcagaggcaggtctcaaaccctcgcctacctaactcagacacacttggcaatactatatatctctttaagcctttcagaggatatgttttaggaggtgkattgttccattttatatatatatgaacatgatagacagacagatagatagataaatagatagagataattttaaacgtgctcactttcatttatgaaaatttacatttgataactaaaagagccttgcaattccagcatctccctcatggtggcagtagaagactaagtcatgtacacgcagcctccagcaccaacaactaacccagaagaaacctccttaataaatcagcttttggtcaagattggtgttacgtaaaatgcaaaattaggaccctcggaaggggaaaaaaagagtctcaagtatctaggttattgaccccagaaacaaaagaaatttgacaaacttgcaaaacagagacaaca

SEQ ID NO: 305139 - DNA, 524 bp, Homo sapiens
tccccttgaaaccaagcttttgagaacaaatagttcatttctcctttcttaatttgctctgaaggtttttaacacagcgataactggcatatagaaatttcacatatttttcttgatcactayggcctatcaacccccgcctgatgattaaatgaaggacgatgtatccaaggttcttaaagaacttggttgcaacgaatgaacacaaaaaacaccagacaataaacatgtattgaattatatctgggtacagtagacaccattgggcagacttcagaattagcccccggaagttttgcttttgcttgactcttggtcatagctgattggactagaagtgaacacctgactcaggaggaggaagttcattggctgaccaggagccaattagggtctctctcttgagaactctgactaagagacagagatgcaggttatttagtccagttgcgggtgtagcattagacagatataaaacccaagaactcttggtactgaggcctggttgttcaactttcctcgga

SEQ ID NO: 305140 - DNA, 585 bp, Homo sapiens
gaagtgccaggtcacgtgagttgatgacttttgtaaccctgggctgacctgaaacaaaacaagacctctttcggttgctaggtattgcctgcaaggatgctggagggctgcccaggtcttgttcagggacttcagtctttgtggcaagcagagtacagagccgttggattaaagactgagttaattaggtcacaggatgctctttgatggggggaaagcagcaaactatgatgggacttttagcgcaatctggtttaacagattagccaagtgtatctgctccatgctgtaggcacacaacaatgactgagaaatcttttctgcccacaggaaaaggttacagttggggtagggtgcatcagtgagtcaagtctatgaataactagtaaaggaaggcagcacatamagtaacaatgcaagtaaatacaaagcaagaagtatggtgtatgcaatgagttttggcagagcaattgagtcgaaaattaaaagcagagaaaggagatcgctgtaggttgcaagttgagaatttagaagttttctgcatcaagctgccagagtggcctttaaaaagaaatgccaatccca

SEQ ID NO: 305141 - DNA, 576 bp, Homo sapiens
aacctccccgactgttggcctcccagattagatgcctccaatgctaccttgttagacacggatttcacactgagcctgcttccgcggctgtgtgcctctgaaccaaagcctctgtctaagagatagagcccaggtcaaatgcctatgtccaagctgcaagagagtgtgggaaggctctggcttctacctyttgggggcagtaatgaaatgtgagaaattccccacccaaaagaagggtgttcggaagatgctggatgtttacagaatatgacaaatgtctactctacatggtctatgccagtgcttctcaagctttaatatgcagaaaaatcacctgaggatcatgttaaagtgcagattctcatttagtaggtcagaaggggaggaggaacaagattctgctatgttttctgtctccacagttttgccaggcactagtccaagtattttacttgaattaactaatttaattctcccaccccaatcctatggagcaaagaggctagctaagaatacatacttttcttttggataaggttctgctttcactgtaaatatcttaatgaaatgatgcac
